United States Patent Application Publication US 2007/0105122 A1 - sequence listing, part 3

SEQ ID NO: 3416 - DNA, 884 bp, Homo sapiens
  misc_feature (751)..(751): "n" may be a, t, c, g, other or unknown
  misc_feature (809)..(809): "n" may be a, t, c, g, other or unknown
  misc_feature (845)..(845): "n" may be a, t, c, g, other or unknown
  misc_feature (881)..(881): "n" may be a, t, c, g, other or unknown
aaaaaaaaaaaaaaaaaaaaaaaaaaaaaaagttcctgggagaagccgggctgcctcacgaggcactaggaactacatttcccggaaagtactaaatttaagaatgtttggacaactcattccaggtcacctatagcctatgagagaggaagaatatattttgacaattatcggcgctgtgtcagcagtgttgcatctgagccaagaaaactttatgaaatgccaaaatgttccaaatcagaaaaaatagaggatgctttattatgggaatgcccagtgggagatatacttcccaattcatcagattataagtcctcactcatagcactgactgctcataattggctacttcgtatatcagcaactacgggaaaaatccttgagaaaatatatcttgcaccttattgcaaattcagatacttgagctgggacactcctcaagaagtcattgcagttaagtcagctcagaacagaggctcagcagtggcccggcaggcaggcattcaacaacatgttttgctgtaccttgcagtgttccgagttctacctttttcacttgtagggattctagagatcaacaaaaagatttttgggaacgttacagatgctaccttgctcatggaatactgattgtgatgtacagctcaggactggtcagactctatagcttccaaaccatcgctgaacagacatgccaccactgctctttgaggggcatccctggaaaatgcttttcaaattggaggccatncttggcactacatcgtcaccctaataggaagaaaccgaaaggagttttccatatttgngcctaaaagacaattcctggcaaaaaatgggatccnggaaatgggatggggtctctaaaactgactggactnttc

SEQ ID NO: 3417 - DNA, 906 bp, Homo sapiens
  misc_feature (757)..(757): "n" may be a, t, c, g, other or unknown
  misc_feature (829)..(829): "n" may be a, t, c, g, other or unknown
  misc_feature (832)..(832): "n" may be a, t, c, g, other or unknown
tatgcctgtttttatgtttacctataattttcatatagccgtataaggattgatttaccattttttgcccaacatgacaattctggctatgaaaattatgtttaaactgtgtatgatctattttatgtgctctatgttcccatttgtttgtttggtctggacagtggttctggaatgaattctatctagtaaattagtaaatgtgctgttttgtataaagcatgataattactttttaacagaagttcatttttaaagattactcccttttctttctctctttttttttgagacaatttctctcttgttgcctaggcagtgcagtggcgcgatctcagctccctgcaacttctgcctcccaggttcaagcgattctcctgccttagcctcctgagtagctgggtcagccaccatggctgactcattttttgtatttttagtagagaaggggttttaccgtgttggccgggctggtcttgaactcctgaccttgggtgatccacctgcctcagcctcccaaagtgctgggattacaggcgtgagctatcccgcccggtccccttttctttattatcgaagatattgtttaaaagaaagaaaaagtaggtcccaataatatatgtgctattcaaaaaatgtgatcatttaggacattatcacaagttgctatggaaataactgaagacttcctcaggagaaggaaagaaaatgaggaacataatgatagagtcggggaactcccactagctcacctgangggggctcgatgcagctgaaatactgaatactgaaatactagaaaccaacaaaactggtttctagaattctncanggatttgggcttgggaaacttggtaagaatagtttttatttttgaacattcaacttgggtcttcaaagtaatct

SEQ ID NO: 3418 - DNA, 795 bp, Homo sapiens
  misc_feature (706)..(706): "n" may be a, t, c, g, other or unknown
  misc_feature (726)..(726): "n" may be a, t, c, g, other or unknown
  misc_feature (744)..(744): "n" may be a, t, c, g, other or unknown
gcgcccagcctgccagccgcgctgctgctgctcctcctgctgtgggaccgctgaccgcgcggctgctccgctctccccgctccaagcgccgatctgggcacccgccaccagcatggacgctcgccgcgtgccgcagaaagatctcagagtaaagaagaacttaaagaaattcagatatgtgaagttgatttccatggaaacctcgtcatcctctgatgacagttgtgacagctttgcttctgataattttgcaaacacgaggctgcagtcagttcgggaaggctgtaggacccgcagccagtgcaggcactctggacctctcagggtggcgatgaagtttccagcgcggagtaccaggggagcaaccaacaaaaaagcagagtcccgccagccctcagagaattctgtgactgattccaactccgattcagaagatgaaagtggaatgaattttttggagaaaagggctttaaatataaagcaaaacaaagcaatgcttgcaaaactcatgtctgaattagaaagcttccctggctcgttccgtggaagacatcccctcccaggctccgactcacaatcaaggagaccgcgaaggcgtacattcccgggtgttgcttccaggagaaaccctgaacggagagctcgtcctcttaccaggtcaaggtcccggatcctcgggtcccttgacgctctacccatggaggangaggaggaagaggataagtncatgttggtgagaaagangaagaccgtggatggctacatgaatgaagatgacctggccagaagccgtcg

SEQ ID NO: 3419 - DNA, 807 bp, Homo sapiens
  misc_feature (654)..(654): "n" may be a, t, c, g, other or unknown
  misc_feature (714)..(714): "n" may be a, t, c, g, other or unknown
  misc_feature (729)..(729): "n" may be a, t, c, g, other or unknown
  misc_feature (801)..(801): "n" may be a, t, c, g, other or unknown
ggagtttctccaccagcaacatggccgccgcctgagaggagagccgggccgccgccgtctctgcagcccgcgggtaactgggccgttgccgccgtccgcgctcggcccccgcggagagatcgagctgaaggactgcgcggctggctctcctctagtatggccaatgaagaggatgacccagttgtacaggagatcaatgtgtacttggccaagagtctggcggaaaagctgtatctatttcagtaccctgtgcgtccagcctcgatgacctacgatgacattccgcacctctcagccaagatcaagcccaagcagcagaaggtagagcttgagatggccatcgacaccctgaaccccaactattgccgcagcaaaggggagcagattgcgctgaacgtggacggggcctgcgccgacgagaccagcacgtattcctcgaagctgatggacaagcagaccttctgctcttcccagaccaccagtaacacatcccgttatgccgctgcactctacaggcaaggtgagctccacctgacacctttacatggcatcctgcagctgcggcccagcttctcctacctggataaggctgacgccgagcaccgggagagggaggcggccaatgaggcaggggactcttcacaggatgaggcngaagacgatgttaagcagatcacggtgcggttctccggcccggagtcagagcaggcccgncagcgccgtgtgcantcctatgagttcctgcaaaaagaagcccccaaaagaacccctgggtccaccttgcattactatgggcctgangggaca

SEQ ID NO: 3420 - DNA, 817 bp, Homo sapiens
  misc_feature (782)..(782): "n" may be a, t, c, g, other or unknown
  misc_feature (807)..(807): "n" may be a, t, c, g, other or unknown
  misc_feature (810)..(810): "n" may be a, t, c, g, other or unknown
tttgacaactcacagtcactggatgctgctgaagaagagccctctgagagaggaacagaggaggaccctgtattctctgttgagaattcagggagggactcagatgcccttagacttgaaagtacggtggttgaggagagcaatggttctgatgagatggagaattcagatgaaaccaaaatgtcagaagaaatactggctttggtggatgaatttcaacaggcatggcctttggaaggctttgggggtgcactagagatgaaagggcggcgtctagacttacaaggaatacgggtgctgaagaaaggtccccaggatggagtggccagaagctcttgctatggagactgcagaagtgaagatgatgaagcaacagaatggattacattccaggtcaaacgtgtaaagaaacccaaaggagatcataagaaaactcctgggaaaaaagtagaaacaggtcagatagaaaatggacatcgttaccaagcaaacctagagatcactggccccaaggtggcatctcctgggccacaaggaaaaaaacgtgactaccagcgtctgggatggcccagcccggacgaatgcctcaaactccgctgggtagagctgactgccatcgtgagtacctggcttgcagtttcttcaaaaaacattgacatcacagaacacatagattttgcccccctatacagcagccagcaatggacctctttgcaatggcaatctccccacgagtatcctaccctggcccttgcatggggttccacccgaccagctgactncacaggggagagcagttacagaggnttncaaatct

SEQ ID NO: 3421 - DNA, 802 bp, Homo sapiens
  misc_feature (567)..(567): "n" may be a, t, c, g, other or unknown
  misc_feature (688)..(688): "n" may be a, t, c, g, other or unknown
  misc_feature (721)..(721): "n" may be a, t, c, g, other or unknown
  misc_feature (763)..(763): "n" may be a, t, c, g, other or unknown
  misc_feature (802)..(802): "n" may be a, t, c, g, other or unknown
cagcgcgggcccggagcagggggaagggaagtgcggctcggtcggcgcgggtggagggggcgtgaggccgccctacggtggccgtcgagggacggcgctacggctcccacgctaggccaaacgcctccggcggccgcgcccgagagccccttcacctgcagggcgaccccagccggcgacgcgtgaaccacgccctcagccgccttgccagcgcccccagccgcgcgccccagcaccatgcggccgccctgcgcacggagccccgagggacaggggcacccgcaggcccggcccctagcaccgccggccggccccgaggtccgggacgccggcgccgccgcggagagggcaccgggccgacgcctccccccagggtcagctgcgggctcccaggcctaggcgcccatgacccctacgccaaccgccgcctggacaccgccgccgccactgcgacctagcgccgccgccggggcccaatgccggtcatgcccattccgcggcgggtgcgctccttccacgggccgcacaccacctgcctgcatgcggctgcgggcccgtgcgcgcctnccacctggcccgcaccaagtacaacaacttcgacgtgtacatcaagacgccgctggctgtacggcttcatcccgcttcctactctactttagcttgcaagcctgttcacttgcggcgcttntggggttgccgcttggcccgcccttcttcttgncttacagtacccttgggcggtttcgccgttccttggctttgngcttttccaagcgcaaagcttgttcgggtggcccccttn

SEQ ID NO: 3422 - DNA, 726 bp, Homo sapiens
  misc_feature (677)..(677): "n" may be a, t, c, g, other or unknown
  misc_feature (686)..(686): "n" may be a, t, c, g, other or unknown
  misc_feature (722)..(722): "n" may be a, t, c, g, other or unknown
agcgggcgtgcggagcgggcgacagtggcgtgggatctgcctctctgcgagcagctgggagcggcggcggcggcgccatgagcgggggcaccccttacatcggcagcaagatcagcctcatctccaaggcggagatccgctacgagggcatcctctacaccatcgacaccgaaaactccaccgtagcccttgccaaagttcgatcctttggtacagaagacagaccgacagatcgtccaataccacctcgagatgaagtctttgaatacattatattccgtgggagtgacattaaagaccttactgtttgtgagccaccaaaaccacagtgttctttgcctcaagacccagctattgttcagtcctcactaggctcatcgacttcttcattccagtccatgggttcttatggacctttcggcaggatgcccacatacagtcagttcagtccgagttccttagttgggcagcagtttggtgctgttggtgttgctggaagctctttgacatcctttggaacagaaacatcaaacagtggtaccttaccccaaagtagtgcggttggttctgcctttacacaggatacaagatctctaaaaacacagttatctcaaggtcgctcaagccctcagttagaccctttgagaaaaagcccaaccatggaacaagcagtgcanaccggcttnagcccacttacctggtccagcaactgttgggagaangagt

SEQ ID NO: 3423 - DNA, 779 bp, Homo sapiens
  misc_feature (683)..(683): "n" may be a, t, c, g, other or unknown
  misc_feature (704)..(704): "n" may be a, t, c, g, other or unknown
  misc_feature (766)..(766): "n" may be a, t, c, g, other or unknown
ggcctttttttttttttttttggtttttatgtgtatttattaaaaaaagcaattacccgattaggctgacagaatgattaggctgaccattaaaaggactggcaactttatcctcagagtttagaggtaagtttgtaagaattcaggatgtttgtctaagattgcttgatactagggcaacaagactgagagcagagggcactaaaaagactgtctaggggttagacatcaattgtgtttaagtctgagatctgccccttaggtaccatatgaccctgcacaagtcatcgacccctccacactccagtgtgtcatctgtaatgaggatggggcactcccttccacactgcagcactgcgggaaccgagacaatgccatcgcagaggacctgcaggggacaggctacttcactcactcctctccttcccactcttcagagaacaaggacttgtgctactgtattctcacagcactcactggcctgggaaccagctgtgggagccctatgggcctggtcatcaactctcaactgcttgtgtgcagctgtaggaaccctctgaggtgtggcaggtagaggatggggtgggtgcccaggcacactgctgactttctggagccctgcccacccccaaccctctccttattactaatgacatgggaacccacctgctccactgtgcagncccaagtctgatccaagtcangctcctgaatgtgaggaaccgaacctgggggccacagggaagtgggatcacttgaaaagctntaaccattggccg

SEQ ID NO: 3424 - DNA, 813 bp, Homo sapiens
  misc_feature (781)..(781): "n" may be a, t, c, g, other or unknown
  misc_feature (784)..(784): "n" may be a, t, c, g, other or unknown
  misc_feature (794)..(794): "n" may be a, t, c, g, other or unknown
gatcgcgcccagcggagctaatcagattacctggctagtgtttgcttgttctggagtgatcttctgactggaaaagaactatgtcatggatcaaggaaggagagctgtcactttgggagcggttctgtgccaacatcataaaggcaggcccaatgccgaaacacattgcattcataatggacgggaaccgtcgctatgccaagaagtgccaggtggagcggcaggaaggccactcacagggcttcaacaagctagctgagactctgcggtggtgtttgaacctgggcatcctagaggtgacagtctacgcattcagcattgagaacttcaaacgctccaagagtgaggtagacgggcttatggatctggcccggcagaagttcagccgcttgatggaagaaaaggagaaactgcagaagcatggggtgtgtatccgggtcctgggcgatctgcacttgttgcccttggatctccaggagctgattgcacaagctgtacaggccacgaagaactacaacaagtgtttcctgtatgtctgttttgcatacacatcccgtcatgagatcagcaatgctgtgagagagatggcctggggggtggagcaaggcctgttggatcccagtgatatctctgagtctctgcttgataagtgcctctataccaaccgctcttctcatcctgacatcttggatccggactttttggaaaaagtgcggcttgagtgacttcttactatggcaagacctctcactccttgcctggtggttccaacccgttctgnggncagaagtttncattttgggaacctttttc

SEQ ID NO: 3425 - DNA, 906 bp, Homo sapiens
  misc_feature (880)..(880): "n" may be a, t, c, g, other or unknown
  misc_feature (883)..(883): "n" may be a, t, c, g, other or unknown
  misc_feature (893)..(893): "n" may be a, t, c, g, other or unknown
ttttaatggtgctcatatatactgtattttttgttgtttagttttacttattgagagtgtcacaacatgaatcacataatcatgattttttttttttacttttactccccaaattattcatgtttcttagatcgtagtcattgagaagtcccaataactctaaacttttgagttataacgtagtaaacttctctttcatctttgtgttagctctgtagtcttaacctggattttaatttttttgtttccaaagtcacaattgaattattcttagataccttaagccactgaattcagttctgtttgactgaaagcaaaacaacgtgacagtttattttcaaacactaacttcttgatattttgttatggtatatctttttattaaatatttattttgactaagctttcataaaatatttgaagctattttaatcatcaagtatggaaaacaaattactattgcattttcctatatatgcatatattatggattaaccagaattgtatcatttttggcctaatgtctggatataaaagataattagcctactatagtattaataaatttttcagttggtttgggcaaatttaaacctgaaaaataggttaaaaagtagttacaaattaaacttactaatttatacctgattttttttcttgaattaaagtacattttaaatgagctttataataccttaaaaaggttggtctaatttaaaatatgaaagctctggctatcatcctggggatagtaatttctaattatatagtatttcaaaactatatattttttagttcctttggagataacctaatttctaattatatatgtttcaaaaaccatatcctggattttttttaaagaatgggtttataaatnggncataaggatncaagggctgcatt

SEQ ID NO: 3426 - DNA, 884 bp, Homo sapiens
  misc_feature (779)..(779): "n" may be a, t, c, g, other or unknown
  misc_feature (867)..(867): "n" may be a, t, c, g, other or unknown
  misc_feature (880)..(880): "n" may be a, t, c, g, other or unknown
gcagaggcctgcgggaagccaagatggcgcataggggttctccaggctgcagttggcgccttatcagtatctaagcggagtgttttggaaggagttaaggggctgtggcaaacgccctctccgccgtcatggcccggcatcggaatgttcgaggctataactacgatgaagattttgaagatgatgatctctacggccagtctgtagaggatgattattgtatttcgccgtcaacagctgcccagtttatttattcacggcgtgacaaaccttccgttgagcctgtggaagaatatgattatgaagatctgaaagaatcttccaattctgtttcaaaccatcagctcagtggatttgatcaagctcgtctttattcatgccttgatcacatgagagaggtacttggagatgctgtgccagatgaaatattaattgaagcagttctgaagaacaagtttgatgtgcagaaggctttgtcaggggttctggaacaagatagagtgcagagtttgaaggacaagaatgaggcaacagtatctacaggaaagatagcaaaaggaaaaccagtagattcccagacatcgcgaagtgaatctgaaattgtgccaaaagttgctaaaatgactgtatctggaaagaagcaaactatgggatttgaagtgcctggagtgtcttctgaagaaaatggtcatagtttccacacacctcaaaaaggaccgccattgaagatgccattgcttcttccgatgttcttgagactgcttctaaatctgctaatncaccccacacgattcaagcatcagaagaagcagagttcaacccagcaccggtggaaaaagtctgcaagctgaggcacaaatagatgtnaagcggactgganaacc

SEQ ID NO: 3427 - DNA, 697 bp, Homo sapiens
  misc_feature (650)..(650): "n" may be a, t, c, g, other or unknown
  misc_feature (656)..(656): "n" may be a, t, c, g, other or unknown
  misc_feature (673)..(673): "n" may be a, t, c, g, other or unknown
accctcgggctcgagacagcggcgacgtttaaagctgagcgacccagtgccactggagacggtcagcttctccactcaggctcctccagcccgagccagaagaccccctcccccagaattctgggggccgatggaagggagccgagtcagatcgcgaggtacccagagccgacagaccggagcgacagggagttgccagaagccccgcccctaggagtgatcggaaagcctcacccatccgggtgaggaacccggagggaccgcctccgggcggagcccgccgaccatggctacgcccctggtggcgggtcccgcagctctacgcttcgccgccgcggctagctggcaggttgtgcgcggacgctgcgtggaacattttccgcgagtactggagtttctgcgatctctgcgcgctattgcccctggcttggttcgctaccggcaccacgaacgcctttgtatgggcctaaaggccaaggtggtggagctgatcctgcagggccggccttgggcccaagtcctgaaagccctgaatcaccactttccagaatctggacctatagtgcgggatcccaaggctacaaagcaggatctgaggaagattttggaggcacaggaaactttttaccagcaggtgaagcagctgtcanaagctnctgtggatttggcctcnaacttcaggtgaaactgggttgaa

SEQ ID NO: 3428 - DNA, 898 bp, Homo sapiens
  misc_feature (737)..(738): "n" may be a, t, c, g, other or unknown
  misc_feature (842)..(842): "n" may be a, t, c, g, other or unknown
  misc_feature (862)..(862): "n" may be a, t, c, g, other or unknown
  misc_feature (896)..(896): "n" may be a, t, c, g, other or unknown
agggacttttgctcccacaagtcctgcctcggaggcgggggagctggaccagcagccgcctggagcgtccgagtcaccgtcgccggggctcccgcgctccccagaacggtgggacgcggggctcggcagccgccagcggaacatggcgccctggacgctgtggcgctgctgccagcgcgtcgtgggctgggtgccggtgctcttcatcaccttcgtggtcgtctggtcctactacgcgtacgtggtggagctctgcgtgtaccacgttgatgagcgaacaatatgcaatggaattgccccagaaaaagatgtagatggatttcatattatcaatattggaagattgtgccttgatcagcattctctcatacctgccactgccagtgctgtttgggaaataataaaaagaacaggaattcaaacatttggaaaaaatgtggttgtggctggaagatccaagaacgtagggatgcctattgccatgcttttacacactgatggagagcatgaacggccaggaggtgatgcaactgtgacaatagctcacagatacacccccaaagagcaactgaagattcatacgcagctggcagatattatcatagttgctgcaggtattccaaagttgattacgtctgatatggttaaagaaggtgctgctgtaattgatgtgggtatcaactatgtccacgatccaatgacaggaaagacaaaattagttggagaatgtggacttnnaacttgttaaaaagaaagctggctttattacttccagttccaggaaggtgttggaccccattgacaatgggcaatgctttttgaaaaacacccctttttggcancttaaaaaaatcatttactntgatcccattgaaagggttaaagccaacttgaantt

SEQ ID NO: 3429 - DNA, 769 bp, Homo sapiens
  misc_feature (621)..(621): "n" may be a, t, c, g, other or unknown
  misc_feature (690)..(690): "n" may be a, t, c, g, other or unknown
  misc_feature (733)..(733): "n" may be a, t, c, g, other or unknown
  misc_feature (737)..(737): "n" may be a, t, c, g, other or unknown
taaactcgggccgcggcggggcgagcgaggcgggctccggagggagctgacgcctgatgatggcgcagtccaacatgtttaccgtggctgatgtgttgagtcaagatgaactgcgcaaaaagctataccagacgtttaaggatcggggtatactggatacactcaagacacaacttcgaaaccagctaattcatgagttgatgcaccctgtattgagtggagaactgcagcctcggtccatttcagtagaagggagctccctcttaataggcgcctctaactctttagtggcagatcacttacaaagatgtggctatgaatattcactttctgttttctttccagaaagtggtttggcaaaagaaaaggtatttactatgcaggatctattacaactcattaaaatcaaccctacttccagtctctacaaatcactggtttcaggatctgataaagaaaatcaaaaaggttttcttatgcattttttaaaagaattggcagaatatcatcaagctaaagagagttgtaatatggaaactcagacaagttcgacatttaacagagattctctggctgagaagcttcagcttattgatgatcagtttgcagatgcttaccctnagcgtatcaagttcgaatctttagaaataaagctaaatgagtataagagagaaatagaagagcaacttngggcagaaatgtgtcaaaagttgaagtttttttaaagatccgngatncaaaaattaaaatggaaccaaaaaaaaagttt

SEQ ID NO: 3430 - DNA, 911 bp, Homo sapiens
  misc_feature (83)..(83): "n" may be a, t, c, g, other or unknown
  misc_feature (507)..(507): "n" may be a, t, c, g, other or unknown
  misc_feature (671)..(671): "n" may be a, t, c, g, other or unknown
  misc_feature (834)..(834): "n" may be a, t, c, g, other or unknown
  misc_feature (864)..(864): "n" may be a, t, c, g, other or unknown
  misc_feature (879)..(879): "n" may be a, t, c, g, other or unknown
ctgaagctgctgggcaaagggaacattatcatcagcacccctgagaagtgggacatactttcccggcgatggaagcagcgcangaacgtgcagaacatcaacctcttcgtggtggatgaggtccaccttatcgggggcgagaatgggcctgtcttagaagtgatctgctcccgaatgcgctacatctcctcccagattgagcggcccattcgcattgtggcactcagctcttcgctctccaatgccaaggatgtggcccactggctgggctgcagtgccacctccaccttcaacttccatcccaatgtgcgtcccgtccccttggagctgcacatccagggcttcaacatcagccatacacaaacccgcctgctctccatggccaagcctgtgtaccatgctatcaccaagcactcgcccaagaagcctgtcattgtctttgtgccgtctcgcaagcagacccgcctcactgccattgacatcctcaccacctgtgcagcagacatncaacggcagaggttcttgcactgcaccgagaaggatctgattccgtacctggagaagctaagtgacagcacgctcaaggaaacgctgctaaatggggtgggctacctgcatgaggggctcagccccatggagcgacgcctggtggagcaagctcttcagctcangggctatccaggtggtggtggcttctcggagtctctgctggggcatgaacgtggctgcccacctggtaatcatcatgggatacccagtactacaatggcaagatccacgcctatgtggatacccatctatgacgtgcttcaaatggtgggccacgccaaccgncctttgcaggacgatgaaggggcccttggntcattaatgtgtcanggcttccaagaaggattctttaaaaagttctt

SEQ ID NO: 3431 - DNA, 889 bp, Homo sapiens
  misc_feature (730)..(730): "n" may be a, t, c, g, other or unknown
  misc_feature (742)..(742): "n" may be a, t, c, g, other or unknown
  misc_feature (770)..(770): "n" may be a, t, c, g, other or unknown
  misc_feature (870)..(870): "n" may be a, t, c, g, other or unknown
  misc_feature (882)..(882): "n" may be a, t, c, g, other or unknown
  misc_feature (889)..(889): "n" may be a, t, c, g, other or unknown
tgcaagggtgtacaactatgagcctttgacacagctcaagaatgtcagagcaaattactatggaaaatacattgctctaagagggacagtggttcgtgtcagtaatataaagcctctttgcaccaagatggcttttctttgtgctgcatgtggagaaattcagagctttcctcttccagatggaaaatacagtcttcccacaaagtgtcctgtgcctgtgtgtcgaggcaggtcatttactgctctccgcagctctcctctcacagttacgatggactggcagtcaatcaaaatccaggaattgatgtctgatgatcagagagaagcaggtcggattccacgaacaatagaatgtgagcttgttcatgatcttgtggatagctgtgtcccgggagacacagtgactattactggaattgtcaaagtctcaaatgcggaagaaggttctcgaaataagaatgacaagtgtatgttccttttgtatattgaagcaaattctattagtaatagcaaaggacagaaaacaaagagttctgaggatgggtgtaagcatggaatgttgatggagttctcacttaaagacctttatgccatccaagagattcaagctgaagaaaacctgtttaaactcattgtcaactcgctttgccctgcatttttggtcacgaacttgttaaagcaggtttggcattagcactctttggaggaagccagaaatacgcagatgacnaaaacagaattncaattcggggagacccccacatccttgntggtggagatccagcctaggaaaaagtcaaatgctccaggcacgtgcaatgttgcccacctggcgtgtttgttggggaacacacgaccccttggctgcgnactttttaaaanaagtccn

SEQ ID NO: 3432 - DNA, 818 bp, Homo sapiens
  misc_feature (658)..(658): "n" may be a, t, c, g, other or unknown
  misc_feature (760)..(760): "n" may be a, t, c, g, other or unknown
  misc_feature (786)..(786): "n" may be a, t, c, g, other or unknown
  misc_feature (809)..(809): "n" may be a, t, c, g, other or unknown
ttgggcgcttcgctgatggtgtcggtgagcgcgtttcccgcctgagcgcaactagcggcgggtcgtgggcacctccaggctcagacgtgcagcttctggaatacgaggcgtcagctgctggcctcatccgatccttctctgagcgtttcccagaggatggacccgagttggaggagatcctcacacagctggccacagccgatgcccgattctggaagggccccagtgaggccccatctggccaagcttgaggaagatgtgtggccttgcccccaattccatcagaccaaggctgcaagtggccctccattcgtcaatgaggccaattcgaagtggttggatgcgcactacgacccaatggccaatatccacaccttttctgcctgcctagcgctggcagatttacatggggatggggaatacaagctggtggtaggggaccttggccctggtgggcagcagccccgcctgaaggtgctcaaaggaccactggtgatgaccgaaagcccgctacctgctctgccagctgctgctgccaccttcctcatggagcaacatgagccccggaccccagctctggcacttgcttcaggcccttgtgtctatgtgtataagaatctcagaccctacttcaagttcagcctgccccaattgcctncaaatcctctggaacaagacctttggaaccaggccaaagaggaccgaatcgaccccttaaccctgaaggagatgctggaaaacattccgggagacggcagangagcctttgtccattcagtcacttangtttctgcaacttggagcttaantgaaatgga

SEQ ID NO: 3433 - DNA, 808 bp, Homo sapiens
  misc_feature (724)..(724): "n" may be a, t, c, g, other or unknown
  misc_feature (775)..(775): "n" may be a, t, c, g, other or unknown
  misc_feature (783)..(783): "n" may be a, t, c, g, other or unknown
gcacattctacctgaagcaatggtttgttacttagaaaattatgaacctgaaaagttttctgagatttttctaggagaatttgatactccagaagcaatctggagcagtgaagtgaggcgcctgatgatagagaagattgctgcccatctcgcggatttcacacctcgtcttcagagtaacacaagagcactttatcagtattgccccattcctataatcaactatccacaactcgaaaatgaactattttgtaatatttattacctcaaacaactgtgtgatacactccggtttccagattggccaattaaagacccggttaagcttctaaaagatacccttgatgcctggaagaaagaagtagaaaagaagccacctatgatgtcaatagatgatgcttatgaagtgcttaatctgcctcaaggacagggaccgcatgatgagagcaagattaggaaagcttacttcagacttgcacaaaagtaccaccctgataagaatccagaagggagggacatgtttgaaaaagtaaataaagcatatgaatttttatgtaccaaatcagcaaaaatagtggatgggccagatccagagaatataattttaatctaaaaacacagagcatcctcttcaacccgtcataaagaagatttacagccttataaatatgcaggataccccatgcttattcggactataacaatggaaacttcagatgacctncttttctcaaaagaatcaccattgttgcctgcggctacagagctagctttncatactgncaactgttcaaccctcaatgctgaa

SEQ ID NO: 3434 - DNA, 832 bp, Homo sapiens
  misc_feature (643)..(643): "n" may be a, t, c, g, other or unknown
  misc_feature (773)..(773): "n" may be a, t, c, g, other or unknown
  misc_feature (780)..(780): "n" may be a, t, c, g, other or unknown
  misc_feature (815)..(815): "n" may be a, t, c, g, other or unknown
gtcaagaggatcatccatgcatcatgtggactggaggctgcaggagaattccagttttggtattccatgccgacgctattcttacaaaggacaacaatattagagtaattggagaacgttatcatttgtcttataagattgtacgaacggacagtcgcctagtacgcagcattctgacagcccatggatttcatgaagttcacccaagcagcactgactataacctaatgtggacaggatcccacctgaagcccttcttactgcgcaccctctctgaagcacaaaaagttaatcactttcccaggtcttatgaacttacccggaaggaccgactgtacaaaaacattattcgaatgcagcatacacatggattcaaggcttttcacatcctcccccagaccttcctcctgccagctgagtacgcggaattttgtaattcatattcgaaggaccggggaccttggatagtaaaaccagtggcatcttcaagggggcggggcgtctacctgatcaacaatccaaaccagatctccctggaagagaacattttggtctcccgttacattaacaaccccctgctcatagatgatttcaagtttgacgtgcgcctctatgtgctcgtgacttcctatgatcctcttgncatctatctctatgaagaaggattggctagaaaatgcaattggaagatgggaaataccatggataaaagaagcttcctatttatgtcaggtgctttgcagatttattggactctgacactattattttanaatggcntttaatgatttagaagacttagtttttttacatgnatcccatgcttggaatc

SEQ ID NO: 3435 - DNA, 848 bp, Homo sapiens
  misc_feature (627)..(627): "n" may be a, t, c, g, other or unknown
  misc_feature (812)..(812): "n" may be a, t, c, g, other or unknown
  misc_feature (822)..(822): "n" may be a, t, c, g, other or unknown
  misc_feature (831)..(831): "n" may be a, t, c, g, other or unknown
gcagaggtgcggccggggaggcgcgcggaggctggagctggaggcgcggcgccggtgagctgagaaccatgtgtgctcagtattgcatctcctttgctgatgttgaaaaagctcatatcaacattcgagattctatccacctcacaccagtgctaacaagctccattttgaatcaactaacagggcgcaatcttttcttcaaatgtgaactcttccagaaaacaggatcttttaagattcgtggtgctctcaatgccgtcagaagcttggttcctgatgctttagaaaggaagccgaaagctgttgttactcacagcagtggaaaccatggccaggctctcacctatgctgccaaattggaaggaattcctgcttatattgtggtgccccagacagctccagactgtaaaaaacttgcaatacaagcctacggagcgtcaattgtatactgtgaacctagtgatgagtccagagaaaatgttgcaaaaagagttacagaagaaacagaaggcatcatggtacatcccaaccaggagcctgcagtgatagctggacaagggacaattgccctggaagtgctgaaccaggttcctttggtggatgcactggtggtacctgtaggtggangaagaatgcttgctggaatagcaattacagttaaggctctgaaacctagtgtgaaggtatatgctgctgaaccctcaaatgcagatgactgttccagtccaagctgaaggggaaactgatgcccaatctttatccttcagaaccatacagatggtgtcaaatccacattggcttgaacacctggnctattatcanggaccttgnggatgatatctttactg

SEQ ID NO: 3436 - DNA, 880 bp, Homo sapiens
  misc_feature (668)..(668): "n" may be a, t, c, g, other or unknown
  misc_feature (675)..(675): "n" may be a, t, c, g, other or unknown
  misc_feature (800)..(800): "n" may be a, t, c, g, other or unknown
  misc_feature (812)..(812): "n" may be a, t, c, g, other or unknown
  misc_feature (849)..(849): "n" may be a, t, c, g, other or unknown
aatgctgcccgatggccctgggtcctcgctgtggggcaatccgggcttgcagacgagttttagaaagagcgttttcgctacgtaaagcacattcgataaaggatatggaaaatactttgcagctggtgagaaatatcatacctcctctgtcttccacaaagcacaaagggcaagatggaagaataggcgtagttggaggctgtcaggagtacactggagccccatattttgcagcaatctcagctctcaaagtgtgacagccccaatgctgttcatgaggtggagaagtggctgccccggctgcatgctcttgtcgtaggacctggcttgggtagagatgatgcgcttctcagaaatgtccagggcattttggaagtgtcaaaggccagggacatccctgttgtcatcgacgcggatggcctgtggctggtcgctcagcagccggccctcatccatggctaccggaaggctgtgctcactcccaaccacgtggagttcagcagactgtatgacgctgtgctcagaggccctatggacagcgatgacagccatggatctgtgctaagactcagccaagccctgggcaacgtgacggtggtccagaaaggagagcgcgacatccttcccaacggccagcaggtgcttgtgtgcagccaggaaggcagcancccgcangtgtggagggcaaggggaccttctgtcgggcttcctgggcgtcctggtacactgggcgcttcttgctggaccacagaaaacaaatgggtccagcccttttctggtggcccgtttggcgcctgctntttaccaggcantgcaaccaccaagcctttcaaaagcacggtcgttcancacaacttcgacatgaccccaagtgggggcc

SEQ ID NO: 3437 - DNA, 775 bp, Homo sapiens
  misc_feature (683)..(683): "n" may be a, t, c, g, other or unknown
  misc_feature (750)..(750): "n" may be a, t, c, g, other or unknown
  misc_feature (752)..(752): "n" may be a, t, c, g, other or unknown
tagccagaaaagggggcgggaagggctgtagggtacttgtcaattcgccgccatgaacgtggtttttgctgtgaagcagtacatttccaaaatgatagaggacagcgggcctggtatgaaagtacttctcatggataaagagacgactggcatagtgagtatggtatacacacaatcggagattctacagaaggaagtgtacctctttgaacgcattgattctcaaaatcgagagatcatgaaacacctgaaggcaatttgttttcttcgacctacaaaggagaatgtggattatattattcaggagctccgaagacccaaatacactatatatttcatttatttcagtaatgtgatcagcaagagtgacgtgaagtcattggctgaagctgatgaacaggaagttgtggctgaggttcaggaattttatggtgattacattgctgtgaacccacatttgttttccctcaatattttgggttgctgccagggtcgaaattgggatccagcccagctatctagaacaactcaagggcttacagctctccttttatctctgaagaagtgtcccatgattcgttatcagctctcatcagaggcagcaaagagacttgcagagtgcgttaagcaagtgataactaaagaatatgaactgtttgaattccgtcggacagaggttcctncattgctccttattttagatcgctgtgatgatgccatcaccccattgttaaccagtggacatatcangncatgggtccacgaactactaggc

SEQ ID NO: 3438 - DNA, 831 bp, Homo sapiens
  misc_feature (630)..(630): "n" may be a, t, c, g, other or unknown
  misc_feature (741)..(741): "n" may be a, t, c, g, other or unknown
  misc_feature (814)..(814): "n" may be a, t, c, g, other or unknown
  misc_feature (818)..(818): "n" may be a, t, c, g, other or unknown
acctgatgcagctgtttatagctcagaggccagatatgagagaagaagaattagaagatattaaacagttcaagaaaacaaccataagttgttacttacgttgcttagatggccgctcctgctggactactttaataagtgccttcagaatactattagaatctgatgaagacagacttcttgttgtatttaatcgaggattgattctaatgacagagtctttcaacactttgcacatgatgtatcacgaagctacagcttgccatgtgactggagatttagtagaacttctgtcaatatttctttcggttttgaagtctacacgcccttatcttcagagaaaagatgtgaaacaagcattaatccagtggcaggagcgaattgaatttgcccataaactgttaactcttcttaattcctatagtcctccagaacttagaaatgcctgtatagatgtcctcaaggaacttgtacttttgagtccccatgattttcttcatactctggttccctttctacaacacaaccattgtacttaccatcacagtaatataccaatgtctcttggaccttatttcccttgtcgagaaaatatcaagctaataggaggggaaagcaatattcggcctncgcgccctgaactcaatatgtgcctcttgcccacaatggtggaaaccagtaagggcaaagatgacgtttatgatcgtatgctgctagactacttcttttcttatcatcagntcatccatctattatgcccagttgcaatcaactgtgaaaaattactggaacattagttaactgagtggcctanttgnctatgaaggtttg

SEQ ID NO: 3439 - DNA, 712 bp, Homo sapiens
  misc_feature (680)..(680): "n" may be a, t, c, g, other or unknown
  misc_feature (684)..(684): "n" may be a, t, c, g, other or unknown
  misc_feature (702)..(702): "n" may be a, t, c, g, other or unknown
aacgccgggcagggcggcgggcgcgctcagtctggcggcggctgccgtgagctgactgacgttccgggaacgccgcagcagcccgcgccgcccgcagcctagccgagccgcgccgcccgggcctcgcccgcccgcctgcccgccatggtgtcatggatcatctccaggctggtggtgcttatatttggcaccctttaccctgcgtattattcctacaaggctgtgaaatcaaaggacattaaggaatatgtcaaatggatgatgtactggattatatttgcacttttcaccacagcagagacattcacagacatcttcctttgttggtttccattctattatgaactaaaaatagcatttgtagcctggctgctgtctccctacacaaaaggctccagcctcctgtacaggaagtttgtacatcccacactatcttcaaaagaaaaggaaatcgatgattgtctggtccaagcaaaagaccgaagttacgatgcccttgtgcacttcgggaagcggggcttgaacgtggccgccacagcggctgtgatggctgcttccaagggacagggtgccttatcggagagactgcggagcttcagcatgcaggacctcaccaccatcaggggagacggcgcccctgctccctcgggccccccaccaccggggtcttggcgggccancggnaaacaccggcagcctaanatgtccaaga

SEQ ID NO: 3440 - DNA, 840 bp, Homo sapiens
  misc_feature (593)..(593): "n" may be a, t, c, g, other or unknown
  misc_feature (771)..(771): "n" may be a, t, c, g, other or unknown
  misc_feature (782)..(782): "n" may be a, t, c, g, other or unknown
  misc_feature (813)..(813): "n" may be a, t, c, g, other or unknown
agctggctgggcggttaggagggcccggggccgagacgatggctgaccacaaccctgacagcgactccacgccgcgcacgctgctgcgacgcgtgctggatacagcggacccgcgcaccccgcggcgaccccggagtgctcgggctggagcccggagagccctgcttgaaacggcttcccccaggaagttgagtggccaaacaaggacgatagccagagggcgttcccatggagccaggtctgttggcagatcggcccatattcaggccagtgggcacttggaggaacagacacctcggacgctgctgaagaacatcctactaactgccccagaatcttccatcctgatgcctgagtcggtagtgaagccagtgccagcaccgcaggcggtccaaccctccagacaagagagcagttgcggcagcctggagctgcaacttcctgagctcgagccccccacaaccctggctccaggtctgctggcccctggcaggaggaaacagaggctgagactgtcagtgtttcagcagggagtggaccaggggctgtctctctcccaagagcctcaagggaatgctgatgcctcttccctnccagatccctcaacctgacctttgccacgcctcttcagccacagtcagtgcagaggcctggcttggcccgcagaccttcagcccgccgagctgtagacgtgggtgcctttttgcgggatctgcgagatacttcctggcttcttcaaacattgtgttggaggacacccagccgttcttntaacccatggntggcttcccccaacgtgtattacttccttgnccttgacgccttacactggggcttgaa

SEQ ID NO: 3441 - DNA, 890 bp, Homo sapiens
  misc_feature (682)..(682): "n" may be a, t, c, g, other or unknown
  misc_feature (713)..(713): "n" may be a, t, c, g, other or unknown
  misc_feature (793)..(793): "n" may be a, t, c, g, other or unknown
  misc_feature (845)..(845): "n" may be a, t, c, g, other or unknown
  misc_feature (876)..(876): "n" may be a, t, c, g, other or unknown
ggttaatggaggaagagatggaaggctcgtgccatgatttggtactgggtcatctgactgtccatgcagttagctacgcattctgcagacttcctccatccccagctcccacagttacaaaaagttctttcctgctctgagttctgaaatgctcacattcccagctccaagaggattcccaaaatgaatgtttaccttctcttacagttcagtctagccttcacatcttgggaggggttagagggggcagaggaaaggaactttagctgcctaggtgcagtttaaagagggtctaggtactgtggctctcagcagcctttgaccctggggccactctcttcatcttatggaggacaaggcctttggttccctggaggttcactgaaaatcactgacatgaggcagattgattaataggataaaagtcacacaaatttatttaatgtgagtacacatgaaccttcaaaatgaagacccaaagacacaggggaaattgtccatttttatggttgggtacaacaaagtatggacagccatgtagaaatatgattgaacaaaaagggtatgatctaatgctaatagactgagtggggaaaccaagcaaggcctgcctgtctggattcttcttggcctctctgagcatgcattcctctgtgaacccagaaaatctgagacagctctnagtccagaaagtttattttgccaagtttganggccacctgtgacacaacctcaggaagtcctgatgacatgtgcccaagtggccggggcacagcttggtttatacatttanggagacatgagacacatcaattatgtagaagtccttacttttcagaagatgngacactaaccagccctacttcagtacagtantgcaacaatgtgat

SEQ ID NO: 3442 - DNA, 849 bp, Homo sapiens
  misc_feature (743)..(743): "n" may be a, t, c, g, other or unknown
  misc_feature (796)..(796): "n" may be a, t, c, g, other or unknown
  misc_feature (804)..(804): "n" may be a, t, c, g, other or unknown
  misc_feature (843)..(843): "n" may be a, t, c, g, other or unknown
agtcgaggtatcttctccccaaccactgctcttattttaattattgcagacggaagttgaagactattgacatagtaaatagctctgggtggcttgaaacgaaagtttaactttgcggacaaacaggacttattgtagggggtggtcaaaatagtcccggcggggcggggccatgacccctgacgtcgccggtccggcgcgcagttcagtttggcggttccggtaccgctctcacattggggcgggatgtgggagcggctgaactgcgcagcagaggacttttattctcgtctccttcagaaatttaatgaagaaaagaaaggaatccgtaaagacccatttctctatgaggctgatgtccaagtgcagttgatcagcaaaggccaaccaaaccctttgaaaaatattctaaatgaaaatgacatagtattcatagtggaaaaagtgcctttagaaaaggaagaaacaagtcatattgaagaacttcaatctgaagaaactgccatatctgatttctctactggcgaaaatgttggaccacttgctttaccagttgggaaggcaaggcagttaattggactttacaccatggctcacaatcctaatatgacccatttgaagattaatctgccagttactgcccttcctcccctttgggtaagatgtgacagttcagatcctgaaggtacttgttggctaggagctgagcttatcacaacaaacaacagcattacaggaattgncttatatgtggcagttgtaaagctgataaaaattattctgtaaatcttgaaanctaaaaanttccccagaaaagacatcacttgctactgtacatccaangctttg

SEQ ID NO: 3443 - DNA, 802 bp, Homo sapiens
  misc_feature (621)..(621): "n" may be a, t, c, g, other or unknown
  misc_feature (765)..(765): "n" may be a, t, c, g, other or unknown
  misc_feature (776)..(776): "n" may be a, t, c, g, other or unknown
  misc_feature (794)..(794): "n" may be a, t, c, g, other or unknown
gggccgggccttcgggcccgaggcggcggcggcggtataaagccggcgactgggagcatgtaatgtcggaatgcggaggccgcggcggcggcagcagcagcagcgaggacgccgaggacgagggagggggcggcggcggccccgcgggctcagactgcctcagctcgagcccgaccctggccacagcgtcctcggcgggccggctccgtcgcgggctgcgtggcgccttcctcatggcgcgccagcggcccgagctgctctgcggggccgtggcgctcggctgcgcgctgctcctcgccctcaagttcacctgcagtcgagcaaaagatgtgataataccagcaaagccacctgtcagctttttctccttgaggtctccagtccttgacctcttccaggggcagctggattatgcagagtacgttcgacgggattcagaggtggtactgctcttcttctatgccccttggtgtggacagtccatcgctgccagggcagaaattgagcaagcagcaagtcggctttcagatcaggtgttgtttgtggcaattaactgttggtggaaccaggggaaatgcagaaaacagaaacacttcttttattttcctgtaatatatctgnatcatcggagttttggaccaatcgaatacaaaggccccatgagtgctggttacattgagaagtttgtccccccggtgatgaaaccacttctctacatcccatcttcaattcagaattactagaattttcttcttcaaacttacnaaccctgggantacttcggggtacctttnaagttcaa

SEQ ID NO: 3444 - DNA, 868 bp, Homo sapiens
  misc_feature (750)..(750): "n" may be a, t, c, g, other or unknown
  misc_feature (793)..(793): "n" may be a, t, c, g, other or unknown
  misc_feature (825)..(825): "n" may be a, t, c, g, other or unknown
  misc_feature (866)..(866): "n" may be a, t, c, g, other or unknown
agaatgcctatgagacacaggaagaaggcagcagacaagaatcttccctgccgtcctttagtatgtgcagtactggacctgatggtagagtttattgtaacacacatgatgaaggagtttcctatggatctctatatacgctgcatccaggtagtacacaaactgctctgctaccagaagaagtgtcgggtacgcctgcattacacctggcgggagctctggtcagccttgataaatttgctgaagttccttatgtcaaatgagactgtacttttggccaaacacaacatttttacattagcccttatgattgtgaacctatttaatatgtttatcacatatggcgacacatttctgccaacccccagcagctatgatgaactttactatgagattatccgcatgcaccagagctttgacaacctctactccatggtcctgaggctttctaccaatgcaggccagtggaaggaagcagctagcaaggtgacccatgcattggttaatatcagagccatcatcaaccactttaaccccaaaattgagtcctacgctgctgtgaatcacatatcccaactgtcagaggagcaggtgctggaggtggtgagagccaactatgacacgctcacgctgaagctgcaggatggcctggaccagtatgagcgctactcagagcagcacaaggaagctgccttcttcaaagagctggttcgatccattagcaccaacgtccggagaaacctggtcttncacacacttcagcccaagaagtcctgcttcaaaggagttcttncactatctcctggaggccacgccttacctganccagccctttggactggcccttaccccattgaaggatcatngg

SEQ ID NO: 3445 - DNA, 862 bp, Homo sapiens
  misc_feature (693)..(693): "n" may be a, t, c, g, other or unknown
  misc_feature (781)..(781): "n" may be a, t, c, g, other or unknown
  misc_feature (806)..(806): "n" may be a, t, c, g, other or unknown
  misc_feature (841)..(841): "n" may be a, t, c, g, other or unknown
agaccggcgcgtgaggaacctaccggtaccggccgcgcgctggtagtcgccggtgtggctgcacctcaccaatcccgtgcgccgcggctgggccgtcggagagtgcgtgtgcttctctcctgcacgcggtgcttgggctcggccaggcggggtccgccgccagggtttgaggatgggggagtagctacaggaagcgaccccgcgatggcaaggtatatttttgtggaatgaaaaggaagtattagaaatgagctgaagaccattcacagattaatatttttggggacagatttgtgatgcttgattcacccttgaagtaatgtagacagaagttctcaaatttgcatattacatcaactggaaccagcagtgaatcttaatgttcacttaaatcagaacttgcataagaaagagaatgggagtctggttaaataaagatgactatatcagagacttgaaaaggatcattctctgttttctgatagtgtatatggccattttagtgggcacagatcaggatttttacagtttacttggagtgtccaaaactgcaagcagtagagaaataagacaagctttcaagaaattggcattgaagttacatcctgataaaaacccgaataacccaaatgcacatggcgattttttaaaaataaatagagcatatgaagtactcaaagatgaagatctacngaaaaagtatgacaaatatggagaaaagggacttgaggataatcaaggtggccagtatgaaactggactattatcgtatgaatttggnatttatgatgatgatcctgaaatcnttaccattggaaagaagagaatttgagctgtggtnaattttgaaaactggggttgg

SEQ ID NO: 3446 - DNA, 867 bp, Homo sapiens
  misc_feature (774)..(774): "n" may be a, t, c, g, other or unknown
  misc_feature (805)..(805): "n" may be a, t, c, g, other or unknown
  misc_feature (826)..(826): "n" may be a, t, c, g, other or unknown
ttatagatatattccatgaatataatcagactcttactcctgtacttctagaaatgatgcaaacacttcaaggacccacaaatgtggaagatatgaatgcactgttaatcaaagatgctgtgtataatgctgttggattagctgcttatgagctctttgacagtgttgattttgatcagtggtttaaaaaccagcttcttccagaattacaagtcattcacaataggtataagccattgcgacgcagggtgatttggctcatcggtcagtggatttctgtgaaattcaagtctgacttaagacccatgctttatgaagcaatctgtaacttgcttcaagatcaagatttagtggtccgtattgaaacagctacaactttgaagttaactgttgatgattttgaatttagaacagatcagtttctaccgtatttggaaaccatgttcacactactttttcagttactgcagcaagttacagaatgtgacacaaagatgcatgttttgcatgtcctttcttgtgtgatcgaaagagtcaacatgcagatacgaccatatgtgggatgtttggtacaatatttgcccctcctttggaagcagagtgaagaacacaatatgttgagatgtgctattttgacaacacttattcatcttgttcagggattaggagcagacagcaagaacctgtccctttcctgctcccagttattcaactgagtacagatgtttcacagcctccacatgtttatcttctggaagatggtttagaattatnggtcagtaactttgggaaaacagtccatgtnttacacccagaattgcttcgnatattttcaagaaatatggtcaccccttttttggacttaag

SEQ ID NO: 3447 - DNA, 738 bp, Homo sapiens
  misc_feature (420)..(420): "n" may be a, t, c, g, other or unknown
  misc_feature (529)..(529): "n" may be a, t, c, g, other or unknown
  misc_feature (670)..(670): "n" may be a, t, c, g, other or unknown
  misc_feature (706)..(706): "n" may be a, t, c, g, other or unknown
  misc_feature (720)..(720): "n" may be a, t, c, g, other or unknown
ggtggcgggtggctggcggttccgttaggtctgagggagcgatggcggtacgcgcgttgaagctgctgaccacactgctggctgtcgtggccgctgcctcccaagccgaggtcgagtccgaggcaggatggggcatggtgacgcctgatctgctcttcgccgaggggaccgcagcctacgcgcgcggggactggcccggggtggtcctgagcatggaacgggcgctgcgctcccgggcagccctccgcgcccttcgcctgcgctgccgcacccagtgtgccgccgacttcccgtgggagctggaccccgactggtcccccagcccggcccaggcctcgggcgccgccgccctgcgcgacctgagcttcttcgggggccttctgcgtcgcgctgcctgcctgcgccgctgcctcgggccgncggccgcccactcgctcagcgaagagatggagctggagttccgcaagcggagcccctacaactacctgcaggtcgcctacttcaagatcaacaagttggagaaagctgntgctgcagcacacaccttcttcgtgggcaatcctgagcacatggaaatgcagcagaacctagactattaccaaaccatgtctggagtgaaggaggccgacttcaaaggatcttgagacttcaaccccatattgcaaagaantttcgacttgggaagtgccgacttcttacttaaganggaacaagccacanggaaagcttgtggcccca

SEQ ID NO: 3448 - DNA, 715 bp, Homo sapiens
  misc_feature (519)..(519): "n" may be a, t, c, g, other or unknown
  misc_feature (699)..(699): "n" may be a, t, c, g, other or unknown
  misc_feature (706)..(707): "n" may be a, t, c, g, other or unknown
tcgcgcgcgccgccgccccgcgctgctgaagctggcgtcgctgccgccctcgtgccacgcaccgccgcacgcgctggagcaggaggagacgccgctgtgacgccgccggcgggaagggtccgcgcgccatggctggccgctcgcgccctttcccaccgctgccgggaaaccgaggctcgccccaaacggatttgcgtgaaaccagcccaaggttccgggcccccccaaccgagccccgcgcccggggactgactcggggaccgactcagggacctcccgagcgccaggactcagggcccgacctgcagcggctgcaggcccagcgcccgcaagcggcctgggccgagcgccgtttccaggccctcgccaggtctttgaactgcaggtaaagtggcaggaacgtcttccgtctgctcagcgtttggggatttagactcctaaagccagtacctgccccgtttcccccccaggttccgtcctgcccgcgcccggtctcagggtggcggccccggacacggnccgtccccacagacgaggtctccggcctgagctgtcgcacctggcgcggaggtcgcccggggtgccctggctgggtgagaggtggcctggcgggccggagcttgccaagaattacgggcagtccttaagtggatggtggggcccaacaagcttgttctgtccccttaacaaaccaggggnccccccnnggggccca

SEQ ID NO: 3449 - DNA, 775 bp, Homo sapiens
  misc_feature (681)..(681): "n" may be a, t, c, g, other or unknown
  misc_feature (724)..(724): "n" may be a, t, c, g, other or unknown
  misc_feature (747)..(747): "n" may be a, t, c, g, other or unknown
aagataaatgcggtacgtgcaatagttcctaataagagcaacaatgaaattatcctggttttgcagcactttgataactgtgtggacaaaacagtacaagcattcatggaaggtagtgccagtgaagtactcaaagaatggacagtaacaggcaagaaaaagaacaaaaagaagaaaaacaaaccgaaacctgccgcagaaccaagtaacggcatcccagattccagtaaatcagtttccattcaagaggaacagtctgcgccttcctcagagaaaggtggtatgaatggctaccatgtcaatggtgccatcaatgacactgagtctgtggactcactcagtgaaggtttggagacactttcaatagatgccagagaattggaggatcccgagtctgccatgctagatacgctggatagaacaggatccatgctgcagaatggtgtctctgattttgagaccaagtctttgactatgcactctattcacaattctcaacaacccaggaatgctgccaaatctctctcaagacctaccacagaaactcagttttcaaatatggggatggaagatgttcccctcgccaccagtaaaaagctaagttccaatattgaaaaatctgtaaaagaccttcagcgctgcacagtgctcttgcacggtatcgagttgagttaagaaganatggatgcctccattagaaaatgaacaagcctttgtgattganactgttatggtcagaatggcgtnttctgatggcaagtgaactgaacatgga

SEQ ID NO: 3450 - DNA, 734 bp, Homo sapiens
  misc_feature (624)..(624): "n" may be a, t, c, g, other or unknown
  misc_feature (705)..(705): "n" may be a, t, c, g, other or unknown
  misc_feature (707)..(707): "n" may be a, t, c, g, other or unknown
  misc_feature (731)..(731): "n" may be a, t, c, g, other or unknown
agctcgttcgccgcactttggaggcttcggctgcccctccgacccacgtagggcccggacccgggcctccttgtgaacagcgtgccggcttcgccccacgggttcaccggctggctgggcttcaagcgccgaggccgccgcagtgaccccgcccccgggccgaggatgtgaggcgggccgggcgtccccacaccgggcccgggcgccgggagtgggcgtctgggcagcgccaggcgatggccctgctgctggtgctcctcgcctcttggggcctggggcagtgagggggccggcgggcgtgggccgagtggccgcgggcgccatggagggggtgctgtacaagtggaccaactatctgagcggttggcagcctcgatggttccttctctgtgggggaatattgtcctattatgattctcctgaagatgcctggaaaggttgcaaagggagcatacaaatggcagtctgtgaaattcaagttcattctgtagataatacacgcatggacctgataatccctggggaacagtatttctacctgaaggccagaagtgtggctgaaagacagcggtggctggtggccctgggatcagccaaggcttgctgactgacagtaggacccanaaggagaaagagtttgctgaaaacactgaaaacttgaaaaccaaaatgtcagaactaagactctacttgtgacctccttgntnaagcaaagtaggataaaacaaaangaa

SEQ ID NO: 3451 - DNA, 664 bp, Homo sapiens
  misc_feature (580)..(580): "n" may be a, t, c, g, other or unknown
  misc_feature (642)..(642): "n" may be a, t, c, g, other or unknown
  misc_feature (647)..(647): "n" may be a, t, c, g, other or unknown
cagaacagggaaatgtggtgtttaccagtgcaatagatgggtggggctttggaattgagcacttcgccagaatctacagtcaaaaaattggcatcaaaaaggaagttcttatgaaaaccttgtggggagattactatataaatatgaaggctaaaaagatcatgaagggtgatcaggccaaaggaaagaaacctttatttgtacagttgatcctggaaaatatatggagtttgtatgatgctgttttgaaaaaggacaaagacaaaattgataaaatagtgacttctttaggattaaaaattggagcccgggaggcacgacattcagaccctaaagttcagatcaacgccatttgcagtcagtggctacccatatcccatgctgttcttgctatggtgtgtcagaaacttcctagtccccttgatattacagctgagagagtggagagactgatgtgcacaggatcacaaacttttgactcttttccaccagaaactcaagcactgaaagcagcttttatgaaatgtggaagtgaggacactgctccagttattatatttgtttccaaaatgtttgcagntgatgctaaggccttgcctcagaataaagccaaggcctctcactcaagaagaaattgctcanagacntgagcctgcaagacaaa

SEQ ID NO: 3452 - DNA, 793 bp, Homo sapiens
  misc_feature (764)..(764): "n" may be a, t, c, g, other or unknown
  misc_feature (775)..(775): "n" may be a, t, c, g, other or unknown
  misc_feature (781)..(781): "n" may be a, t, c, g, other or unknown
tgttcattgaagaacaggcggctggaattgggaagagtgccaaaatagtggttcatcttcacccagctcctcctaacaaagaacctggcccattccagagtagtaagaactcctacatcaaactctccttcaaagaacatggccagattgagttttacaggcgtttatcagaggaaatgacacaaagaagatgggagaatatgccagtttcccagtcattacaaacaaatagaggaccccagccaggaagaataagggctgtaggaattgtaggtattgaaaggaaactggaagaaaaaagaaaagaaactgacaaaaacatttctgaggcctttgaagacctcagcaaactaatgatcaaggctaaggaaatggtggaattatcaaaatcaattgctaataaaattaaagacaaacaaggtgacatcacagaagatgagaccatcaggtttaaatcctacttgctgagcatgggaatagctaacccagttaccagagaaacctacggctcaggcacacagtaccacatgcagctggccaaacaactggctggaatattgcaggtgcctttagaggaacgagggggaataatgtcactcacggaggtgtactgcttagtaaaccgagctcgaggaatggaattgctctcaccagaagatttagtgaatgcgtgcaagatgctggaagcactgaaattacctctcaggcttccgtgtgtttgcagtggccgtcatggtaattgagcttcagtctccaaggaagangaaatggtggncttggncctggagacaag

SEQ ID NO: 3453 - DNA, 770 bp, Homo sapiens
  misc_feature (733)..(734): "n" may be a, t, c, g, other or unknown
  misc_feature (744)..(744): "n" may be a, t, c, g, other or unknown
atgtgaccacactgaatttaatgcatttcttgatttgaagaactccctaaatgaagtaaaaaacctactgagtgataagaaactggatgagtggcatgagcacactgctttcactaataaagcagggaaaatcatttctcatgttagaaaatctgtgaatgctgaactttgtactcaagcatggtgtaagttccatgagattttgtgcagctttccacttattccacaggaagcttttcagaatggaaaactgaattctctacacctttgtgaagctccaggagcttttatagctagtctcaaccactacttaaaatcccatcggtttccttgtcattggagttgggtagcgaatactctgaatccataccatgaagcaaatgacgacctcatgatgattatggatgaccggcttattgcaaataccttgcactggtggtactttggtccagataacactggtgatatcatgaccctgaaattcttgactggacttcagaatttcataagcagcatggctactgttcacttggtcactgcagatgggagttttgattgccaaggaaacccaggtgaacaagaagctttagtttcttctttgcattactgtgaagttgcactgctctgaccactcttggaaacggtggctcttttggtctaaagatgtttactatgtttgaacattggtccataaacttgatggacctgcttaactggtggttttgacccaagnnccatgttttnaaacctggttcttagccaaggcaggg

SEQ ID NO: 3454 - DNA, 753 bp, Homo sapiens
  misc_feature (576)..(576): "n" may be a, t, c, g, other or unknown
  misc_feature (657)..(657): "n" may be a, t, c, g, other or unknown
  misc_feature (700)..(700): "n" may be a, t, c, g, other or unknown
  misc_feature (741)..(741): "n" may be a, t, c, g, other or unknown
tttccatggggctctcaaggaatgagaagtcaagatcacatccaagttagcaagcagcacattaataatcagcaacagccacctcaactacgttggagaagcaattctctcaataatggccagccgaaaagtacgcgctgccaggcatctgcctccgcggagtcattaaactcccacagtggtcaccccactgctgatgtacagactttccaggcaaagcgccatattcatcaacaccgtcagtcttactgtaattataacactggaggtcagttagagggcaatgcagccacttcctatcagaagcagactgacaaacccagccactgtagccagtttgtgacacctccgcggatgaggagacagttctcagcacccaatctcaaagctggtcgagaaaccacagtataaatcagttactggacaaacttgaaatcatggtggaagaaacagacagtgttagctcatgatttgatttggttctacctttggccttgagttcttattatttacattataaatattaactggttttatattgttaagacaaaacactggtaaaagtttcaacacctnccttttgcttgtataccataaatgggcagtttctgaaattttggataaagcatcaagactcctttttctgaaacgttcctncttttttagtgcctaattaatatacttacttacacagacttgncccatcttgatgtaagttggtatggttttataatgcctatnaattaatctgac

SEQ ID NO: 3455 - DNA, 777 bp, Homo sapiens
  misc_feature (683)..(683): "n" may be a, t, c, g, other or unknown
  misc_feature (734)..(734): "n" may be a, t, c, g, other or unknown
  misc_feature (770)..(770): "n" may be a, t, c, g, other or unknown
attttacccagcccctgttcaagatggagttgctgtggttcacacatctctgacaaaaatacagggctattcggagtcaccagacctggagtttgagtatgctgacacagacaagtgggctgcagagctctcggagctttacagctacacggaagggccagaattcctgatgaatcgaaaatgctttgaggaggacttccggatccatgtgacagacaagaagtggactgagctggataccaaccagcaccggacccatgccatgaggctcctggatggcttggaagtcactgccagggagaagagactcaaggtggctcgagcaattctctatgttgctcaaggcacgtttggggagtgcagctcggaggcagaggtgcagtcctggatgcgctacaacatctttctcctcctggaggtgggcacgttcaatgctttggtggagcttctgaacatggaaatagacaacagtgccgcctgcagcagtgctgtgaggaagcctgccatctccctggctgacagcacagacctcagggtcctgctcaacatcatgtacctgatagtggagaccgttcatcaggagtgtgagggtgacaaggctgagtggaggaccatgcggcagaccttcagagccgaactgggctccccgctgtacaacaatgagccatttgccatcatgctgnttgggatggtgaccaaattttgcagtggtcacgcccctactttccatgaanaaagtctcttgctgtctggaaacagtattgtgcacnctaggcg

SEQ ID NO: 3456 - DNA, 902 bp, Homo sapiens
  misc_feature (874)..(874): "n" may be a, t, c, g, other or unknown
  misc_feature (880)..(880): "n" may be a, t, c, g, other or unknown
  misc_feature (894)..(894): "n" may be a, t, c, g, other or unknown
cttcatggacacccacacagattcactggagagcaaagcctaccagagtccctgtcagcagcactgtttctagaagcttccacatgagcagacagcatggagtcctgggggctaatgaagcagcaatgtcagcatgagcacaggcagggagaggcaagaggagcagagtaaaggggaacgttctcttcattcttccacctgcctgtcccccagccgacacgtcccttccgttccctgcaaggccatttccagggaggcttacgaagacagcagatgatggtgatggaaggagtctgggtgctgagctgtgccatggacctggagagaaactgagtccgagggatgtcaacatgccaagtccatggaaatatcagtgggctggaattctagctgcctgaaagaagacattcctcacacaagacctcacaatcatatccatggaattatagcactgggctctccagatggtgctacaggaagacctccagaaatttgacgatcctctattcaaggccctaccacagagacacacaggaacggaactcagaatcacaaacaaagaaactttgatccaagaaagaaaatgatctttaaaaagaccctcgtttcatgctggccgatgctgagaaaatctgctctgaaggatatttggagacactgattaaaaggtagtaccatcaccacatatttaacttccccctctttttcctctgcttctaggagtagagaaaccaacaaaaccaaccggagagagatggtttcaaacaatctgtcccccaccccaccactattcacacctttcacaagggcccagccacaaagccagtgcaacatgacatcaatcattaagcaaagtggaaaatggttgtcccantggganggggaattcttcgngttaccta

SEQ ID NO: 3457 - DNA, 789 bp, Homo sapiens
  misc_feature (697)..(697): "n" may be a, t, c, g, other or unknown
  misc_feature (717)..(717): "n" may be a, t, c, g, other or unknown
  misc_feature (774)..(774): "n" may be a, t, c, g, other or unknown
gctcgcagactccggagtcgccaacatgtcgaccgccatgaatttcgggaccaagagcttccagccgcggcccccggacaagggcagcttcccgctggatcacttaggtgaatgtaaaagctttaaagagaaattcatgaagtgtcttcataacaataattttgaaaatgctttgtgcagaaaggaatcaaaagaatatttagaatgcaggatggagagaaaattgatgctacaagaaccattggagaaactgggatttggagacttgactagtggaaaatcagaggcaaaaaaatgaattttgatgagaagacccctgggccgtgttcagtggtctctcaggacggagggcatcatcctgcctcttaggttggctgaggcctgcgtgtggtgtccttagaaatgggcttcgaatagaagctccagccctgtgggggcgtctcctgggtagggagtggcgtcccgttttcccttaggagggtgtttctgcattgaacccctgagtgggacggcgttcccggcaaagctgggagggaggcgagcgtggggcaagacccttgtcttcgaggccggggccctcttgtatggggcggttttatgttgcagtcctctgatactttctgagttcaaagaggtaaatgtataaatttcagtcccttctgaacacagatatcatcagaaaattaccattccctancaggatgttttcgtgtttgnattcgtatatgccagttcatttcctttgaaaaaaaaaaaaaagtggaccccaaagtnggaagtgagaacctt

SEQ ID NO: 3458 - DNA, 772 bp, Homo sapiens
  misc_feature (643)..(643): "n" may be a, t, c, g, other or unknown
  misc_feature (737)..(737): "n" may be a, t, c, g, other or unknown
  misc_feature (742)..(742): "n" may be a, t, c, g, other or unknown
  misc_feature (768)..(768): "n" may be a, t, c, g, other or unknown
attttgggcttcgcttccaccgcaccagccggcctacccagtccttccggtatcgcgttgctcaggggcttttcaaccctctgtcagtcggaaaaccatcgccgaggccgtggggggactcctatccatggtgttgaagcgtcgagccgactagggaacctccttccccgccaggatggaagtcgcatcagtcgccgcctattgcgcgggctgttcttccctgtgttctgccgcccgctgccgcattcgctgccctctgtggcttttctgctggctcgaagatcggcctggagcagcgacgccaccgctgggcaaggccgagactctgtaggcttcctccgaatcccgtcgacctccagccgctgagcgccgcggccctacctgagagactgtcaagaaaaaggagatggagccggggacaggcggatcgcggaaacggcttggccctcgggcgggcttccggttctggccaccctttttccctcggcgatcgcaagcaggctcttctaagttcccgacgcctcttggcccggaaaactccgggaaccccacactgctttcctctgcccagcccgagactcgggtcagttactggacgaaactgctctcccagctccttgcgccgctccccggattgcttcanaaggtgctaatttggagccaacttttcggtggaatgtttccgaccagatggctagattttgctggagtctacaagcgccctgagagccctgaanggacnggagaaaccaagccggccccacaagngcaa

SEQ ID NO: 3459 - DNA, 760 bp, Homo sapiens
  misc_feature (732)..(732): "n" may be a, t, c, g, other or unknown
  misc_feature (738)..(738): "n" may be a, t, c, g, other or unknown
  misc_feature (760)..(760): "n" may be a, t, c, g, other or unknown
atttctacgacttttctctcagctgaggcttttcctccgaccctgatgctcttcaattcggtgctccgccagccccagcttggcgtcctgagaaatgctcccaatatggaacatgtactagcagttgccaatgaagaaggctttgttcgattgtataacacagaatcacaaagtttcagaaagaagtgcttcaaagaatggatggctcactggaatgccgtctttgacctggcctgggttcctggtgaacttaaacttgttacagcagcaggtgatcaaacagccaaattttgggacgtaaaagctggtgagctgattggaacatgcaaaggtcatcaatgcagcctcaagtcagttgccttctctaagtttgagaaagctgtattctgtacgggtggaagagatggcaacattatggtctgggataccaggtgcaacaaaaaagatgggttttataggcaagtgaatcaaatcagtggagctcacaatacctcagacaagcaaaccccttcaaaacccaagaagaaacagaattcaaaaggacttgctccttctgtggatttccagcaaagtgttactgtggtcctctttcaagacgagaataccttagtctcagcaggagctgtggatgggatattcaagtctgattttggattccactggctctactttatttgctaattgcacagacgatacatctacatgtttaatatgactgggttggaagacttntccagnggctattttcaatgggcacccn

SEQ ID NO: 3460 - DNA, 713 bp, Homo sapiens
  misc_feature (677)..(677): "n" may be a, t, c, g, other or unknown
  misc_feature (698)..(698): "n" may be a, t, c, g, other or unknown
  misc_feature (708)..(708): "n" may be a, t, c, g, other or unknown
ttactggatatcaagatgactaagaaatagcacttgccttgaaggagcttttctatttgaggaaaaagacatgtatataaataactgcaaacagaatgaaacaagtgttatgtagatctacatacagtgacatgccatgggaatgctgaacactgagcaacagtttcaactagcgaattggcacaggaaacatgaaaaataagcgtattttcaatatgacaagaatggtcatttctggatataagaacaagagagaagtcatgggtatatggaaaggcatggactcttcaaggaagagcaagtagtctaatgtagatgctgtataggaatctggggacaaagggacagataagtggtgtagacaaagaggctggaaatagggttatgggctagatcatgagtgacctgtaagcattaggagttttgatttattttggaataagaaacatttatggcttttgagaaggaaaattacacaagggaaaagaaaggatttttattttttatttttatttttggagagatgagatctcactatgttgcccaggctggtcttgaactcctgaactcaagcaatcctcccggctcggcctctgaaacttctaggattataggcgtgagccactacgcccagccaggattatgtttttttatgggagggatgagaatattggtanggtgggtagaggattaatganagagaattgnatatg

SEQ ID NO: 3461 - DNA, 675 bp, Homo sapiens
  misc_feature (627)..(627): "n" may be a, t, c, g, other or unknown
  misc_feature (647)..(647): "n" may be a, t, c, g, other or unknown
  misc_feature (674)..(674): "n" may be a, t, c, g, other or unknown
agcgattctcctgcctcagccttccgagtagctgggattacaggcatgcaccaacacgctcagtgtttaactgctgaagagatcttttcccttcatggcttttcaaatgctacccaaataaccagctccaaattctctgtcatctgtccagcagtcttacagcaattgaactttcacccatgtgaggatcggcccaagcacaaaacaagaccaagtcattcagaagtttggggatatggattcctgtcagtgacgattattaatctggcatctctcctcggattgattttgactccactgataaagaaatcttatttcccaaagattttgaccttttttgtggggctggctattgggactcttttttcaaatgcaattttccaacttattccagaggcatttggatttgatcccaaagtcgacagttatgttgagaaggcagttgctgtgtttggtggattttacctacttttcttttttgaaagaatgctaaagatgttattaaagacatatggtcagaatggtcatacccactttggaaatgataactttggtcctcaagaagaaactcatcaacctaaagcattacctgccatcaatggtgtgacatgctatgcaaatcctgcntggcccagaagcttatgggncattttccatttttggataatggtcang

SEQ ID NO: 3462 - DNA, 814 bp, Homo sapiens
  misc_feature (755)..(755): "n" may be a, t, c, g, other or unknown
  misc_feature (773)..(773): "n" may be a, t, c, g, other or unknown
  misc_feature (802)..(802): "n" may be a, t, c, g, other or unknown
gattcacgtagaccttgtcaggaaattggtcactatccatctaggccctagaagtgagaggaggaatcttacgaactcattttctagttgctttgtattcaaatcttagttgttaattatcttgttctagtaatcacctaaaatattagacacttaaaatgttggggaaacgtaagcgtgtggtgttgacaattaaggacaagcttgacattattaagaaacttgaggaaggcatctctttcaaaaaactttccgtggtgtacggaattggtgaatccacagttcgtgatattaaaaagaacaaagaaaggattataaactatgcaaacagttcagatcctaccagtggagtatccaaacgtaaatctatgaagtcatcaacatacgaggagcttgatagagttatgatagagtggtttaaccaacagaaaacagatgggattccagtgtccggaacgatttgtgcaatacaagccaagttcttttttgatgctttgggaatggaaggtgattttaatgcatcgtcaggctggctaactcgatttaagcagcgccatggtattccaaaggctgctggtaaaggaacaaaattaaaaggagatgaaactgctgccagagaattttgtggtagctttcaggaatttgttgaaaaagagaatctacaccagagcaaatttatggtgctgatcaaactggattggtttggaaatgtctaccatcaaggacattaactcttgaaactgaccaaagtcttntgggtgtaggtcaagccnaagaggggaatcatcattatggggttgcncaaatgcccaca

SEQ ID NO: 3463 - DNA, 867 bp, Homo sapiens
  misc_feature (804)..(804): "n" may be a, t, c, g, other or unknown
  misc_feature (822)..(822): "n" may be a, t, c, g, other or unknown
  misc_feature (858)..(858): "n" may be a, t, c, g, other or unknown
aactgggcttggcttcctcaagcaaaagttcccttttctgaagaaataagaaatttgattctaccatatatttctgacatgaactttgtgcaagatttatgtgaagatctctatgaactttttaagactgacaaaggatttgacaaagccacttttgaaagtcagatgtctgtgatgaggggtcagatcttaaaccttactcaggcattgagagacgggaagagtcctttccagctagtacagataccttgtgtgattgtggaacgcagtcaaggtggaagtcagggtcggattgtccacctgagcaattcctttacccagactgtcaattgcaggaagccatttttttcctcctggtagtaaatgtcagagtaagagaaacaaactgtttagaattatcatgtttttaaaacatcatagtaatataaatctgctgttaggagctccagttgctaaaacctcaatttaagtctttaaaaggttgtattttgaatgtaaccaaaagtttacagttttttgtccaaatattaaatttctatttcagggaagaagtgctatatctcctatattgtatttttgtagaaaatttgtattttatgttgttgttagtttaaaaggtaattttacacatgctggaatgactgtaattactctagaattccaagtagaatacaataacttttaatattgagaagaatgttcatgctaattcttcttacattacaaaaggcctttgaggatgcctacgtctgaaattgctcttacgaactttaataaaatggttagctaatagaaaaacaggtnagaataaagcaatggtgncttaattcaaaagctgctatttagaattggataagncttctaaag

SEQ ID NO: 3464 - DNA, 754 bp, Homo sapiens
  misc_feature (695)..(695): "n" may be a, t, c, g, other or unknown
  misc_feature (733)..(733): "n" may be a, t, c, g, other or unknown
  misc_feature (746)..(746): "n" may be a, t, c, g, other or unknown
actaagcccaggccaggttgctgtgctggctcatcctccttagaaagatatgcaacctccaatgagttccctgatgatgccctgaacttcatcaagacgcacccgctcatggatgaggcagtgccctccatcttcaacaggccatggttcctgagaacaatggtcagatgcagctatgatggagtcgaagacaaaaggatcatgggcatgcagctggacagagcaagcagctctctgtatgttgcgttctctacctgtgtgataaaggttccccttggccggtgtgaacgacatgggaagtgtaaaaaaacctgtattgcctccagagacccatattgtggatggataaaggaaggtggtgcctgcagccatttatcacccaacagcagactgacttttgagcaggacatagagcgtggcaatacagatggtctgggggactgtcacaattcctttgtggcactgaatgggcattccagttccctcttgcccagcacaaccacatcagattcgacggctcaagaggggtatgagtctaggggaggaatgctggactggaagcatctgcttgactcacctgacagcacagaccctttgggggcagtgtcttccataatcaccaagacaagaagggagtgattcgggaaagttacctcaaaggccacgaccagctggttcccgtcacccttcttggncattgcagtcatcctggctttcgcatgggggccgcttntcggcattaccgntactgggt

SEQ ID NO: 3465 - DNA, 808 bp, Homo sapiens
  misc_feature (635)..(635): "n" may be a, t, c, g, other or unknown
  misc_feature (663)..(663): "n" may be a, t, c, g, other or unknown
  misc_feature (697)..(697): "n" may be a, t, c, g, other or unknown
  misc_feature (741)..(741): "n" may be a, t, c, g, other or unknown
  misc_feature (789)..(789): "n" may be a, t, c, g, other or unknown
  misc_feature (800)..(800): "n" may be a, t, c, g, other or unknown
atccttatggcagcatgaggaaagctccagggagtgatcccttcatgtcctcagggcagggccccaacggcgggatgggtgacccctacagtcgtgctgccggccctgggctaggaaatgtggcgatgggaccacgacagcactatccctatggaggtccttatgacagagtgaggacggagcctggaatagggcctgagggaaacatgagcactggggccccacagccgaatctcatgccttccaacccagactcggggatgtattctcctagccgctaccccccgcagcagcagcagcagcagcagcaacgacatgattcctatggcaatcagttctccacccaaggcaccccttctggcagccccttccccagccagcagactacaatgtatcaacagcaacagcaggaaccccggaggcatggcgggtaatgatgtccctcaagtctggtctcctggcagagagcacatgggcattagataccatcaacatcctgctgtatgatgacaacagcatcatgaccttcaacctcagtcagctcccagggttgctagagctccttgtagaatatttccgacgatgcctgattgagatctttggcattttaaaggagtatgaagtgggtgacccangacagagaacgctactggatcctgggangttcaacaaggtgtctagtccaacttccatgganggtggggaagaagaagaagacttctaggtcctaaactagaagangaagaagaagaggaagtagttgaaaatgatgaggagatagccttttangcaaggacaanccacttta

SEQ ID NO: 3466 - DNA, 791 bp, Homo sapiens
  misc_feature (628)..(628): "n" may be a, t, c, g, other or unknown
  misc_feature (746)..(746): "n" may be a, t, c, g, other or unknown
  misc_feature (754)..(754): "n" may be a, t, c, g, other or unknown
  misc_feature (772)..(772): "n" may be a, t, c, g, other or unknown
tatttccatgcaagtggaagacggtaccgtctccccacatttgagaagactgttttgcatcactctttgctattgaaggaagcagtgatggtgaatttccttctgtttgggttccttgtgtctataacttcctttgtggtaaagccatcaggaagaatagtgggagtggggtatatggtcagggtgctcatatcctgctttagcctagctgcttcttacggagtgcaagggagaactctgagaagcagtatgtaaataccagggagctgattgctgaatattgtggtctcatctgaatattgtggtctcatctaaatattgacaccaggcaatgaagcagaaatagagtatgtgtccctttatgcgtgggtaacttaagcttctgtcatgtgggaagggggaccgaatcttccctgggaggaaggctccaaattctcactacttctgtgttacttgaagggggaagcataaggaacccagtttgaaggcaacattgtgtgccatgaatctgcttattaatcaacatgccttgttaatgtcctctgccctgaacagcccttactcagttctcatttggaaagttattttttggggttacatcctgtttgtttcagaatttaaaaccctncatggtgggtcacttgaggtcaggagttcaagattagcctggccaacttagtgaaactccggctctgctgaagatgcaaaaattagccaggtgtggcacacgcctgtaatcccagttnccttggangcccaggcaggagaatcnctttgaaccctgggaggca

SEQ ID NO: 3467 - DNA, 850 bp, Homo sapiens
  misc_feature (754)..(754): "n" may be a, t, c, g, other or unknown
  misc_feature (835)..(835): "n" may be a, t, c, g, other or unknown
  misc_feature (843)..(843): "n" may be a, t, c, g, other or unknown
tgtggggccttatatccaggttcccagtgccggaagctttcctgtgctgggggaccctataaagccccagtctctcagtattgcctcaaatgctgctcatggaagatccaaatccgctaatgatggaaactggccaacattaaaacagaattctagctcttccgtgaaaccagtgcaggtggccggtgcagactggaaggatccgagcgtggaggggtctgtcaagcagggcactgtctccagccagcctgtgcccttctcagcactgggacccacggagaagccgggcatcgagattggtaaagtgccacctcccatcccgggtgtaggcaagcagctgcctccaagctatgggacatacccaagtcctacgcctctgggtcctgggtcggcaagctccctggaaaggaggaaggaaggcagcttgcccaggcccagtgcaggcctgccaagtcgacagaggcccaccctgctgcccgccacaggcagcaccccccagccaggctcctcacaacagattcagcagaggatttccgtaccgccaagtcccacgtacccgccagcgggaccacctgcatttccagctggggacagcaagcctgaactcccactgacagtggccattaggcctttcctggctgataaagggtcaaggccacagtcttccaggaaaggaccccagacagtgaattcaagttccatatactccatgtaccttcagcaagccacaccacctaagaattaccagcccggnagcacacaagcgccttaaataatcagttaaagcagtgtatggtaagcccgtttaccttcgggttcaacctttcatcgccgntgccgttnttacggg

SEQ ID NO: 3468 - DNA, 820 bp, Homo sapiens
  misc_feature (706)..(706): "n" may be a, t, c, g, other or unknown
  misc_feature (748)..(748): "n" may be a, t, c, g, other or unknown
  misc_feature (798)..(798): "n" may be a, t, c, g, other or unknown
  misc_feature (809)..(809): "n" may be a, t, c, g, other or unknown
aatataatgaagaagtggctgacttaaagataaagcgatctaaacttcatgaacaagttttagatttgggcctgacatggaagaagataataaaatttttgaatgaaaaactggagaagagtaaaatgcaaagtataaatgaagacttaaaagatatattacatgctgcaaagcagatagaagtgaattgtccattccagaagaggaggctggatggaaaagaggaggatgagaagatgagcagagcttctgacagattcagaggactaagatgacaaaaatgactaaaatggacaaaagaagaaatagaaaatctgaatatttgactattaaaggaatttaatctgtaattaaaaaccttaagtacaaagaaatctatatgctatgatggctttaatggagaatgtcataatgtcatttaaaaaggtatgagagtactattgtagattaaaagaggttaaaggcatataataatcaaaatgtaatgtatgatccttgattgactcttgaatcagaaaaaaattacgtatttttggggccgttggagaaatctgaatatgggctggacatcattaggtaatattagatctcaggtgtgataatgttgtggctatgtaagaggatatcctaaatctcaggagaagcatactgcagtatatatagtggtatctcatgaagattaaaatgtctgtcaaatgtgtcagcnaaagaaatacacatgatgtgtgtgtgtgatcaagtgtttatnatggagtgggattaataaatatgagaaagataggggtgaatttggttggnaagtaataaanggttaaaaatt

SEQ ID NO: 3469 - DNA, 645 bp, Homo sapiens
  misc_feature (589)..(589): "n" may be a, t, c, g, other or unknown
  misc_feature (591)..(591): "n" may be a, t, c, g, other or unknown
  misc_feature (618)..(618): "n" may be a, t, c, g, other or unknown
gcaggggccagacccggacggctccagagcctccagagcctccgggtctgggcggcgcttcggctcctcccgagccgcctgctagccccgcgccgcactccatccccacaggctggggacgggcccggtgcggctgtgtgggttcgggagcggagttgcagaatccaaggacccattttgttctttctccgcactgctttatgggaggcattatggcccccaaagacataatgacaaatactcatgctaaatccatcctcaattcaatgaactccctcaggaagagcaataccctctgtgatgtgacattgagagtagagcagaaagacttccctgcccatcggattgtgctggctgcctgtagtgattacttctgtgccatgttcactagtgagctctcagagaaggggaaaccttatgttgacatccaaggtttgactgcctctaccatggaaattttattggactttgtgtacacagaaacggtacatgtgacagtggagaatgtacaagaactgcttcctgcagcctgtctgcttcagttgaaaggtgtgaaacaagcctgctgtgaattcttaaaaaagtcaantngacccctctaattgccttgggtattanggaattttgcttgaaaccccacaattg

SEQ ID NO: 3470 - DNA, 792 bp, Homo sapiens
  misc_feature (668)..(668): "n" may be a, t, c, g, other or unknown
  misc_feature (719)..(719): "n" may be a, t, c, g, other or unknown
  misc_feature (741)..(741): "n" may be a, t, c, g, other or unknown
  misc_feature (776)..(776): "n" may be a, t, c, g, other or unknown
agtgggctctgcggataactcagacgccattaagctggggaatccaaactctaaaagaaggacgcattttaggtaagatctagtggctagatcttcagggtgggcttcgttcttgtggaaatcagtcaagaaagatcggattcgcggttatttatgcaaatcatctgggtggattgtgtacggagtcaaactgcgccttctggaccgggtctgaacaatggagactgcgctagcaaaaacgccacagaaaaggcaagttatgtttcttgctatattgttgcttttgtgggaggctggctctgaggcagttaggtattccataccagaagaaacagaaagtggctattctgtggccaacctggcaaaagacctgggtcttggggtgggggaactggccactcggggcgcgcgaatgcattacaaaggaaacaaagagctcttgcagcttgatataaagaccggcaatttgcttctatatgaaaaactagaccgggaggtgatgtgcggggcgacagaaccctgtatattgcatttccagctcttactagaaaatccagtgcagttttttcaaactgatctgcagctcacagatataaatgaccatgccccagagttcccagagaaggaaatgctcctaaaaatcccagagagcacccaccagggactgngtttccttaaaaatagcccaggactttgacataggtagcaacactggtcanaactacacaatcaagcccaaantcacactttcatggtgctacgcataatcgccgganatggcagaaaatccca

SEQ ID NO: 3471 - DNA, 841 bp, Homo sapiens
  misc_feature (720)..(720): "n" may be a, t, c, g, other or unknown
  misc_feature (765)..(765): "n" may be a, t, c, g, other or unknown
  misc_feature (836)..(836): "n" may be a, t, c, g, other or unknown
  misc_feature (839)..(839): "n" may be a, t, c, g, other or unknown
tttcctgcattgcatcatcatagcttttaatataatgctacagaatcatatccacattaggttagagttcagatatttggatatgaatacctaacctagccatatccatggccatctctgttcttttcagcaatgttttccatattatattagcaatgacagaaacagaacaagccaagatccagtcagttcttgggagcttgtctagagcaccaagtaatgaaatagccaggtagtgggatgactgtacctttaaaaatacataatttagtttgcaagctatattatgctactttctattttccttgttactttatagcaattcattttaccctcacaaagtcaatttagaaccttatcattaactgggatgtgtagtgatatttttgggcctctgggtttcatgtgttaatacgaggaatatttatttaaaatagatttatttagaggaggcacagtgttgttgatctgtgtgacaccacccatatttttaaaaacctttgtatgtttctctaaatttgttgttgactgaatataatagaccctaccataattcgtcaaatatcactgattagttacatcctttgtgtgagattagctgtaaagtatactgctcttattcttattcagaatagttaattggtagccaaaaatacatgtatcacagatgttaggtccgaatttaaacagcacagtcaagtgctatggaagtttttctgntaaattagtagattaaagaattctatccctaagcatggggagcanccgttttcctttgggaggtaggactctatctaatggaacagtgccagttcacactttggacttaaaatggnctnta

SEQ ID NO: 3472 - DNA, 813 bp, Homo sapiens
  misc_feature (78)..(78): "n" may be a, t, c, g, other or unknown
  misc_feature (591)..(591): "n" may be a, t, c, g, other or unknown
  misc_feature (738)..(738): "n" may be a, t, c, g, other or unknown
  misc_feature (772)..(772): "n" may be a, t, c, g, other or unknown
  misc_feature (780)..(780): "n" may be a, t, c, g, other or unknown
ataacccgtgtcttcaaaaccatctaccatgaagctaaaacataccatcaaccctattcttttatattttatacattntctaatatcactttatactattttaacatacattccgttttattttttctccgagtcaagacaagaaaaatcaaaccgaattaaagcaaagcctgtaaattcaaaacctgattctgcatacagatctgttaatagtttggatggtttggcttcagtattataccctggatgtgatactttagataaagtttttacatatgcaaaaaacaaatttaagaacaaaagactcttgggaacacgtgaagttttaaatgaggaagatgaagtacaaccaaatggaaaaatttttaaaaaggttattcttggacagtataattggctttcctatgaagatgtctttgttcgagcctttaattttggaaatggattacagatgttgggtcagaaaccaaagaccaacatcgccatcttctgtgagaccagggccgagtggatgatagctgcacaggcgtgttttatgtataattttcagcttgttacattatatgccactctaggaggtccagccattgntcatgcattaaatgaaacagaggtgaccaacatcattactagtaaagaactcttacaaacaaagttgaaggatatagtttctttggtcccacgcctgcggcacatcatcactggtgatggaaagccacccgacctggtcccgagttncccaagggcatcattgtgcataccatggctgcantgggaagncctgggagcccaaggccagcatgggaaaaccca

SEQ ID NO: 3473 - DNA, 822 bp, Homo sapiens
  misc_feature (694)..(694): "n" may be a, t, c, g, other or unknown
  misc_feature (715)..(715): "n" may be a, t, c, g, other or unknown
  misc_feature (778)..(778): "n" may be a, t, c, g, other or unknown
  misc_feature (810)..(810): "n" may be a, t, c, g, other or unknown
  misc_feature (815)..(815): "n" may be a, t, c, g, other or unknown
acatcagcatcagcaggacaggctcctgaggacccctcaggccctggcacaggcccctctgggacttgtgaggctccggtagctgtcgtgaccgtgaccccagctccggagcctgctgaaaactctcaagacctgggctccacgtccagcctgggacctggcatctctgggcctcgagggcaggccccggacacgctgagttacttggactccgtgagcctcatgtctgggaccttggagtccttggcggatgatgtgagctccatgggctcagattcagagataaacgggctggccctgcgcaagacggacaagtatggcttccttgggggcagccagtactcgggcagcctagagagctccattcccgtggacgtggctcggcagcgggagctcaaatggctggacatgttcagtaactgggataagtggctgtcacggcgattccagaaggtgaagctgcgctgccggaaggggatcccctcctctctcagagccaaagcctggcagtacctgtctaatagcaaggaacttctggagcagaacccaggaaagtttgaggagctggaacgggctcctggggaccccaagtggctggatgtgattgagaaggacctgcaccggcagttccctttccacgagatgtttgctgctcgaaggggggcatgggcaacaaggaacctgtacccgaatncttgaaggccttacaccattntacccgggccttgaccaaaggggttacctggccaaggcccaaggcccccccgtgggctttgcnggtccctggcttaatgccacattgcccttgcnggaancaaggcc

SEQ ID NO: 3474 - DNA, 638 bp, Homo sapiens
  misc_feature (608)..(608): "n" may be a, t, c, g, other or unknown
  misc_feature (627)..(627): "n" may be a, t, c, g, other or unknown
  misc_feature (634)..(634): "n" may be a, t, c, g, other or unknown
caatgaaaacctctaaaattggaccatactaccacagtttatgtatgctatagaatttattttgagattgataacatactttagaggtggtatggatcaacaaatggacccacagatttttcttatatgttaagtgaacagagacataggaaactcatagaaaaagaaactaaatgaagaatttggttcccatattgatgttataatagatgatcattataccttgaccctctttctctggttctgattgaagattgagactttggaagagaaataatatgaaaaatggtaactgattatcagacgacgttattcagaaaaagattttattttctggagagtgacctaagatcccttgaataatagatttctgtgcttcatctcacaggaattaaaagaatttattcacctggtaacttgatcatcagatcaagattttattcacaaaatgttggagaagacagaaaaatatcagtaaaattctaaaactggatatgatggaggttatcacataaaatagatgatataaggcagttgacaaggtgcccatgattatgtagtagtaaatactgggaagaaggatgtgttcaaaggccgttccttggggnctcaggttccttaccattnttgaaanttaa

SEQ ID NO: 3475 - DNA, 788 bp, Homo sapiens
  misc_feature (747)..(747): "n" may be a, t, c, g, other or unknown
  misc_feature (761)..(761): "n" may be a, t, c, g, other or unknown
  misc_feature (786)..(786): "n" may be a, t, c, g, other or unknown
ctacgttgtcttttcacttctctggggaggagtgatctggccgttcctcaactaccagaggatgtactacgtgttcatccagatgctgtccagcgggcccgcctggctggccatcgtgctgctggtgaccatcagcctccttcccgacgtcctcaagaaagtcctgtgccggcagctgtggccaacagcaacagagagagtccagaatgggtgcgcacagcctcgggaccgcgactcagaattcacccctcttgcctctctgcagagcccaggctaccagagcacctgtccctcggccgcctggtacagctcccactctcagcaggtgacactcgcggcctggaaggagaaggtgtccacggagcccccacccatcctcggcggttcccatcaccactgcagttccatcccaagtcacagctgccctaggtcccgtgtgggaatgctcgtgtgatggatggtcctaagcctgtggagactgtgcacgtgcctcttcctggcccccagcaggcaaggaggggggtcacaggccttgccctcgagcatggcaccctggccgcctggacccagcactgtggttgttgagccacaccagtggcctctgggcattcggctcaacgcaggagggacattctgctggcccaccctgcgcgctgtcatgcagaggccattcccccaggcctgtgtctttcacccacctgccatcattggcctttgctggcactggggagagaagaacccgtccanggacccatggtggnccacatgtggattgccacatgctgntg

SEQ ID NO: 3476 - DNA, 696 bp, Homo sapiens
  misc_feature (651)..(651): "n" may be a, t, c, g, other or unknown
  misc_feature (675)..(675): "n" may be a, t, c, g, other or unknown
  misc_feature (682)..(682): "n" may be a, t, c, g, other or unknown
aaaatatgaaggcaaaggaaatacatgtgacttaatgaacctcacacaaactgaaggttgaagtcaggctccggggctttttcctggacttatcctctgttttcccctgtgtacttgggcaaggatcttcacctgtgtcttagtatcgatttttatgaatcagtactgatggagtatatgtgtgtttaatggtgaatattaaccatagaagggctgagtgctcctccccatcttgggactcataatctgtgaaataaaacagtctgggcctccctgcccgggtagcatcaggatagacagatgaagagaagagaaagtaatgtgtcttgggcatcttctgtatgccaggcaccatgccagaggctttaagtacttcatcttacttgactcctcagatggccctgttagaagcctattttatgcaaaaggaaactgtagctgggggtaagtaacttgccaaggggtcacacagctagaaagcggtggaccctagatgcaggcgcagccattcagaccccacagtccacattcctttgagccagtccattgagggtcctcaaggaatgtggcgggtcccctggtctcgctcccccgcagatcttgcatctcagcatgcgcctaccacatcagttgacattagcacagcttttncattaggagaacgaagtgaaactnctggtanaacggatgatggct

SEQ ID NO: 3477 - DNA, 802 bp, Homo sapiens
  misc_feature (586)..(586): "n" may be a, t, c, g, other or unknown
  misc_feature (622)..(622): "n" may be a, t, c, g, other or unknown
  misc_feature (642)..(642): "n" may be a, t, c, g, other or unknown
  misc_feature (706)..(706): "n" may be a, t, c, g, other or unknown
  misc_feature (722)..(722): "n" may be a, t, c, g, other or unknown
  misc_feature (791)..(791): "n" may be a, t, c, g, other or unknown
gctggaagagcagcggcccgagccggggccatggcgaagctgctgagctgcgtcctaggcccccggctctacaaaatctaccgggagagggactctgaaagggccccggccagcgtccctgagacgccaacggcagtcactgccccccattccagctcctgggatacgtactatcagccccgtgccctggagaaacatgctgacagcatcctggcactggcttcagtattctggtccatctcttattactcctctcccttcgccttcttctacttgtacaggaaaggttacttgagtttgtccaaagtggtgccgttttctcactatgctgggacattgctgctacttctggcaggtgtggcctgcctccgaggcattggccgctggaccaacccccagtaccggcagttcatcaccatcttggaagcaacacatcggaaccagtcttcagaaaacaagaggcagcttgccaactacaactttgacttccggagctggccagtcgacttccactgggaagaacccagcagccggaaggagtctcgagggggcccttcccgccggggtgtggccctgcttcgcccanagcccctgaccgggggacaagcaagacacccttctnaaccgggttaagaagcttgncttgtcagatcaccagctacctggtggcgcacaccctagggcgcccgatgctggattcaggctntggggacctgctgcanaaagcccttatgcctgggcttgttgaagggcaggccccactggtggaaaaatgtaatgggcccccggcnaaacttgttgg

SEQ ID NO: 3478 - DNA, 873 bp, Homo sapiens
  misc_feature (670)..(670): "n" may be a, t, c, g, other or unknown
  misc_feature (805)..(805): "n" may be a, t, c, g, other or unknown
  misc_feature (813)..(813): "n" may be a, t, c, g, other or unknown
  misc_feature (860)..(860): "n" may be a, t, c, g, other or unknown
tcatttgtaatgtaaagatcagttatatatatatatttgtaatgagagcaagtatatactcattatagaatcaatttaagaagtttaaaataacccagagtagaatttctatatctagtcttggtttttttcatgaatatttgcaagtaattaccattaaattcacacatgaaagattaatctgaaagatcagagaccatgttattcctgaccacgatagaactgctcctgtggtttgggacaagtaataaaacaactgcttgagttttgtttgtaaaatacataattaatatttgacctacctcaaaatgtattgaggatctgtgaaatgctaagtgcccaaaataaaatattgctgattgtctttttattaaaagtaaatttcctcattaagccaacctgccttctgtaagtcacagtgcttaaatctcaggatttttcattaggagagacctgtcgttaaggatttgtaggtataattgcttagcctccattattggtgcttgggatagagaggttttagatttttgtttttttttttgttctgcctcaaagctcagtttattgaagacatttgtaagctattggatcatcacttgaatcaagattttgactagtgagcttaattgtccatttcttacaatttcaaagttacagtctcagaaatggntaattttaataactgtcctatcataaattaatgttggaataaattgaagttggtgataaatacttcatgaaaactaaagtctgaaataaattacttggtttatgtccaatagctactaccatttgatagaacagnttttgganggaaccatttcattcttggaaccccagcatctgacatgggtcttcancaagtttggaata

SEQ ID NO: 3479 - DNA, 807 bp, Homo sapiens
  misc_feature (699)..(699): "n" may be a, t, c, g, other or unknown
  misc_feature (805)..(807): "n" may be a, t, c, g, other or unknown
cctttattatacagaagcaggatctatgttttttactctttttgcgtatttgatgtgtctttatggaaatcataaaacttcagccttccttggattttgtggcttcatgtttcggcaaacaaatatcatctgggctgtcttctgtgcaggaaatgtcattgcacaaaagttaacggaggcttggaaaactgagctacaaaagaaggaagacagacttccacctattaaaggaccatttgcagaattcagaaaaattcttcagtttcttttggcttattccatgtcctttaaaaacttgagtatgcttttgcttctgacttggccctacatccttctgggatttctgttttgtgcttttgtagtagttaatggtggaattgttattggcgatcggagtagtcatgaggcctgtcttcattttcctcaactattctactttttttcatttactctctttttttcctttcctcatctcctgtctcctagcaaaattaagacttttctttccttagtttggaaacgtagaattctgttttttgtggttaccttagtctctgtgtttttagtttggaaattcacttatgctcataaatacttgctagcagacaatagacattatactttctatgtgtggaaaagagtttttcaaagatatgaaactgtaaatatttggtagttccagcctatatatttgctggntggagtacagctgactcattgaaatcaaggcaatttttttggaatttaatggttttcatatgcctgggtcactggtataggttcctcagaaactggtgggaattcnnn

SEQ ID NO: 3480 - DNA, 700 bp, Homo sapiens
  misc_feature (644)..(644): "n" may be a, t, c, g, other or unknown
  misc_feature (650)..(650): "n" may be a, t, c, g, other or unknown
  misc_feature (695)..(695): "n" may be a, t, c, g, other or unknown
gtcgccgcgcggccgccggtgagccgcatggagccccgggcggcggacggctgcttcctgggcgacgtgggtttctgggtggagcggacccctgtgcacgaggcagcccagcggggtgagagcctgcagctgcaacagctgatcgagagcggcgcctgcgtgaaccaggtcaccgtggactccatcacgcccctgcacgcagccagtctgcagggccaggcgcggtgtgtgcagctgctgctggcggctggggcccaggtggatgctcgcaacatcgacggcagcaccccgctctgcgatgcctgcgcctcgggcagcatcgagtgtgtgaagctctcgctgtcctacggggccaaggtcaaccctcccctgtacacagcgtcccccctgcacgaggcctgcatgagcgggagttccgaatgtgtgaggcttcttattgacgtcggggccaatctggaagcgcacgattgccattttgggacccctctgcacgttgcctgtgcccgggagcatctggactgtgtcaaagtgctgctcaatgcaggggccaacgtgaatgcggcaaagcttcatgagactgcccttaccacgcggccaaggtcaagaatgttgacctcatcgagatgcttatcgagtttggcggnaacatntaccccgggacaaccgcgggaagaaccgtctgactacacgtggancaaca

SEQ ID NO: 3481 - DNA, 891 bp, Homo sapiens
  misc_feature (669)..(669): "n" may be a, t, c, g, other or unknown
  misc_feature (821)..(821): "n" may be a, t, c, g, other or unknown
  misc_feature (852)..(852): "n" may be a, t, c, g, other or unknown
  misc_feature (854)..(854): "n" may be a, t, c, g, other or unknown
gcatgcgctgtggctaatgccgtaggctccttcagggctgagccatcccgcgtgtcttgcgctcggtggaaatgcccagccgagggacgcgaccagaggacagctctgtgctgatccccaccgacaattcgaccccacacaaggaggatctaagcagcaagattaaagaacaaaaaattgtggtggatgaactttctaaccttaagaagaataggaaagtatataggcaacaacagaacagcaatatattctttcttgcagaccgaacagaaatgctgtctgagagcaagaatatattggatgaactgaaaaaagaataccaagaaatagaaaacttagacaagaccaaaatcaagaaatagtcaacctgatttcacataacaatgtgtggcatttgttgttctgtaaacttttctgctgagcatttcagtcaagatttaaaagaggacttactatataatcttaaacagcggggacccaatagtagtaaacaattgttaaagtctgatgttaactaccagtgtttattttctgctcacgtcctacacttgaggggtgttttgactacccagcctgtggaagatgaaagaggcaatgtgtttctatggaatggagaaatttttagtggaataaaggttgaagctgaagagaatgacactcaaattttgnttaattatctttcctcctgtaagaatgaatctgagattttgtcactcttctcagaagtacaaggtccctggcatttatatattatcaagcatctagtcattatttatgggttggtagggatttttttgggcgccgaaacttgcttttggcantttagtaatttgggccaagaagttctggctntntttaattgggaccccaacattttggattggcaaatca

SEQ ID NO: 3482 - DNA, 877 bp, Homo sapiens
  misc_feature (811)..(811): "n" may be a, t, c, g, other or unknown
  misc_feature (861)..(861): "n" may be a, t, c, g, other or unknown
  misc_feature (865)..(865): "n" may be a, t, c, g, other or unknown
atcttgtcttgttcccgaagaagtagaagcatcgaaagcgttggagaggtgttaccggaacggcggcgacaagggtgttcccgaactagagtggggcatacataatcttgctgctatgcttcgaagctgtagtctgaatcaacctaagttttaaacagaaggtgaacctctgagatagaaaatcaagtatattttaaaagaagggatgtgggatcaaggaggacagccttggcagcagtggcccttgaaccagcaacaatggatgcagtcattccagcaccaacaggatccaagccagattgattgggctgcattggcccaagcttggattgcccaaagagaagcttcaggacagcaaagcatggtagaacaaccaccaggaatgatgccaaatggacaagatatgtctacaatggaatctggtccaaacaatcatgggaatttccaaggggattcaaacttcaacagaatgtggcaaccagaatggggaatgcatcagcaacccccacacccccctccagatcagccatggatgccaccaacaccaggcccaatggacattgttcctccttctgaagacagcaacagtcaggacagtggggaatttgcccctgacaacaggcatatatttaaccagaacaatcacaactttggtggaccacccgataattttgcagtggggccagtgaaccagtttgactatcagcatggggctgcttttggtccacccgcaaggtggatttcatcctccttattggcaaccaggaccttcaggaccttcaacaccttcccagaatcgaagagaaaggcnttatcattcagggtcgcacgttcacctattgactttctgggaagcaggancctnccaaattgccca

SEQ ID NO: 3483 - DNA, 684 bp, Homo sapiens
  misc_feature (644)..(644): "n" may be a, t, c, g, other or unknown
  misc_feature (656)..(656): "n" may be a, t, c, g, other or unknown
  misc_feature (668)..(668): "n" may be a, t, c, g, other or unknown
acacttcagccacagaagggaggggttttccggcatcagggttggcaactgagtcagatggagggaatggctccagccaaaacaactcgggcagcattcgccatgagcttcagtgtgacctgagacgcttctttctggagtatgaccggcttcaggagctggatcagagcctgagtggggaagctccccagacccaacaggcccaggaaatgctcaacaataacattgaatctgagaggccaggcccttcccaccagcccaccccacacagcagtgagaacaactccaacctgtcccgtggccacctgaatcgctgtcgtgcttgccacaatctcctgaccttcaacaacgataccctgcgctgggaaagaaccacacctaactactcctctggcgaggctagttcctcttggcaggtccccagctcctttgagagtgtgccatcaagtggcagccagttgccacctctcgagcggactgagggccaaacgcccagctccagcaggctggagttgagcagctctgctagtccgcaggaggagaggactgtgggggtggcctttaaccaggagacaggccactgggaaagaatttacacccagtccagcagatctggaactgtgtcacaggaggccttacatcangatatgcctgangagagctctgangaggattcactcagga

SEQ ID NO: 3484 - DNA, 732 bp, Homo sapiens
  misc_feature (654)..(654): "n" may be a, t, c, g, other or unknown
  misc_feature (685)..(685): "n" may be a, t, c, g, other or unknown
  misc_feature (696)..(696): "n" may be a, t, c, g, other or unknown
gtcttctcggtcacgttttctgttatatttgcctatgtagctgatgtcactcaggagcacgagcgaagtacagcttatggatgggtctcagccacctttgcggctagtcttgtcagcagcccggccattggagcatatctttctgccagttacggagacagcctcgttgtgctggtggccacagtggtggctcttctggacatctgcttcatcttagtggctgttccagaatctctgcctgagaaaatgagaccggtttcctggggagctcagatttcttggaaacaagcagacccttttgcgtcgttgaagaaagttggaaaagattctactgtcttactaatctgcatcaccgtgtttctttcataccttcctgaagctggacagtattcaagtttttttctctatctcaggcaggtcataggttttggatctgttaaaattgcagcattcatagctatggtaggaattctgtctattgtggctcagacggcctttcttagcatcttgatgagatcattaggaaataagaatactgtcctccttggcttgggcttccagatgctccagttagcctggtacggttttggatcacaggcctggatgatgtgggcagcagggaccgtggctgccatgtccagcatcacgtttccngcaatcagtgccctcgtcactcggaatgcanagtcagatcancaaggagttgcccaggggatcataactggaataaga

SEQ ID NO: 3485 - DNA, 724 bp, Homo sapiens
  misc_feature (674)..(674): "n" may be a, t, c, g, other or unknown
  misc_feature (679)..(679): "n" may be a, t, c, g, other or unknown
  misc_feature (695)..(695): "n" may be a, t, c, g, other or unknown
tcagggagcccttaatgcctcagaaaccacacccaaagaacttcggatcaagagacaaaactcctcagatagcatctcaagcctcaacagcatcactagccattccagcatcggcagcagcaaggatgctgatgcgaaaaagaagaaaaaaaagagttggcttcgaagttccttcaacaaagcgttcagtataaaaaaggggcccaagtcagcttcctcatactcggatatagaggagattgctacacccgactcttcagccccctcatcccccaaactacagcatggttctacagagactgcttcaccctccatcaagtcctccacctcgtcctccgtgggcactgatgtcaccgagggccctgctcacccagccccccacactaggctgttccatgcaaatgaggaggaggagccagagaagaaggaggtatcggagctgcgctctgagctatgggagaaggaaatgaagcttacagacatccgcttggaggccctcaactctgcccaccaactggatcagcttcgggagaccatgcacaacatgcagttggaggtggacctgctgaaagcagagaatgaccgactgaaggtagccccaggcccctcatcaggctccactccagggcaggtccctggatcatctgcattatcttcccacgccgttcctaggnctggnacttacccattccttngggcccagtctttgcagacacagacctgt

SEQ ID NO: 3486 - DNA, 669 bp, Homo sapiens
  misc_feature (583)..(583): "n" may be a, t, c, g, other or unknown
  misc_feature (593)..(593): "n" may be a, t, c, g, other or unknown
  misc_feature (625)..(625): "n" may be a, t, c, g, other or unknown
aagggctactccgggatctacggacccgggttcccctggcgtaggtcggccctcggccgcagggtgaggctgggcatgcagccgggaccccgggcgtcctgtcccgttcctgcgcggcgactgcggccccggcgccctctctgggcagctccgcgcccgcagcctcgcgtctcccgagattgtgcggctgtaagcaacacaggttcgcggcccgactcactgcaccgagacgctgagggctgcagcagaaacagtttaatagccagagaggggaggacaccccagatccgcctccctgagggatttggggtctggacgggggcggctgggtgtagggtcgttggttggtggggaagtgaggggtgaatcctgggacaggaggtgaagaaaccgcattctgctgaatgggctccctcgttgggacttcaacctgattggcgccagcctttgctgggattcaggatctgagaactccggcgactcttgagcagttctcagagatcttatccccaggcacaatggggaagccggcggtcagcgtctgctgtgacctgactctcagggaggcggccccttgaggcancggggctganggcacctggttaatatctaactgcaatctcgncttcagcctgctcgcaattcctgtgaacccggctcatggcttta

SEQ ID NO: 3487 - DNA, 908 bp, Homo sapiens
  misc_feature (718)..(718): "n" may be a, t, c, g, other or unknown
ctattcagtaccaataccaggataacataaaagagctagaattagaagtcatcaatctgcaaaaggaaaaggaagaattggttcttgaacttcagacagcaaagaaggatgccaaccaagccaagttgagtgagcgccgccgcaaacgtctccaggagctggagggtcaaattgctgatctgaagaagaaactgaatgagcagtccaaacttctgaaactaaaggaatccacagagcgtactgtctccaaactgaaccaggagatacggatgatgaaaaaccagcgggtacagttaatgcgtcaaatgaaaggagatgctgagaagtttagacagtggaagcagaaaaaagacaaagaagtaatacagttaaaagaacgagaccgtaagaggcaatatgagctgctgaaacttgaaagaaacttccagaaacaatccaatgtgctcagacgtaaaaacggaggaggcagcagctgccaacaagcgtctcaaggatgctctccagaaacaacgggaggttgcagataagcggaaagagactcagagccgtggaatggaaggcactgcagctcgagtgaagaattggcttggaaacgaaattgaggttatggtcagtactgaggaagccaaacgccatctgaatgacctccttgaagatagaaagatcctggctcaagatgtggctcaactcaaagaaaaaaaggaatctggggagaatncaccttctaaacttcggaggcgtacattctccttactgaaatgcgttggtcaagtttcggagtcagaagattctattccaagcagaattgaagccttaagactgaaatggaattcaggatgctcaaaatggttgcctacacagaaacttgttggatgcagaaagtgaagaccggacccaaacaaccgctg

SEQ ID NO: 3488 - DNA, 860 bp, Homo sapiens
  misc_feature (664)..(664): "n" may be a, t, c, g, other or unknown
  misc_feature (702)..(702): "n" may be a, t, c, g, other or unknown
  misc_feature (795)..(795): "n" may be a, t, c, g, other or unknown
  misc_feature (821)..(821): "n" may be a, t, c, g, other or unknown
  misc_feature (860)..(860): "n" may be a, t, c, g, other or unknown
cactgtatgctgtgtggacatgcatttcatgtggctgtgtggtaagaattacagcttacatatggcttggacccacatccgaggaatctgatgttcacttataccagaacattatcttgctatttatgaaattatttaaacgttcaaaagattgtttttaacatggtttaatttcccaaaaactacagttttttttcttagcatgctattcaggtaaacagtcttataataaagcatgtcccattgtcaagaaacataaagtggtgtgaataccactgaaaatatatatatagtatcttctgtaaataatagtacctgtgtgaataaggaataggcttgcctcccagccaggcaatttcctgagggcacactaatgatatcccctgagttgctaagttgatgctgagacattttgctgggaattagtcatggcatgatctctttcagactccctgaataccatttagtcccgtaacagtgctcacaactcatgtgctaatgaatcacaaaggctttaactagctcccaggttgtagccttcgcaggatctagtttatttgccacatctctttatgaacatatagcgattcgcagatctctctattcacggagaggaaggtgttttgcttctgtagatctcaaggtactattttgtggctctcancaggaagtagaattggtcctaaatgtgtgctgaatgangacatgatgtcccttctggtgccaggacacattctgcatggcattctgtgaaaggcatcctgctgaggataatgccaggagcagcacatttanggtaatttgctaaactttcagatgcntataaattcctcttttcccctgaacttaccattcagagn

SEQ ID NO: 3489 - DNA, 795 bp, Homo sapiens
  misc_feature (757)..(757): "n" may be a, t, c, g, other or unknown
  misc_feature (774)..(774): "n" may be a, t, c, g, other or unknown
  misc_feature (778)..(778): "n" may be a, t, c, g, other or unknown
aatccccgccatgtgggggctcctgctcgccctggccgccttcgcgccggccgtcggcccggctctgggggcgcccaggaactcggtgctgggcctcgcgcagcccgggaccaccaaggtcccaggctcgaccccggccctgcatagcagcccggcacagccgccggcggagacagctaacgggacctcagaacagcatgtccggattcgagtcatcaagaagaaaaaggtcattatgaagaagcggaagaagctaactctaactcgccccaccccactggtgactgccgggccccttgtgacccccactccagcagggaccctcgaccccgctgagaaacaagaaacaggctgtcctcctttgggtctggagtccctgcgagtttcagatagccggcttgaggcatccagcagccagtcctttggtcttggaccacaccgaggacggctcaacattcagtcaggcctggaggacggcgatctatatgatggagcctggtgtgctgaggagcaggacgccgatccatggtttcaggtggacgctgggcaccccacccgcttctcgggtgttatcacacagggcaggaactctgtctggaggtatgactgggtcacatcatacaaggtccagttcagcaatgacagtcggacctggtggggaagtaggaaccacagcagtgggatggacgcagtatttcctgccaattcagacccagaaacttcagtgcttgaaccttctgccggagccccaagtggnccgcttcattcgcctgnttgncccaaaacttggcttca

SEQ ID NO: 3490 - DNA, 844 bp, Homo sapiens
  misc_feature (579)..(579): "n" may be a, t, c, g, other or unknown
  misc_feature (716)..(716): "n" may be a, t, c, g, other or unknown
  misc_feature (797)..(797): "n" may be a, t, c, g, other or unknown
  misc_feature (828)..(828): "n" may be a, t, c, g, other or unknown
  misc_feature (835)..(835): "n" may be a, t, c, g, other or unknown
gttgccatgtttgctctgcccctggggtggaggccagaggagatgcttaccaggcctgagaccttgagagttcacccagggtttgtacgctgccacccagggttcccaaggtttctcccatctggtcagatgtcgaacacaaaatgtgggcattctgcacggaaggaaagatcaggcttctcttgctgagtgtgtgaagacagggagagccaggccccagcagatgcggcctagcacactctgatttggttttgtggggagggcccaggaacttgggggtggtcttggcattcagagctggtgctaaaaacccagagcagaagcagggagaagggagtgaggatgggacagagaagagcgaccactggggatcagaacagcttttcaggggccaccttgcagcctaagataatgccgtttcagggcctgggcctgctgtgagagccagaatgaagcatgtgcaagattggaatgtgagaagaactgtggggggaaaccagttttaattaagtggaagtgctttgtgcttgtgctgaagttgcctgggcctcctgcagctctggacctcactggagcggncccgccctgcccttgcctgcctttcttttatgctgatgctggtgggctttttcctgcttcaggatccatgtaagggactgaccaggttcatccagccttaactggttcctgcaacccacttttaggtcttccaccangggcctattgtgctgtcttcctgtgaccagcagatcctgtaagggggtgatcctaattcttggggctctttgcagcaagangagaacgttctttttcttgaacaaggtgggnccggttnccttgggaa

SEQ ID NO: 3491 - DNA, 902 bp, Homo sapiens
  misc_feature (706)..(706): "n" may be a, t, c, g, other or unknown
  misc_feature (877)..(877): "n" may be a, t, c, g, other or unknown
  misc_feature (880)..(880): "n" may be a, t, c, g, other or unknown
aaatcaacttggattaacctttcagttacctctgccagaactggagatatttcaaggtgaagggaagatttatgaatgtaatcaagttcaaaagttcatcagccacagttcttcagtttcgccacttcaaagaatttactctggggtcaaaacccacatatttaataaacataggaatgattttgttgattttccattgctgtcacaagaacagaaagcacacattaggagaaaaccttacgaatgtaatgagcagggcaaagtcttcagagtgtcttcaagccttcctaatcatcaagtaatccacactgcagataaacctaacagatgtcatgaatgtggtaaaaccgtcagggacaagtcaggcctcgcagaacattggagaattcgtacaggagagaaaccttacaaatgtaaagagtgtggcaagctcttcaatcgaattgcataccttgcacgacacgagaaagtgcatactggagagagtccttacaaatgtaatgagtgtggcaaggtcttcagtcgaattacataccttgtacgacatcagaaaattcatactagagagaaacctcataaatgtaacaaatgtggcaaggtttatagtagcagttcatacctagcacaacattggagaattcatacaggagagaaactttacaaatgtaataaatgtggcaaagaatttagtgggcattcaagcctnaccacccatctgttaatccacactggagagaaaccttacaaatgtaaagaatgtgacaaagcttttaggcacaagtctcctgacagtcatcagagaaatcatatgggagagaaaccttataatgtcatgaatgtggcaaagtctttactcaggttcacatcttgcacgacntcngaaaattcccctggagagaacc

SEQ ID NO: 3492 - DNA, 692 bp, Homo sapiens
  misc_feature (632)..(632): "n" may be a, t, c, g, other or unknown
  misc_feature (669)..(669): "n" may be a, t, c, g, other or unknown
  misc_feature (690)..(690): "n" may be a, t, c, g, other or unknown
acccggcctgccccgcggcaagatggcggcctgaacgcatctggcagcggcggaaagcttagatcagcctttccacagctgttagcagcatctgccccaatttcagctgaagattcaggtgccccagggactggaagaaattacagtgcctacttggaaagaagaagagatagcgacttgccccagtccaaccccagagcgggagctgtggctaaaggaagtggaggggccgtgggatgcggagagccgagggctaactcccggacagcggaacagagagagctgccgacaaacagacgtccagagtccttctggccacatctctgagcctgcctccttcttgcttctcagcaggcggaggagccgtcacctcccagaatgactagtgccgcccctgctaagaaaccctaccgtaaggcaccaccagagcatcgggagctgcgtttggaaattcctggatcccggcttgagcaggaggaacccctgactgatgcagaaaggatgaagctcttacaggaggagaatgaagagcttcgccggcgcctggcctccgccaccagacgcactgaggccctggaacgtgagctggaaattgggcaggactgcctggagctggagctgggccagagccncgaggagctggacaaatttaaggataaagttccgcangctgcagaacagctacacggntt

SEQ ID NO: 3493 - DNA, 739 bp, Homo sapiens
  misc_feature (29)..(29): "n" may be a, t, c, g, other or unknown
  misc_feature (144)..(144): "n" may be a, t, c, g, other or unknown
  misc_feature (163)..(163): "n" may be a, t, c, g, other or unknown
  misc_feature (555)..(555): "n" may be a, t, c, g, other or unknown
  misc_feature (650)..(650): "n" may be a, t, c, g, other or unknown
  misc_feature (722)..(722): "n" may be a, t, c, g, other or unknown
  misc_feature (728)..(728): "n" may be a, t, c, g, other or unknown
acacaatggtgagaagccctatgaatgtnatgaatgtgataaagccttcagtgtgctttcttcccttgttcaacatcagagaatacataatggagacaaaccctatgagtgtcacaaatgtgggaaggcctttagccaggggtnacaccttattcagcatcanaggagtcacattggtgagaaaccctatgagtgtaatgagtgtgggaaaacctttgggcagatatccaccctaattaagcatgagagaacacacaatggagagaagccctatgagtgcagtgactgtgggaaggccttcagccagagtgcacaccttatccaccatcaaagaattcacactggagagaatccctatgagtgcagtgaatgtgggaaggccttcaatgtttgttcctctctcattcagcatcacagaattcatactggtgagaaaccttatgaatgtagtgactgtggcaaggcgttcagtcagcattcacaatttatccaacatcagagaattcacactggagagaaaccctacatgtgcaatgagtgtgagaaatccttcantgcatgcttatcccttatccaacacaagagaattcacactggatagaaaccctatgtatgtgccaaatgtggaaaatccttctgacaaagctctnaccttattcaacatcagagaattcacagtggggagcaacctcatacgtgtaatcgatgttgaaaaaaccttnagtttngagaataactc

SEQ ID NO: 3494 - DNA, 724 bp, Homo sapiens
  misc_feature (660)..(660): "n" may be a, t, c, g, other or unknown
  misc_feature (707)..(707): "n" may be a, t, c, g, other or unknown
  misc_feature (710)..(710): "n" may be a, t, c, g, other or unknown
attctgcaaggccgtggaaacaaagggaggaactgtttgtagccctcgtccagacgccccaaacaaacaatggagaaggaaaggcaagcgacttgtccagagccactctgtcaaaaggggacttgagtcctcagggctgttgactccaaagctgacaagcaggtggcattcttcttcagagcagggcaagtgtaattctggaccaatgtgtgattctgagaccagaccaaccaactgaaggagccaagttacaccctgtttaaccctgccttcaaagggacgactctgtaagattctctgctacttattcaagttgacacgatgcccttcacactccacctgaggtcccgccttccctctgccataaggagtttgattctacaaaagaaaccaaacatcagaaatacatccagcatggctggagagctccgaccagccagcctggtggtcctgcccaggtcccttgctccagcttttgaaagattctgccaggtcaacactggtcctctacccctgctgggccagagtgagccagaaaagtggatgctgccccctcaaggtgctatctcagagaccaggatgggccatccccagttctggaaatacgagttcggtgcctgcaccggtagcctggcttcgctggagcagtactcggagcanctgaaggacatggtggccttcttcctgggctgcagcttctcctggangangccttggagaaagc

SEQ ID NO: 3495 - DNA, 910 bp, Homo sapiens
  misc_feature (671)..(671): "n" may be a, t, c, g, other or unknown
  misc_feature (746)..(746): "n" may be a, t, c, g, other or unknown
  misc_feature (799)..(799): "n" may be a, t, c, g, other or unknown
  misc_feature (829)..(829): "n" may be a, t, c, g, other or unknown
  misc_feature (863)..(863): "n" may be a, t, c, g, other or unknown
  misc_feature (901)..(901): "n" may be a, t, c, g, other or unknown
gtgccacgtcccaagtgctacgcggaggattagagcaggcggtgcgctgggggcgggagcagcgcggagcccggctcggccacaccgatcgcccgccgccatgggctcctcgcaaagcgtcgagatcccgggcgggggcaccgagggctaccacgttcagcgggtacaagaaaattccccaggacacagagctggtttggagcctttctttgattttattgtttctattaatggttcaagattaaataaagacaatgacactcttaaggatctgctgaaagcaaacgttgaaaagcctgtaaagatgcttatctatagcagcaaaacattggaactgcgagagacctcagtcacaccaagtaacctgtggggcggccagggcttattgggagtgagcattcgtttctgcagctttgatggggcaaatgaaaatgtttggcatgtgctggaggtggaatcaaattctcctgcagcactggcaggtcttagaccacacagtgattatataattggagcagatacagtcatgaatgagtctgaagatctattcagccttatcgaaacacatgaagcaaaaccattgaaactgtatgtgtacaacacagacactgataactgtcgagaagtgattattacaccaaattctgcatggggtggagaaggcagcctangatgtggcattggatatgggtatttgcatcgaatacctacacgcccatttgaggaaggaaagaaaatttctcttncaggacaaatggctggtacacctattacacctcttaaagatgggtttacagangtccaacttgtcctcagttaatcccccgtntttgtcaccaccaggaactacaggaattgaaccnaatcttgactggactttctatttacttaactccccagnttgtcaata

SEQ ID NO: 3496 - DNA, 761 bp, Homo sapiens
  misc_feature (657)..(657): "n" may be a, t, c, g, other or unknown
  misc_feature (731)..(731): "n" may be a, t, c, g, other or unknown
  misc_feature (740)..(740): "n" may be a, t, c, g, other or unknown
  misc_feature (757)..(757): "n" may be a, t, c, g, other or unknown
aaaactcttctcagacccgggagcgtccgggacgcggagcccggagctggggcgacgaggcgattgcgggggcctgggctagctgctggctaccaatattctactttctgtctctatgtatgtgactaccctggttacctcatataatctccctggaaaaggagacatgaatgtctgcaatgatacttcctgacaagaagttgatacaagaaaaggaaaggagattaacagctagtgagcagaatttcgaacagcaggatttcgtattttttgcttccaactgcacacttccgtttcccacttttaaatcagagatacctacactcaaaacccagacaaggcaaaaggatacctttcttgtatattttttgagatcgaagaaacgacaatgtccaggaaacagaaccagaaggattcatcaggattcatttttgatttgcagtccaataccgtactggcccagggaggagcttttgagaacatgaaagagaagataaatgcggtacgtgcaatagttcctaataagagcaacaatgaaattatcctggttttgcagcactttgataactgtgtggacaaaacagtacaagcattcatggaaggtagtgccagtgaagtactcaaagaatggacagtaacaggcaagaaaaagaacanaaagaagaaaaacaaacccgaaacctgccgcagaaccaagtaacggcattccagattccagtaaatcaagtttncattcagangaacagtctgcgccttnctca

SEQ ID NO: 3497 - DNA, 893 bp, Homo sapiens
  misc_feature (835)..(835): "n" may be a, t, c, g, other or unknown
  misc_feature (839)..(839): "n" may be a, t, c, g, other or unknown
  misc_feature (881)..(881): "n" may be a, t, c, g, other or unknown
agtcaggacaagatgaaaagaaaaacatccaaaagaagtgaaattggtgacagaatgagaggagcaaagcataccagtgtagtaagtggaatgtttgaatgactttgccaggtcagagcaagtaatatttctgtatctgagtttttgtttgtgttttgataaggctaatgaaattgcattccaggtaggggttaacgtcaaatttccatggctggtagctgtgcttttggcatatcacagtgttgtgtcactactacaaggtaaagcatctacagcggagaatgagcttgaaaatgagagacctattgtgaataaatatgcccatgagagcatatttaataagcctctataacatgcagccaaaccagacattcactcctgcagagaaatgttgccctggagaaaaagagatatataaagataggctatcacccttcttttgctgcagtactaagcatagcaagaaattagaatcatttacattggaaatttgaaaattccctttatatacacaactttactgtgtataaataaaaaatatttattaatgcagtgatgtccgtcaggttgttttaggaatggcttctgcaattagaaaaatagcttgctagaatgtaaatgttctgttactggtaaatgtactgcacacattcattggcgttaaaacaagtgagtagccttttttacctgccagcagcatggcttgtgtgcagccactaggctgagacaataaattaccaaaaattataatgtccgagctgaaaatgctcagtacattatgtggcatattctggatgtgatgagaaatctcattggcatttgggacactggcatnccanaagtaatccacactgctttgcaaaagcaaagtgactggtcanattgaccggacc

SEQ ID NO: 3498 - DNA, 827 bp, Homo sapiens
  misc_feature (648)..(648): "n" may be a, t, c, g, other or unknown
  misc_feature (764)..(764): "n" may be a, t, c, g, other or unknown
  misc_feature (783)..(783): "n" may be a, t, c, g, other or unknown
  misc_feature (796)..(796): "n" may be a, t, c, g, other or unknown
gtactaccttcggtctaggcagcggaggcagccgcgaccccaggaaaccgaggaaatgaagacgcgaaggactacccgccttcagcagcagcactcagagcagcctccgctacagccgtctcctgttacgaccaggagagggctgcgggactctcattcctctgaagaggatgaagcatcttcccaaactgatttaagccaaacgatctcaaagaaaactgtcaggagcatacaagaggctccagtgagtgaagatcttgtaatcaggttacgtcgaccccctctaagatgcccaagatatgaagccaccagtgtccaacagaaggtcaatttctctgaagaaggagaaactgaagaagatgatcaagacagctctcacagcagtgtcactactgttaaggccagatccagggattctgatgaatctggagataaaaccaccagatcatctagtcaatatatagaatcattttggcagtcatcacaaagtcaaaacttcacagctcatgataagcaacgttcagtgctaagctcaggatatcaaaaaactccccaggaatgggccccacaaactgcaagaataaggaccaggatgcaaaatgacagcattctgaaatcagagcttggaaaccagtcaccatcaacctncagccgacaagtgactggacaaccccaaaatgcatcttttgtcaagaggaaccggtggtggctacttcctctgatagctgctcttgcctctgggagtttttgggtctttagtactnctgaggtagaaaccactgntggtcaagagttncagaacccgatgaatcaacttaagaataagt

SEQ ID NO: 3499 - DNA, 681 bp, Homo sapiens
  misc_feature (541)..(541): "n" may be a, t, c, g, other or unknown
  misc_feature (633)..(633): "n" may be a, t, c, g, other or unknown
  misc_feature (650)..(650): "n" may be a, t, c, g, other or unknown
  misc_feature (670)..(670): "n" may be a, t, c, g, other or unknown
agtgtgccaggctggaggcggcagcggttggaggcttcgcccggctttgcagcggggacttcggcggcggcgcctcaggcacctcggcccggacacgatgaggcgagtggtacgacagagcaagtttcggcatgtatttgggcaagcggtgaaaaatgaccagtgctatgatgacatccgggtttctcgtgtgacctgggatagttccttttgtgctgtcaatcccagatttgttgccataatcatagaggcaagtgggggaggagcgttccttgtcctccctctgcacaagactggtcgaattgacaaatcttaccctacagtatgtggccacacaggaccagtgctggacatagactggtgcccacataacgatcaggtcattgccagcggttcagaggactgcacggtcatggtatggcagatcccataaaatggactcaccctttccctgactgaacctgtggtgattttggaaggccactcaaagagagtcggcatcgtggcttggcatccaacggcccgcaatgtgcttcttagngcaagctgtgataatgccattatcatctggaatgtgggaacaggggaagcccttataaacttggacgatatgcattcagacatgatttacantgcgagctggaacccgnaatggcaggtctgatctgcncagcttccaaa

SEQ ID NO: 3500 - DNA, 774 bp, Homo sapiens
  misc_feature (624)..(624): "n" may be a, t, c, g, other or unknown
  misc_feature (715)..(715): "n" may be a, t, c, g, other or unknown
  misc_feature (723)..(723): "n" may be a, t, c, g, other or unknown
  misc_feature (746)..(746): "n" may be a, t, c, g, other or unknown
gacaccagtagcttccagggatatttgaggcaccatccctgccattgccgggcactcgcggcgctgctaacggcctggtcacacgctctccagagagctacgggagggcgctgggtaacctctatccgagccgcggccgcgaggaggagggaaaaggcgagcaaaaaggaagagtgggaggaggaggggaagcggcgaaggaggaagaggaggaggaggaagaggggagcacaaaggatccaggtctcccgacgggaggttaataccaagaaccatgtgtgccgagcggctgggccagttcatgaccctggctttggtgttggccacctttgacccggcgcgggggaccgacgccaccaacccacccgagggtccccaagacaggagctcccagcagaaaggccgcctgtccctgcagaatacagcggagatccagcactgtttggtcaacgctggcgatgtggggtgtggcgtgtttgaatgtttcgagaacaactcttgtgagattcggggcttacatgggatttgcatgacttttctgcacaacgctggaaaatttgatgcccagggcaagtcattcatcaaagacgccttgaaatgtaaggcccacgctctgcggcacangttcggctgcataagccggaagtgcccggccatcagggaaatggtgtcccaattgcacgggaatgctacctcaagcacgactgtgcgccgnttgcccangagaacacccgggtgatatgganatgatccatttcaaggactttgttgctt

SEQ ID NO: 3501 - DNA, 790 bp, Homo sapiens
  misc_feature (735)..(735): "n" may be a, t, c, g, other or unknown
  misc_feature (764)..(764): "n" may be a, t, c, g, other or unknown
  misc_feature (783)..(783): "n" may be a, t, c, g, other or unknown
ctgagtctttcggcctgggtggaggacgcggctgcttcaagtccttggctctgatccaggccacagattccaggattctacaggcaggaaacatcttagaaatcagggttgggcaggcaggagccaggagagtagctacaatgacttcaccagtactggtggacatacgagaagaggtgacctgccctatctgcctggagctcctaacagaacccctgagcatagactgtggccacagcttctgccaagcctgcatcacaccaaatggcagggaatcagtgattggtcaagaaggggaaagaagctgccctgtgtgccagaccagctaccagccagggaacctgcggcctaatcggcatctggccaacatagtgaggcggctcagagaggtagtgttgggccctgggaagcagctgaaagcagttctttgtgcagaccatggagaaaaactgcagctcttctgtcaggaggatgggaaggtcatttgctggctttgtgagcggtctcaggagcaccgtggtcaccacacgttcctcgtggaggaggttgcccaggagtaccaggagaagtttcaggagtctctaaagaagctgaagaacgaggagcaggaagctgagaagctaacagcttttatcagagagaagaagacatcctggaagaatcagatggagcctgagagatgcaggatccagacagagtttaatcagctgcgaaatatcctagacagagtggaancaaccgggagctgaaaaagcttggaacanggaagagaagaaggggctnccaattt

SEQ ID NO: 3502 - DNA, 748 bp, Homo sapiens
  misc_feature (730)..(730): "n" may be a, t, c, g, other or unknown
  misc_feature (732)..(732): "n" may be a, t, c, g, other or unknown
  misc_feature (736)..(736): "n" may be a, t, c, g, other or unknown
tttagcagtctgtgatgatcagcaaaaaagcacataaagtaaaaattagttgaccatgctaaattcaattctggaatttttttttatttgggcatttctagaactttttacatttgaaagtacatgatgagtattagtaacgatgacttatgtataatcagaatctttatgacaatttagttttacaaggtcaaaagagatgagtttgctaaacccagctgtgatacctcagttggaaagggaattcaaaggtatgctttgtagaacagaaaagtatagtttttttttcatgaactttaatcattttctgtttttcctctatgtgagtcagctacaaaagtggtctaatttttacaacagtagaacttcctccttttctactgtaatcttcccactgactttactgcacaggtatgaaatactagtgtattggatcttcagtaacctttttatttcctagatgattgaaatataggtatttactccatttaaaccaggtgataagatgatgtaaatactcagggagggtattaacttgttacttttgctcgtttggggtgtaaagtgccatgactgaataatcttcaattcatgattctagagtaagtttaatttggaaaaaggggcttcacacatggtgggtggttgaacattggattcttttatcttaaaaaggatgaaaaatgttttgggggactgatcattttatcttactggaatatgaattggntnatgnatctctactggc

SEQ ID NO: 3503 - DNA, 717 bp, Homo sapiens
  misc_feature (674)..(674): "n" may be a, t, c, g, other or unknown
  misc_feature (707)..(707): "n" may be a, t, c, g, other or unknown
  misc_feature (709)..(709): "n" may be a, t, c, g, other or unknown
cccgggacgtttggtgcgtcttctaagggcgtgggcgagtttacgcgggccagttgttgctggtcgcatgggagctgctgctaaataatttctgctcagccatgtcgccggctccagatgcagccccggctcctgcgtcgatctccctgtttgacctcagcgcggatgctccggtctttcagggcctgagcctggtgagccacgcgcctggggaggctctggcccgggctccgcgtacttcctgttcaggctcaggggagagagaaagcccagaaagaaagctactccagggtcctatggatatttcagagaagttattttgttcaacttgtgaccagaccttccagaaccaccaagaacagagggaacattataagcttgactggcatcggtttaacctaaagcaacgtctcaaggacaagcctctcctgtctgccctggactttgaaaagcagagctccacaggagatctttccagcatctcgggatcagaagactcagactcagccagtgaggaggacttgcagacactggatcgggagagggctacatttgagaagttgagccgacccccaggcttttaccctcatcgagttcttttccagaatgcccagggccagtttctttatgcctaccgctgtgtcctaagccctcatcaggatcccccagaagangcagaactgctgctacagaacctgcaaaagtanangtcccaga

SEQ ID NO: 3504 - DNA, 693 bp, Homo sapiens
  misc_feature (644)..(644): "n" may be a, t, c, g, other or unknown
  misc_feature (674)..(674): "n" may be a, t, c, g, other or unknown
  misc_feature (683)..(683): "n" may be a, t, c, g, other or unknown
cacatccgggagtcgctgccggccctacgtagcaaactacagagccagctgctgtccctggagaaggaggtggaggagtacaagaactttcggcccgacgaccccacccgcaaaaccaaagccctgctgcagatggtccagcagtttggggtggattttgagaagaggatcgagggctcaggagatcaggtggacactctggagctctccgggggcgcccgaatcaatcgcatcttccacgagcggttcccatttgagctggtgaagatggagtttgacgagaaggacttacgacgggagatcagctatgccattaagaacatccatggagtcaggacggggctcttcacccccgacatggcctttgaagccattgtgaaaaaacagattgtaaaactcaaagagccgagtttgaagtgtgttgatctcgtggtctcagagctggccacggtcataaaaaagtgtgccgagaagctcagttcctacccccggttgcgagaggagacagagcgaatcgtcaccacttacatccgggaacgggaggggagaacgaaggaccagattcttctgctgatcgacattgagcagtcctacatcaacacgaaccatgaggacttcatcgggtttgccaatgcccagcagangagcacgcactgaacaagaagagagccatncccaatcangtgatccgca

SEQ ID NO: 3505 - DNA, 851 bp, Homo sapiens
  misc_feature (733)..(733): "n" may be a, t, c, g, other or unknown
  misc_feature (744)..(744): "n" may be a, t, c, g, other or unknown
  misc_feature (838)..(839): "n" may be a, t, c, g, other or unknown
  misc_feature (850)..(850): "n" may be a, t, c, g, other or unknown
gacggcgggtgcccgcgcctcagagttactgatttattcttgagattcctctactctcgttatctgacctcatggatgaacttcaggatgttcagctcacagagatcaaaccacttctaaatgataaggaacatgatatagaaacaactcatggtgtggtccacgtcactataagaggcttacccaaaggaaacagaccagttatactaacatatcatgacattggcctcaaccataaatcctgttccaatgcattctttaactttgaggatatgcaagagatcacccagcactttgctgtctgtcatgtggatgccccaggccagcaggaaggtgcaccctctttcccaacagggtatcagtaccccacaatggatgagctggctgaaatgctgcctcctgttcttacccacctaagcctgaaaagcatcattggaattggagttggagctggagcttacatcctcagcagatttgcactcaaccatccagagcttgtggaaggccttgtgctcattaatgttgacccttgcgctaaaggctggattgactgggcagcttccaaactctctggcctgacaaccaatgttgtggacattattttggctcatcactttgggcaggaagagttacaggccaacctggacctgatccaaacctacagaatgcatattgcccaagacatcaaccaagacaacctggagctcttcttgaattcctacaatggacccanagaccctgganaccgaaagaccccatactggggcccaaaatggttacccaatcaaaaacctttaaaggggtctacctttacctggggggtagggggacaaatttnncctgcaatttna

SEQ ID NO: 3506 - DNA, 692 bp, Homo sapiens
  misc_feature (569)..(569): "n" may be a, t, c, g, other or unknown
  misc_feature (639)..(639): "n" may be a, t, c, g, other or unknown
  misc_feature (662)..(662): "n" may be a, t, c, g, other or unknown
  misc_feature (690)..(690): "n" may be a, t, c, g, other or unknown
taggagaattacacatatctcaggtactttagaagatgaagatgaagatgaagataatgatgacattgtcatgctagagaaaaaaatacgaacatctagtatgccagagcaggcccataaagtctgtgtcaaagagataaagagactcaaaaaaatgcctcagtcaatgccagaatatgctctgactagaaattatttggaacttatggtagaacttccttggaacaaaagtacaactgaccgcctggacattagggcagcccggattcttctggataatgaccattacgccatggaaaaattgaagaaaagagtactggaatacttggctgtcagacagctcaaaaataacctgaagggcccaatcctatgctttgttggccctcctggagttggtaaaacaagtgtgggaagatcagtggccaagactctaggtcgagagttccacaggattgcacttggaggagtatgtgatcagtctgacattcgaggacacaggcgcacctatgttggcagcatgcctggtcgcatcatcaacggcttgaagactgtgggagtgaacaacccantgttcctattagatgaggttgacaaactgggaaaaagtctacagggtgatccacagcagctctgcttgangtgttggatcctgaacaaaaccnttacttcacagatcattatctaaatggngg

SEQ ID NO: 3507 - DNA, 681 bp, Homo sapiens
  misc_feature (629)..(629): "n" may be a, t, c, g, other or unknown
  misc_feature (637)..(637): "n" may be a, t, c, g, other or unknown
  misc_feature (646)..(646): "n" may be a, t, c, g, other or unknown
ttgttaactttgtcaaagatcaggttgttgtaggtttttggctttatttctaggttctctactttgtttcatttgtctatgtgtctgtttctataccagtaccatgctgtttttgttactgtactcttctagtatagtttgaagttaggtagagtgacacttccagcttttttttttttttcttaaggttggcttggctatttgggctcttttttggttccatatgaactttaaaagtttttatttttctaattctctgaagaatgtcagtagttcaatgggaatagcattgaatctatgaattacttagggccatatgcccatattcatgatactgattcttcctctccatgagcatggaatatttctccatctgttttgtgtccactctgatttctctgagcagttgtttgtggttctccttgaagaggtccttcactttctttcttagctgtattcctaggtatttttttctctttgtagcaaatgtgaatgaaagttcattcatgatttgtctccctgcttgcctgttgtttgtgcatgggaatgctagctacttttgcacattgattttatatcctgagattttgctactggtgcttatcaccttaagaagctttgggcctganacaatgangttttctanatgtaggatcaggtcatctgcaaacaaagataatt

SEQ ID NO: 3508 - DNA, 702 bp, Homo sapiens
  misc_feature (623)..(623): "n" may be a, t, c, g, other or unknown
  misc_feature (664)..(664): "n" may be a, t, c, g, other or unknown
  misc_feature (688)..(688): "n" may be a, t, c, g, other or unknown
atatggagaagagccaagaggagatggatcaagcattagcagaaagcagcgaagaacaggaagatgcactgaatatctcctcaatgtctttacttgcaccattggcacaaacagttggtgtggtaagtccagagagtttagtgtccacacctagactggaattgaaagacaccagcagaagtgatgaaagtccaaaaccaggaaaattccaaagaactcgtgtccctcgagctgaatctggtgatagccttggttctgaagatcgtgatcttctttacagcattgatgcatatagatctcaaagattcaaagaaacagaacgtccatcaataaagcaggtgattgttcggaaggaagatgttacttcaaaactggatgaaaaaaataatgcctttccttgtcaagttaatatcaaacagaaaatgcaggaactcaataacgaaataaatatgcaacagacagtgatctatcaagctagccaggctcttaactgctgtgttgatgaataacatggaaaagggtccctagaagaagctgaagcagaaagacttcttctaattgcaactgggaagagaacacttttgattgatgaattgaataaattgaagaacgaaggacctcanaggaagaataaggctagtccccaaagtgaatttatgccatncaaaggatcagttactttgtcagnaaatccgcttgcct

SEQ ID NO: 3509 - DNA, 597 bp, Homo sapiens
  misc_feature (374)..(374): "n" may be a, t, c, g, other or unknown
  misc_feature (578)..(578): "n" may be a, t, c, g, other or unknown
  misc_feature (585)..(585): "n" may be a, t, c, g, other or unknown
  misc_feature (595)..(595): "n" may be a, t, c, g, other or unknown
aaactgggaaagttgctgggccagctcctttgtttccagtctgagcgttgcgttcggtttcccgagggtcttctgaggcaccgcggctgcgggcttctgagttcccggctctccgcagggaagcctcctcttcgtacctcgttttttggctcgtggggggtcctcccaccgctggccgacgcagccagcatgtccggggtgcgcgcagtgcggatcagcatcgaatcggcctgcgagaagcaggtccatgaggtgggcctggatggcaccgagacgtacctgcccccgctgtccatgtcgcagaatctggcgcgtctggcccagcggatagacttcagccagggttcgggctccgaggaggaggaggcggcggngaccgagggggacgcgcaggactggccgggcgccgggtccagcgcagaccaggacgacgaggaaggagtggtaaaatttcagccttccctttggccttgggactcagtgaggaacaatttgagaagtgccctgacagagatgtgtgttctctatgatgttctcagtattgttagggataaaaaatttatgactcttgatcctgnctctcangatgcacttnct

SEQ ID NO: 3510 - DNA, 621 bp, Homo sapiens
  misc_feature (507)..(507): "n" may be a, t, c, g, other or unknown
  misc_feature (593)..(593): "n" may be a, t, c, g, other or unknown
  misc_feature (605)..(605): "n" may be a, t, c, g, other or unknown
  misc_feature (616)..(616): "n" may be a, t, c, g, other or unknown
aacaatggagctgctgcaggatgtgagtgatgtcacagaaaggagtgagttctggaccctgaggaagccagaagctctccctacaaagctgagaagtatgttccgagccccagatctgaaaaggatgctgcgagtgtgtagaggggagatgaaatggccaggtgacatcctcacaggattcctcaccattcccctcaatgtagtaaggagagagataccagacatgagacagttggtcctattcaacattattgactcttttcatcattacagagctgacagatgtccaaagctactgggttgacgtgaccctgaatccacacacagctaatttaaatcttgtcctggctaaaaaccggagacaagtgaggtttgtgggagctaaagtatctggaccttcctgtctggaaaagcattatgactgtagtgtcctgggctcccagcacttctcctctggtaagcattactgggaggtagatgtggccaagaagactgcctggatcctangggtatgcagcaattcactgggacctacattctctttcaaccattttgctcaaaatcacagtgcttactccaggtatcagcctcanagtggatactgngtgaatggggntacag

SEQ ID NO: 3511 - DNA, 774 bp, Homo sapiens
  misc_feature (712)..(712): "n" may be a, t, c, g, other or unknown
  misc_feature (716)..(716): "n" may be a, t, c, g, other or unknown
  misc_feature (722)..(722): "n" may be a, t, c, g, other or unknown
actcaggacccagcgggggcagcgcgatgaggcgggtgaccctgttcctgaacggcagccccaagaacggaaaggtggttgctgtatatggaactttatctgatttgctttctgtggccagcagtaaactcggcataaaagccaccagtgtgtataatgggaaaggtggactgattgatgatattgctttgatcagggatgatgatgttttgtttgtttgtgaaggagagccatttattgatcctcagacagattctaagcctcctgagggattgttaggattccacacagactggctgacattaaatgttggagggcggtactttacaactacacggagcactttagtgaataaagaacctgacagtatgctggccctcatgtttaaggacaaaggtgtctggggaaataagcaagatcatagaggagctttcttaattgaccgaagtcctgagtacttcgaacccattttgaactacttgcgtcatggacagctcattgtaaatgatggcattaatttattgggtgtgttagaagaagcaagattttttggtattgactcattgattgaacacctagaagtggcaataaagaattctcaaccaccggaggatcattcaccaatatcccgaaaggaatttgtccgatttttgctagcaactccaaccaagtcagaactgcgatgccagggtttgaacttcagtggtgctgntctntctcgnttggaccttcgatacattaacttcaaaatggccatttaaccgttgaatcttg

SEQ ID NO: 3512 - DNA, 873 bp, Homo sapiens
  misc_feature (793)..(793): "n" may be a, t, c, g, other or unknown
  misc_feature (829)..(829): "n" may be a, t, c, g, other or unknown
  misc_feature (871)..(871): "n" may be a, t, c, g, other or unknown
gctgtgaggctcggagtcgccggaggagccagtatctgtgtcgccgccgcccgcggcgtccccggtttggtgctgcggcgcccaccttcgggaggatcagtatctggcaccaattctgacccagtcatttgtgatccctggctcttgtgatatgctgaagatttccaggcagtttttgtggaacacctccccgtccagctctaatcaagcaccatataaacaagaaattgcctggtcaaatctgtgaggactgtattctgactgccaaagagatcaatactgacaccagaatggcagctactctcaagtcattaaaacttgtaagataccgagcattttgcagtccttctgcctttggtgcagtccgaagtgtgtcatactggaatgtgagcagcacacagcatgggggacaggaccctccagaacacattagcctctgccattctgccaaaaaagttaagaacatatgtagcaccttctcttctcggagaatcctgacaaccagcagtgcccacccaggtttggaattcagcaagacttcttcctctaaggccagtacattgcagctgggctcacccagggccacaggagttgatgaagaggacgtagaagtgtttgattcctttgaaaacatgcgagttttcctacagctaagaccagaataccgtgttcacagctataatgcatctgagacttctcagctcctgtctgtttcagaaggtgaactaattttgcacaaagtcagagttaatcaaaataatcttcaggctcaaagtcattggtgattatttgngtaaagctgagctctttgccttgcagagcaacattnctgtcttgcttggcaatacccagctttgcttcttgcttttgncc

SEQ ID NO: 3513 - DNA, 879 bp, Homo sapiens
  misc_feature (664)..(664): "n" may be a, t, c, g, other or unknown
  misc_feature (852)..(852): "n" may be a, t, c, g, other or unknown
  misc_feature (864)..(864): "n" may be a, t, c, g, other or unknown
  misc_feature (868)..(868): "n" may be a, t, c, g, other or unknown
acttaaatataagtttattctaactaatcccaatatgtggcctcaaaacataagtccataaatgtcatttctaagattattttacataaatactcaaatttgttgtcatttttgtagccaaagctaagtagaggatggggcctgtgaatttagaaccatcctagtgataaatatcaaatatttagataaaaacctaaatatttacccctctagctttatggagccattaaataataacatttttctccttctcttcatagagtttatagacaaaactagaaaattcaggtatttggtatatacttttttgttttttttgataccatcttggtcttgtcacccaggctgtagtgcagtggcgtgatctcggctcattgcaacctccgcttcccgggctcaagcgattcccctgtcccagcctcctaagtagctgggactacaggcacatgccaccacgcctggctaattttttgtatttttagtagagacggggtttcaccatgttggccaggttggtcttgatctcctgacctcatggtctgcccgcctcggcctccctaagtgttgggattatggctgtaagccatgtcatttcactctcttaatggtgtcttttggtgaaaagaagttcataatttcatgtagtccagtttatccattttgntttctatatgtttagcagttttttgtgtcctgtttagaaaatttttgcctattccaaaatcatgaaatttaagttcttcacccctgttgaaattataatattaaggcagaaaagactcttcattctgatctggtgggttcttagccttttgcaagtccaggaaccctgtgaaaatctgactagaactntggacgccctgnacanaagtgcaccct

SEQ ID NO: 3514 - DNA, 892 bp, Homo sapiens
  misc_feature (697)..(697): "n" may be a, t, c, g, other or unknown
  misc_feature (851)..(851): "n" may be a, t, c, g, other or unknown
  misc_feature (858)..(858): "n" may be a, t, c, g, other or unknown
  misc_feature (870)..(870): "n" may be a, t, c, g, other or unknown
caccgtccggcagactactctcccccatggcggacttcgctgggccgtcttctgccggccgcaaggccggggctccccgctgctctcgaaaagccgcaggtactaaacagacaagtactttgaaacaagaagatgcttctaaaaggaaagctgaactagaagcagctgtgagaaagaagattgaatttgagagaaaagctctacatattgttgaacagcttttagaggagaatattacagaagagttcctaatggagtgtgggaggttcattacacctgctcactacagtgatgtcgtggatgaacgttctattgtcaaactctgtggttatcctttatgtcagaagaagctgggaattgtaccaaaacagaaatataaaatttctaccaaaaccaataaagtctatgatattactgaaagaaagtctttttgcagcaatttttgttatcaagcatctaagttttttgaagcacaaattcccaaaactccagtatgggttcgagaagaagagaggcatcctgattttcaactgctaaaggaagaacaaagtggccattctggagaagaagtacagttatgcagtaaagccattaaaacatcagatatcgacaatcctagccactttgaaaagcaatatgaatctagttcttctagcactcacagtgatagtagcagtgacaatgagcaagactttgnttcctccattctaccaggaaacagaccaaattcaacaaatattagaccacagctgcaccaaaaaagcataatggaaaaagaaagctggtcacaaagctaacttccaaacaccaaggaccaaggaacaggacagtagtagatgtcacttgaccanttaggcnaattgcaaattngatagtcagggagaaaagatgc

SEQ ID NO: 3515 - DNA, 786 bp, Homo sapiens
  misc_feature (649)..(649): "n" may be a, t, c, g, other or unknown
  misc_feature (670)..(670): "n" may be a, t, c, g, other or unknown
  misc_feature (756)..(756): "n" may be a, t, c, g, other or unknown
  misc_feature (765)..(765): "n" may be a, t, c, g, other or unknown
  misc_feature (776)..(776): "n" may be a, t, c, g, other or unknown
aatggtcctctacagatatgaaactggttctggagtgagatgagctcggctggggacgctacttgagaaggcctttccccacagggtgacttaaatgtcccaggctggagggtggagtgagaagtggatgcccccagggctctgggtcacactccaggatgacttctcggaaccagctggtgcagaaggtgctgcaggagctgcaggaagcagtggagtgcgaaggcctggagggtctcataggtgcttccttggaggccaagcaggtcctgtcttccttcactctccccacctgccgggagggaggccctggcctccaggtgctggaagtggactcggtggccctgagcctgtatccagaagatgctccacggaacatgctgccgctggtgtgcaagggggagggcagcctgctgttcgaggcggccagcatgctgctgtggggtgacgcaggcctcagcctggagctgcgggcccgcaccgtggtagagatgctgctgcacagacactactacctccagggcatgatcgactccaaagtgatgctgcaggccgtgcgctactccctatgctctgaggagtcccctgagatgaccagcttgccccccgccacgctggaggccatcttcgatgccgacgtcaaggcctnctgtttccccagcagcttctncaacgtgtggcacttgtatgctctcgcctctgccttcagcggaacatctacttcatctaccccatccgcaaccttcaagatccggnccttacttnaaccgggtcantccgggcccc

SEQ ID NO: 3516 - DNA, 849 bp, Homo sapiens
  misc_feature (778)..(778): "n" may be a, t, c, g, other or unknown
  misc_feature (802)..(802): "n" may be a, t, c, g, other or unknown
  misc_feature (815)..(815): "n" may be a, t, c, g, other or unknown
ctataatcagtataaaaacctgttactgaaatattttatagggcccatctcagttcagactagccacatttaagtgcttcatagccacatgtggctcatggccatccatatttggacaatgtactttagactattgcatctgtatactcttgtgccgtcagctggggggtggggtgtgtgtgcgtgtataccaaggcagtgagcatctgagctttgaacctcaaagaccaaaatgccctgcccattttcctgcttatcagctgaggaatctttacccacattgacacatgggcttgttctgacccaagtgcatgcaggcttccagagcagattcagaggcctaacttagtcctttagctttcctcccagcacagaactcccaaggttatctgaagtaggccttgcctagagagactgagttttcaagttgtcagttttcccaaattgtcctcaagcatcttcctctggaatcaccttactgtttagtaaacattcagaggacttgctacacatctgggcagtctgcattgtaattcatatgtgtttacacatttgtgtcttcatctgctaaagcacctttgaaccatattgtaattcataatatctgaagcaattattatgaattgtagtaattcataatattgaagcgattcataatatctgaagcaatccccagatacgggttaggcatggccctgctctgagcaggatggcaaaagtggcaagtccgtgacgcaacccttggtaccccaggctattactaaatggtggtggtggntttatcttaattaaaaatgacatnaccaacaatgggnccttttcctggctggccaggaaaaagtttttgta

SEQ ID NO: 3517 - DNA, 857 bp, Homo sapiens
  misc_feature (722)..(722): "n" may be a, t, c, g, other or unknown
  misc_feature (766)..(766): "n" may be a, t, c, g, other or unknown
  misc_feature (831)..(831): "n" may be a, t, c, g, other or unknown
  misc_feature (849)..(849): "n" may be a, t, c, g, other or unknown
catgttggacgtggtcagcacaggggccggcaccacggggttatcgaagcagctgtcaagatgctggggtccctggtgttgaggagaaaagcactggcgccacggctactcctccggctgctcaggtccccaacgctccggggccatggaggtgcttccggccggaatgtgactactgggagtctcggggagccgcagtggctgagggtagccaccggggggcgccctggaacatcgccggccttgttctccggacgtggggcagccaccggggggcgccagggaggacgcttcgataccaaatgcctcgcggctgccacttggggacgccttcctggtcccgaagaaacactcccaggacaggacagctggaacggggtccccagcagggccggactgggcatgtgcgccctggccgcagcgctggtggttcattgctacagcaagagtccgtccaacaaggatgcagccctgttggaagctgcccgtgccaacaatatgcaagaagtcagcaggctgttgtcagaaggtgcagatgtcaatgcaaagcacagacttggctggacagcactcatggtggcagccatcaaccgaaacaacagtgtggtacaggtcctgcttgctgctggggctgatccaaaccttggagatgatttcagcagtgtttacaagacttgccaaggaacagggaatccattctttggaggtcctgatcacccganaggatgacttcaacaacaggctgaacaaccgggccagttttaanggcttgaacggccttgcactatgctggtctttgctgatgactaccggacttggcaaggaacttgnttgatggaagaacccaanccccttgc

SEQ ID NO: 3518 - DNA, 826 bp, Homo sapiens
  misc_feature (750)..(750): "n" may be a, t, c, g, other or unknown
  misc_feature (789)..(789): "n" may be a, t, c, g, other or unknown
  misc_feature (797)..(797): "n" may be a, t, c, g, other or unknown
ctttcacttcagggagtctgaattagatgcgcttcttcccattcctccctctaattacaacaagcttggacgttacatacagaacaaacagaaggagtctctgaaagatgaagagaaggcaagtaagctacagacttcacaatgtaaggaataatatggtggtgagttacatttgtgatttttttttgtctcatatcccataatatctcatatctcataatcagttagaaagcacaatggaaaagtattccactgccaatggtgttagagaactgctcacaaattcaacagaaatgcacagataccaaagcagaaaggacaataaacaagagtcttcatggtcaaaagattagaagctgcagctttcaatgggagggacaggttctggaccacactgcagtgcttttctgctttctgtgctttcccactctagagctgaagaaggtaacgaccccaaaatgtcaatatacgtagaccaaaaaccagccccaataaaagtctgctctctctagccaaaggactacagtagggcagcccagcaagacagaaaaccttcagacaacctaccccagccaaacactaccaaaaaaagtaaagtgagccatcacccaatccacatcagtaaaaactaagtggaaagtccagactttcacctcaagaggttgcgacaagctactccaatacccctgctgggatagtgtcacagaaggctaaataaggagctgtaatggtgattccccttcagaagtnaagagtccgtacctgctattttcagagagaccacatggnaagcctanatttcaacacctacccagcattaatgagg

SEQ ID NO: 3519 - DNA, 894 bp, Homo sapiens
  misc_feature (656)..(656): "n" may be a, t, c, g, other or unknown
  misc_feature (722)..(722): "n" may be a, t, c, g, other or unknown
  misc_feature (765)..(765): "n" may be a, t, c, g, other or unknown
  misc_feature (837)..(837): "n" may be a, t, c, g, other or unknown
  misc_feature (853)..(853): "n" may be a, t, c, g, other or unknown
  misc_feature (892)..(892): "n" may be a, t, c, g, other or unknown
gtgaacgggttgtgggacctgtcgctgtgtgggggctgtcgagcactccccagaacgtaacaaatcctcaggggaactgatgggcggtcgcgcgggcactgggtcctccacaccctggagagccgttttccgttgccactcggctctggccggggtcacattctgcagcatgtctgttcattcccctgggcggggccctgcaccgactccagcccagcccctgctccctctgcggggaacgtggccccaggcagtgctgggccattggctgtcagtgctggtcctggcggctgcattcccagtccccttggtctctgtgacagtgggcggggccggccctcccaggatctgacggcgcaggtcctccccttctgtgtcctgcagatggacacccgctccgggagccagtgttccgtcaccccagaagccatactcaataatgaaaagctggtcttgccgccccgcatctccagagtgaacggctggtcgttacccctgcactacttccaggtggtgacctgggctgtcttcgtgggcctttcctcggccaccttcgggatcttcattcccttcctgcctcacgcgtggaaatacattgcctacgtggtgaccggggggatcttctcgttccacctcgtcgtccacctgatcgcgtnctgcatcgacccggccgacttcaatgtcagactcatgaagaactattctcagcccatgccctcttngacagatcaaaacatgcacacgtgatccagaatcagttcttgncacctgtgcaaggtcaccgtgaacaagaaaaccaaacactgcatttcctgccaataaagtgtgtgtcccggntttgaccaccaattgnaaatgggatcaacaacttgcttgggaaagccggaaattntt

SEQ ID NO: 3520 - DNA, 805 bp, Homo sapiens
  misc_feature (744)..(744): "n" may be a, t, c, g, other or unknown
  misc_feature (790)..(790): "n" may be a, t, c, g, other or unknown
  misc_feature (801)..(801): "n" may be a, t, c, g, other or unknown
agaaaagcgccggacgccggggtgatcatggacgcttgacaacctgcgggcaggcgccgggaggccgagccagcgactaagaggaccgagaggtggcgtggacagatttcaaggccagagaatggcaggggaacagaaaccctcaagtaatctcctggagcagtttattttactagccaaaggtaccagtggctcagccctcactgctctcataagccaggtcttagaggctcccggagtgtatgtctttggagaacttctggagctggccaacgtgcaggagccaacaaggagagcctgccagaactgagcacagctcagcagaacaagctgaagcatcttaccatcgtgagcttggcatcaagaatgaagtgtatcccctactccgtgttgctgaaagacctggagatgcggaatctccgggaactagaagaccttatcattgaggctgtctacactgacatcatccagggcaagctggaccagcgaaaccagctgctggaagtggatttctgcattggccgtgacatccgaaagaaggatatcaataatattgtcaagaccctgcatgaatggtgtgatggctgtgaagcagttctactgggcatcgagcagcaagttctgagagccaaccagtacaaagagaaccacaaccgaactcagcagcaggtagaagcagaggttaccaacatcaagaagacactcaaagccaccggatcctcctcggctcaggagatggagcancagctggctgaacgggaatgtcccccttacgctgagcaaaagcagnccaccaagaanatgt

SEQ ID NO: 3521 - DNA, 724 bp, Homo sapiens
  misc_feature (615)..(615): "n" may be a, t, c, g, other or unknown
  misc_feature (677)..(677): "n" may be a, t, c, g, other or unknown
  misc_feature (692)..(692): "n" may be a, t, c, g, other or unknown
  misc_feature (724)..(724): "n" may be a, t, c, g, other or unknown
gagggcgcttccggcacagcggaactccgggtgccggttgaggttgctggtgggcctgctctggtggtcttggatgaggccccatgagcgcggcgcccctggtgggctacagcagcagcggctccgaggatgagtccgaggacgggatgcggaccaggccgggggatgggagccaccgtcgtggccagagcccccttcccaggcagagatttccagtacctgacagtgtgctgaacatgttcccgggcaccgaggaggggcctgaagatgacagcacaaaacacgggggacgggtgcgcaccttcccccacgagcgaggcaactgggccacccacgtctatgtaccatatgaagccaaggaggagttcctggatctgcttgatgtgttgctgccccatgcccagacatatgtcccccggctggtaaggatgaaggtgttccacctcagcctgtcccagagtgtggttctgcgccaccactggatcctccccttcgtgcaggctctgaaagcccgtatgacctccttccacagattcttctttactgccaaccaggtaaagatttacaccaatcaagagaaaaccaggacctttattgggcttgaggtcacttcanggcatgcccagttcctggacctggtttcagaggtggacagagtcatggaggaattcaacctnaccactttctaccangatcctttttttccaccccagcctggcctggn

SEQ ID NO: 3522 - DNA, 842 bp, Homo sapiens
  misc_feature (696)..(696): "n" may be a, t, c, g, other or unknown
  misc_feature (700)..(700): "n" may be a, t, c, g, other or unknown
  misc_feature (797)..(797): "n" may be a, t, c, g, other or unknown
  misc_feature (817)..(817): "n" may be a, t, c, g, other or unknown
  misc_feature (820)..(820): "n" may be a, t, c, g, other or unknown
ttttgtacctgactccctgaccgatttgtattttttatatacaactagaaggaagtcacaagattgccttctacagtgtgccatttccaaatggatctgttgttggaggaaactggttgctagtcaatgttctatatttaatgaatgtgtgataaatcatcctgtaatcagtatggagtaacctgtttttgtagtttggatgaatatgtcctgagaaatttccatccactttggttcagcggacatcaaggtagtaataataatttttcctccacaggtccctccactcatatggcctctccctccccagctagtggaggggaagcagtctggacttagaaaggaaataggtggtctgtcataggggctttcattagagttaaacttcatagagtcaactgtttcatcatcatagtgagcccagagagccactgcccagcagcatgctcacaccacctaccctagtgtaggtaataggtctacgctaggaccccgtgctgggctctcagcccatcatgagattttggtggatttaatggcaggtaggaacttatttatagtggattgataattgctttataattccttggtaatgacagctcagggaaggtttcacaaggtcatgatcaggagacttgaattggtactggatgtaggaattgtttcactgctcttaacttgctcaaactggggcangttncaggaacttgaactaaaaatatctatttaagcctctctctctttctctcttcccaacttttttctgaaagccttgatttctgtagacagactatggnttttggcatgttgggtcaanacnggttctataggaaatcttgcac

SEQ ID NO: 3523 - DNA, 850 bp, Homo sapiens
  misc_feature (760)..(760): "n" may be a, t, c, g, other or unknown
  misc_feature (796)..(796): "n" may be a, t, c, g, other or unknown
  misc_feature (843)..(843): "n" may be a, t, c, g, other or unknown
ataatgttaccagtcagagttggcagccacagacttatcagatctgtctggttgatccagtgtctggaagtgtgaaaacagtgaacgttcccttccatttagcactgagtgataagaagagtgaacgagccaaggatatgcacctagtgaagaaactagcagccttactgaaaacaaaatctcccaatcttgatttggttgaaacagaaataaaggaattaattcttgatattaaataccctgcaaccaaaaaacaagctttggaaagcattttggcaagtgaacgtttaccattttcttgccttagaaacatcactcagactttaatggacactttaaaaagtcaagaacttgagtctgttgatgaaggattgctacagttttgtgccaataaactaaaactgctgcaactctatgagtctgtcagtcaattaaattcccttgattttcatttagacacaccattctctgataatgacttggctctgttactaaggcttgatgaaaaagaactgcttaagctccaggcattactagagaaatataagcaagagaacaccaggacaaatgttcgattttctgatgataaagatggtgtgttgcctgtaaaaacattcttggaatatttagaatatgaaaaggatgtgctcaacataaagaaaataagtgaagaggaatatgtggctttaggtagtttctttttttggaagtgtttgcatggagaaagctccctgaggatatgtgtcacactttggagtcngctggtcttaacccttaactggtggtggctctgctnctgagggtttggctttcaaaggaaaagggtattttggataaccacancaatctg

SEQ ID NO: 3524 - DNA, 828 bp, Homo sapiens
  misc_feature (772)..(772): "n" may be a, t, c, g, other or unknown
  misc_feature (774)..(774): "n" may be a, t, c, g, other or unknown
  misc_feature (780)..(780): "n" may be a, t, c, g, other or unknown
gagaacatctctgttgacattcattgtggagaacctttacaaatagatcacttggtttttgtagtccatgggattggaccagcttgtgatctccgctttcgaagcattgtacagtgtgttaatgattttcgcagtgtttccttgaacttgctacagacacattttaagaaagcccaagaaaatcagcagattgggagggtagaatttcttccagtcaactggcacagtcctttgcattctactggtgtggatgtagatctgcagcgaataaccctgcccggcattaaccgcctcaggcacttcaccaatgacacaattctggatgtcttcttctacaatagtcccacctactgtcagactattgtggacacagttgcttctgaaatgaaccgaatatacacactttttctacagaggaaccctgatttcaaagggggtgtatccattgctggtcatagtttaggttcgcttatattgtttgatatcctaacaaatcagaaagattctttgggggatattgacagtgaaaaggattcgctaaatattgtaatggatcaaggagatacacctacactagaggaagatttgaagaaacttcagctctctgaattctttgatatctttgagaaggagaaagtagataaggaaactctggctttatgtacagaccgagatcttcaggaaataggaattcctttaggaccaagaaagaagatattaaactatttcagcaccagaaaaaactcaatgggtattaagagaccagccccgnanctgttnagggcaaacatcccaagaattgagtctgcagtacagtatctagaatgg

SEQ ID NO: 3525 - DNA, 803 bp, Homo sapiens
  misc_feature (672)..(672): "n" may be a, t, c, g, other or unknown
  misc_feature (707)..(707): "n" may be a, t, c, g, other or unknown
  misc_feature (781)..(781): "n" may be a, t, c, g, other or unknown
  misc_feature (783)..(783): "n" may be a, t, c, g, other or unknown
tatcatatactttatctcgggcccagactgtggtggttgaatatactcatgacagcaacaccgatatgtctcagattggccggtcgactgaaagccccattgattttgtagtaactgacacggttcctggaagtcaaagtaattctgatacacagtcagtacaaagcactatatcaagatttgcctgcagaatcatatgtgaacggaatcctccctttacagcacggatttatgctgcaggatttgactcatcaaaaaacatctttcttggggagaaggctgccaaatggaagacatcagatggacagatggatggcttgaccactaatggtgttcttgtgatgcatccacgcaatgggttcacagaagactccaagcctggaatatggagagaaatatcggtgtgtggaaatgtatttagcctacgtgaaaccagatcggctcagcagagaggaaaaatggtggaaattgaaaccaatcagttacaagatggctcgttaattgacctctgtggtgcaacattgttatggcgtactgcagaaggccttccccacactcctaccgtgaagcatttagaagctttaagacaggaaatcaatgcagcacgacctcagtgccctgtagggttcaacacactagcatttcctagtatgaagaggaaagacgttgtanatgaaaaacaaccatgggtatatctaaactgcggncatgtacatggctatcataactggggaaaccaagaagaacgtgatggaaaagatcgtgaatgtcctatgtgtangnctggtggtccctatggtcct

SEQ ID NO: 3526 - DNA, 703 bp, Homo sapiens
  misc_feature (581)..(581): "n" may be a, t, c, g, other or unknown
  misc_feature (650)..(650): "n" may be a, t, c, g, other or unknown
  misc_feature (676)..(676): "n" may be a, t, c, g, other or unknown
  misc_feature (688)..(688): "n" may be a, t, c, g, other or unknown
ttcgaataaaagtggagcctggaaaataatgggttttgatttttgtgtatcatcaaccaatccttctgaacaagagcctaaatttccttgtaaagaatgggacccaaatttaccttcattgtgtcttccaaatcctgaatatttggctcctgaatacatactttctgtgagctgtgaaacagccagtgatatgtattctttaggaactgttatgtatgctgtatttaataaagggaaacctatatttgaagtcaacaagcaagatatttacaagagtttcagtaggcagttggatcagttgagtcgtttaggatctagttcacttacaaatatacctgaggaagttcgtgaacatgtaaagctactgttaaatgtaactccgactgtaagaccagatgcagatcaaatgacaaagattcccttctttgatgatgttggtgcagtaacactgcaatattttgataccttattccaaagagataatcttcagaaatcacagtttttcaaaggactgctaaaggttctaccaaaactgcccaagcgtgtcattgtgcagagaattttgccttgtttgacttcanaatttgtaaaccctgcatggtaccttttgttttgcccaatgtcctacttattgctgaggaatgcaccanagaagaatatgtcaaattaattcttnctgaactttggncctgtgtttaaacca

SEQ ID NO: 3527 - DNA, 761 bp, Homo sapiens
  misc_feature (634)..(634): "n" may be a, t, c, g, other or unknown
  misc_feature (651)..(651): "n" may be a, t, c, g, other or unknown
  misc_feature (718)..(718): "n" may be a, t, c, g, other or unknown
  misc_feature (751)..(751): "n" may be a, t, c, g, other or unknown
  misc_feature (761)..(761): "n" may be a, t, c, g, other or unknown
aagttatgctgaagaccgaagcaagagctggttcaggtggcagccacagcagcctcagggacctcagcaactatggcctcctgcccagactctgataatagctgggtgcttgctggctccgagagcctgccagtggagacactgggcccggcatccaggatggacccagaatctgagagagccctgcaggcccctcacagcccctccaagacagatgggaaagaattagctgggaccatggatggagaagggacgctcttccagactgaaagccctcagtctggcagcattctaacagaggagactgaggtcaagggcaccctggaaggtgatgtttgtggtgtggagcctcctggcccaggagacacagtagtccagggagacctgcaggagaccaccgtggtgacaggcctgggaccagacacacaggacctggaaggccagagccctccacagagcctgccttcaacccccaaagcagcttggatcagggaggagggccgctgctccagcagtgacgatgacaccgacgtggacatggagggtctgcggagacggcggggcccgggaggccggcccacctcacccatggtgcccctggctgtggagaaccaggctgggggtgagggtgcangcggggagctgggcatntccttaacatgtgccttcttggggccctggtctgcttggcctgggggtccttctcttctcaggtggnctttaaagtctgagactgggcccatggaggaantggaaccggn

SEQ ID NO: 3528 - DNA, 778 bp, Homo sapiens
  misc_feature (697)..(697): "n" may be a, t, c, g, other or unknown
  misc_feature (706)..(706): "n" may be a, t, c, g, other or unknown
  misc_feature (763)..(763): "n" may be a, t, c, g, other or unknown
acagtgggccatggagttcccgttcgatgtggacgcgctgttcccggagcggatcacggtgctggaccagcacctgaggcccccagcccgccgacccggaaccacaacgccggcccgtgttgatctacagcagcaaattatgaccattatagatgaactgggcaaggcttctgccaaggcccagaatctttccgctcctatcactagtgcatcaaggatgcagagtaaccgccatgttgtttatattctcaaggacagttcagcccgaccggctggaaaaggagccattattggtttcatcaaagttggatacaagaagctctttgtactggatgatcgtgaggctcataatgaggtagaaccactttgcatcctggacttttacatccatgagtctgtgcaacgccatggccatgggcgagaactcttccagtatatgttgcagaaggagcgagtggaaccgcaccaactggcaattgaccgaccctctcagaagctgctgaaattcctgaataagcactacaatctggagaccacagtcccacaggtgaacaactttgtgatctttgaaggcttctttgcccatcaacatcggccccctgctccctctctgagggcaactcgacactctcgtgctgctgcagtcgatcccacgcccgctgctccagcaaggaagctgccacccaagagagcaganggagacatnaagccatactcctctagtgaccgagaatttctgaaggtacttgtggacctccttggncctaaacagggccct

SEQ ID NO: 3529 - DNA, 799 bp, Homo sapiens
  misc_feature (633)..(633): "n" may be a, t, c, g, other or unknown
  misc_feature (771)..(771): "n" may be a, t, c, g, other or unknown
  misc_feature (788)..(788): "n" may be a, t, c, g, other or unknown
  misc_feature (793)..(793): "n" may be a, t, c, g, other or unknown
ctctgcccggctccagccagcgtctgccgccgccgtagctgccccaggctccccgccccgctgccgagatggcgacgcgctcctgtcgggagaaggctcagaagctgaacgagcagcaccagctcatcctatccaagcttctgagggaggaggacaacaagtactgcgccgactgcgaggccaaaggtcctcgatgggcttcctggaatattggtgtgtttatttgcatcagatgtgctggaattcatagaaaccttggggttcatatatccagggtcaaatcagtcaacctagaccaatggacagcagaacagatacagtgcatgcaagatatgggaaatactaaagcaagactactctatgaagccaatcttccagagaactttcgaagaccacagacagatcaagcagtggaatttttcatcagagataaatatgaaaagaagaaatactacgataaaaatgccatagctattacaaataaagaaaaggaaaaaaaaaaggaagagaaaaagagagaaaaggagccagaaaagccggcaaaaccacttacagctgaaaagctgcagaagaaagatcagcaactggagcctaaaaaaagtccagccctaaaaaagctgcggagcccactgnggatcttttaggacttgatggccctgctgtggcaccagtgaccaacgggaacacaacggtgccccccctgaacgatgatctggacatctttggaccgatgatttctaatccttactggaactggcatgcccccaactnaggggacacccttttgnaccancagctg

SEQ ID NO: 3530 - DNA, 834 bp, Homo sapiens
  misc_feature (442)..(442): "n" may be a, t, c, g, other or unknown
  misc_feature (666)..(666): "n" may be a, t, c, g, other or unknown
  misc_feature (694)..(694): "n" may be a, t, c, g, other or unknown
  misc_feature (761)..(761): "n" may be a, t, c, g, other or unknown
  misc_feature (775)..(775): "n" may be a, t, c, g, other or unknown
  misc_feature (800)..(800): "n" may be a, t, c, g, other or unknown
ttttactcatgctcagcgaaggctggttcctggtcccctgggctgtgtagacccggtgtcccaccaggctccaggctcccaccatctacagaggggcttacagcgcccattctggtcttggggaacccatcacaaaataggctttttctgctccccgattctggtgtagttctaagtacacagtgatgtcctctgtaggggcgtgcctgtggtggaacataacgcagttacaaaagaaagggcaggtgaggcctgggtaaccccagccatggaccgtcagtggctggagggagcttcgtgtctgtgctggagctgcagcctgctcgccatctggaggctcagtggagtggggagttggggttctcataccagcagatttccctagagcgtgattctcccatctgaggcaatcttgcctcccaggggaaattttgcaatgttnggaggatgttgtcacagctagtagcgggtgctctgggatctggtggatagatgccaaggatgctgtcaagcatactatactgcccagaacagtggcccatagcagggacctgccctatcaaaatatcaggtgtatggaggtggagtcccaacgctagagcagcccttctcagctccaccctgcccggggagggaggaggagctctggtttcagagcaagtgccnggattgcctttccccaggatctgtgtcngccatccaggaagaactgtactggccaacctgggaccacacgtctgcagaaacctgctcttgttggncttgagccccaggncttggccctcctgtgctttggggtnaaccattggccactggggaaaaggcaagggaccg

SEQ ID NO: 3531 - DNA, 812 bp, Homo sapiens
  misc_feature (680)..(680): "n" may be a, t, c, g, other or unknown
  misc_feature (735)..(735): "n" may be a, t, c, g, other or unknown
  misc_feature (765)..(765): "n" may be a, t, c, g, other or unknown
  misc_feature (805)..(805): "n" may be a, t, c, g, other or unknown
agatctcccgttgtgtgagagaaacgcaagcacggagctcccttgacctgctgcatcctcctcggcaattttttttttttaagtcaaaaagcttggatttcctgaaattgttgaactggatgcggctgttgaagagtgaacttggatcattcattacagactattttcagaaccagcttcttgcaaaaggactgttctttgtggaggagaagatcaagctgtgtgaaggtgaaaatcgcattgaggttctggctgaagtctgggaccacttcttcactgagactctccctaccctgcaggcaatattttatccagttcagagtgttcacgagcccacaggcccaagtgagagttatttgcaactggaggagctggtgaagcaagtggtttctcctttcctcggcatcagcggggaccgtagcttctcaggccccacgtacacgctggccaggcggcactccagggtccggcccaaggtgactgtcctgaactatgcctccccgataaccgcagtcagccggccactgaatgagatggtcttgaccccactgacagagcaggagggggaagcctacctggagaagtgtggcagcgtgcggcggcacacggtggccaatgcccactcggacatccagctgctggccatggccaccatgatgcactcgggcctgggggaggangccagcagtgagaacaagtgcctgcttctgccacccaactttcccccggcccaancggcagtgcttccagtgaagccccaacatnaaccgacaaccctgaccggactggaaggaaggggggccanggggcaa

SEQ ID NO: 3532 - DNA, 790 bp, Homo sapiens
  misc_feature (717)..(717): "n" may be a, t, c, g, other or unknown
  misc_feature (719)..(719): "n" may be a, t, c, g, other or unknown
  misc_feature (765)..(765): "n" may be a, t, c, g, other or unknown
acagcaagttgtattcattccattcatctagaattcctaggctgcctttgtcgggcctgcaggtattaatggagaatagcagctttttatttttttatatttattttttgagacagagtctcactctgttgcccaggctggagtgcaatggcgcgatctcagctcactgcagcctccgcctcagaggttcaagtgattctcctgcctcagcctctggaatagctgggactacaggcacctgccaccacacccagctaactttttgtatttttagagaagatggggtttcatcatgttggccaagctggtctcaaactcctgatctcagtgatccatctgcctcagcctcccaaagttataagatttttttcctctggtttttagtaaatgttttttttgagattgcttagcaccagaatgatttgcaaatttgaaaataggaactccactaggaatgccggatagaagagtgcttcacatttgtagagggagacaagaactaaatatcacgacgtctttctgagccttttggtttgctaacgtgccccaaattcttattccaaacggtataagataattatgtgtaaatgaataccagctctacttagttttatttcatatttgtgtatctgaatatattaaaatatctttttttttttttttgatgcggagtcttgctctgttgtccagcctggagtgcagtggcatgatctcggntnactgcaacctctgcctcccaggttcaagcgattctcctgcctcagnctccttaagtagcttgggatttaca

SEQ ID NO: 3533 - DNA, 867 bp, Homo sapiens
  misc_feature (729)..(729): "n" may be a, t, c, g, other or unknown
  misc_feature (740)..(740): "n" may be a, t, c, g, other or unknown
  misc_feature (813)..(813): "n" may be a, t, c, g, other or unknown
  misc_feature (845)..(845): "n" may be a, t, c, g, other or unknown
  misc_feature (867)..(867): "n" may be a, t, c, g, other or unknown
gagagggcacggggaaaaggtggctctggccggggtggctcggtttcctggggctatgtaactgagctcgtcgacttaggggtccttcttcgctgccctcgccgcgtgctagcagggagtttccgctcgggagagagactgtcctcacgcccgctgcgcctcctcgacggcagagcaggcttgctcgcccgtgggagcgtcccggccgagaagccctgaggggggaggggaggccattttgtcccgaccgactccccggaaccgggcggagcggctgggagaggctgcggagccgcggtcgccgccctcggaggcactggacgccgccactgtcggggcttcctcaaagctgttcgtaggtcgcccgcgccgtctcgagcctttttcccacgcttccccggtcctccggcctgagaacgcccgagtgaggagttggccgtagtgagagggaccgatcccttggggccgccggcggcgagagcccgagccgctcctcccaatggcgaagaagacgtacgacctgcttttcaagctgctcctgatcggggattccggagtggggaagacctgcgtcctttttcgtttttcggatgatgccttcaatactacctttatttccaccataggaatagacttcaagatcaaaacagttgaattacaaggaaagaagatcaagctacagatatgggatacagcaggccaggagcgatttcacaccatcacaacctnctactacagangcgcaatgggtatcatgctagtatatgacatcaccaatggtaaaagttttgaaaacatcagcaaatggcttanaaacatagatgaagcatccaatgaaaattggnaagaatgtactaggaaacaagn

SEQ ID NO: 3534 - DNA, 801 bp, Homo sapiens
  misc_feature (784)..(784): "n" may be a, t, c, g, other or unknown
  misc_feature (791)..(791): "n" may be a, t, c, g, other or unknown
  misc_feature (793)..(793): "n" may be a, t, c, g, other or unknown
agagagacgcctctaggggcagaggccctgggaggcaaagacccccaggagagatttacccaccccagacggaaagcgcggctcagagtcggacgaggggagactgtcagaggacaacgccccctaggtctcctgggagaccccgaagcgaccccgggggcagcccgggccgtgtccgggcgagggtgacctatccttggttgagagcgatggggacacaagccctgcagggcttcctctttctcctcttcctcccgctgctgcagccgcgtggggcctcggctgggagcctgcacagtccaggcctgtccgaatgcttccaggtgaatggggctgactaccgcggccaccagaaccgcactggcccgcgcggggcgggccgcccgtgcctcttctgggaccagacgcagcaacacagctacagcagcgccagcgacccccacggccgctgggggctgggcgcgcacaacttctgccgtaacccagacggtgacgtgcagccgtggtgctacgtggctgagacagaggagggcatctactggcgctactgcgacatcccctcctgtcacatgccaggctacctgggatgctttgtggactcaggggcacccccagccctcagcggccccagcggcacctccacgaagctcacggtccaggtgtgcctacgcttcttgccgcatgaaggggtaccagcttggcgggcgtggaagcccggttacgcctgcttcttgtggcttctgaaaagcgaccttggcccgggggaacgccttggccccccggncacccgnantgtgaccc

SEQ ID NO: 3535 - DNA, 741 bp, Homo sapiens
  misc_feature (703)..(703): "n" may be a, t, c, g, other or unknown
  misc_feature (712)..(712): "n" may be a, t, c, g, other or unknown
  misc_feature (722)..(722): "n" may be a, t, c, g, other or unknown
ctggtaaagcagcggccagggggagccgtgagtgaggcgctgcctctcccgctgaagcgggttccaaggccaccgtgagggggaccatccatccaggagagtactgggcaggctgcaaatgtctgtgttaaaacagctctgctgggctaagacaggacagaagcagacagcaggtggatgagacacaatttcctatccagcagaacctgcagcaagctccacagcaccctccatgggctcagtcttgctcccgggaagatggttaattccatcagctccttctggccggcagcaggaagagtggccctgtgtgtgccaggccctgcagtctctcctctcagctggtgtctccagtgagggacctgagtcatcgcacacatgagcctgtgctcagcctgcacatctcccgcctcccaccagctgctcctcaactgccagggccagactgtggcaaaatctcactcctctgccgatgctggggtttccctcgtgtctgggaggtggtgtgcttggtggcctgagcactgcagtgaatccatgtttccctcccagcaccctgttctgtcctccaacttggccgacagctctggccagggacgcagcccagctggtgcccaccccgcactctgtccatttcataagagcccttggtttcctcacttccctcagattttgccaagagaatggtcctggtgtggcccanaaaggccancggggtgcancctgggactgaaaagcaga

SEQ ID NO: 3536 - DNA, 601 bp, Homo sapiens
  misc_feature (74)..(74): "n" may be a, t, c, g, other or unknown
  misc_feature (89)..(89): "n" may be a, t, c, g, other or unknown
  misc_feature (189)..(189): "n" may be a, t, c, g, other or unknown
  misc_feature (215)..(215): "n" may be a, t, c, g, other or unknown
  misc_feature (253)..(253): "n" may be a, t, c, g, other or unknown
  misc_feature (481)..(481): "n" may be a, t, c, g, other or unknown
  misc_feature (563)..(563): "n" may be a, t, c, g, other or unknown
  misc_feature (573)..(573): "n" may be a, t, c, g, other or unknown
  misc_feature (594)..(594): "n" may be a, t, c, g, other or unknown
gaggcgggcggcccccagctcgcgtccccgagtcctagcccgcgaggcgccagggctgcgcctgggcatggaanaggggaagatggacnagaatgaatgggggtaccacggagagggcaataagagcctggtggtggcccacgcgcagtgctgcgtcgtgctgcggtttctgaagtttcctccaaatangaagaagacctcggaagagatatttnaacacctgcagaacatagtggactttgggaaaaatgtnatgaaggagtttttgggggagaactatgttcattatggggaggtcgttcagctacctttagagtttgtgaaacagctttgtttaaagatacaatctgaaagaccagagtctcgctgtgacaaggacctggatactctcagtggttacgctatgtgccttcctaatttaaccagactccaaacctaccgctttgcagagcaccggccgattctgtgtgtagagattaanccaaaatgtgggtttattcctttctcgagtgatgtcacgcatgagatgaagcataaggtctgtcgatactgcatgcaccagnacctcaaggnagcaactgggaagtggaagcngatcagc

SEQ ID NO: 3537 - DNA, 744 bp, Homo sapiens
  misc_feature (681)..(681): "n" may be a, t, c, g, other or unknown
  misc_feature (691)..(691): "n" may be a, t, c, g, other or unknown
  misc_feature (707)..(707): "n" may be a, t, c, g, other or unknown
gcatgcatcacatcagaagggctcattgccttcaggaacgacaatcgagtggttagaaccaaagatatctttatcaaaccactataaaaatggagctgaccagccctttgcaactgatcagagtaagccggtggcagtcccagaagagcagcctgttgcagaatctggactattagcgagggagcctgaagaaataaatgcagatgatgagatagaggatacatgtgaccacaaagaggatgacctgggagctgtagaagaacaacgtagtgtcatcctacatctcttgtcacagcttaagctgggcatggatttaacaagagtggtgcttcctacatttatcctagagaagcgttccttgctggaaatgtatgcagactttatgtctcatccagacctatttatagccatcactaatggagccacagctgaggacagaatgattcgctttgttgagtactaccttacctcatttcatgaaggccgtaagggagccattgctaaaaaaccatacaatcctatcattggagaaacatttcactgttcctggaagatgccaaaaagcgaggtagcatccagtgtttttagcagttcttccacccagggagtcacaaatcatgctcctttatcgggggagtctttgacccaggtgggatcagactggtacacagtcagatttgntgctgagcangtttctcatcatcctncagtctcaggattttatgcagaatgtacagagaggaa

SEQ ID NO: 3538 - DNA, 839 bp, Homo sapiens
  misc_feature (611)..(611): "n" may be a, t, c, g, other or unknown
  misc_feature (667)..(667): "n" may be a, t, c, g, other or unknown
  misc_feature (764)..(764): "n" may be a, t, c, g, other or unknown
  misc_feature (785)..(785): "n" may be a, t, c, g, other or unknown
  misc_feature (824)..(824): "n" may be a, t, c, g, other or unknown
aggagacctaggtaccagactttgctttgccagtgcctctttctgtggccttgggtaagtttttcccctctctgggcctcagtttcccatttgcaaaataaaagtgtttaagactaggttccaagattttccaattctaatgctgagaggatacagaggaaaacagaaagaatgctggctgaggaaccaggagacttgccttcttgtcccagctctgccactgacctgacctctttgggcctctgcttcctcatctataaaataagataaagcaacagaagcctccagcgactaagttaaactttcctggggtcacaaggtttacaagtggctgaataggatttctacagactggttccttcacccggctgcccgccgaagtaagcgggccttactgccctaattctcaataggaccccaaagaggacgcttctttgctcctgaagggatggcaccctttggattcgcggtaacagcaaatggggctctcactcctaccatctcagtgacagtttaaagcgcaccctaccgcaggaaagtgcccatatttgcacacacgcggcagagggcagggctgaaaaggggccctagggtgcagggggcgcgccctnacccggggaccccgcattttacaatattagcttcaccgaggcgcacggaaccgcangcgaacaactgaccttcggcttcagcgggcccaaagcccggggtgggaacgcgcgaccaagtagcggcatggacttcgagcctggccccttcggggntaaaacttcccagacattaanggttccggacgacagaagtgcaacccgccgcgttgcccntgggacacttgaact

SEQ ID NO: 3539 - DNA, 760 bp, Homo sapiens
  misc_feature (495)..(495): "n" may be a, t, c, g, other or unknown
  misc_feature (501)..(501): "n" may be a, t, c, g, other or unknown
  misc_feature (683)..(683): "n" may be a, t, c, g, other or unknown
  misc_feature (737)..(737): "n" may be a, t, c, g, other or unknown
  misc_feature (752)..(752): "n" may be a, t, c, g, other or unknown
taggaggaagagagagatggaaccatgtaaccaccacgaccaagaggccagtaaccaccagagctccagcaaatactttaggaaatgattttgacttggctgatgccctggatgatcgaaatgatcgagatgatggccgcaggaaaccaattgctggaggaggaggtttttcagacaaggatcttgaagacatagtagggggtggagaatacaaacctgacaagggtaaaggtgatggccggtacggcagcaatgacgaccctggatctggcatggtggcagagcctggcaccattgccggggtggccagcgccctggccatggccctcatcggtgccgtctccagctacatctcctaccagcagaagaagttctgcttcagcattcagcagggtctcaacgcagactacgtgaagggagagaacctggaagccgtggtatgtgaggaaccccaagtgaaatactccacgttgcacacgcagtctgcagagccgncgccgncgccgaaccagcccggatctgagggccctgtccagctgcaggcatgcacaatggtgccaccgcttgtcacccggctccccccaccccttcatttggacccgcagctgctgtgctgctctgtgccatcggctccttgttggtctgagtttcccggatgagctctgggtgtttgtgagtttggnttctctggccttgcccaagcgtgctgagacttggtgccgaaattcaagagccancttttgatagaaagncagcacca

SEQ ID NO: 3540 - DNA, 813 bp, Homo sapiens
  misc_feature (739)..(739): "n" may be a, t, c, g, other or unknown
  misc_feature (741)..(741): "n" may be a, t, c, g, other or unknown
  misc_feature (803)..(803): "n" may be a, t, c, g, other or unknown
gcgcaggcgtaccgggtgccccggctctggagcataaacaagagcggggacgggatgaggcggcggttgatcccagggtggcgagtggcggcgaccgaggcggcgagcggggcccggcgccgaccctgagtgcagcctgacccgccctcgcgcgcgcgccctccccggccgggcccactcgccgcgcgcccagccatgaacctggcgagccagagcggggaggccggcgccggccagctgctcttcgccaacttcaaccaggacaacacgtccctagctgttggtagtaagtccggttataaatttttctccctttcttctgtggataagctggaacagatctatgaatgcaccgatacggaagatgtgtgcattgtagagagattgttctccagcagcctagtggccatcgtgagccttaaagcaccaaggaagctaaaggtttgccactttaagaagggaactgagatctgcaactacagctactccaacacgattctggctgtgaagctcaacaggcagaggctgatagtatgcctggaggagtccctgtacatccacaacattcgggacatgaaggtgctgcatacgatcagggagacgcctccaaaccctgcaggcctgtgtgcgctgtcaatcaacaacgacaactgctacttggcgtacccagggagcgcgaccatcggagaggtgcaggtcttcgataccattaatttgagagcttgcaaacatgattccngntcacgaacagtcctttacgggactggcctttgacgcaagtgggaactaaactttgccacggnttccggagaa

SEQ ID NO: 3541 - DNA, 828 bp, Homo sapiens
  misc_feature (655)..(655): "n" may be a, t, c, g, other or unknown
  misc_feature (788)..(788): "n" may be a, t, c, g, other or unknown
  misc_feature (797)..(797): "n" may be a, t, c, g, other or unknown
  misc_feature (811)..(811): "n" may be a, t, c, g, other or unknown
agtgggtaccgggacgccgtgaggcggaagctgtgtatggcgggaggctgtggcggtcccttggtggggaagctgttgctgttgctagacgacgggaactagctctcgtcacttcctcagcccgccgtctgcccactcctctagccggaacctgggggcccggagccggggtaggcacagagttgtcctcggaggtccaggacagcggccagcccggcggcgggagtcagggccacgccacctgcagggaagaacccgagtcgaagcgggaagatggctgcagacaagcctgcagatcagggagcagagaaacatgaaggcacaggtcagtcctctgggatcactgatcaagagaaggagttatccaccaatgctttccaagctttcacatctggaaattatgatgcctgtctacaacaccttgcccgtctacaagatataaacaaagatgattataaaataattttgaatacagcagtagctgagttttttaaaagtaaccaaacaacaacagataatttgagacaaacacttaaccagctgaagaatcaggtccactcagctgttgaagaaatggatggattagatgatgttgaaaacagcatgttgtactataatcaagcagtcattctttatcatctgcggcagtatacanaaccatatcagttggtgaaaaactttatcagttcatagagccttttgaagaaaaatttgcccaagcagtgtgttttttgcttggagacctggatatattaacctaccaagctgagaaacttggatcttcttgntggcctaanaaaaaatgatttcncaggggtaaccattacc

SEQ ID NO: 3542 - DNA, 789 bp, Homo sapiens
  misc_feature (665)..(665): "n" may be a, t, c, g, other or unknown
  misc_feature (720)..(720): "n" may be a, t, c, g, other or unknown
  misc_feature (755)..(755): "n" may be a, t, c, g, other or unknown
  misc_feature (785)..(785): "n" may be a, t, c, g, other or unknown
tattccttcaatatccctttggaagagaggagtgacatgttcacatgggacccctatggaccatgggaaggctgtaccaaaatgtgtcaaggtcttcagcgaagaaacataacttgcatacataagagtgatcatagtgttgtgtctgataaagaatgtgaccacttgccacttccatcatttgttactcaaagttgcaatacagactgtgaactaaggtggcatgttattggcaaaagtgaatgttcatcccaatgtggtcaaggatatagaaccttggacatccattgcatgaagtattccattcacgaaggacagactgttcaagttgatgaccactactgtggtgaccagcttaaacctcctacccaagaactatgccatggtaactgtgtcttcacaagatggcattattcagaatggtctcagtgttccaggagttgtggaggaggggaaaggtctcgagaatcttattgtatgaataactttggccatcgtcttgctgacaatgaatgccaagaactgtcccgagtgacgagagagaattgcaatgaattttcctgtcccagttgggctgctagtgaatggagcgagtgccttgttacatgtggtaaaggaacaaagcagcggcaggtatggtgtcagctgaatgtagatcacttgantgatggcttctgtaattcaagtccaaacctgaatctctgagtccatgtgaacttnatcatgtgctttctggcaagtaggaccatgggggnccttgcacaaccacatgtggaccttgggtntcaa

SEQ ID NO: 3543 - DNA, 852 bp, Homo sapiens
  misc_feature (740)..(740): "n" may be a, t, c, g, other or unknown
  misc_feature (797)..(797): "n" may be a, t, c, g, other or unknown
ccatctcttcaaggtcccactagtctaaaacgcctggttctagatggaaacctgttgaacaatcatggtttaggtgacaaagttttcttcaacctagttaatttgacagagctgtccctggtgcggaattccctgactgctgcaccagtaaaccttccaggcacaaacctgaggaagctttatcttcaagataaccacatcaatcgggtgcccccaaatgctttttcttatctaaggcagctctatcgactggatatgtccaataataacctaagtaatttacctcagggtatctttgatgatttggacaatataacacaactgattcttcgcaacaatccccggtattgcgggtgcaagatgaaatgggtacgtgactggttacaatcactacctgtgaaggtcaacgtgcgtgggctcatgtgccaagccccagaaaaggttcgtgggatggctattaaggatctcaatgcagaactgtttgattgtaaggacagtgggattgtaagcaccattcagataaccactgcaatacccaacacagtgtatcctgcccaaggacagtggccagctccagtgaccaaacagccagatattaagaaccccaagctcactaaggatcaccaaaccacagggagtccctcaagaaaaacaattacaattactgtgaagtctgtcacctctgataccattcatatctcttggaaacttgctctacctatgactgctttgagactcanctggcttaaactgggccataccccggcatttggatctatacagaaacaattgtacangggacgcatgagtcttggtcacagccctggagctgatcacctataaggatgctgg

SEQ ID NO: 3544 - DNA, 738 bp, Homo sapiens
  misc_feature (674)..(674): "n" may be a, t, c, g, other or unknown
  misc_feature (676)..(676): "n" may be a, t, c, g, other or unknown
  misc_feature (711)..(711): "n" may be a, t, c, g, other or unknown
aaaaaaagtacccctgcagccggccggagaggctagagcccgacggggcccggctccggcggcagccgcgcctctcgcttgcttccctcggccgggccgtcctcggcggcagtgtcaggagcactccgctggtccaggcggcaacatgtccatgcttttagtgatgtccctgcctctaatccagaagccatggaggagataaggtagcccccctcgatcggatggggaagcccagttcaatggatactaaattcaaggatgacttatttcggaagtacgtgcagttccatgagagcaaagtggataccaccaccagcaggcagcggcctggcagcgatgagtgcctgcgggtggcagcctcaaccctgctcagcctgcacaaggtggatcccttttatcgattccggctgatccagttctacgaggtggtggagagctccttgcgctcgctcagctcctctagcctgcgggctctgcacggcgccttcagcatgctggagacggtgggcatcaacctcttcctctacccgtggaagaaggaattcagaagcatcaagacctacacgggcccttttgtttattatgtcaagtcgacattactggaagaggacatccgagccatcctgagctgcatgggctacacacctgagctgggcactggatacaaagctcanangagctcgtggagacccttcaggtgaagatggtctnctttgagctctttctgggcaaaagtca

SEQ ID NO: 3545 - DNA, 695 bp, Homo sapiens
  misc_feature (644)..(644): "n" may be a, t, c, g, other or unknown
  misc_feature (653)..(653): "n" may be a, t, c, g, other or unknown
  misc_feature (676)..(676): "n" may be a, t, c, g, other or unknown
gtgcacacattgtgttcttaaactgagacgtggctctgcaggtctcctgggctcattccatggtgtggtatgtttattccactgtccagagctattctctgatggatttgagcaacagcagtggagataaatgtcctagagtcaccaggtcgcttggagaagtcatttaagctgcctcgggtttttgttacttaaaatgtggatattatttctccacctaaatcactgagtttacagagtaataatgtgttgctctggacattgacagctttctagagccagtaatgggctcttctgaaggatgctgaattagaagtgaacctattcataggatcaaaagccacttgctttgaaatatgtagagttcctcagaattgacggtgctagaaatatccaagtgttaaataaccttttaaaagcaacaaaagctacttttttcttaccacttaatagaagaacctgtccctagaggcgacttcattgctatggatctggagtctctgaactcttaataggatgcagcctcacatacataatgtcacccattttatgttgatgaaaacattacaagttttcatcattgggtatgtgttgatgttcacagacagtacttgggcccattaggttttcgcgtctgggcttanagcatgtgnattcatctcaacgtgaatacctnaccagtcttatgaatagga

SEQ ID NO: 3546 - DNA, 879 bp, Homo sapiens
  misc_feature (699)..(699): "n" may be a, t, c, g, other or unknown
  misc_feature (713)..(713): "n" may be a, t, c, g, other or unknown
  misc_feature (745)..(745): "n" may be a, t, c, g, other or unknown
  misc_feature (838)..(838): "n" may be a, t, c, g, other or unknown
  misc_feature (845)..(845): "n" may be a, t, c, g, other or unknown
gcttccggctccggcgtggggtttgatgtctacggagtggcttttgcttagcgtcttgaaggggggaaaaaaatcctctaagctggtgatttcacgttctttgacaaacttcaatagcaacaggcaacgataccactttaagaaaattccaaggaaaagacctcattttaaaattcccacctctggctcccaaagattggtttgcaaacttcgacaaaatactcttctccactcgctattgatggagtctcgctctgtcacccaggctggagtatagtggtgtgatcttggctcactgcaacctctgcctcccaggttcaagcgattctcctgcctcagcctctcgagtagctggaattacaggtctggcagaaggaacagtatcaactgactgagtaggtctcattggcagttgtgattcagagacctagaaagctgaacccacggctggcaagaagaggatggtttgtgggacctgggctgatgtctgatgaaattttaagccccagctatagctactacaaagaaaagtggctgatgataagcatgtaactcaaaaagacaatgtatataaaaatatgcaagaatcacaggaaacccacatatccaaccacctagatgaagttgttgctgctgttagcatcactcatagaaagaagttccaaaacaagctgcttcagacagcactattccagcctnctcgagagaaactncacctctgtgaagagaaagcaaagtcctattncaacagtcatgagtacaaacaggccgtccatgagcttgtgccttgcgtaacactgacaagaatttgctatggagacttacattgggaactacngaaggcncatgtaatctgggctcaaggttacctccactgaa

SEQ ID NO: 3547 - DNA, 685 bp, Homo sapiens
  misc_feature (609)..(609): "n" may be a, t, c, g, other or unknown
  misc_feature (662)..(662): "n" may be a, t, c, g, other or unknown
  misc_feature (678)..(678): "n" may be a, t, c, g, other or unknown
gaagttctagaaaatgttaattgggggagctgtggctggcagagaaggaaaaaggaagctgaagggcacttgggctcataatggtctctccaaccctgatcctgtcctttatggacatttggcagcgctgctgccttgaggtgccttgcaatgctttatctttttgttaaagccacctctgttgcttcagccagcttgagcggttttctgttacttgctagtggttgggaaggcttagccgacgaagggaaaatgagtcaggtcctgaaggatgagcaagttacgggagtgggccgcatggtgagggagtggacttcctgatggggttaagggcgcctgaacacctgggaggcaagttgaggccaagacctggggtgatggagaggcagggtaggctacccagtgagtaggaggccgaaggaaccacagcagggctccagatctcctggcccagaggggctggtacgggaagcccagaagacactcatccctaaggggagcctgagactgaggaactctcatgccctgcgtcgggctcgtgggcgaagggccttcccagggactgcaccatggcctgtccccagccttacccaggggccttcctctcangttctgaaggacccaggggtcacagctgtgtggggtgctccactgaacacttncttcaaactccttcangcttgga

SEQ ID NO: 3548 - DNA, 762 bp, Homo sapiens
  misc_feature (589)..(589): "n" may be a, t, c, g, other or unknown
  misc_feature (606)..(606): "n" may be a, t, c, g, other or unknown
  misc_feature (629)..(629): "n" may be a, t, c, g, other or unknown
  misc_feature (720)..(720): "n" may be a, t, c, g, other or unknown
  misc_feature (740)..(740): "n" may be a, t, c, g, other or unknown
  misc_feature (761)..(761): "n" may be a, t, c, g, other or unknown
acttccccctcccccctcccttcctctctcctcccttttccctcctttccttgtctccttcttcttcctcttctttcccccagcccccctcctccctgtccccctctctccctgctccacgcagtgtcccactgcccgcctttctctgcagctggctggtatggagggggctgccctgaggagccccagagtaagctggaagggaggggacagaggctggtgtcatttgtctctgtagccctaggaccggtctgaaccggttgctgggagaggaggagggggcggccagatcgattgcagcaaagagggaagagagcggcagagggagctcgcggggcttgcgtgctggaacacgccgatggcctgtgccaccgcctcaccaccgtgtgccccacgtccaagccgcagactcagggcctggccaaggatgcctgggagatccctcgggagtcgctgcggctggaggtcaagctgggccagggctgctttggcgaggtgtggatggggacctggaacggtaccaccagggtggccatcaaaaccctgaagcctggcacgatgtctcagaggccttctgcaggaggcccangtcatgaagaagctgangcatgagaagctggtgcagttgnatgctgtggtttcagaggagcccatttacatcgtcacggagtacatgagcaaaggggagtttgctggactttctcaagggggaaacaggcnaagtacctgcgggttgcctnaactggtgggacatgggttgnt

SEQ ID NO: 3549 - DNA, 794 bp, Homo sapiens
  misc_feature (636)..(636): "n" may be a, t, c, g, other or unknown
  misc_feature (719)..(719): "n" may be a, t, c, g, other or unknown
  misc_feature (747)..(747): "n" may be a, t, c, g, other or unknown
  misc_feature (756)..(756): "n" may be a, t, c, g, other or unknown
gtttctccaccagcaacatggccgccgcctgagaggagagccgggccgccgccgtctctgcagcccgcgggtaactgggccgttgccgccgtccgcgctcggcccccgcggagagatcgatgtgtacttggccaagagtctggcggaaaagctgtatctatttcagtaccctgtgcgtccagcctcgatgacctacgatgacattccgcacctctcagccaagatcaagcccaagcagcagaaggtagagcttgagatggccatcgacaccctgaaccccaactattgccgcagcaaaggggagcagattgcgctgaacgtggacggggcctgcgccgacgagaccagcacgtattcctcgaagctgatggacaagcagaccttctgctcttcccagaccaccagtaacacatcccgttatgccgctgcactctacaggcaaggtgagctccacctgacacctttacatggcatcctgcagctgcggcccagcttctcctacctggataaggctgacgccaagcaccgggagagggaggcggccaacgaggcaggggactcttcacaggatgaggcggaagacgatgttaagcagatcacggtgcggtctcccggccggagtcagagcaggcccgncagcgccgtgtgcagtcctatgagttcctgcagaagaagcacgcagaggagccctgggtccacctgcattactatggcctganggacagtcgcttctgagcatgaaccgtnagtacctgnttgtgcccccggcttcaagccggggttgggaaaaacac

SEQ ID NO: 3550 - DNA, 847 bp, Homo sapiens
  misc_feature (680)..(680): "n" may be a, t, c, g, other or unknown
  misc_feature (707)..(707): "n" may be a, t, c, g, other or unknown
  misc_feature (784)..(784): "n" may be a, t, c, g, other or unknown
  misc_feature (816)..(816): "n" may be a, t, c, g, other or unknown
  misc_feature (828)..(828): "n" may be a, t, c, g, other or unknown
gtgggctgggtgggtttcctaatctggtttcgtctgcttggttcatctgtgtgcgatggctccggactcggatcccttccctgaagggccgctcttaaagctgctacccttagacgctagagaccggggcacccagcgctgccgcctgggcccggccgccctccacgccctgggcgcgcgcttgggctcggcagtgaagatctcgctacccgacggcggctcctgcctctgcactgcctggcctcggcgggacggagcggacggctttgtgcagctggacccgctgtgcgcgagccccggggcggcggtcggggcgtcgagatcccggaggagtctcagcctgaatcgcctcctcctagtgccctgtccgcccctgcggcgcgtcgccgtgtggccggtgttgcgagagcgggcaggcgcgcccggtgcccggaatacagccgcggtgctggaggcggcacaggagctgctgagaaaccgaccgatctccctgggccacgtggtggtcgctccgccaggcgctcctggcctggtggctgccttgcacatcgtcggcgggacgcccagtcccgatcccgctgggctggtcacccctcgtacccgcgtcagccttggcggggagcctccgtcggaagcccagccgcagcccgaggtgccccttgggaggtctttcggaggcnggccgactcgctgcggggagcttcttncggcttccgcttccgttacccggggccgccctgacccgcgcttgggcttaaccggtggccttcgccgggggtgcttncctggccggggggccccccccggaattgggcnaagaaccccaanttggtgcaagggccctggc

SEQ ID NO: 3551 - DNA, 821 bp, Homo sapiens
  misc_feature (796)..(796): "n" may be a, t, c, g, other or unknown
  misc_feature (805)..(805): "n" may be a, t, c, g, other or unknown
  misc_feature (812)..(812): "n" may be a, t, c, g, other or unknown
aaccctgtcattgctgaactgtcccaagcaataaacagtggtacattgttatcaaaaccgtccccacccttaccacctaagagaggcattccatcaacctcagtacccaccttggagtctgctgctgccatcaccacaaaaacaccaagtgatgaaagagagaagagcacgtgttctatgggctcggaactactaccaatgatctcacctcgctctccgtcccccccactgcctactcatatacctccagagcctccacgcacccctccattccctgctaagacttttcaagttgtgccagaaattgagtttccaccatccttagatctacaccaggagattccccagcaggaagatcagaaaaaggaagtccccaagaggatactggaccagaactttggggagccccatataccctctaggctgcctccactcccactgcatattcgaatccagcaggccctcaccagcccacttcccatgactcctattctggagggttctcacagagctcattcgttgctttttgaaaacagtgacagcttttctgaggacagcagtacgccgggtcggaccaggtctcttcccatcactattgaaatgctaaaagttccagacgatgaagaagaagaggagcaaacctgtccatccacattcagtgaagaaatgacacctacctcagtcattcctaaattaccacagtgtctacgggaggaagaagagaaggagagcgacttctgattcagaaggtcccattcagtaccgagatgaagaagatgaagatgaaagctttcanagtgctctngccaacnaaatgaaga

SEQ ID NO: 3552 - DNA, 756 bp, Homo sapiens
  misc_feature (705)..(705): "n" may be a, t, c, g, other or unknown
  misc_feature (737)..(737): "n" may be a, t, c, g, other or unknown
  misc_feature (739)..(739): "n" may be a, t, c, g, other or unknown
caaatatgtttcagagctctggagtccagcaccaccctccagaaccaaaagcccaaacagaagggaatgaagattcagagggcaaagagcaaccttgggaaatggtgatggataagaaacactttaagctgtggcggcgcccaattacaggcacccacctttaccagtaccgagtttttggaacctacacagatgtgacacctcggcagttcttcaatgttcagctggacacagagtatagaaaaaaatgggatgccctggtaatcaagctggaggtttgtgtgatgcagaacactaatcctgcccctccatttctttagtatccaatgtactcacgggattatgtttatgttcggcggtatagtgtggatcaggaaaacaacatgatggtgttggtgtcgcgtgctgtggagcatccgagtgtgccagagtctccagaattcgtcagggtcagatcatatgaatcccaaatggttatccgtccccacaagtcatttgatgagaatggctttgactacttactaacatacagtgacaatccccaaacggtgtttcctcgctactgtgttagttggatggtttccagtggcatgccagatttcctggagaagctgcacatggccactctgaaagccaagaatatggagattaaagtaaaggactacatctcagctaacctctggaaatgagtagtgaagccaaggncaccagccagtccttttgagccgaaagaaacnanggccagctttggccctg

SEQ ID NO: 3553 - DNA, 647 bp, Homo sapiens
  misc_feature (485)..(485): "n" may be a, t, c, g, other or unknown
  misc_feature (517)..(517): "n" may be a, t, c, g, other or unknown
  misc_feature (612)..(613): "n" may be a, t, c, g, other or unknown
  misc_feature (637)..(637): "n" may be a, t, c, g, other or unknown
agacactggccgcgggccaccatctggacgcgatcccccgctagggcctccctggtctgggccaaagttggtggccaccttcgcgcgggctgcgccctccttctcttccctgccctcctcccccggggcccgcgcccgctgcctccagcacgcgcgtcggcaggctcggcaagcgaagaggagcggctcgccccagggcgcccctcgcccagcctgccggccaggcgagcgcgacgagagtctccccgcaccccttcctctcccgggggccgagagggttgggctccgccccggcgccgcagctcccgactccccgccgctcgggctgccgccgctgccccgcgcccggcgctcggggcagccgggggcgcaggcggagagcgcagggcggggagaggcgtggggagcagagcggcgctgaggggagggcagaggaggagagagcctggcagcggaggagcagaggcgggcgccgcaccgcccgnacgctcgctcgctcgggagagtcgcgggcggncgcttgggcgcacttgccgggtcaccttgtcccggaggagaaatggcttcctgaggcaagtgtaacctacattccagccaccaagctgacgccanncagggagagagtaccatggatggnatattgaaca

SEQ ID NO: 3554 - DNA, 717 bp, Homo sapiens
  misc_feature (680)..(680): "n" may be a, t, c, g, other or unknown
  misc_feature (695)..(695): "n" may be a, t, c, g, other or unknown
  misc_feature (710)..(710): "n" may be a, t, c, g, other or unknown
aagatggctatcaagagtatcgcttcccgcctccggggttcccgtcgttttctgagcggcttcgtggttggggctgtagtgggcgctgcgggagctgggctcgcggccctgcagttcttccggagtcagggcgctgagggagcgttgacagggaagcagccggatggatctgcagaaaaggctgtcttggaacaatttggattccctttaactggaacagaggcaaggtgttacactaatcacgctttgtcttatgatcaggcaaagcgggtgcctagatgggttcttgaacatatttccaaaagcaagataatgggtgatgcagacagaaagcattgtaaatttaagcctgatcccaatatccctccaaccttcagtgccttcaatgaagattatgttggaagtgggtggtcacgaggacacatggctccagcaggaaataacaaattttcaagtaaagccatggctgaaaccttttacctttctaacattgtgcctcaggattttgataataattctggatattggaacagaatagaaatgtactgtcgagagctgacagaaaggtttgaagatgtttgggtggtatctgggcctttgaccttacctcagactagaggcgatggaaagaaaatagttagttaccaggtgattggcgaggacaacgtggcagtcccctnacacctttataaggnaatcctggcccgcanaagctca

SEQ ID NO: 3555 - DNA, 714 bp, Homo sapiens
  misc_feature (678)..(678): "n" may be a, t, c, g, other or unknown
  misc_feature (690)..(690): "n" may be a, t, c, g, other or unknown
  misc_feature (711)..(711): "n" may be a, t, c, g, other or unknown
aaacaaaaacaactttaaatgcttgtagcagaccgggtcatctcatgtcagaaacctttaatccaggcctaaatttgcatagacctgacattcagctgccttgcagttgcttcctcccatgagccaaggtggtgtcagagggcaactggatgactcgcagtaccacagcactgggacagacagaagccacacctttcttttgggtttttgccaagcctcctccatctcccatcagtgctgtgggctggctgcaagcctcgaaacagttctcctggaagggaggtttttgctttacccccgccagcacttccgcacacaatcatagagaacctctctgctctctgctggcctacagcttgtctgtttctcaagcagaggcaggaagagctagtcttagcatttatattttaataggaagttgactcccagcatgtaaaagtgatccacgcagccggagtgtatgccgggagctaagtggtctatgggtgaacatatcccaccttgcttcctgagtccttggtcccaatcttctcatttgttcctctcgttttaaattttttccccccaactcttttgatgtaagaagttcagtttgtcttcgggagtgggtctctgcaagggctctgggatgagtcttggcttccaagaggacaggctattaggttcttggactttttnctgtgctaccgntgctgcttggtggaagtacangac

SEQ ID NO: 3556 - DNA, 870 bp, Homo sapiens
  misc_feature (662)..(662): "n" may be a, t, c, g, other or unknown
  misc_feature (672)..(672): "n" may be a, t, c, g, other or unknown
  misc_feature (745)..(745): "n" may be a, t, c, g, other or unknown
  misc_feature (780)..(780): "n" may be a, t, c, g, other or unknown
  misc_feature (870)..(870): "n" may be a, t, c, g, other or unknown
caacccttaacatttgggtaatgtggtccaccctccctcccaggcaacaaactgcttgaggctggcagctcctgtttctgaagactgatgcagcccttgaaggtcaacctgctggagcaaaaaaacttgggacttgaatttgtagctccatttacatggatccattgccccagctactggagtatagcctacaatgtttatttcagtcaatattcctttatctgggtgttctgtacaatgtttattacagtcaatattccttcatctggatgttctgtgaagatagccatgtttatgggggtcttagttttcaaactctggcaactctgtgaaaaataggagcaaactagagagccctggagattggtagtagggaagggaggatagcaggaagtttgaaaaattagcagccccggggcctaaaggaatcagctgtcatcattttcatcattattattttggttaggatggcttgaaaatcagaacgtatcttggtttacgtaattgaggtcttaaagaactaagaacagttaaatagtcacaactaccaccctctgacttacataatcattggtgtgggcttcgttttgcctttagagtcacatctttcagtaaattcacagagatcaagagggacgtgcaacatacagcttaaaggctgntatgcttcanggttgctgaagaagatgaaacatcagcctgccatcgtctagaagagacattggcagttaaaaattagcacctncagtgtagtcgcctggcactgcccatcatgctganggagcagattctttccaaggcagcttcagctaggaatttgtaagccaggacttgtgacacatttgtcccctggactgacctttttaactn

SEQ ID NO: 3557 - DNA, 873 bp, Homo sapiens
  misc_feature (3)..(3): "n" may be a, t, c, g, other or unknown
  misc_feature (279)..(279): "n" may be a, t, c, g, other or unknown
  misc_feature (578)..(578): "n" may be a, t, c, g, other or unknown
  misc_feature (674)..(674): "n" may be a, t, c, g, other or unknown
  misc_feature (791)..(791): "n" may be a, t, c, g, other or unknown
  misc_feature (831)..(831): "n" may be a, t, c, g, other or unknown
atnttgtttgacatcctgtctaatcaaaaagcatttgaatttatcaaagtgccctggacctcttgctgttgctaatggagttgtgaagcagctacattttcaggaaaagcagatgcctgaagagccaaagctgactttggatgagtcgtatgaccttgttgttgaaaatgaagaagtcctaactttgcaagaaactctggaagcacttagcctctctgaatattttagcacttttgaaaaggaaaagattgatatggagtccctgcttatgtgtacagntgatgacctgaaggaaatggggataccccttggacccagaaagaagatagctaactttgtagaacataaagcagccaaactgaaaaaagcagcgtcagaaaagaaggcagtggcggccacttctacaaaaggacaagagcaaagtgcccagaagactaaagacatggcttccctcccctcagaatccaatgagccaaagaggaaacttccagttggtgcttgcgtgtcttctgtgtgtgtgaattatgaatcttttgaagttggcgccggacaggtttctgttgcttacaactcattanattttgaaccagagatattctttgccttggggtctccaattgctatgtttctcactattcgaggagttgataggatagatgagaattacagccttnctacctgtaaagggttcttcaatatttatcatccgcttgatccagtggcatatagattagacctatgattggtccagatttggacctaaaagctgtctcattcccatcacaaaggcngaaaagacttcttttagaattgaaagagagtctctctcgnatgggatctgatttgaagcagggtttattacctctttcaaaa

SEQ ID NO: 3558 - DNA, 806 bp, Homo sapiens
  misc_feature (767)..(767): "n" may be a, t, c, g, other or unknown
  misc_feature (772)..(772): "n" may be a, t, c, g, other or unknown
  misc_feature (785)..(785): "n" may be a, t, c, g, other or unknown
gatgctgaaattcagaagtcagcacttcagattgtcatcaattgtgtgtgtggcccagataaccgaatatccagtattggtaaatttatctctggtactcctcggagaaagctgcctcagaaccctaaaagcagtgagcacaccctggccaagatgtggaatgtggttcagtccaacaacggcatcaaggtgctcctgtccttactgtccattaagatgcccatcacagatgcagaccaaatccgggccctggcctgcaaagccctagtgggcctgtctcgcagtagcactgtccggcagatcatcagtaaactgccccttttcagcagctgccagatccagcagctgatgaaggagcctgtgctgcaggacaagcgcagtgaccatgtcaagttctgcaagtatgctgctgaactcattgaacgggtgtcaggaaaaccacttctcattggcactgatgtttccctagcacgactgcagaaagcagatgttgttgcccagtcaaggatctccttccctgagaaagagctgcttttgttgatacgaaaccatcttatttctaaagggcttggagaaacagcaaccgtgctgacaaaagaggctgacctgcccatgactgctgcctcccattcttctgcctttaccccagtcactgctgctgcttctcctgtctctctaccccgaacccctcgtatcgctaatggcattgcaactcgtctgggcagccatgctgctgtgggtgcctctgcgccttctgcccctactgntcatncttaagccacggnccccccagggtccgctagctt

SEQ ID NO: 3559 - DNA, 839 bp, Homo sapiens
  misc_feature (659)..(659): "n" may be a, t, c, g, other or unknown
  misc_feature (774)..(774): "n" may be a, t, c, g, other or unknown
  misc_feature (791)..(791): "n" may be a, t, c, g, other or unknown
  misc_feature (793)..(793): "n" may be a, t, c, g, other or unknown
gtttttacctaagcaagcctgggcaatggcgggcgtccctcccccagcctcgttgccgccttgcagtttgatctcagactgctgtgctagcaatcagcgagattccgtgggcgtaggaccctctgagccaggaactgaagttaaaagatgaagaatgtgagaggctttcaaaagtgcgagatcaacttggacaggaattggaagaactcacagctagtctatttgaggaagctcataaaatggtgagagaagcaaatatcaagcaggcaacagcagaaaaacagctaaaagaagcacaaggaaaaattgatgtacttcaagctgaagtagctgcattgaagacacttgtattgtccagttctccaacatcacctacgcaggagcctttgccaggtggaaagacaccttttaaaaaggggcatacaagaaacaaaagcacaagcagtgctatgagtggcagtcatcaggacctcagtgtgatacagccaattgtaaaagactgcaaagaggctgacttatccttgtataatgaattccgattgtggaaggatgagcccacaatggacaggacgtgtcctttcttagacaaaatctaccaggaagatatctttccatgtttaacattctcaaaaagtgagttggcttcagctgttctggangctgtggaaaacaatactctaagcattgaaccagtgggattacaacctatccggtttgtgaaagcttctgcagttgaatgccgaggacccaaaaaaatgtgctctactgggccanagtaagtcctgtaaacncnggaatttaaattaaggggactcaagccactattaataaaattcttc

SEQ ID NO: 3560 - DNA, 777 bp, Homo sapiens
  misc_feature (651)..(651): "n" may be a, t, c, g, other or unknown
  misc_feature (698)..(698): "n" may be a, t, c, g, other or unknown
  misc_feature (714)..(714): "n" may be a, t, c, g, other or unknown
  misc_feature (773)..(773): "n" may be a, t, c, g, other or unknown
ataacatgattcatcaggtgccaattaaatccctccctcaagaatggctttggtgtgaaacgtggtgtgatgacgcctctaagaaaagggcaaaaaccattgatttgtgtaataatccgatgaccaaagagccgaaactggaagcagctgtgcggattgtcccggagtggcaggactacgaccaagagatcaaacagctacagatccgctttcagaaggagaaagaaacgggagcactgtacaaagagaagacaaaagaaccaagccgagaaggtcctcagaaacgtgaagaattatgatctctggagaaggacaggaaatcaccccatttgaaaaacagtttttataataaatgctagttttttctgatctgtctatacaactgctgataagccggctgggcaggagtgccacaccttttgattctgagcatttgattctgacttctgtactctggtggccactggatctttgggattaaagctctgttggatttgtacctcagaggaagaccaagtggctgatcctttggactctgtaaagagcattcttctagtcagagggtggaatggcagcagcaactggaagaaaatgagttttttggtgcccacacccaagagcacacacatgctgcactgtctcggaaagcanggccagctagagccaccatgttcttcttacctcagtttacctgcggnctgcgctgcactgcanatgcccaccctgccctgggtctggccggcggaagctctgtccaaggtccacacaccttncagg

SEQ ID NO: 3561 - DNA, 743 bp, Homo sapiens
  misc_feature (697)..(697): "n" may be a, t, c, g, other or unknown
  misc_feature (720)..(720): "n" may be a, t, c, g, other or unknown
  misc_feature (729)..(729): "n" may be a, t, c, g, other or unknown
ccccgcccctggagccggcggcgcagggcgcagcttcccgccgccagagcgggccagcctgctgcgtgcgtgcgtgtgtacgactctgcgtgcgtgcgtgcgtgcgtgcgtgccgtcagctcgccgggcaccgcggcctcgccctcgccctccgcccctgcgcctgcaccgcgtagaccgacccccccccagcgcgcccacccggtagaggacccccgcccgtgccccgaccggtccccgcctttttgtaaaacttaaagcgggcgcagcattaacgcttcccgccccggtgacctctcaggggtctccccgccaaaggtgctccgccgctaaggaacatggcgaaggtggagcaggtcctgagcctcgagccgcagcacgagctcaaattccgaggtcccttcaccgatgttgtcaccaccaacctaaagcttggcaacccgacagaccgaaatgtgtgttttaaggtgaagactacagcaccacgtaggtactgtgtgaggcccaacagcggaatcatcgatgcaggggcctcaattaatgtatctgtgatgttacagcctttcgattatgatcccaatgagaaaagtaaacacaagtttatggttcagtctatgtttgctccaactgacacttcagatatggaagcagtatggaaggaggcaaaaccggaagaccttatggattcaaaacttanatgtgtgtttgaattgccagcanagaatgatnaaccacatgatgta

SEQ ID NO: 3562 - DNA, 814 bp, Homo sapiens
  misc_feature (754)..(754): "n" may be a, t, c, g, other or unknown
  misc_feature (773)..(773): "n" may be a, t, c, g, other or unknown
  misc_feature (796)..(796): "n" may be a, t, c, g, other or unknown
gcaaaaatatgaaccaagagaaattcaataagagcctttcatagaggagtagaaaggattattacagaatccaatgaatgccaagaaaatgtacagcaaatgtgccacttgaatatctagtatgaagctggtaatgaagaaattgccatttctgaagcagatatgaaatatgatctgcttaattgttaaggcaactgacctttcaaaagtgcagagtcttattaaaagaggggaggggtagaagcagaataatagtcatatgtctaacctgccccagttaactcctcttgttaaattataagccagttatcttttttagatagtatttttgtcacttggataatcacaggaaatatataagaaaagagcttggactaacttgagaagttggacatggaaagcaagaccaagttccagttgggtttaattttccctcttggttattttcggacacaaagggaatgcttaaaactgagtttagtaataaaaagcataaatctcttctgtaacttttataaaccacagggaggtttcaatccatgcattttccttcattactcaagattataaatctgtttttaaaatacatctaaacaaacagttgagaaacaaaagtttggcatgttgtcagatccccttaagaggaagaggttaagctgtaaagtagtggccctgttttgatgccagaacattcatatgctgttggtctggatttcttttaaatgcatgtattttaaatctggttaaatcttanaatcttggctatatcttanaattctggctcttggtaccattnttccagaagtctatattg

SEQ ID NO: 3563 - DNA, 887 bp, Homo sapiens
  misc_feature (677)..(677): "n" may be a, t, c, g, other or unknown
  misc_feature (822)..(822): "n" may be a, t, c, g, other or unknown
  misc_feature (883)..(883): "n" may be a, t, c, g, other or unknown
  misc_feature (886)..(886): "n" may be a, t, c, g, other or unknown
cagaagcagtagtccaaacctagtatagggaaaggataaaaataagtcaccttcaccaagagatgccaatgattaccaaacaacagacaattgccaaatactggtttctctttcccctgaaaatggcttttgttctcaaatgataagagagctaatacatttagctaatattctagctctctttattatggaacagatcttgatagatggtttaattttctcctaaagagaaataatcagttgagaatttgagaatgggttgtaattatcgctcacccattgggatggttcattgtttaaatatggcattttccccccttcagctgcaggttcctgagatttggtgcctgtgagctctgattgtaggaatgcatgtgacagtcccagtcctatggtaatgacttaggaggaatgcagataaaagtaccttgtaagataaatataaattggagttaggaatttcatgaacctcactatgaccaaaattaattttttgattcagtttgtctgtctgtctgtccttcccctctcttcttttttcagggtgaggtgctgtgtttcttatttcatacgagataaaacagagagaagttctctcttctccagcttgtccatttccccacttgaagaaaacttttgatatatatgccttactgagtacatgccccctttaatgntaatatgacttggagtaatttctgaggtttactgacaaacataaaaatccctttaattgtagtgtagttggtctataaaccatattttttcatgatgtggatattttcttctatttctttggcttcatttaatttggtgggtggngaactttacttgctggattttcttttatttttcctggatgaagtttgggcttggaatgaanagng

SEQ ID NO: 3564 - DNA, 796 bp, Homo sapiens
  misc_feature (671)..(671): "n" may be a, t, c, g, other or unknown
  misc_feature (738)..(738): "n" may be a, t, c, g, other or unknown
  misc_feature (784)..(784): "n" may be a, t, c, g, other or unknown
  misc_feature (793)..(793): "n" may be a, t, c, g, other or unknown
tcgggttggtgtcatggcagctgcggggagccgcaagaggcgcctggcggagctgacggtggacgagttcctagcttcgggctttgactccgagtccgaatccgaatccgaaaattctccacaagcggagacacgggaagcacgcgaggctgcccggagtccggataagccgggcgggagcccctcggccagccggcgtaaaggccgtgcctctgagcacaaagaccagctctctcggctgaaggacagagaccccgagttctacaagttcctgcaggagaatgaccagagcctgctaaacttcagcgactcggacagctctgaggaggaagaggggccgttccactccctgccagatgtgctggaggaagccagtgaggaggaggatggagcggaggaaggagaagatggggacagagtccccagagggctgaaggggaagaagaattctgttcctgtgaccgtcgccatggttgagagatggaagcaggcagcaaagcaacgcctcactccaaagctgttccatgaagtggtacaggcgttccgagcagctgtggccaccacccgaggggaccaggaaagtgctgaggccaacaaattccaggtcacggacagtgctgcattcaatgctctggttaccttctgcatcagagacctcattggcttgtctncagaagctgctgtttggaaaggtggcaaaggatacagcaggatcttgcaacccgtccagcaacccgnttttgggggaagcttctgtggacattaaggcttacctggcttcggncatacaggntgg

SEQ ID NO: 3565 - DNA, 834 bp, Homo sapiens
  misc_feature (751)..(751): "n" may be a, t, c, g, other or unknown
  misc_feature (775)..(775): "n" may be a, t, c, g, other or unknown
  misc_feature (787)..(787): "n" may be a, t, c, g, other or unknown
cttatatgtgaaaagtctataggtacttgtaatagacctttgggcgctggggaggccttgagacgagtaatggagtgtttggcatctggaatactacttcctgggggtcctggtcttcatgatccttgtgagcgagacccaacagatgctctgagctatatgaccatccagcaaaaagaagatattacccacagtgcacagcatgcactcagactatcagcctttggccagatttacaaagtgctggagatggacccccttccatctagtaagccttttcagaagtattcctggtcagttactgataaagaaggtgctgggtcttcagctctaaagaggccatttgaagatggattaggggatgataaagaccccaacaagaagatgaaacgaaacttaaggaaaattctggatagtaaagcaatagaccttatgaatgcactaatgaggctaaatcagatcaggcctgggcttcagtataagctcctatctcagtctggccccgttcatgccccagtcttcacaatgtctgtagatgtggatggcacaacatatgaagcctcaggaccatccaagaaaacagcaaaacttcacgtagcggtgaaggtattgcaggcaatgggatatccaacaggctttgatgcagatattgaatgtatgagttccgatgaaaaatcagataatgaaagtaaaaatgaaacagtgtcttcaaactcaagcaataatactggaaattctacactgaaacctncagtaccttagaggtaagactcanggccctatcctnacagcaagtggcaaaaaccctgtatggagctaatgaaaaaagaagag

SEQ ID NO: 3566 - DNA, 772 bp, Homo sapiens
  misc_feature (600)..(600): "n" may be a, t, c, g, other or unknown
  misc_feature (609)..(609): "n" may be a, t, c, g, other or unknown
  misc_feature (706)..(706): "n" may be a, t, c, g, other or unknown
  misc_feature (722)..(722): "n" may be a, t, c, g, other or unknown
  misc_feature (746)..(746): "n" may be a, t, c, g, other or unknown
gggccgaggcgcgggagaggcggtggacaccgagaagcccgccggcggcttgcaattccctcacccggcgcgcgcctttcgcagagggaaggagcaagagggcccctacctcatcgtgcgcgggtggggtcggcgcttgtcgcgtgtggcgcgcagtggggcgggcggcgggaggggggtggcagtggagggagcgagaggtgcaggggtgactttgttggcagcaggactagctggagagctagacctggaagcgcatccggggaggacttgcggggcagaggagggcgtgggcgtgtctggtatgggatgcagtggaaaggagggggccctcctgagtagatctgtgggtgattccttcgaggacgcctcgtcttcccgtctgcccttttatttgtcagcgagggagtccccatggtctctgttcaagttctggaaactttctctttgggtgggcttaatcacctgctactaaatcgtagaactgcccagggccctttctaatattggtcacaaacgtgaggagtatgtcagaaaacagaaaaccgctgctgggctttgtaagcaaactcactagtgggactgcacttgggaactcangcaagactnactgccccctgtgcttggggcttttcaaagcccccaggctcttgccttggttgcatacagtttgcaccacgtgtctggagcaactggagcccttctngtagtggacattccanggggaaaattttgacacaaacttnttaaggggtcaaatatttcaggaact

SEQ ID NO: 3567 - DNA, 875 bp, Homo sapiens
  misc_feature (703)..(703): "n" may be a, t, c, g, other or unknown
  misc_feature (835)..(835): "n" may be a, t, c, g, other or unknown
  misc_feature (862)..(862): "n" may be a, t, c, g, other or unknown
  misc_feature (874)..(874): "n" may be a, t, c, g, other or unknown
gtgcgcgctccctcggtgcggcgggctgcgtgcgcgagtgggaggtggcaggcctgcgactccggccttgtccgcgcccgctctcggcgcgacgtctccagccatgaaccggtttggtacccggttggtgggagccacggcgacttcttcgccgccgccgaaggcccgcagcaatgaaaacctcgacaaaatagatatgtctttggatgatatcatcaagttgaatcgaaaggaagggaagaagcagaattttccaagactaaatagaagactcctccagcaaagtggtgcccagcaattcaggatgagagtgcgatggggaatccaacagaattctggttttggtaagactagtctgaatcatagaggaagagtaatgcctggaaagagacgtcctaatggagttatcactggccttgcagctaggaaaacgactggaattcgaaaaggaattagtcctatgaatcgtccacctctaagtgacaagaatatagaacaatattttccagtgttaaaaaggaaggcaaaccttctgagacaaaatgaagggcagaggaaaccagtagcagttctcaagagacctagccagctaagcagaaaaaataacattccagctaattttaccaggagtggaaataaattaaatcatcagaaagatactcgtcaggcaacttttcttttcagaagaagcctgaaagtgcangcccagttgaatacagaacaactgctagacgatgtagtacaaagagactcgtcaatggcggactttcaccacaaatggagggattttgactggatctattgacaatcctggaacaatgcaatgcccatactnagaaaccacgattaactctactggtgnaccttcattttna

SEQ ID NO: 3568 - DNA, 772 bp, Homo sapiens
  misc_feature (677)..(677): "n" may be a, t, c, g, other or unknown
  misc_feature (739)..(739): "n" may be a, t, c, g, other or unknown
  misc_feature (756)..(756): "n" may be a, t, c, g, other or unknown
aattaaatgcatatgttctccaagaaccacctaaaggagaaacctacacctacgactggcagctgattactcatcctagagactacagtggagaaatggaagggaaacattcccagatcctcaaactatcgaagctcactccaggcctgtatgaattcaaagtgattgtagagggtcaaaatgcccatggggaaggctatgtgaacgtgacagtcaagccagagccccgtaagaatcggccccccattgctattgtgtcacctcagttccaggagatctctttgccaaccacttctacagtcattgatggcagtcaaagcactgatgatgataaaatcgttcagtaccattgggaagaacttaaggggcctctaagagaagagaagatttctgaagatacagccatattaaaactaagtaaactcgtccctgggaactacactttcagcttgactgtagtagactctgatggagctaccaactctactactgcaaacctgacagtgaacaaagctgtggattacccccctgtggccaacgcaggccccaaccaagtgatcaccctgccccaaaactccatcaccctctttgggaaccagagcactgatgatcatggcatcaccagctatgagtggtcactcagcccaagcagcaaagggaaagtggtggagatgcanggtgttagaacaccaaccttacagctctctgcgatgcaagaaggagacttccttaccagctnacagtgactgaccaatnggacagcaggccactg

SEQ ID NO: 3569 - DNA, 873 bp, Homo sapiens
  misc_feature (502)..(502): "n" may be a, t, c, g, other or unknown
  misc_feature (707)..(707): "n" may be a, t, c, g, other or unknown
  misc_feature (740)..(740): "n" may be a, t, c, g, other or unknown
  misc_feature (815)..(815): "n" may be a, t, c, g, other or unknown
  misc_feature (854)..(854): "n" may be a, t, c, g, other or unknown
aagaaaaagccgggtgaggtggtgtgtacctgtagtcacaggtacttgggaggctgaggtgggaggatcacttgagcccaggagatagaggctgcagtgagctgtgatcgtaccactgcactccagcctgggcgacaaaatgagaccctgtctcaaaagaaagccctctccttagctgagcagaggaagggaaggagtgtggctatgagaatatgatttatgccattttctgtttttaaatctagaagatcttctaagcacaaatacagctacaatgaaatattttacagacaaaatgttaatagaccatattctttgaattaaatttgtttttaattttctctacacattttttttttcctggagtctcttagctctaaatatatcaatcagatttatattttttttacctgattcagatgtcttacatttttatattaaatgaaccttaagcatgattcttttggtaagccagtatgaatgccagtggttggggggcggnggggggagtcagttgacataagatttagtcctaataaggactctgtattcacttgattattctgacccttcctaagggagggaggtggattagataccactggaggcccattctgtattcctaatccagtctcagcactttattcatacaaaataatcaaaataggttttctacaccaaatgctcccagcagtgctctataattnatttgcacacctgtatgtggggtgccatgttanccactaaatctgaacttttaccctgctttcatcatggatttttttgggtaacccggaaacaagtcccaatgcttnctgggcctggtttcctcatttgcaccaggagggtaattnccgacctaccttttgaaaa

SEQ ID NO: 3570 - DNA, 737 bp, Homo sapiens
  misc_feature (707)..(707): "n" may be a, t, c, g, other or unknown
  misc_feature (715)..(715): "n" may be a, t, c, g, other or unknown
  misc_feature (735)..(735): "n" may be a, t, c, g, other or unknown
aatcccaaaggggcccagatgcagccgatctccctccccagagttcagcaggtaccccagcaggtgcagccggtgcagcacgtgtatcctgcccaggtgcagtacgtggaagggggagacgccgtctacaccaatggaaccatacgaacagcctacacctacaaccccgagcctcagatgtacgcccccagcagcacggcttcttacttcgaggccccaggcggtgcccaggtgaccgtggcagcctcgtccccgccagcggtcccctcccacagcatggtgggcatcaccatggatgtcggggggagccccatcgtctccagcgcgggagcctatctcatccacggggggatggacagcaccagacactccctggcccacacctcccgctcatcgcccgccacgctccagtggctgttggataattatgaaacagcggaaggtgtgagtctccccagaagttctctttacaaccactaccttcggcactgccaggagcacaagctagacccagtgaacgccgcctccttcgggaaactgatccgttctgtgtttatggggctgagaacgcggcggctgggcaccaggggcaactcgaagtaccattactatgggattcgtctgaagccggactcaccactgaaccggctgcaggaggacacgcagtacatggccatgcggcagcagcccatgcaccagaagcccangtaccggncagcccagaagacggacagnct

SEQ ID NO: 3571 - DNA, 840 bp, Homo sapiens
  misc_feature (683)..(683): "n" may be a, t, c, g, other or unknown
  misc_feature (712)..(712): "n" may be a, t, c, g, other or unknown
  misc_feature (774)..(774): "n" may be a, t, c, g, other or unknown
  misc_feature (810)..(810): "n" may be a, t, c, g, other or unknown
  misc_feature (828)..(828): "n" may be a, t, c, g, other or unknown
ggatttgggagttgagcaccttcgtcgccattggctttcctcccccagctccagcctctctcatcttgggaatctgcgtcagaagtcactcgcagtcccgtcagcccagaagaagacgtaaagcaggctaccagcaattttgagaacttgcaaaaacagcttgcaaggaaaatgaagcttcctattttcatagcagatgcattcacagcaagagcatttcgtgggaatcctgctgctgtttgcctcctagaaaatgaattggatgaagacatgcatcagaaaattgcaagggagatgaacctctctgaaactgcttttatccgaaaactgcacccgacagacaactttgcacaaagttcctgctttggactgagatggtttacaccagcgagtgaggtcccactctgtggccatgccaccctggcttctgcagctgtgctgtttcacaaaataaaaaacatgaatagcacgctcacgtttgtcactctgagtggagaactaagggccagacgagcagaggacggcatcgtcctggacttgcctctttatccagcccacccccaggacttccatgaagtagaggacttgataaagactgccataggcaacacactggtccaggacatctgttattctccagatacccaaaagctcctcgtccgcctcagtgacgtttacaacangtcgtttctggagaacctgaagtgacacngagaatctgctgcagttgaaaacacagggaaggtgaaaggcttattcttacccttaaagganacctggtgggcaacccaacatttgctttactcaaanattttcccgggggtgggngctgaaaccctg

SEQ ID NO: 3572 - DNA, 514 bp, Homo sapiens
  misc_feature (396)..(396): "n" may be a, t, c, g, other or unknown
  misc_feature (474)..(474): "n" may be a, t, c, g, other or unknown
  misc_feature (476)..(476): "n" may be a, t, c, g, other or unknown
  misc_feature (514)..(514): "n" may be a, t, c, g, other or unknown
acattgaccaggtggccagacacctgaggtgaggcccaggggcacctgcatgtgtataggcaggggtggagacaaggatggatcttgaggtgctgggattgtgagacaggaggtgggtagtatacttggcggggaggcccatgtgcgtaaggctgagaggtggaaagagctggctgctatagagctagtgaggttgctttcaggaagcagccaagtacagatgccacggccgagcatgatggtgcatgcctgtaatcccagcaatttgggaggccgaggcaagagggtcatttgggcccaggaattcgaaaccagcttggccaacatgggaaaaccccatctctaccaaaacaaatacaaaaattagctgggcgtggtggtgcacgcctgtaccanttacttgggaggctgaggtgagaagggattgattgagccctggaaggtaaggctacagtgagtcatgatgggtggcanancaagaccctgtttctttctttctttctttctttctttn

SEQ ID NO: 3573 - DNA, 849 bp, Homo sapiens
  misc_feature (742)..(742): "n" may be a, t, c, g, other or unknown
  misc_feature (766)..(766): "n" may be a, t, c, g, other or unknown
  misc_feature (813)..(813): "n" may be a, t, c, g, other or unknown
  misc_feature (844)..(844): "n" may be a, t, c, g, other or unknown
agagcttgggatcgctttctgctattcaacgtcctccacctctgcccccctctccccccagccggtgacaggctgttgccctgtgatctgcaggtcctgggacgtgcacagacagctaagatgccaggacattccagaaggtgggaaaggcacctgagtaatttgactctcctgcctggacccagcgtacagatgggattgtgcttcattgctggacccagcatttaggcccactacctatgagattgcatgctcctgcctgggctgtgcccacagtgaccttgtgacatatatctgcatccatgacctaaaagatgtgacacttcttgcctgcaacctgccctgcacaggaaagattgcgacttctccctggaagcagacaccagggatcgtcactcccgtggatgatcaaaggcgcctgtaatttcagctactccgggggctgaggcaggagaatcgcttgaactcgggaagcagaagttgcagtgagccaaggtcgcaccactgcactccagcccaggcgacattgtgagactccatctcaaaaaaaaagaaaaaaagtgtactaacaagacccagcacacagaggagacttttaccattgtatgaacacccatcaaacagtacacatcatcattgtgagttctgaatctcacacatagaggaagtcaaaggtggaaaacttgactctcatatttggatccagtccacaggtgtgattttgacgcacacttctgcccancacctgagtaatgtgattcttcanaattggcccgggccacaaataggattgtgccacactgctggacccantgcctaaatgatgtaactctattctttttgncttgg

SEQ ID NO: 3574 - DNA, 725 bp, Homo sapiens
  misc_feature (468)..(468): "n" may be a, t, c, g, other or unknown
  misc_feature (589)..(589): "n" may be a, t, c, g, other or unknown
  misc_feature (695)..(695): "n" may be a, t, c, g, other or unknown
  misc_feature (710)..(710): "n" may be a, t, c, g, other or unknown
  misc_feature (725)..(725): "n" may be a, t, c, g, other or unknown
gtgtggaagtgacgctgcccccgctgcccaaaatgtcggcgcccagagggaggtagagagcccccacataccactgtattccccgccaccatggatgacgtccccgccccaacccctgcaccagcaccgcccgccgctgccgcccccagggtcccgtttcactgcagtgaatgtggcaagagcttccgctaccgctcagacctgcggcgccactttgcccggcacacagcgctcaagccccacgcatgtccgcgctgcggcaagggtttcaagcacagcttcaacctagccaaccacctgcgctcgcacaccggggagcggccctaccgctgctctgcctgccccaaggggttccgcgactccaccggcctgctgcaccaccaggtcgtccacactggtgagaaaccctactgctgcctggtctgcgagctccgcttctcctcacgctccagcctgggccgccacctnaggcgccagcaccgtggggttctcccctctcccctgcagcccggccctggcctgcccgccttgagtgcgccctgctccgtctgctgcaatgtggggccctgctcggtgtgcgggggctcangggccggcggcggagagggccccgagggggcaggcgcgggtctgggcagctgggggctggcagaagcggcagctgcggccgcggctcttgccccattttgcgtgcngcgcctgcgcgcggngcttgacacgggcgn

SEQ ID NO: 3575 - DNA, 710 bp, Homo sapiens
  misc_feature (662)..(662): "n" may be a, t, c, g, other or unknown
  misc_feature (669)..(669): "n" may be a, t, c, g, other or unknown
  misc_feature (693)..(693): "n" may be a, t, c, g, other or unknown
agtccgctccggcagcgcgctctgcccggcttcctcagtctcctcgccgggagcgtccgggagcagctccgaggccgcggcgaaaccaggtggagtccgaggttcggaggagtatcagaggttaggggaaggccggagaatgggctgggaggctgcgtttcggagcttagggttctgtccctgcgatcgccgcgtctccctcccttggtgggcgcggctcccgggaagcggctcgtctcgtctcccctcacaggccgggttcccgttctggaccttcgccctcggaacacagtgctgttggccgggactccttcccgaggtggacggctccctgttcttattcctggctctgccagaactgtaggaagtgctcagtacactttagggcatgcatggcactccctgggagacagtgctttagggccagaggaaagatcttccctgaaggcaaacgcccgcggagcccacaagtccgggccgcactgaacaagtcaggatgttgccatcggcaattctgcagaaggcagtaacccatctgagagaaagagccgctgtcataaggtctcttgcttgagctgctgggttgagaatggagctggaagagggaactgatctcggagctccttggggatcttgggtatgtttgacccttttactttcanggagcanggattggatcaaagtcattgcatntagagtaccgggggaac

SEQ ID NO: 3576 - DNA, 814 bp, Homo sapiens
  misc_feature (690)..(690): "n" may be a, t, c, g, other or unknown
  misc_feature (741)..(741): "n" may be a, t, c, g, other or unknown
  misc_feature (749)..(749): "n" may be a, t, c, g, other or unknown
  misc_feature (798)..(798): "n" may be a, t, c, g, other or unknown
ctataaaatctcagtaccagtttccaccccctctcattgcacccgcggccattcgggacggggagctgatctgcaatgggatccctgaggaatcacagatgcaccttttgaactctgagcacttagccacccaagcagagcagcaagagtggctctgtagtgttgttgcgctccagtgcagcatattgaaacatttatctgctaagcagatgccttcgcattgggactctgaacagacagagaaggctgatattaagcctgttattgtgactgacagctcagtcaccacctccctgcaaacagctgacaagacacctacaccttcccactaccccttgtcctgcccctcagggattagcacccagaattccctgagctgctctccaccccaccagtccccagccctagaggacatcggctgcagttcttgtgcggaaaaatccaagaaaaccccttgtgggactgccaatgggccagtgaacacagaggtgaaagctaatggcccacacctctacagcagccctactgattccacggacccccggcgacttccaggcgctaacaccccactaccaggcctctcacaccggcaaggctggccccggcccctcacgccaccagcggctgggggccttcagaaccacaccgtcggcatcattgtgaagacagagaatgccactggccccagtnttgccccagaggagttggttctgtccaagctgcccttcattccagctttgngccagatngagacaccagccttgaaagaagatgtcatccagatggactcgtgcaatnaggcctggttacccaa

SEQ ID NO: 3577 - DNA, 743 bp, Homo sapiens
  misc_feature (604)..(604): "n" may be a, t, c, g, other or unknown
  misc_feature (663)..(663): "n" may be a, t, c, g, other or unknown
  misc_feature (674)..(674): "n" may be a, t, c, g, other or unknown
  misc_feature (727)..(727): "n" may be a, t, c, g, other or unknown
actattggccagttccgttcaacgaagtggttgctttttttagttccggcaatgagttgcgccggggcggcggcggctccccgcctttggcggctgcgcccgggggcccggcggtccctctcagcttatggaagaagaaccagtgtcagatttcgcagttcaggaatgactttagacaatatcagtcgggcagctgtggatcgaataatccgggtggatcatgcaggcgaatatggagcaaaccgcatctatgccgggcagatggctgtcctgggtcggaccagcgtcgggccagtcattcagaaaatgtgggatcaagaaaaggaccatttgaaaaagttcaatgagttgatggttatgttcagggtccggccaacagttctgatgcccttgtggaacgtgctggggtttgcactgggggcggggaccgccttgctcgggaaggaaggtgccatggcctgcaccgtggcggtggaagagagcatagcacatcactacaacaaccagatcaggacgctgatggaggaggaccctgaaaaatacgaggaacttcttcagctgataaagaaatttcgggatgaagagcttgagcaccatgacatangcctcgaccatgatgcagaattggctccagcctatgccgtcctgaagagcattatccangccggatgcanagtggcgatatatttatcagaaagattattaaagtgtgtccagttttgcctgnctataaaagatgatag

SEQ ID NO: 3578 - DNA, 812 bp, Homo sapiens
  misc_feature (780)..(780): "n" may be a, t, c, g, other or unknown
  misc_feature (782)..(782): "n" may be a, t, c, g, other or unknown
  misc_feature (800)..(800): "n" may be a, t, c, g, other or unknown
gcggagagaggcgagcaccgggaaggggagtgtggggccgctggaatgggtgaatttaaggtccatcgagtacgtttctttaattatgttccatcaggaatccgctgtgtggcttacaataaccagtcaaacagattggctgtttcacgaacagatggcactgtggaaatttataacttgtcagcaaactactttcaggagaaatttttcccaggtcatgagtctcgggctacagaagctttgtgctgggcagaaggacagcgactctttagtgctgggctcaatggcgagattatggagtatgatttacaggcgttaaacatcaagtatgctatggatgcctttggaggacctatttggagcatggctgccagccccagtggctctcaacttttggttggttgtgaagatggatctgtgaaactatttcaaattaccccagacaaaatccagtttgaaagaaattttgatcggcagaaaagtcgcatcctgagtctcagctggcatccctctggtacccacattgcagctggttccatagactacattagtgtgtttgatgtcaaatcaggcagcgctgttcataagatgattgtggacaggcagtatatgggcgtgtctaagcggaagtgcatcgtgtggggtgtcgccttcttgtccgatggcactatcataagtgtggactctgctgggaaggtgcagttctgggactcaacccactgggacgcttgtgaagaagccatctcatcgcttatgcttgacgtgcaagtccattgctgnancttgacccaagaaagacnagttttcctggg

SEQ ID NO: 3579 - DNA, 725 bp, Homo sapiens
  misc_feature (662)..(662): "n" may be a, t, c, g, other or unknown
  misc_feature (695)..(695): "n" may be a, t, c, g, other or unknown
  misc_feature (707)..(707): "n" may be a, t, c, g, other or unknown
aaatattacactctggctgaaatacgcagaaatggaaatgaagaatcgccaagtcaaccatgctcgaaatatctgggaccgggccataacaacgctgcctcgagttaatcagttctggtacaagtacacgtacatggaggaaatgttgggaaacgttgccggtgcccggcaggtgtttgagcgctggatggagtggcagcctgaggagcaagcctggcactcctacatcaactttgagctgagatacaaagaggtggatcgggcccgcaccatttatgagcgatttgtcctcgtgcaccctgatgttaagaactggatcaagtatgcccgctttgaagaaaaacatgcttattttgcccatgcacggaaagtgtatgagagagctgtggaattctttggagatgaacatatggatgagcacctttatgttgcctttgccaagtttgaagaaaatcagaaagagtttgaaagggtacgagtgatttacaagtatgccctggacagaatttcaaaacaagatgcccaagaactctttaaaaattataccatctttgagaagaagtttggtgataggcggggtattgaagatatcattgtgagcaaacggaggttccagtacgaagaagaagtgaaggcgaatccacacaattatgatgcatggnttgattacttgcgcttggtagaaagtgacgcanaagcttgaaccntgagagaagtctatgaaa

SEQ ID NO: 3580 - DNA, 731 bp, Homo sapiens
  misc_feature (637)..(637): "n" may be a, t, c, g, other or unknown
  misc_feature (682)..(682): "n" may be a, t, c, g, other or unknown
  misc_feature (726)..(726): "n" may be a, t, c, g, other or unknown
gtgtaataacaacatctccgagggcgaagggtatgtggagtctccagatctggggagccccgtcagccgcaccctggggctcctggactgcacttacagcatccatgtctaccctggctacggcattgagatccaggtgcagacgctgaacctgtcacaggaagaggagctcctggtgctggctggtgggggatccccaggcctggccccccgactcctggccaactcatccatgcttggagaaggacaagtccttcggagcccaaccaaccggctgcttctgcacttccagagcccacgggtcccaaggggcggtggcttcaggatccactatcaggcctacctcctgagctgtggcttccctccccggccggcccatggggacgtgagtgtgacggacctgcaccctgggggcactgccacctttcactgtgattcgggctaccagctgcagggagaggagaccctcatctgcctcaatggcacccggccatcctggaacggtgaaacccccagctgcatggcatcctgtggtggcaccatccacaatgccaccctgggccgcatcgtgtccccagagcctgggggagccgtagggcccaacctcacctgccgttgggtcattgaagcagctgangggcgccggctgcacctgcactttgaaagggtctcgctggatgangacaatgaccggctgatggtgcgctcagggggcaaccccctatnccccg

SEQ ID NO: 3581 - DNA, 875 bp, Homo sapiens
  misc_feature (678)..(678): "n" may be a, t, c, g, other or unknown
  misc_feature (862)..(862): "n" may be a, t, c, g, other or unknown
agagaaagataatggaaatattgaacttgaaaataaaaaattagaaaaagagagtaagaatgaacaagagagagaaaagaaggaaaacatggctaaagagaatcctcccatgaattctccttgccaaataaccgtgaaaggactcagtaatttgggaaacacatgtttcttcaatgcagttatgcagaacttgtcacaaacaccagtgcttagagaactactaaaagaagtgaaaatgtctggaacaattgtaaaaattgaaccacctgatttggcattaacagaaccattagaaataaaccttgagcctccaggccctcttactttagccatgagccagtttcttaatgagatgcaagagaccaaaaagggggttgtgacaccgaaagaactcttttctcaggtctgtaaaaaagcagtgcggtttaaaggctatcagcggcaagacagccaggagctgcttcgctacttattggatgggatgagagcagaagaacaccaaagagtgagtaaaggaatacttaaagcatttggtaattctactgaaaagttggatgaagaactaaaaaataaagttaaagattatgagaagaaaaaatcaatgccaagttttgttgaccgcatctttggtggtgaactaactagtatgatcatgtgtgatcaatgcagaactgtctncttggttcatgaatctttccttgatttgtcccttccagttttagatgatcagagtggtaagaaaagtgtaaatgataaaaatctgaaaaagacagtggaggatgaagatcaagatgtgaggaagaaaaagataccacggttccttaaaagagagaatgatattcctttgggacaagtagccttnccgaaaaagcaaa

SEQ ID NO: 3582 - DNA, 816 bp, Homo sapiens
  misc_feature (645)..(645): "n" may be a, t, c, g, other or unknown
  misc_feature (719)..(719): "n" may be a, t, c, g, other or unknown
  misc_feature (740)..(740): "n" may be a, t, c, g, other or unknown
  misc_feature (805)..(805): "n" may be a, t, c, g, other or unknown
aacactacctttgctgtaatttcatttgagattttctaagggtagaatttggtctcaccaacaagtgaggatatagccttatctcatggaggacgagctccgtatttactcaggagcagtcagggtacattacataaaacaatggaggatgcctcattttagcaaactaggtttctttgtattcttcagtccttttacagaattgatgtgctaactgaatatcattgcagcaactagactaagatattcaagatctctttattggggatgggagaaatagggaaagaaatgtgtataagtaattatgatattgcaaaagtgatacttagattttacagcctcagtagtctgcccagtgtccacattaatgaaggatccatgtttgtagtgagagaaaaaaaccccaaggtaacccgatatgatttaggatgcatatcagttctaacaattcaatcagaagtcaagctcattggaattccttttttaactgatccaaatactagtagaagggggagggagaggtgttgggtttttttttaagtttttatttaattttgttggttagaatttttttctgtttttggcatcctacataataccccccttcttgactttttctgataattagctgatattcatggttgnttagcacacagttcaggacctttgagatcatgtttgtataagcactccttgaagaatatctaagcttttctganatgggcttttaaaatataatnagggaagttattttctgcggttttgcaagaataaccaagccctggaattaatttttcattggganccgattaaaat

SEQ ID NO: 3583 - DNA, 713 bp, Homo sapiens
  misc_feature (646)..(646): "n" may be a, t, c, g, other or unknown
  misc_feature (685)..(685): "n" may be a, t, c, g, other or unknown
  misc_feature (693)..(693): "n" may be a, t, c, g, other or unknown
agagtccgcgccctgcgtccgcgaccaggaggatcggaccttcgccttcgctgtcgccgccgccgccgcccgcggccgtcggggctattagtgaaagatggtggatcgcttggcaaacagtgaagcaaatactagacgtataagtatagtggaaaactgttttggagcagctggtcaacctttaactatacctggacgagttcttattggagaaggagtattgactaagttgtgcaggaaaaagcccaaagcaaggcagtttttcttgtttaatgatattcttgtatatggcaatattgtcatccagaagaaaaaatataacaaacaacatattattcccctggaaaatgtcactattgattccatcaaagatgagggagacttaaggaatggatggctaatcaagacaccaactaaatcttttgcagtttatgctgccactgctacggagaaatcagaatggatgaatcatataaataaatgtgttactgatttactctccaaaagtgggaagacacccagtaatgaacatgctgctgtctgggttcctgactctgaggcaactgtatgtatgcgttgtcagaaagcaaaattcacacctgttaatcgtcgccaccattgccgcaaatgtgggtttggtggctgngggccctgctctgaaaagagattcttcttcccagccagncctttaancctggccggatttggaactt

SEQ ID NO: 3584 - DNA, 666 bp, Homo sapiens
  misc_feature (641)..(641): "n" may be a, t, c, g, other or unknown
  misc_feature (647)..(647): "n" may be a, t, c, g, other or unknown
  misc_feature (660)..(660): "n" may be a, t, c, g, other or unknown
gtcctaagatggctgctgggcgaccacttcctgacagctccagttaacgggactgccagcaggctagacatccttcgccggaatgtgcagcgcttagttctgtgcccgggaggggcttctctctcttttgggattggagtgtggcattgccgccagaaagcctgcagaattccgggttgtgcagccaagcaggaacggtgtacctttctagacccatcctcttgcaatcttggaccctaagaaaagatgtggagtgggctgctacctcctggcctaaatgaaagtgacgctgagtcaaactcggaagatgaagctacgttggagaactctggacttaacttacaggaagataaagaggatgagagcatcagaaaaacagaaatcatagatttctcaacagatgaaccaaaaactgaaacagagtcaaatgtaaatgcctatgaagagtgtccttctggaattcccatagatatgtggaataaatttcaagaattgcataaaaaacattctgaacagaaaagcacaacctcaagattcagagggaaaagaagaaaacgctccagaaaagataaattgaagaatgaaaaagaattacatagtgaaccgtcctcaatgaaaccagtgggaagagcttacttagnattttnggggccatggttnaattta

SEQ ID NO: 3585 - DNA, 781 bp, Homo sapiens
  misc_feature (619)..(619): "n" may be a, t, c, g, other or unknown
  misc_feature (687)..(687): "n" may be a, t, c, g, other or unknown
  misc_feature (747)..(747): "n" may be a, t, c, g, other or unknown
  misc_feature (780)..(780): "n" may be a, t, c, g, other or unknown
atgcgaggctggggccggttgcctaccggccgcttctcgccgaggcagtccagacttttcccccggcggtgcccgctccaagacagcatctgtcaacgctcctcttctcccctcctcctcctgccgggccgggctccgccggctgcggccgagaggacgcgggacccggcgcggtgagcccatcagctgtcaggcgagcggcgaagcggctggagggcggcgagagacacacaaagaacgcggtgggcggcggcggcgaaaggggacggcaactcctccccgcgcccgccggtgccaccgccggccgtgcttgttccgaggccgcgcagacaatgcggccgggctcgtccccgcgtgccccagagtgcggagcgcccgcgctcccccgaccccaacttgaccgtctcccggctcgcccagccccctcccggggtaggggcgccccctccctccggtggccggcgaaggaagtcggtccgcggccgcagatcccggcaacttgcgaaccgggaaaagtttgcggcgcctccgcggggcggcgcgacgcgtcccgcccctcgcgtccgcggtcatcgcgggtgactttctcgactcgtcgtcagccggggccgagcgcggncggtggggactgcggggcgggcccggagtccgtccgaggtcttccgaccttgggcttgcggatttcangtacttccacttgggcattttctcttcatggacccttatagcaaccaaaaagtggtttancaaaacaacccgaacattttttgggatttaatnt

SEQ ID NO: 3586 - DNA, 489 bp, Homo sapiens
  misc_feature (28)..(28): "n" may be a, t, c, g, other or unknown
  misc_feature (35)..(35): "n" may be a, t, c, g, other or unknown
  misc_feature (154)..(154): "n" may be a, t, c, g, other or unknown
  misc_feature (176)..(177): "n" may be a, t, c, g, other or unknown
  misc_feature (357)..(357): "n" may be a, t, c, g, other or unknown
  misc_feature (386)..(386): "n" may be a, t, c, g, other or unknown
  misc_feature (408)..(408): "n" may be a, t, c, g, other or unknown
  misc_feature (470)..(470): "n" may be a, t, c, g, other or unknown
  misc_feature (487)..(487): "n" may be a, t, c, g, other or unknown
tgtgaattgggccagaagatcagagtgnaatatgngtaatactccaaagtatgctaaattagaagaaagaacaggatatggtggtggttttaatgaaagagaaaatgttgaatatatagaaagagaagaatctgatggtgaatatgatgagttnggacgtaaaacgaaaaaatacnnagggaaagcagttggtcctgcatctatattaaaggaagttgaagataaagaatcagagggagaagaagaggatgaggatgaagatctttctaaatataagttagatgatgatgaggatgaagatgacgctgatctctcaaaatataatcttgatgccagtgaagaagaagatagtaatanaaagaaatctaatagacgaagtcgctcanagtctcgatcttcacattcacnatcttcatcacgctcatcctccccctcaagttcaaggtctaagtccaggtcccgttcaagangttcttccagttcgcantc

SEQ ID NO: 3587 - DNA, 819 bp, Homo sapiens
  misc_feature (782)..(782): "n" may be a, t, c, g, other or unknown
  misc_feature (789)..(789): "n" may be a, t, c, g, other or unknown
  misc_feature (811)..(811): "n" may be a, t, c, g, other or unknown
gtcccgggtggaggcggcggagccggagccgggggagggggcagcggctgtctcacggaccacggcggcgcccgcagctcctcaccgaaacaaggagaccagtgctggtccagtggctgtgatgggaaaagattattacaagattcttgggatcccatcgggggccaacgaggatgagatcaagaaagcctaccggaagatggccttgaagtaccacccagacaagaataaagaacccaacgctgaggagaagtttaaggagattgcagaggcctatgatgtgctaagtgaccccaagaaacggggcctgtatgaccagtatggggaggaaggcctgaagaccggcggtggcacatcaggtggctccagtggctcctttcactacacctttcatggggacccccatgccacctttgcctccttctttggtggctccaaccccttcgatatcttctttgccagcagccgctccactcggcccttcagtggctttgacccagatgacatggatgtggatgaagatgaggacccatttggcgctttcggccgttttggcttcaatgggctgagtaggggtccaaggcgagccccagaaccactgtaccctcggcgcaaggtgcaggaccccccagtggtgcacgagctgcgggtgtccctggaggagatctaccatggcttcaccaagcgcatgaagatcacaaggcgtcgccttaaccctgatgggccgaactgtgcgcaccgaggacaagatccttgcacatagtcattaagcgttggcttgnaaggaangcacccaagatcacctttcccnaagaaagg

SEQ ID NO: 3588 - DNA, 664 bp, Homo sapiens
  misc_feature (639)..(639): "n" may be a, t, c, g, other or unknown
  misc_feature (653)..(653): "n" may be a, t, c, g, other or unknown
  misc_feature (655)..(655): "n" may be a, t, c, g, other or unknown
aaaaaatcacccggatggcggctgcgacgcgcggctgccggccctggggctcgctcctcgggctgctcgggctggtctcggccgcggccgccgcctgggacctggcttccctgcgctgcaccttgggcgccttttgcgaatgcgacttccggcccgacttgccgggtctggagtgtgacctggctcagcacctggccggccagcatctggccaaggcgctggtggtgaaggcgctgaaggcctttgtgcgggacccagcccccaccaagccgctggtcctctccctgcacggctggaccggcaccggcaaatcctatgtcagctccctgctggcgcactacctcttccagggcggcctccgcagcccccgcgtgcaccacttttctcccgtcctccacttcccccaccccagccacatcgagcgctacaagaaggatctgaagagctgggtccaagggaacctcactgcctgtggccgctccctcttcctcttcgatgagatggacaagatgcccccaggcctgatggaagtcctgcggcctttcctgggctcctcctgggtggtatacgggaccaattaccgcaaagccatcttcatcttcatcaggtggggcccggctttgcagtgggcacaatgcngggggccacttttnanaggttaact

SEQ ID NO: 3589 - DNA, 816 bp, Homo sapiens
  misc_feature (622)..(622): "n" may be a, t, c, g, other or unknown
  misc_feature (687)..(687): "n" may be a, t, c, g, other or unknown
  misc_feature (748)..(748): "n" may be a, t, c, g, other or unknown
  misc_feature (794)..(794): "n" may be a, t, c, g, other or unknown
  misc_feature (813)..(813): "n" may be a, t, c, g, other or unknown
gcgagcctgcgttttccggccagaggacatgatgcagggggaggcacaccctagtgcttcccttattgacagaaccatcaagatgagaaaagaaacagaggctaggaaagtggtcttagcctggggactcctaaatgtatctatggctggaatgatatatactgaaatgactggaaaattgattagttcatactacaatgtgacatactggcccctctggtatattgagcttgcccttgcatctctcttcagccttaatgccttatttgatttttggagatatttcaaatatactgtggcaccaacaagtctggttgttagtcctggacagcaaacacttttagggttgaaaacagctgttgtacagactacgcctccacatgatctggcagcaacccaaatccctcccgctccaccttccccttcaattcagggtcagagtgtgttgagttatagcccttctcgttcgcccagtaccagtcccaagttcaccaccagctgtatgactggttacagccctcagctgcaaggtctgtcctcaggtggcagtggttcttatagccctggagtgacctactcgcccgtcagtggttataataaggtaatgactctcttctcttgnctagtcacattattttagaattgagaggtatactaaaaatcatctaatgagtcaaaacttatcantgagcaaactgagagttgatttgcccagaacacccatttaaaaacccgggaattgaacatnatatcttaaacacaacatcttaaaatggaaagagaaaaaatttgcnttttccggagataccaacntta

SEQ ID NO: 3590 - DNA, 828 bp, Homo sapiens
  misc_feature (687)..(687): "n" may be a, t, c, g, other or unknown
  misc_feature (734)..(734): "n" may be a, t, c, g, other or unknown
  misc_feature (770)..(770): "n" may be a, t, c, g, other or unknown
  misc_feature (800)..(800): "n" may be a, t, c, g, other or unknown
ccaagcacttaactttctttgactgcactgagaattgctaatgatttcccatgagatttgcttacttttgtatactgtattttccagcattacagaaccttggttattgttttttagccatagaatcttctagtaaaaaatatctgccaccattttagatttaagcatttgcctatggggagacactgaatatgtggatgtgtgtattaatatttggggtggggacagggaagggaatgtggaaaacaaatgctggctgtgagcagtgctgagatggccaggccaggcggctgagtttgcttggaaattcaggacattctgactcctaagagttgcccccacccaccatcaaactgaaatcagcaccaatggtgtcagcactttacagcccatagccaactttctttatttttaacgtagcacaaaaatgtataatagcaaggaaaagacatttttaaattccggttatttttattgtctaaaatgaaagcaacagtgttttgataaagatgaaaaagaaaagctactaaattagtaaatcagtggttacgtgccctgcagaatttcttaacagatggtgctgagtgcacgagttacataactttctctctaattgaggttcacaaggcgtcttctaaattttgctttgacaattaattcatttctgatggtaaccaaatagagtgnatatatcctactcccattactggctctttccccctactatggcttgnagattttcaaaagatagaagtctaggcaaaactgtncagttcattaaaagttggtaggatagtatntctaaaatcagagatttggtccctcctt

SEQ ID NO: 3591 - DNA, 769 bp, Homo sapiens
  misc_feature (693)..(693): "n" may be a, t, c, g, other or unknown
  misc_feature (745)..(745): "n" may be a, t, c, g, other or unknown
  misc_feature (768)..(768): "n" may be a, t, c, g, other or unknown
ttgtgtgacaactgagggcaaagaagggaaaacagaagcaaagaaaactgtttcaaaagccttggaattgctactgttaaaaggctgcggttcatttctgatttcctcatcttttgctacaaaggaaaaagaaatccaatgatgtgtctacctttggtgagaagaaaacacgagcaacagcagtgtagtttcgaaagtcattgtgcagagagggcaggagtgaattaaggccccggggaccgcggacgcctggccaggagaccgcctgaaatatgagccgaacctgttttgcagaaactgcaggctgttcagaatccaattctctggatattggcatgctacattcaatgtccagctacattaagtgtccatctatcaaaatactagatttcatggctggagcaggaaaagttatgagcttggaatatcttcagtgcctgaaagtgaggaagtgctcccaaaaatatgaaggcctgtcaaaagggagagaacaagaaggaggaggagctagaaaaagaaaaagcagtgggaactgtcatgggtgaatcccagaatgggcatcccagatgacatctgtctccattcctgccatctcttcctggctgccagccacttagcctccaggtgtttgtgtctaaggccaactctctttccagactagaagaaagtgaggcagctcaccttttcatttangtttactttggaaagttctgtggttgaatatcaacatagtgactgatttggnggcttgtaaagcttgtacagctna

SEQ ID NO: 3592 - DNA, 789 bp, Homo sapiens
  misc_feature (753)..(753): "n" may be a, t, c, g, other or unknown
  misc_feature (771)..(771): "n" may be a, t, c, g, other or unknown
  misc_feature (783)..(783): "n" may be a, t, c, g, other or unknown
aagtgctctcctgacccgccgctgtgcagcgcagcgcaccgcgggaagatggcgttggaggtcggcgatatggaagatgggcagctttccgactcggattccgacatgacggtcgcacccagcgacaggccgctgcaattgccaaaagtgctaggtggcgacagtgctatgagggccttccagaacacggcaactgcatgtgcaccagtatcacattatcgagctgttgaaagtgtggattcaagtgaagaaagtttttctgattcagatgatgatagctgtctttggaaacgcaaacgacagaaatgttttaaccctcctcccaaaccagagccttttcagtttggccagagcagtcagaaaccacctgttgctggaggaaagaagattaacaacatatggggtgctgtgctgcaggaacagaatcaagatgcagtggccactgaacttggtatcttgggaatggaggccactattgacagaagcagacaatccgagacctacaattatttgcttgccaagaaacttaggaaggaatctcaagagcatacaaaagatctagacaaggaactagatgaatatatgcatggtggcaaaaaaatgggatcaaaggaagaggaaaatgggcaaggtcatctcaaaaggaaacgacctgtcaaagacaggctagggaacagaccagaaatgaactataaaggtcgatacgagatcacagcggaagattctcaagaaaaagtggctgatgaaattcantcagggtacaggaccaanaaagactgatancccagt

SEQ ID NO: 3593 - DNA, 719 bp, Homo sapiens
  misc_feature (562)..(562): "n" may be a, t, c, g, other or unknown
  misc_feature (648)..(648): "n" may be a, t, c, g, other or unknown
  misc_feature (686)..(686): "n" may be a, t, c, g, other or unknown
  misc_feature (694)..(694): "n" may be a, t, c, g, other or unknown
cttcaggagaggatctgtaagagtacacaaacagagtgagccattgccatagaatattctcttgacaggaccctagctcataaacatttcttcagaactatacttcaaatgggatgctttgtattaaaactttaataaatttaatttattttttcttttgaatataaataactgagcttaagcattatcatcatatcgatttcttatgctgcctaaacctcttaattttagtcgaaatatatctttttttttttttggaggcggaatttcattcttgttgcccaggctggagtgcaatggcacggtctcggcttaccgcaacctccgcctcccgggttcaggcggttctcctgcctcggactcccgagtagctgggactacaggcatgtgccactacgcccggctaattttgtatttttagtagggacagggtttctccatgttggtcaggttgctctcaaactcccaacctcaggtgatctgcccgcctcggcctcccaaagtgctgggattactgagccactgtgcccagcccaaaatgtatcttatacaaacattgtanaaatgaataatgattactcaaataagatcttttaattataagcttctggcatctctatttttcccttaagtaggggatactaaagngaatgattttctaagaggatcttttgaaactctttagncaatattngagtaaaataaattattgggggatc

SEQ ID NO: 3594 - DNA, 841 bp, Homo sapiens
  misc_feature (717)..(717): "n" may be a, t, c, g, other or unknown
  misc_feature (779)..(779): "n" may be a, t, c, g, other or unknown
  misc_feature (829)..(829): "n" may be a, t, c, g, other or unknown
gaaaggtcacagcgcggcagcgggtctggctggcggcagcggcgggagggagccgagagacccgagtgcacgtgtggagaagcggcggcacaagcgcggcggcgggagacactcccgcccccaccagactcaagccctcactcgactctcgcggccttcgttgctcgcacagctccctgcccaggctaggaggccggcttgcggggttgagtggcccgagctaagggtgcggagacctaagggcggcgactacgacggcgttgatatcggtggtaacgacggcctcagcaggcggggaagatgaaaggtagccggatcgagctgggagatgtgacaccacacaatattaaacagttgaaaagattgaatcaggtcatctttccagtcagctacaatgacaagttctacaaggatgtgctggaggttggcgagctagcaaaacttgcctatttcaatgatattgctgtaggtgcagtatgctgtagggtggatcattcacagaatcagaagagactttacatcatgacactaggatgtctggcaccttaccgaaggctaggaataggaactaaaatgttaaatcatgtcttaaacatctgtgaaaaagatggtacttttgacaacatttatctgcatgtccagatcagcaatgagtcggcaattgacttctacaggaagtttggctttgagattattgagacaaagaagactactatnagaggatagagcccgcagatgctcatgtgctgcagaaaaacctcaaagttccttctggtcanaatgcaatgtgcaaaagacagacaactggacaaattacaaatgaactttnttgccttgcttg

SEQ ID NO: 3595 - DNA, 826 bp, Homo sapiens
  misc_feature (674)..(674): "n" may be a, t, c, g, other or unknown
  misc_feature (682)..(682): "n" may be a, t, c, g, other or unknown
  misc_feature (768)..(768): "n" may be a, t, c, g, other or unknown
  misc_feature (816)..(816): "n" may be a, t, c, g, other or unknown
  misc_feature (819)..(819): "n" may be a, t, c, g, other or unknown
ttctttgaattccggaggcggcattcggtggtcagaggcctgtgcggctgcaggtagagtgtcttaggaacctaggaaataactcggaacctgtaacgtcccactggtttggacatattcctctcctgatctggcctcatctgttccagggaggtgggattgaaacatatgcagtaatgtcacctcaaaagagagttaagaacgtccaggcacaaaacaggacttcacaaggtagtagtagttttcagaccacgctttcagcctggaaagtaaaacaggatccaagcaactcgaagaacatctcaaaacatggacaaaacaatccagtgggagattatgaacatgctgatgatcaagctgaagaagatgctttgcaaatggcagtgggatattttgagaaaggtcccattaaagcttcacagaataaagataaaaccttggaaaaacacttgaaaactgtggaaaatgtggcttggaagaatgggttagcttcagaagaaattgatattctattaaatattgcactcagtggcaaatttggaaatgctgtaaacacacggatattgaagtgcatgatcccagcaacagtaatatcagaagattctgtggttaaggcagtctcctggctttgtgttggcaagtgttctggtagcaccaaggtacttttttatcgntggctggntgcaatgtttgacttcattgatcgtaaggagcaaattaacttgctctatggcttcttttttgcttcattgcaggatgatgcactgngcccttatgtttggcatttggtatattacttcccaaaaagagaatgtnaancctttcg

SEQ ID NO: 3596 - DNA, 781 bp, Homo sapiens
  misc_feature (615)..(615): "n" may be a, t, c, g, other or unknown
  misc_feature (654)..(654): "n" may be a, t, c, g, other or unknown
  misc_feature (658)..(658): "n" may be a, t, c, g, other or unknown
  misc_feature (765)..(766): "n" may be a, t, c, g, other or unknown
  misc_feature (780)..(780): "n" may be a, t, c, g, other or unknown
agggtcacaagggagatgtccgcccccagtcgtagcctcggacggtttctgagcgttggtgtttggcacgcgccaccctctcttgctttggttccgccatgccgatgtaccaggtaaaaccttatcacgggcgcggcgcgcctctccgtgtggagcttcccacctgcatgtaccggctctctaacgtgcaaggcaggagcggcggcccagcgcccggcgttggccacctacagtctttggtagatgagtggctggatagctacaagcaagaccaggatgcaggatttctggagcttgttaactttttcatctgatcttgtggatgtaaaggactcgggggactatcctctgacagctccaggtctatcctggaagaagttccagggcagcttctgtgagtttgtggggacattggtctgtcggtgccagtacatcctcctccatgatgacttccctatggacaacctcatctccctgctcactggcttctcagactcacaagtctgcgccttctgtcacactagcaccctggctgctatgaaactgatgacctccctggtaagagttgccctccaactgagtctgcaccaagatatcaatcagcgtcagtatgangctgaaagaaacaaggggccagggcagaaggcacctgancggntggagaagcctgttggagaaacacaaagagctgcattaatactacattgtcaaagacaaagacgaacatgagacatgcgatatgagttttaaaaggagagaagagcnnaaaaaccattcagnt

SEQ ID NO: 3597 - DNA, 759 bp, Homo sapiens
  misc_feature (577)..(577): "n" may be a, t, c, g, other or unknown
  misc_feature (696)..(696): "n" may be a, t, c, g, other or unknown
  misc_feature (723)..(723): "n" may be a, t, c, g, other or unknown
  misc_feature (726)..(726): "n" may be a, t, c, g, other or unknown
ggtgaatgggctggtggtgctcgctgctgctgctgagaggaggaggaggatgaagagttgggcttgtttgtctcctcctcctcctgcttcccctgctcagagttcctgcctccagctgccaggggggacagccagccagcagcaggaggggggctagagagctgaaggagagccagtttccccaaaattggacttctcagaacctttaatatgctaatgtgcattgtgaatctccaagagggggatatgatatgcagcattcttgaatacttctaatgacagggagcccactacctcataagctgcagtgagaagaggagtttgttactttaaacagaggctgaagaaactatagaattagcagagaaagtggagaaggtagaggatggagttgcagactctacaggaggctcttaaagtggaaattcaggttcaccagaaactggttgctcaaatgaagcaggatccacagaatgctgacttaaagaaacagcttcatgaactccaagccaaaatcacagctttgagtgagaaacagaaaagagtagttgaacagctacggaagaacctgatagtnaagcaagaacaaccggacaagttccaaatacagccattgccacaatctgaaaacaaactacaaacagcacagcagcaaccactacagcaactacaacaacagcagcagtaccaccaccnccacgcccagcagtcagctgcagcctnttnccaacctgactgcttacagaagactgtaactac

SEQ ID NO: 3598 - DNA, 357 bp, Homo sapiens
  misc_feature (282)..(282): "n" may be a, t, c, g, other or unknown
  misc_feature (311)..(311): "n" may be a, t, c, g, other or unknown
  misc_feature (348)..(348): "n" may be a, t, c, g, other or unknown
agccgccacactttcccaagcccgcaggcgccccccccaacaccagcgctgcacccccgacccattccccgcgggcccctccaggagaaaaaatgaaaccagactggccgaggaggggggcggcagggaccagggtgcggagcagaggtgagggagacgggacttactttgcgaggctcggtgcagggcgccgccgacgagaaataaaggccccgatacgggctgcctggagccccccgagcgcagcaatgtcagggctccagtccgggcggcgttggcggncgcaggggacggggacgggcgcgcgtgcngcgggcgctctcgctgcgctccggctcgggccccggntccgcgcgg

SEQ ID NO: 3599 - DNA, 659 bp, Homo sapiens
  misc_feature (1)..(1): "n" may be a, t, c, g, other or unknown
  misc_feature (632)..(632): "n" may be a, t, c, g, other or unknown
  misc_feature (636)..(636): "n" may be a, t, c, g, other or unknown
  misc_feature (643)..(643): "n" may be a, t, c, g, other or unknown
ncggagggaaggaaggaagagagggaggcgggcaagcaggcgggcgcgggggtcggggactgaggcagtagagggaggcgagagcccggcagccgcttcgcgctgtttgctgcgcgggcttttggagggggcggccgtttagtcggctgaggagaagcggacaccagcggcgttggtgatagcgcctgggggagggggactggagaggcgagaaggggggtcgctgcggtggttctctcgctgtcgctctctctttgcctcgctcccggctcggcgggctcctcccggcgtctctctcgcctccggggtcccgctccccgccccccgcggtatgtcttgatcccgagcagcgggtttcatggggctcctcaggattatgatgccgtccaagttgcagctgctggcggtggtggccttcgcggtggcgatgctcttcttggaaaaccagatccagaaactggaggagtcccgctcgaagctagaaagggctattgcaagacacgaagtccgagaaattgagcagcgacatacaatggatggccctcggcaagatgccactttagatgaggaagaggacatggtgatcatttataacagagttcccaaaacgggaagcacttcatttaccaatntcgnctatgancctgtgtgcaaagaat

SEQ ID NO: 3600 - DNA, 778 bp, Homo sapiens
  misc_feature (645)..(645): "n" may be a, t, c, g, other or unknown
  misc_feature (743)..(743): "n" may be a, t, c, g, other or unknown
  misc_feature (747)..(747): "n" may be a, t, c, g, other or unknown
  misc_feature (753)..(753): "n" may be a, t, c, g, other or unknown
tcggaactcgccaggggcgccgccggcggcggagggagcgtgactgcgctgcgcagggcgctaggaggcattgtcgccgctcaggcccttttgtgagaagcagaccagcctgggggctggcggcaggacacctgtgtctgcatgctgaagaagatgggtgaggccgtggccagagtagcaaggaaggtcaacgagacggtggagagcggctctgacactctggacctggccgagtgcaagctggtctcctttcccattggcatctacaaggtcctgcggaatgtctctggccagatccacctcatcaccctggctaacaacgagcttaagtccctcaccagcaagttcatgaccacattcagtcagctccgagatgtgcccgtggagaagctggccgccatgccagccttgcgcagcatcaacctccgcttcaacccactcaacgccgaggtgcgcgtgatcgccccgccgctcatcaagtttgacatgctcatgtctccggaaggcgcaagagcccccctaccttaggccaccctcctcatgcccacccagcaagggacagaggccacaggcctggaaccctggaagggagggaggcccatgggaggccaagcctgggggctgggggcgggtgggccgagcacnacgtggtgggtggggtgcaactggtctggatagatagcttacagcagtagtgggctctggaatgcccaaagggaagaagcaaggtgggggcctgcaancccngacttngggacttaacaagcttgcttggtgc

SEQ ID NO: 3601 - DNA, 767 bp, Homo sapiens
  misc_feature (619)..(619): "n" may be a, t, c, g, other or unknown
  misc_feature (693)..(693): "n" may be a, t, c, g, other or unknown
  misc_feature (735)..(735): "n" may be a, t, c, g, other or unknown
  misc_feature (753)..(753): "n" may be a, t, c, g, other or unknown
agtgctaggaacctgcgcccggctgagctgagcgaggcgagaggagaaagcgaggcccggggacgggactgagagctctgaaaggagggaggcggctcccgagtactccgcgccgggcaggccccggcctcgcctgttcgcccatttttaaggctcgagttagaggccacctcctccgagaagccttcggtgacaccacctctcccagacggttcccctttctgattcccacagcattttccaaccattcacggtcagaaccactcaccaggacgtgttgtcaccattttaccgctttgcctcgtctcttaactagacgaaatgggttccttttggctctttggaaagggaggctgtcttctatttatttccgtggtaatcccacctcccacaacaagttccattctacagcaatgtcttttctcttgctgagaaccattcaagtctaagttttctgtcctggttgctcatctcgcccacttgcacagcccacctgtgtggccgactcaggattgacccacctgctctcttcaggccatattcccacgcagaagtgggtcccactcctcaggcctctgtgctggccccgtctgtggggttagcaagcagccctgctctncatttccagctcagaagcaactggatcgttacctcattggtgacaacttgacttgtgctgccaaaacttgatangaaacattacccgggggaaaaccacttgcttttccttggttnctaatcagggtgggaaanactggtaaattttt

SEQ ID NO: 3602 - DNA, 714 bp, Homo sapiens
  misc_feature (692)..(692): "n" may be a, t, c, g, other or unknown
  misc_feature (694)..(694): "n" may be a, t, c, g, other or unknown
  misc_feature (703)..(703): "n" may be a, t, c, g, other or unknown
atatttatgtcaatctggctacttttctagtatgttcagtggttcttggaaagaatccagcatgaatattattgaactggagattcctgaccagaacattgatgtagtagcactgcaggttgcatttggttcactgtatcgagatgatgtcttgataaagcccagtcgagttgttgccattttggcagcagcttgtttgctgcagttggacggtttaatacagcagtgtggtgagacaatgaaggaaacagttaatgtgaaaactgtatgtggctattacacatcagcagggacctatggattagattctgtaaagaaaaagtgccttgaatggcttctaaacaatttgatgactcaccagaatgttgaactttttaaagaactcagtataaatgtcatgaaacagctcattggttcatctaacttatttgtgatgcaagtggagatggatatatacactgctctaaaaaagtggatgttccttcaacttgtgccttcttggaatggatctttaaaacagcttttgacagacacagatgtctggttttctaaacagaggaaagattttgaaggtatggcctttcttgaaactgaacaaggaaatccattgggtcagtattcagacatttaaggttacaatatattatcagtgatctggcttctgccaagaattattggaccaagaatctggnantaccttcanaaatggctcct

SEQ ID NO: 3603 - DNA, 712 bp, Homo sapiens
  misc_feature (651)..(651): "n" may be a, t, c, g, other or unknown
  misc_feature (666)..(666): "n" may be a, t, c, g, other or unknown
  misc_feature (700)..(700): "n" may be a, t, c, g, other or unknown
gaataagctgaaggccatcaaagcccggaatgagtacttgctggctttggaggcaaccaatgcatctgtcttcaagtactacatccatgacctatctgaccttattgattgttgtgacttaggctaccatgcaagtctgaaccgggctctacgcaccttcctctctgctgagttaaacctggaacagtcgaagcatgagggtctggatgccatcgagaatgcagtagaaaacctggatgccaccagtgacaagcagcgcctcatggagatgtacaacaacgtcttctgcccccctatgaagtttgagtttcagccccacatgggggatatggcttcccagctctgtgcccagcagcctgtccagagtgagctggtacagagatgccaacaactgcagtctcgcttatccactctaaagattgaaaacgaagaggtaaagaagacaatggaggccaccctgcaaaccatccaggacattgtgactgtcgaggactttgatgtgtctgactgcttccagtacagcaactccatggagtccgtcaagtccacggtctctgaaaccttcatgagcaagcccagcattgctaagaggagagccaaccagcaagagacagagcagttttatttcacaaaaatgaaagagtcctgganggcaggaaccttatnaccaagttacaagccaagcatgacctttttgcanaaaaacctggga

SEQ ID NO: 3604 - DNA, 732 bp, Homo sapiens
  misc_feature (665)..(665): "n" may be a, t, c, g, other or unknown
  misc_feature (674)..(674): "n" may be a, t, c, g, other or unknown
  misc_feature (732)..(732): "n" may be a, t, c, g, other or unknown
aaaaaaaaaaagcgggtgctgcttgctgcaggctctggggagtcgccatgcctacaacacagcagtcccctcaggatgagcaggaaaagctcttggatgaagccatacaggctgtgaaggtccagtcattccaaatgaagagatgcctggacaaaaacaagcttatggatgctctaaaacatgcttctaatatgcttggtgaactccggacttctatgttatcaccaaagagttactatgaactttatatggccatttctgatgaactgcactacttggaggtctacctgacagatgagtttgctaaaggaaggaaagtggcagatctctacgaacttgtacagtatgctggaaacattatcccaaggctttaccttttgatcacagttggagttgtatatgtcaagtcatttcctcagtccaggaaggatattttgaaagatttggtagaaatgtgccgtggtgtgcaacatcccttgaggggtctgtttcttcgaaattaccttcttcagtgtaccagaaatatcttacctgatgaaggagagccaacagatgaagaaacaactggtgacatcagtgattccatggattttgtactgctcaactttgcagaaatgaacaagctctgggtgccaatgcagcatcaggggacatagcccgagatngagaaaaangagaacgaagaaagacaaggaactggagaaatttttagtggggaaacaaaattttggn

SEQ ID NO: 3605 - DNA, 744 bp, Homo sapiens
  misc_feature (678)..(678): "n" may be a, t, c, g, other or unknown
  misc_feature (689)..(689): "n" may be a, t, c, g, other or unknown
  misc_feature (718)..(718): "n" may be a, t, c, g, other or unknown
gaaagtgtgtgaaattcattttcatgaaatcaacaacaaaatggtggaatgtaagaaagctcagccaaaggaggtgatgtcgccaacgggctcagcccgggggaggtctcgagtcatgccctacggaatggacgccttcatgctgggcatcggcatgctgggttacccaggtttccaagccacaacctacgccagccggagttatacaggcctcgcccctggctacacctaccagttccccgaattccgtgtagagcggacccctctcccgagcgccccagtcctccccgagcttacagccattcctctcactgcctacggaccaatggcggcggcagcggcggcagcggctgtggttcgagggacaggctctcacccctggacgatggctccccctccaggttcgactcccagccgcacagggggcttcctggggaccaccagccccggccccatggccgagctctacggggcggccaaccaggactcgggggtcagcagttacatcagcgccgccagccctgcccccagcaccggcttcggccacagtcttgggggccctttgattgccacagccttaccaatgggtaccactgaagcaggggacggtggcaggagcgccccaacctgcaactgactgaggaccacgagtgagccaacgagggggcgggagacctnaccgcagccgncgcccttccctgcaacgacttggacccgntactgctgcccaacttcccggcccgg

SEQ ID NO: 3606 - DNA, 833 bp, Homo sapiens
  misc_feature (779)..(779): "n" may be a, t, c, g, other or unknown
  misc_feature (810)..(810): "n" may be a, t, c, g, other or unknown
  misc_feature (815)..(815): "n" may be a, t, c, g, other or unknown
gcggcttccggcggcgtgacctgaccgcaagaggccaatggagtgtgggagctgaaagggtcttcgctggcggccggtaactggcggcggttgggaacggccgagtgtggctcttctggtgtttcagcttggggagagaggggtggccttcctcttgcagttgaggccggcgccgagccggacttcaggcggatctcgtggcggagcccatcttgctccctctcccaggcctttacccgctccctaggattcccgggccctgtaggtgggagttgggagacgacagtactgcttttaaagagacagtgttagggatcttggaagcacagccaacatgtgtgacattgaagaagccactaaccaactcctagatgtgaaccttcatgagaaccagaagtctgtacaagtgacagaaagtgacctcggaagtgaatctgagcttctagtcactattggagccactgtacctactggctttgagcaaacagctgcagatgaagtcagagagaaacttgggtcatcatgcaaaatcagcagagaccgtggcaagatatattttgtcatttcagtggaaagtctggcacaggttcattgtctgagatcagttgataacttatttgtggtggttcaggagtttcaagattaccagttcaaacaaacaaaggaagaagttctaaaggattttgaagacttggctggaaaactccatggtcaaaccccttaaaagtgtggaaaattaatgccagttttaaaaagaaaaaagcaagcgcaaaaagatnaatcagaattcaagtaaggagaagattaatnatggncaagaagtcaaaatcatc

SEQ ID NO: 3607 - DNA, 823 bp, Homo sapiens
  misc_feature (630)..(630): "n" may be a, t, c, g, other or unknown
  misc_feature (782)..(782): "n" may be a, t, c, g, other or unknown
  misc_feature (819)..(819): "n" may be a, t, c, g, other or unknown
attgctggttcaaatggtagttctgttttaacttctttgagaaatctccaaactgctttcacagtggctgaactaatttgcatttccatcagtgtaggcgcattctacactgcactggcttctacagtgttgaagcattccgtttttcccacagcctcaccagcatctgttatttttttgactttttgataatagccattctgactggtgtgagattgtaactcattgtggttttgatttgcatttatctgattagtaatgttgagcattttttcatgtttgttaaccgcttgtatgttgtcttttgagaagtgtctgttcaagtcttttggcatttttttaatgggtttttgtttgtgtgtgtgtatttttgtttttgtttttgttttgagatggagtttcactgttgtcacccaggctagagtgcaatggcaccatctcagctcactgcaacctccacctcccgggttcaagcgattctcctgccccagcctcctgagttgctgggattacaggtgcctgccaccaagcgtggctaattttggtacttttagtagagacagggtttcaccatgttggccagcctggtctcgaattcctgacctcaggtgatccacccatctcagcctnccaaagtgctgggattacaggagtgagccaccacacctggcccgagttacttggttttcgtttctgaattggtttaattccttatagattttggacattagacctttttcagatgcccagtttgggaatatctctccatctgtaggtgctgntactggattgaagtccttttgcgggcaaaactcttanttga

SEQ ID NO: 3608 - DNA, 737 bp, Homo sapiens
  misc_feature (720)..(720): "n" may be a, t, c, g, other or unknown
  misc_feature (724)..(724): "n" may be a, t, c, g, other or unknown
  misc_feature (737)..(737): "n" may be a, t, c, g, other or unknown
aaaaaatgcagacgggataggggtgtgtgtgtgaggggagggggcctgtatggcaactgctcttgccccagcgtccccaaaagtgcagaggcagcggctgcagcatccagccagcttggatgtctggcctacttccaggactctgaagaaacagttacaagcaggatgcttttcccaacctctgcgcaagaatcttcccgtggcctcccagatgcaaatgacttgtgccttggcctgcagtccctcagtttgacaggctgggaccgaccctggagcacccaggactcagattcctcagcccagagcagcacacactcggtactgagcatgctccataacccactgggaaatgtcctaggaaaaccccccttgagcttcctgcctctggatccccttgggtctgacttggtggacaagtttccagcaccctcagttagaggatcacgcctggacacccggcccatcctggactctcgatctagcagcccctctgactcagacaccagtggcttcagctctggatcagatcatctctcagatttgatttcaagccttcgcatttctccacctctgcccttctgtctctgtcagggggtggtcccagagaccctttaaagatgggggtagggtctcggatggaccaagagcaagctgctcttgctgcagtcacttccttcccaaccagtgcttcaaagagatggccaggagcttctgtgtggncatnctgggacctcttn

SEQ ID NO: 3609 - DNA, 832 bp, Homo sapiens
  misc_feature (742)..(742): "n" may be a, t, c, g, other or unknown
  misc_feature (756)..(756): "n" may be a, t, c, g, other or unknown
  misc_feature (810)..(810): "n" may be a, t, c, g, other or unknown
gtgcatgagggggctgctccggagcgacggcggctgcagctggagccaggcgctcgcccgtccgccggttggctcgccgggacctcgcgcaccggcggcagagtcccttgcgtggattggcaagcgacgccccacctgccccgagctcaccattttctttcgcgctggctgcagctgacccggcgaagggagccgaccgggccctgggctggaggtaaaaccccacggaaagaacatgaggttcccttggaaatcattcaagaggaagatggaaggggctgtttagaagagcttaaaagctacaggctgtaagactggggcctgagtgctggcagtggaaaacactgttgggctgtgatctctccctgaaaagttccaggtgcctttttgcttcctgcaaaagaaaggaagcgaaagagaagaccatgtccatagccctgaagcaggtattcaacaaggacaagaccttccgacccaagaggaaatttgaacctggcacacagaggtttgagctgcacaaacgggctcaggcatccctcaactcgggtgtggacctgaaggcggctgtgcagttgcccagtggggaggaccagaatgactgggtggcagtacatgtggtggacttcttcaatcggatcaacctcatctatggcaccatctgtgagttctgcaccgagcggacctgtcctgtgatgtcaaggggccccaaatatgagtatcggtggcaggatgatctcaagtntaagaagccaacancgcttgccagcttcccagtacatgaaccttcttatggattggattgaggttcanatcaacaaccagggaaatattt

SEQ ID NO: 3610 - DNA, 836 bp, Homo sapiens
  misc_feature (691)..(691): "n" may be a, t, c, g, other or unknown
  misc_feature (737)..(737): "n" may be a, t, c, g, other or unknown
cagagaattgcttttctagatttgatggagggagggggagagtcacatcatttggattctaccaatctgcaggctctatctttggcaacatgtaaataattagactatacatctgtttctcaagtatggcaagaccaatagtttgaatttaattatcaatgctatggtatactttctggtcatattttagttatgtcagttttaaggtaagttttttcatttattaaagcccttaaatgagattttagactgccaaagagaagaggcagtccaattgacctaactgaaatgagatgaccagtatatagagcctagatggactgtagcagctctacccctttgttttacaaggtaaatcattttaaaaattaccttttttgatcagtgggtaaaagttaaagggatctttaatttttgatatattcaagttaattttctaaatgtgaatcagtccttggactgcaactatatattcacctacaaaatcccaatcaaaaaattacatgagcctgtcaagcagatctttagttttccacttcacacaagatcgttaatgttctaaattaatctattcacttagatgatttttgtcagttcttaaatgggatataataaatttagcattttcatcttaacaagcaaaagagttaaaaaacaaaacaaacactactccaagccaaatacattctanctgggtaattccagacttgtcccaagtggttccccaacctcttttncactggtaatttcttttcatgcaggcagaatataggggtgccaaccctgtgagttttacatatgaacttggataggggaacctgaacccagtcaggaac

SEQ ID NO: 3611 - DNA, 797 bp, Homo sapiens
  misc_feature (680)..(680): "n" may be a, t, c, g, other or unknown
  misc_feature (720)..(720): "n" may be a, t, c, g, other or unknown
  misc_feature (764)..(764): "n" may be a, t, c, g, other or unknown
  misc_feature (796)..(796): "n" may be a, t, c, g, other or unknown
agagtgctgatttagaagaatacaaatcatggctgaaaatagtgtattaacatccactactgggaggactagcttggcagactcttccatttttgattctaaagttactgagatttccaaggaaaacttacttattggatctacttcatatgtagaagaagagatgcctcagattgaaacaagagtgatattggttcaagaagctggaaaacaagaagaacttacaaaagccttaaaggacattaaagtgggctttgtaaagatggagtcagtggaagaatttgaaggtttggattctccggaatttgaaaatgtatttgtagtcacggactttcaggattctgtctttaatgacctctacaaggctgattgtagagttattggaccaccagttgtattaaattgttcacaaaaaggagagcctttgccattttcatgtcgcccgttgtattgtacaagtatgatgaatctagtactatgctttactggatttaggaaaaaagaagaactagtcaggttggtgacattggtccatcacatgggtggagttattcgaaaagactttaattcaaaagttacacatttggtggcaaattgtacacaaggagaaaaattcagggttgctgtgagtctaggtctccaattatgaagccagaatggatttataaagcttgggaaangcggaatgaacaggatttctatgcagcagttgatgctttngaaatgaatttaaagttcctccatttcaagaatggatttttagnttcctgggattttcagatgaagagaaaacccnt

SEQ ID NO: 3612 - DNA, 686 bp, Homo sapiens
  misc_feature (639)..(639): "n" may be a, t, c, g, other or unknown
  misc_feature (662)..(662): "n" may be a, t, c, g, other or unknown
  misc_feature (664)..(664): "n" may be a, t, c, g, other or unknown
actggttcgccgcggggaccgggcagggctccccgtcggagtgcactgcgccggacacttcaagccctggagggacaggaaagccagaaatggacttcgtgagactcgctcgactgttcgccagggcccgccccatgggactgttcatcctgcaacacctggacccctgtagagccaggtgggcaggaggcagggaggggctgatgcggccagtgtgggcgcccttcagcagctcctcctctcagctgcccctcggccaggagcgtcaggaaaacacgggcagcctgggctctgacccgagccactccaactccacggccactcaggaagaagacgaggaggaggaggagagttttgggaccctctctgacaaatactcctcccggagactattccgcaaatccgcagcccagttccataacctgcggtttggggaacggagagatgagcaaatggaaccggagcccaaattatggcgaggccggagagacaccccgtactggtacttcttgcagtgcaaacacctgatcaaggaagggaagctggttgaagccctggacctgtttgagaggcagatgctgaaggaggagcgattgcaggccatggagagcaactacacggtgctgattgggggctgcnggcgggttggctacctgaagaangncttcaacctctacaaccaagat

SEQ ID NO: 3613 - DNA, 792 bp, Homo sapiens
  misc_feature (711)..(711): "n" may be a, t, c, g, other or unknown
  misc_feature (723)..(723): "n" may be a, t, c, g, other or unknown
  misc_feature (752)..(752): "n" may be a, t, c, g, other or unknown
aaaactcagctatgcaaagcaactcaggaatctttcaaagaagtaccaacctaaaaagaactcgaaggaggaagaagaatacaagtatacgtcatgtaaagctttcatttccaacctgaacgaaatgaatgattacgcagggcagcatgaagttatctccgagaacatggcatcacagatcattgtggacttggcacgctatgttcaggaactgaaacaggagaggaaatcaaactttcacgatggccgtaaagcacagcagcacatcgagacttgctggaagcagcttgaatctagtaaaaggcgatttgaacgcgattgcaaagaggcggacagggcgcagcagtactttgagaaaatggacgctgacatcaatgtcacaaaagcggatgttgaaaaggcccgacaacaagctcaaatacgtcaccaaatggcagaggacagcaaagcagattactcatccattctccagaaattcaaccatgagcagcatgaatattaccatactcacatccccaacatcttccagaaaatacaagagatggaggaaaggaggattgtgagaatgggagagtccatgaagacatatgcagaggttgatcggcaggtgatcccaatcattgggaagtgcctggatggaatagtaaaagcagcccgaatcaattgatcagaaaaatgattcacagctggtaatagaagcttataaatcanggtttgagcctnctggagacattgaattgaggattacactnagcccatgaacgcactgtgtcagatacagcctttcaattc

SEQ ID NO: 3614 - DNA, 715 bp, Homo sapiens
  misc_feature (658)..(658): "n" may be a, t, c, g, other or unknown
  misc_feature (678)..(678): "n" may be a, t, c, g, other or unknown
  misc_feature (707)..(707): "n" may be a, t, c, g, other or unknown
ccagagcccagacttgcaggctcacggtgcagggtgaacctggccacagctcaccctggaacagccacaatgtctgccccttagagaagaaccctgaaatcagaccagtttttgcggcctccccctttcctctctgttacagtgccctttccaggccttaagagaagtaaaacttagctgcagcgtcaggaggtggaccccagagtgtgagtggcacgcttccctgtgaacccgtcctcaccatgtttgccacatctggggcagtggcagcggggaagccttactcgtgcagcgaatgtggcaagagcttctgctacagctcagtgctgctgcgacatgaacgagctcacggcggtgacggccgcttccgttgcctagaatgcggtgagcgctgtgcacgggctgctgacctccgagcgcacaggcgcacgcatgctggccagaccctctacatctgcagtgagtgcggacaaagcttccgccacagcggccgtcttgacctacacttgggcgcacaccggcagcgatgccgcacttgcccctgccgcacatgcggccggcgcttcccgcacctcccggcgctgctgctacaccggcgccgccagcatctgccagagcggccccgccgctgcccgctgtgcgcccgacctttcggcanaacgcgctgtctttcaccangcgcgggcgcaccccttggggacaacctntgaccttg

SEQ ID NO: 3615 - DNA, 733 bp, Homo sapiens
  misc_feature (675)..(675): "n" may be a, t, c, g, other or unknown
  misc_feature (719)..(719): "n" may be a, t, c, g, other or unknown
  misc_feature (725)..(725): "n" may be a, t, c, g, other or unknown
aactattacatattgcggcgtcacagggacacgcagagtgtctacagcacctcacttctttgatgggagaagactgcctcaatgagcgcaacactgagaagttgactccagcaggcctggccattaagaatggtcagttggagtgcgtacgctggatggtgagcgaaacagaagccattgcagaactgagttgttctaaggattttccaagccttattcattacgcaggttgctatggccaggaaaagattcttctgtggcttcttcagtttatgcaagaacagggcatctcgttggatgaagtagaccaggatggcaacagtgccgttcacgtagcctcacagcatggctaccttggatgcatacagaccttggttgaatatggagcaaatgtcaccatgcagaaccacgctggggaaaagccctcccagagcgccgagcggcaggggcacaccttgtgctccaggtacctggtggtggtggagacctgcatgtcgctggcctctcaagtggtgaagttaaccaagcagctaaaggaacaaacagtagaacgtgtcacgctgcagaaccaactccaacaatttctagaagcccagaaatcagagggcaagtcactcccttcttcacccagttcaccatccccacctgccttcagaaagtcccagtggaaatctncagatgcagatgatgattcttgtaccaaaagcaagccaggagtncaagangggattca

SEQ ID NO: 3616 - DNA, 860 bp, Homo sapiens
  misc_feature (785)..(785): "n" may be a, t, c, g, other or unknown
  misc_feature (812)..(812): "n" may be a, t, c, g, other or unknown
  misc_feature (822)..(822): "n" may be a, t, c, g, other or unknown
atgagagagatgttgttgcacagcaggaatccattttggctttggaaaaattccctactccagcatctcggcttgcactcactgatatattagaacaagagcagtgtttctacagagtaagaatgtcagcttgcttctgtcttgcaaagattgcaaattcaatggtgagcacatggacaggaccaccagccatgaagtcactcttcactaggatgttttgttgtaaaagttgtccaaacattgtgaaaacaaacaactttaagagctttcaaagctattttctacagaagactacgccagttgcaatggctttattaagagatgttcataatctttgtcctaaagaagtcttaacatttattttagacttaatcaagtacaatgacaacaggaaaaataagttttcagataactattatcgtgcagaaatgattgatgccctggccaactctgttacacctgcagtcagtgtgaataatgaagttagaactttggataacttaaatcctgatgtgcgactcattcttgaagaaatcaccagatttttgaatatggaaaaacttcttccgagttacaggcataccatcactgtcagttgtttgagagccatacgggtacttcagaagaacggacatgtgccaagtgatccagctctttttaaatcttatgctgaatatggccactttgtggacattaggatagcagctttggaagcagttggtgattatactaaagtgggccagaagttatgaagaactgcaattggctacttaatatgattcaanaatgaccctgtaccctatggtaaggcntaagatcttnaacatggtggacttagaacccaccatttacttaagaac

SEQ ID NO: 3617 - DNA, 712 bp, Homo sapiens
  misc_feature (699)..(699): "n" may be a, t, c, g, other or unknown
  misc_feature (710)..(711): "n" may be a, t, c, g, other or unknown
gtgcaatttgtagaggctgcagcacacgagagtgaacagcagaaagaggcttcttggaaacataaccaggaattgcgaaaagccttgcagcagctacaagaagtattgcagaataagagccaacagcttcgtgcctgggaggctgaaaaatacaatgagattcgaacccaggaacaaaacatccagcacctaaaccatagtctgagtcacaaggagcagttgcttcaggaatttcgggagctcctacagtatcgagataactcagacaaaacccttgaagcaaatgaaatgttgcttgagaaacttcgccagcgaatacgtgataaagctgttgctctggagcgggctatagatgaaaaattctctgctctagaagagaaagaaaaagaactgcgccagcttcgtcttgctgtgagagagcgagatcatgacctagagagactgcgcgatgtcctctcctccaatgaagctactatgcaaactatggagagtctcctgagggccaaaggcctggaagtggaacagttatctactacctgtcaaaacctccagtggctgaaagaagaaatggaaaccaaatttagccgttggcagaaggaacaagagagtatcattcagcagttacagacgtctcttcatgataggaacaaagaagtggaggatcttaatgcaacattgctctgcaacttggccaggcanaatgagatacnna

SEQ ID NO: 3618 - DNA, 813 bp, Homo sapiens
  misc_feature (645)..(645): "n" may be a, t, c, g, other or unknown
  misc_feature (691)..(691): "n" may be a, t, c, g, other or unknown
  misc_feature (732)..(732): "n" may be a, t, c, g, other or unknown
  misc_feature (769)..(769): "n" may be a, t, c, g, other or unknown
  misc_feature (813)..(813): "n" may be a, t, c, g, other or unknown
gttttggcgttcagttatatttcacaaccaccttgattatttagctaaaaatggttatgaatatgaagagagcactaaaaatcaagcaacaaaagagcaacaggaacttttaatgaaaatgcttgcgctttcttgtaaactggagcgagaattccgttgtgtggaacttgctgatctaatgactcaaaatgctgtgaatttagccattaaatatgcttctcgctctcggaaattaatactggctcaaaaactaagtgaactggctgtagagaaggcagccgaattgacagcaacccaggtggaagaggaagaagaagaagaagatttcagaaaaaagctgaatgctggttacagcaatactgctacagagtggagccaaccaaggttcagaaatcaagttgaagaagatgctgaggacagtggagaagctgatgatgaagaaaaaccagaaatacataagcctggacagaactcgttttccaaaagtacaaattcctctgatgtttcagctaagtcaggtgcagttacctttagcagccaaggacgagtaaatccctttaaggtatcagccagttccaaagaaccagccatgtcaatgaattcagcacgttcaactaatattttagacaatatgggcaaatcatncaagaaatccctgcacttagtcgaactacaaataatgaaaagtctnccattataagcctctgttccaaagccgaacctaacagcatntgcagcatctattcagaaagaatctaactataactgngagtgaagaagaaatttaaagttattgaaccctttgctctcaan

SEQ ID NO: 3619 - DNA, 628 bp, Homo sapiens
  misc_feature (555)..(555): "n" may be a, t, c, g, other or unknown
  misc_feature (605)..(605): "n" may be a, t, c, g, other or unknown
  misc_feature (614)..(614): "n" may be a, t, c, g, other or unknown
ccactacctctagactgccctcccgggctggcgtcccacggagtctcagccgcgcaccccttcctcgcgttaccctccttccggacagcaccccctcccttctccggtagctcctacccctgcctgtgcgggcctcgtccccgcgcccagccctcggtgctgcctccgacagcgccgcgctctctcagccgcccccctgcccctcgggcccccctctctgctgcccctggcgccatggcgtgcagcctcaaggacgagctgctgtgctccatctgcctgagcatctaccaggacccggtgagcctgggctgcgagcactacttctgccgccgctgcatcacggagcactgggtgcggcaggaggcgcagggcgcccgcgactgccccgagtgccggcgcacgttcgccgagcccgcgctggcgcccagcctcaagctggccaacatcgtggagcgctacagctccttcccgctggacgccatcctcaacgcgcgccgcgccgcgcgaccctgccaggcgcacgacaaggtcaaagctcctctgctcacggaccgngcgcttctctgcttcttctgcgacgaagcctgcactgcacgagcagcatnaggtcaccngcattgacgaaccc

SEQ ID NO: 3620 - DNA, 668 bp, Homo sapiens
  misc_feature (612)..(612): "n" may be a, t, c, g, other or unknown
  misc_feature (653)..(653): "n" may be a, t, c, g, other or unknown
  misc_feature (660)..(660): "n" may be a, t, c, g, other or unknown
tgaggcaagcgcctcaggagtgcgtgaggcccacgcagaactcggggagccttttatcctgaggacacaggggaagaattggaggactatattcagctgcgggcgcttacctgccccccctgcagcaggtgttccaggcacctcgccggcctggcattggcactgtggggaaaccaatcaagctcctggccaattactttgaggtggacatccctaagatcgacgtgtaccactacgaggtggacatcaagccggataagtgtccccgtagagtcaaccgggaagtggtggaatacatggtccagcatttcaagcctcagatctttggtgatcgcaagcctgtgtatgatggaaagaagaacatttacactgtcacagcactgcccattggcaacgaacgggtcgactttgaggtgacaatccctggggaagggaaggatcgaatctttaaggtctccatcaagtggctagccattgtgagctggcgaatgctgcatgaggccctggtcagcggccagatccctgttcccttggagtctgtgcaagccctggatgtggccatgaggcacctggcatccatgaggtacacccctgtgggccgtccttcttctnccggctgagggctactaccacccgcttgggggtggccccangtctggntcggcttt

SEQ ID NO: 3621 - DNA, 629 bp, Homo sapiens
  misc_feature (1)..(1): "n" may be a, t, c, g, other or unknown
  misc_feature (87)..(87): "n" may be a, t, c, g, other or unknown
  misc_feature (575)..(575): "n" may be a, t, c, g, other or unknown
  misc_feature (613)..(613): "n" may be a, t, c, g, other or unknown
  misc_feature (627)..(627): "n" may be a, t, c, g, other or unknown
ntccagcgtctgccgcggctccgagggggtggggctgctgggaatggctgtgcccccttcggcccctcagcagcgcgcgtcctttcncctgaggaggcacacgccttgcccgcagtgctcatggggcatggaggagaaggcggcggccagcgccagctgccgggagccgccgggccccccgagggccgccgccgtcgcgtacttcggcatttccgtggacccggacgacatccttcccggggccctgcgcctcatccaggagctgcggccgcattggaaacccgagcaagttcggaccaagcgcttcacggatggcatcaccaacaagctggtggcctgctatgtggaggaggacatgcaggactgcgtgctggtccgggtgtatggggagcggacggagctgctggtggaccgggagaatgaggtcagaaacttccagctgctgcgagcacacagctgtgcccccaaactctactgcaccttccagaatgggctgtgctatgagtacatgcagggtgtggccctggagcctgagcacatccgtgagccccggcttttcaggttaatcgccttanaaatggcaaagattcatactatccacgccaacggcagnctgccaagcccatnct

SEQ ID NO: 3622 - DNA, 700 bp, Homo sapiens
  misc_feature (647)..(647): "n" may be a, t, c, g, other or unknown
  misc_feature (672)..(672): "n" may be a, t, c, g, other or unknown
  misc_feature (679)..(679): "n" may be a, t, c, g, other or unknown
accatcctcctgggcgccgctttcgcgcggcggcggcggctgcggcggggtctttctttgcttaaatacctcgttggccagaagcgctggtaccgggggcgggttgggtcgggtcgggcagtgctgcacacctgggtttccttgcctagagctgtgtgttcggggtcctttggtccagtcggaggctgcggagcggcgggggttgcctgcgctgtccgcccgggcatcctcccggtgatggaagcagccgccgccgccgctgcggggtcgcgctgtgccccattcaccgctgccagagaggtgggaaaattcgccgcacggaggccgaaagcgagaggggctgcgccgctatgccgggagctgagtcccatataagccgcccccagccatcgcccccagccggcttcgttcccctgagcgagacaggaagctgcggtcccgagaaagcggaggagacgtcgctggagccgggaggcgccgggttcggcggagcgcggagcggggctctgggccgcgtgaaagtttttcttcccgagccgcagggcgcccgctgcccggaaactgcccagggataagtcggccgacttcccagacccctcgaaggtgcggggacccccagcggaagcgagagggaaccgaaaatcgangaacgagttgacagcccggacagtnccgcccnggccggtgatcccggggcccg

SEQ ID NO: 3623 - DNA, 848 bp, Homo sapiens
  misc_feature (757)..(757): "n" may be a, t, c, g, other or unknown
  misc_feature (766)..(766): "n" may be a, t, c, g, other or unknown
  misc_feature (776)..(776): "n" may be a, t, c, g, other or unknown
agagtggcgcggggggcgtggggcggtgctgaggagctgaagccgtggccagctcgacgccggacagtccagcgagcagcacggcgggaaccggcagccggagcagtcccggagcagaagcagcagcagcagcagcagccctcgccgttcgcggagcgcagccgagccggccatggcgttgtcgatgccactgaatgggctgaaggaggaggacaaagagcccctcatcgagctcttcgtcaaggctggcagtgatggtgaaagcataggaaactgccccttttcccagaggctcttcatgattctttggctcaaaggagttgtatttagtgtgacgactgttgacctgaaaaggaagccagcagacctgcagaacttggctcccgggacccacccaccatttataactttcaacagtgaagtcaaaacggatgtaaataagattgaggaatttcttgaagaagtcttatgccctcccaagtacttaaagctttcaccaaaacacccagaatcaaatactgctggaatggacatctttgccaaattctctgcatatatcaagaattcaaggccagaggctaatgaagcactggagaggggtctcctgaaaaccctgcagaaactggatgaatatctgaattctcctctccctgatgaaattgatgaaaatagtatggaggacataaagttttctacacgtaaatttctggatggcaatgaaatgacattagctgattgcaacctgctgccaaactgnatattgtcnaggtggtggncaaaaaaatatcgcaacttttgatatttccaaaagaaatgactggcatctggagatcctaactaatgcatac

SEQ ID NO: 3624 - DNA, 479 bp, Homo sapiens
  misc_feature (60)..(60): "n" may be a, t, c, g, other or unknown
  misc_feature (114)..(114): "n" may be a, t, c, g, other or unknown
  misc_feature (313)..(313): "n" may be a, t, c, g, other or unknown
  misc_feature (341)..(341): "n" may be a, t, c, g, other or unknown
  misc_feature (401)..(401): "n" may be a, t, c, g, other or unknown
  misc_feature (462)..(462): "n" may be a, t, c, g, other or unknown
  misc_feature (476)..(476): "n" may be a, t, c, g, other or unknown
ggtttatcctaaattactcaaccccttgtagccttgacaaattttaccttaaaaccaaantgaaacacaaaaattaatccttaataatgatagcaagtgatctttctttttagntttagccttcctttttcaatagtaatatttaaacccactcttgaccaattgtttgcccaaatattcttgtcatttggagtcagtggaaaatccagcacaccaagcaccagtcttcttctgaggcaaaagaaaagtgttgtcattttcactctgttggagctgcacactttttttctttttctttttttttttttgtcgngtaagaaggatgctggtcagagctgcanaaaatatgaggcaattaaaagtctttagctgttagcaaacctgttagttttacttctgcnttgaaccagcctcagaagctacttactgctttatgtactctttgggcattaatgccttctntgtaattatatctnggt

SEQ ID NO: 3625 - DNA, 750 bp, Homo sapiens
  misc_feature (615)..(615): "n" may be a, t, c, g, other or unknown
  misc_feature (737)..(737): "n" may be a, t, c, g, other or unknown
  misc_feature (746)..(746): "n" may be a, t, c, g, other or unknown
  misc_feature (748)..(748): "n" may be a, t, c, g, other or unknown
ttttagattttgaaatttagggataatagctcttaggtttgggtaccactttgctgcagtttaagaaagggggaagggaactcatttattaaacatcaatcacgtgctgtgttctgtttgttttctagtcatcatatcacacacctttacgacagctcactgaaggaaggtgatactgttcccattttgtagatggaatagacaaaacctgaatttaagtagcttgctcaaggttccatattgaatatggaaagttcaaatcatctcagtaatgaatataccatatatacttgctgtattgtatctatgataattcagttacccacaatacccttttaaatttctgttaatgacatacctttaaatgtctccttgatgaacagaatcatggtctttaaaaacattttcatgggttgattgcattttcaagctctaaaggattgaaagataaatcttcacgttaaaggtgagagtgaagtatctgctcttgggttacagaaccagatagtactagaactaagattacagggtaaagctgcttttatcttttttctttttctttttcttttttttttgacatggggtctcactgtattgcccaggcttggaatgcantggcatgatctcagctcacggcagcctctgcctcttgggctcaagcgattctcctgcttcagctttccaagtatttgggaccacaggcgccaccacaggcctggctaatggttttggtttgnttttggtananac

SEQ ID NO: 3626 - DNA, 879 bp, Homo sapiens
  misc_feature (665)..(665): "n" may be a, t, c, g, other or unknown
  misc_feature (684)..(684): "n" may be a, t, c, g, other or unknown
  misc_feature (734)..(734): "n" may be a, t, c, g, other or unknown
  misc_feature (775)..(775): "n" may be a, t, c, g, other or unknown
  misc_feature (831)..(831): "n" may be a, t, c, g, other or unknown
  misc_feature (871)..(871): "n" may be a, t, c, g, other or unknown
  misc_feature (879)..(879): "n" may be a, t, c, g, other or unknown
agcatcgagtcggccttgttgcggaacggaaccactgggccgcagcgaccacaggggagttcttcgccggccgcaggttcaaagcgatctgcaatgagcgcctttaggaattcattcgaaggcgcaaaagaaaaagaaattaaggcaggaactgagcgaggaaggaagggagggaaagaaaggaagaaagagaaaaagagaaagaaacagaaagaacaggcaaaagctgaaagggtcatgggaggaggctgctggttccagtgaatggcgctgaccccactgagatcaacaccttgctggaggcctcaaacactgaaagaaagacatgcaaaggaaataattcaggaccaactggtgggctccaaaaatctcttctatgaggaaggtgaatgcaggctctgctacgtcctgcctgtgaaagaatcccttcaggaaaccagagcttccctcgtttaccttttctcctacaaagggaagcagcctggaagaaagagtccagtacttgacccatgcctcaacaaactctgctatcaatatggtgcagcttaccaaaggtcctagaactttgtcaacgcacttggagtaatttttatgaaatattgtgtgtgataagcaaactgtggaaatttatataagatgttggtggcatagagttatacgattgngtattaagggtagttttangatgtcatttttttttcagttcatcatgacagaagtcctttttatgaganaaagtcccatgagaaaaaaactttcttatattgggaagctncttctaatagggggatgggccatttaatggccttccacttaagatgggggtaatanccccggggggttggctttaaagttttttaactttaaatcngggttaan

SEQ ID NO: 3627 - DNA, 703 bp, Homo sapiens
  misc_feature (257)..(257): "n" may be a, t, c, g, other or unknown
  misc_feature (323)..(323): "n" may be a, t, c, g, other or unknown
  misc_feature (394)..(394): "n" may be a, t, c, g, other or unknown
  misc_feature (401)..(401): "n" may be a, t, c, g, other or unknown
  misc_feature (511)..(511): "n" may be a, t, c, g, other or unknown
  misc_feature (540)..(540): "n" may be a, t, c, g, other or unknown
  misc_feature (594)..(594): "n" may be a, t, c, g, other or unknown
  misc_feature (668)..(668): "n" may be a, t, c, g, other or unknown
  misc_feature (670)..(670): "n" may be a, t, c, g, other or unknown
  misc_feature (702)..(702): "n" may be a, t, c, g, other or unknown
aggtctgagggagcgatggcggtacgcgcgttgaagctgctgaccacactgctggctgtcgtggccgctgcctcccaagccgaggtcgagtccgaggcaggatggggcatggtgacgcctgatctgctcttcgccgaggggaccgcagcctacgcgcgcggggactggcccggggtggtcctgagcatggaacgggcgctgcgctcccgggcagccctccgcgcccttcgcctgcgctgccgcacccagtgtgccgncgacttcccgtgggagctggaccccgactggtcccccagcccggcccaggcctcgggcgccgccgncctgcgcgacctgagcttcttcgggggccttctgcgtcgcgctgcctgcctgcgccgctgcctcgggccgncggccgnccactcgctcagcgaagagatggagctggagttccgcaagcggagcccctacaactacctgcaggtcgcctacttcaagatcaacaagttggagaaagctgttgctgcancacacaccttcttcgtgggcaatcctgancacatggaaatgcagcagaacctagactattaccaaaccatgtctggagtgaangaggccgacttcaaggatcttgagactcaaccccatatgccaagaatttcgactgggagtgcgactctactcanangaacagccacaggaagcttgtgccccacctana

SEQ ID NO: 3628 - DNA, 720 bp, Homo sapiens
  misc_feature (78)..(78): "n" may be a, t, c, g, other or unknown
  misc_feature (83)..(83): "n" may be a, t, c, g, other or unknown
  misc_feature (243)..(243): "n" may be a, t, c, g, other or unknown
  misc_feature (318)..(318): "n" may be a, t, c, g, other or unknown
  misc_feature (388)..(388): "n" may be a, t, c, g, other or unknown
  misc_feature (689)..(689): "n" may be a, t, c, g, other or unknown
  misc_feature (691)..(691): "n" may be a, t, c, g, other or unknown
  misc_feature (702)..(702): "n" may be a, t, c, g, other or unknown
ttcattgagtcttctgttgccaaattaaatgccctgaggaaaagtggccagttctgtgatgttcgacttcaggtctgnggccntgaaatgttagcacacagagcagtgctagcttgctgcagtccctatttatttgaaatctttaatagtgatagtgatcctcatggaatttctcacgttaaatttgatgatctcaatccagaagctgttgaagtcttgttgaattatgcctacactgctcanttgaaagcagataaggaattggtaaaagatgtttattctgcagcaaaaaagctgaagatggatcgagtaaagcangtttgtggtgattatttactgtctagaatggatgttaccagctgcatctcttaccgaaattttgcaagtngtatgggagactcccgtttgttgaataaggttgatgcttatattcaggagcatttgttacaaatttctgaagaggaggagtttcttaagcttccaaggctaaagttggaggtaatgcttgaagataatgtttgcttgcccagcaatggcaaattatatacaaaggtaatcaactgggtgcagccgtagcatctgggagaatggagacaatctggaagagctgatgggaagaggttcaaaccttgtctactcagctgatcacaagctgcttgatgggaacctactagatggacagggctgangntgtttggccantgatgatgaccacattca

SEQ ID NO: 3629 - DNA, 847 bp, Homo sapiens
  misc_feature (768)..(768): "n" may be a, t, c, g, other or unknown
  misc_feature (847)..(847): "n" may be a, t, c, g, other or unknown
aggagaagctgatgaagagctagttgatgatggagaagatcagaatgatccctctcgatgggatgaatcaggagaagtttgtatgtctctagatgattaactgacctactatactcctcaaggatgctgcatttggacctaatatgaatcgacaatttggattgttgaacttgaaggcttgcaaaatatggtacatgctggatagtagttatgttgctgtgaaaactgtagggtcaaagccttatagcaaaaaaaatttttttttatatttgcacaggactatacagcaaacaaccatgtggttggattacatggagtccccacatactcagtcagttatcaaagtaaaatattttttatttataggatatacagtaactatttgggtcctatgaaaatagtccttaaagagcttacattcatgtgctactttaacatgaatggagaaaatccgtttatggaagtacagtgacaattgacccaatcactctgtccatcaaaccactcaggctagtttgtactagtagagttttgtttctatttttatttttattaattttattttttttaatacagattttcagtgaggggctttttcaatcccattggttctattttcttgtatttttccatttaatttgcttcataacttaaaccaagtctcttctagtcttaggtattatttctcgattttgtgctgatgggcatgtttataagaactggactttttgacatgaattttactacttcacaaatgaagaatgatgntatgaagtaccgtggcgaagttgacaatccctaaaatgatatgattaaaagtacttcttctgtgtctatcggtaatggn

SEQ ID NO: 3630 - DNA, 773 bp, Homo sapiens
  misc_feature (675)..(675): "n" may be a, t, c, g, other or unknown
  misc_feature (716)..(716): "n" may be a, t, c, g, other or unknown
  misc_feature (739)..(739): "n" may be a, t, c, g, other or unknown
catcgcccgctgcagtagccctgagcccatggctgacaggctcctgctcaccaccccaacccaccgcttccagtgcaaagggccagtggacatcaacattgtggccaaatgcaatgcctgcctctccagcccgtgcaagaataacgggacatgcacccaggaccctgtggagctgtaccgctgtgcctgcccctacagctacaagggcaaggactgcactgtgcccatcaacacctgcatccagaacccctgtcagcatggaggcacctgccacctgagtgacagccacaaggatgggttcagctgctcctgccctctgggctttgaggggcagcggtgtgagatcaacccagatgactgtgaggacaacgactgcgaaaacaatgccacctgcgtggacgggatcaacaactacgtgtgtatctgtccgcctaactacacaggtgagctatgcgacgaggtgattgaccactgtgtgcctgagctgaacctctgtcagcatgaggccaagtgcatccccctggacaaaggattcagctgcgagtgtgtccctggctacagcgggaagctctgtgagacagacaatgatgactgtgtggcccacaagtgccggcacggggcccagtgcgtggacacaatcaatggctacacatgcgcctgcccccagggcttcantggacccttctgtgaacaccccccacccatggtcctactgnagaccagccatgcgaccagtccnagtgccagaacggggcccagtgcatcgtggtgca

SEQ ID NO: 3631 - DNA, 834 bp, Homo sapiens
  misc_feature (779)..(779): "n" may be a, t, c, g, other or unknown
  misc_feature (786)..(786): "n" may be a, t, c, g, other or unknown
  misc_feature (830)..(830): "n" may be a, t, c, g, other or unknown
caaaaaaaaaaatggcggctgccactgtggggcttctgccggccggtagtccctggcgctgctgacccagcatcggcttttctacgtcttgaacctggattcgcctaggggttgggaagggctgtggacggcgttgggggaggcctgacgagattaataaagaactcttcagaattcctggtgtttcatcatatatacgactaagatatcaactcttctagcttgctgtttctggaccaaaaaaaatgacgtctattatcaaattaactaccctttctggggtccaagaagaatctgccctttgctatcttctccaagttgatgagtttagatttttattggactgtggctgggatgagcacttttctatggatattattgattccctgaggaagcatgttcaccagattgatgcagtgctgttgtctcaccctgatcctctccaccttggtgccctcccgtatgctgtcggaaagttgggtctgaactgtgctatctatgcaaccattcctgtttataaaatgggacagatgttcatgtatgatctttatcagtctcgacacaatacagaagattttacactctttacattagatgatgtggatgcagcctttgataaaatacagcagctaaaattctctcagattgtgaatttgaaaggtaaaggacatggcctgtctatcacacctctgccagctggtcatatgataggtgggaacaatatggaaaatagtcaaagatggagaagaagaaattggttatgcagttgactttaaccnccaaganggagatccatttaaaatggatgttcctggaaatgctaaacaggncttt

SEQ ID NO: 3632 - DNA, 773 bp, Homo sapiens
  misc_feature (734)..(734): "n" may be a, t, c, g, other or unknown
  misc_feature (769)..(769): "n" may be a, t, c, g, other or unknown
  misc_feature (772)..(772): "n" may be a, t, c, g, other or unknown
aaggaatcaagcccccaagatggcggcagcggcggaggagcggatggcagaggaaggaggcggcggccaaggcgacggcggttcctctttggcctccggctctacccagcgacagcctccaccgcccgcgccacagcacccgcagccggggtcccaggcgctcccagcccccgcgctggctccggaccagctgcctcaaaacaacacgcttgtggcgctgcccatcgtagccatcgagaacatcctcagctttatgtcctacgacgaaattagccagctccgcctggtttgtaaaagaatggacttggtctgccagagaatgttgaatcagggatttctgaaagtggagaggtaccataatctatgtcagaaacaagttaaagcacaactcccaaggagagagtcagaaaggagaaaccattcattagctcgtcatgcagacattcttgctgctgttgaaacaaggctgtcactattaaatatgactttcatgaaatatgtggattccaatctctgttgcttcatcccaggaaaggtgattgatgagatttatcgtgtgttgagatatgtcaattctaccagagcccctcaacgagctcatgaagtacttcaagaattaagggatatatcctctatggcaatggagtactttgatgaaaagattggtccaattttaaagaggaaattaccaggatcagatgtttctggaagactcatgggctcttcttcagttncaggaaccgtctgcagcctaacaacaatgcagctnttnt

SEQ ID NO: 3633 - DNA, 780 bp, Homo sapiens
  misc_feature (688)..(688): "n" may be a, t, c, g, other or unknown
  misc_feature (708)..(708): "n" may be a, t, c, g, other or unknown
  misc_feature (754)..(754): "n" may be a, t, c, g, other or unknown
ggaagctggtggcggctggtgggcgaccgggcgcatcctcattgcagtgcggcggccctacctcggccctggcctgaccccggcggccctgcccgcccctccctccagcatcatggccagcccaagaaccaggaaggttcttaaagaagtcagggtgcaggatgagaacaacgtttgttttgagtgtggcgcgttcaatcctcagtgggtcagtgtgacctacggcatctggatctgcctggagtgctcggggagacaccgcgggcttggggttcacctcagctttgtgcgctctgttactatggacaagtggaaggacattgagcttgagaagatgaaagctggtgggaatgctaagttccgagagttcctggagtctcaggaggattacgatccttgctggtccttgcaggagaagtacaacagcagagccgcggccctctttagggataaggtggtcgctctggccgaaggcagagagtggtctctggagtcatcacctgcccagaactggaccccacctcagcccaggacgctgccgtccatggtgcaccgagtctctggccagccgcagagtgtgaccgccttctcggacaaggcttttgaggactggctgaatgatgacctcggctcctatcaaggggcccaggggaatcgctacgtggggtttgggaacacgccaccgctnagaagaaagaagatgacttncttaacaacgccatgtccttccttgtactcgggctggaacagcttnaccactggagccagcccggtttgcct

SEQ ID NO: 3634 - DNA, 765 bp, Homo sapiens
  misc_feature (702)..(702): "n" may be a, t, c, g, other or unknown
  misc_feature (745)..(745): "n" may be a, t, c, g, other or unknown
  misc_feature (756)..(756): "n" may be a, t, c, g, other or unknown
aattcatgggacttatataagaaggacaattaatgctgatttgggtacaggggaattatgtgtgtgaatgtcatctacaattaaaaaaaattagcacatccctttacttacttgttatcagtggattctcggggtttggacttaatgttgagctaagaagcattaagtctttgaactgaatgtattttgcatccctggttttggacgacagtaaacgtaggagcactgttgaagtcctggaagggagatcgaaggaggaagattgacttggttctttcttagtcctatatctgtagcatagatgacttggaataaaagctgtatgcatgggcattacccctcaggtcctaagaaataagtcctgaatgcatgtcgttccaaactaacactctgtaatttttcttttatgtcttattttccaagagtcctccattttttgcaccccctcaccgccaactctgttattcagtagagagaagtgtacggctttctgattggtgagtgaaaaagtaacttgagacacgacctaagttgaagagtttagacttgctgagttttagaagtgatggaaattaagagagcatttcaataaaatgtgacttggctgtctttggaagagaagtgcaaggctttcctttgaagaatttaaattagtccggtaggatgtcaggtgagactgtgtatgcaaaatgaatggcacangtgatgccagggcctcttgcttggggtctgagtcttggcacanggtaagtgaanggtaatttc

SEQ ID NO: 3635 - DNA, 782 bp, Homo sapiens
  misc_feature (649)..(649): "n" may be a, t, c, g, other or unknown
  misc_feature (706)..(706): "n" may be a, t, c, g, other or unknown
  misc_feature (740)..(740): "n" may be a, t, c, g, other or unknown
  misc_feature (778)..(778): "n" may be a, t, c, g, other or unknown
catttggcccggggatggtcacacgcgcgggggccggaactgccgtcgccggcgcggtcgttgtcgcattgctctcggccgcactcgcgctgtacgggccgccactggacgcagttttagaaagagcgttttcgctacgtaaagcacattcgataaaggatatggaaaatactttgcagctggtgagaaatatcatacctcctctgtcttccacaaagcacaaagggcaagatggaagaataggcgtagttggaggctgtcaggagtacactggagccccatattttgcagcaatctcagctctcaaagtgggcgcagacttgtcccacgtgttctgtgccagtgcggccgcacctgtgattaaggcctacagcccggagctgatcgtccacccagttcttgacagccccaatgctgttcatgaggtggagaagtggctgccccggctgcatgctcttgtcgtaggacctggcttgggtagagatgatgcgcttctcagaaatgtccagggcattttggaagtgtcaaaggccagggacatccctgttgtcatcgacgcggatggcctgtggctggtcgctcagcagccggccctcatccatggctaccggaaggctgtgctcactcccgaccacgtggagttcaacangctgtatgacgctgtgctcaaaggccctatggacagcgatgacagccatggatctgngctaagactcagccaacccttgggcaacgtgacngtggtccaaaaaggagagcgcgacatcttttcaacggncaca

SEQ ID NO: 3636 - DNA, 888 bp, Homo sapiens
  misc_feature (850)..(850): "n" may be a, t, c, g, other or unknown
  misc_feature (858)..(858): "n" may be a, t, c, g, other or unknown
  misc_feature (872)..(872): "n" may be a, t, c, g, other or unknown
agtgtccataaacctgtgttttgccagcttgcacaggatgaaggtagttacgttggtggctttgcagtggttgaatatagcactgcggagcaggctgaagaggtccagcaggcagcagacggtatgaccatcaagggcagcaaagtccaggtttccttctgtgctcctggagcgccagggcgaagtacattagcagcattgatagcggctcaacgtgtgatgcacagtaatcaaaagggcttacttccagagccaaatccagtacaaattatgaaaagtttaaacaaccctgccatgttgcaagttcttctacagccccagttatgtggacgagctgttaaaccagccgttcttggaacacctcacagcttgccacatctgatgaaaccatccatctctcctgcatttttacatttgaataaagcacatcagaatctttctcatataccactggcacaacaacaattaatgaagtttgagaatattcatactaataataaacccggcttacttggagagcccccagctgtggtacttcagactgcactagggatagggtcagtgcttccattgaaaaaggagttgggacatcatcatggagaagcacataaaagctgcctctaagaatcaaacttcactcttgggagaaccaccaaaagaaattcggctcagtaaaaatccatacttgaatttggcaagtgtgttgcccagtgtgtgcttatcatcccctgcaagtaaaaccactcttcataagactggaattgcaagcagcattctggatgcaatcttttcagggaagtgaatcacaacacgcattggaaaagtgcattgcttatcttcaccttttggngatatgcncaggtaaataattnccaggttcttgatgat

SEQ ID NO: 3637 - DNA, 676 bp, Homo sapiens
  misc_feature (604)..(604): "n" may be a, t, c, g, other or unknown
  misc_feature (674)..(675): "n" may be a, t, c, g, other or unknown
atgtcaggttcaaggaaaggacccttccgtggacatcactcaggaccttgtggatgaatctgaagaggagcgttttgatgatatgtcatcgccaggcttagaattgccatcttgtgaattaagtcgccttgaagaaattgcagaacttgtggcatcatctttaccttcacctcttcgtcgtgaaaaacttgcactggcactagaaaatgagggttatattaaaaagctcctggagctttttcatgtgtgtgaagatttggaaaatattgaaggactgcaccacttgtatgaaattatcaaaggcatctttctcttgaatcgaactgctctttttgaagttatgttctctgaagaatgtataatggacgtcattggatgtttagaatatgatcctgctttatcacaaccacgaaaacacagggaatttctaacaaaaacagccaagtttaaagaagtgattcccatatcagatcctgagctgaaacaaaaaattcatcaagacatacagagttcagtatatacaagatatggttctaccaactccttcggtctttgaagaaaacatgttatcaacacttcactcttttatctttttcaataaggnagagattggtggcatgttgcaggaagatgaaaaatttctgcagatttggttgcccacttacagatgaacnnc

SEQ ID NO: 3638 - DNA, 786 bp, Homo sapiens
  misc_feature (629)..(629): "n" may be a, t, c, g, other or unknown
  misc_feature (693)..(693): "n" may be a, t, c, g, other or unknown
  misc_feature (719)..(719): "n" may be a, t, c, g, other or unknown
  misc_feature (756)..(756): "n" may be a, t, c, g, other or unknown
agtagtggtggtacgggtccgactgaggggtactcgccaccggctgcgtccacccgagcggctgcgagagccaaggcccgagggggtgggcgtggcggccgccgaaacacaaccccctctgttccctctcttcgcggagcggcgccgcgtagcttccatccgccagctgccatgagcgagcgcctccgtcccaggaaaaggagaaggaatggcaacgaagaagacaaccatcttcccccccagaccaaaagaagtagcagaaaccctgtctttcaggattcctgggacacagagtcttcaggcagtgacagtggtgggagcagcagcagcagcagcagcagcatcaatagcccggacagggccagcgggccggaaggcagcttgagccagaccatggccggatccagccctaacacgcctcagcccgtgcccgagcagtccgcgctgtgccaaggcctctacttccacatcaaccagaccctgagggaggcccacttccacagcctacagcaccgagggcggcctctgacatgatgtgccggcagtttcttgccttctgtgaagggacagcgctgtgcagatttgatatttcaacttacaacttggtttaaaagaaaaattgccacganaaatgcctgttggcttttcagtctatatttgaaataacaggttaacaggcagttgtttacttgngggtttgctgcactattgcaatttcnaaggggctttgaacaatttttataggattctttttanggaaggtattcaaatctatgtcaaggtaat

SEQ ID NO: 3639 - DNA, 827 bp, Homo sapiens
  misc_feature (659)..(659): "n" may be a, t, c, g, other or unknown
  misc_feature (722)..(722): "n" may be a, t, c, g, other or unknown
  misc_feature (740)..(740): "n" may be a, t, c, g, other or unknown
  misc_feature (791)..(791): "n" may be a, t, c, g, other or unknown
  misc_feature (827)..(827): "n" may be a, t, c, g, other or unknown
gtggtaccaaagacctgtccatcgctgcagtggggaagtacgggactctgcaggaattttctttctttgacaaggtccgccgggtgctgaagagccaggaggtgtatgaaaacttcctccgctgcatcgcactcttcaaccaggagctggtgtctggctctgagctcctgcagctcgtcagcccatttctggggaaatttccagaactctttgcacagttcaagtccttcctgggggtaaaagagctgtccttcgcgccacccatgagcgacagatccggggacgggataagccgggaaattgattatgcatcctgcaagcgcataggatccagctaccgggcactccccaaaacctaccagcagcccaagtgcagtgggaggacagccatctgcaaggaggtactgaacgacacctgggtctccttcccttcctggtctgaggactccacgttcgtcagctccaagaagacaccgtacgaggagcagcttcaccgctgtgaggacgagcgcttcgagttagacgttgtcctggagacgaacctggccacaatccgtgtgttggaaagtgtgcagaagaagctgtcccggatggcgccggaagaccaggagaagttccggctggacgactccctgggaggcacgtcggaagtgatccancgccgtgccatttatcgcatctatggcgacaaggccccggagatcatcgagagcctcaagaanaaccctgtcaccggttgnccccgttgtcctgaaaagactgaagggccaaggaaaaagaattggcgggangcccaacagggctttaacaagatctggcgggaaccn

SEQ ID NO: 3640 - DNA, 786 bp, Homo sapiens
  misc_feature (719)..(719): "n" may be a, t, c, g, other or unknown
  misc_feature (730)..(730): "n" may be a, t, c, g, other or unknown
  misc_feature (764)..(764): "n" may be a, t, c, g, other or unknown
tcaattttcctttttccggaggggagatggattccctggaatggaactgggctctggtgtatgagctcagtggagagcaccatgacgaagagtggtcagtgaagacttaccaggaagtagctcagaagtttgtggaaactcaccctgagtttattggaatcaaaatcatttattcggatcacagatccaaagatgtggctgtcatcgcagaatccatccgaatggccatggggctccgaatcaagttccccacggtggtggcagggtttgacctggtggggcatgaggacactggccactccttgcatgactacaaggaagctctgatgatccccgccaaggatggcgttaagctgccttacttcttccacgccggagaaacagactggcagggtacttccatagacaggaacattctggatgctctgatgctgaacactaccagaatcggccatggatttgctttgagcaaacaccccgcagtcaggacttactcctggaaaaaggacatccccatagaagtctgtcccatctctaaccaggtgctgaaactggtgtctgacttgaggaaccaccctgtggccactctgatggccactgggcaccccatggtgatcagctctgatgacccagctatgtttggtgccaaaggcttgtcctacgatttctatgaggtcttcatgggcattggggggatgaaggctgacctgaggaccctnaaacagctggncatgaactctatcaagtacagtaccctgttgganagtgagaaaaatactttcatgg

SEQ ID NO: 3641 - DNA, 751 bp, Homo sapiens
  misc_feature (695)..(695): "n" may be a, t, c, g, other or unknown
  misc_feature (720)..(720): "n" may be a, t, c, g, other or unknown
  misc_feature (725)..(725): "n" may be a, t, c, g, other or unknown
ttttgtttgggccttgggcaatagggagcagcccagtgatgactcagctccccagggagaaagctgtctcagcagcccatacttcagggtgttagtcctgccccctggcagctggttatccagctagctccctaaagtgagtactagagttgtttggcctgtagtgtggggtgtctcatctcatgccctgctttgtttccctggaatgtgaaggcccatgccagctcagcccagtattgcatagctactcagttcaggcaaggcactgcatccccagagggtaatgtgcctcgtcagctcaggtctagggtgtgtgaccttaggttggcccaggcaccattttcctgggatgcaggaagctgcttcagattaggtactggactgtgtgtctgcttgggatggccaagacactgttacctggaaggcagggtggtaggtagggtgctgcttaaacttaggcactggggaggcatgactgctctcgatggccaaagtactgttttcccaggagacaaggtactgcttcagctcaggtacagaggggtgtgactgctctggatggttaatgcactgttttcccaggatgcctggcattgcttcagctctggcctagaggggcaggatgtagcagcatctgggaggggtaggtggaggagcttcgccaaggcatcctttcctcaggaggcaatgtgcancttcagctcaggtccctggaagcanggcanttttgggagaagtagactgagaggta

SEQ ID NO: 3642 - DNA, 865 bp, Homo sapiens
  misc_feature (725)..(725): "n" may be a, t, c, g, other or unknown
  misc_feature (853)..(853): "n" may be a, t, c, g, other or unknown
  misc_feature (859)..(859): "n" may be a, t, c, g, other or unknown
  misc_feature (862)..(862): "n" may be a, t, c, g, other or unknown
gatcttggctcactgcaaccaccatctcctgggttcaagcgatcttcccaccttatcctcctgagtacctggggctacaggcatgtgccaccacgcctggctaatttttgtattttcttagtagagatggggttttgccatgttgttccggctggtcacaaactccagggctcaagcaatccactcacttcagcttcccaaagtgctgggattacaggcatgagccacaacacccagccctttatataattttaaaagtgtaggtaattaggtaaaattaggttaaaagtatatgtatatttacctgatatttaaatattacctaagtgtttaatgtggacatgtaagctctttaaagatagtgcttatgtattttatatctgtttcacatactccttatatatcccccacagaaatggtcacaaataggttccttaataagtatttttgaattcagccatgctatatattcattagtaagtgagttttcttttattatgaactacaaactttaacctttttttgagtagtgagcagttattcatttaccttcacactctttaaataccaaattttgagtgagtgagtgtgtaaggttttgtcatacagacttgcaattcctatatgggataaagtagactagcacaggaatttttcttgtatcactcatgcaagactctaaattccttaaaggcagggatcatgtatattttgatcactggtgnatcctcagcacttcacatggtgcctgtcacataaatatttggtaaatgacttcttcaagcaatagctttggctttatggtatcctggatttcaaaacgtcatatataaattctctcactatgacttgntcatanggncta

SEQ ID NO: 3643 - DNA, 818 bp, Homo sapiens
  misc_feature (677)..(677): "n" may be a, t, c, g, other or unknown
  misc_feature (759)..(759): "n" may be a, t, c, g, other or unknown
  misc_feature (780)..(780): "n" may be a, t, c, g, other or unknown
  misc_feature (795)..(795): "n" may be a, t, c, g, other or unknown
cttccttcgtcccttccttccttcctttcgccgggcgcgatggagccggggcgccggggggccgcggcgctgctagcgctgctgtgcgtggcctgcgcgctgcgcgccgggcgcgcccaatacgaacgctacagcttccgcagcttcccacgggacgagctgatgccgctcgagtcggcctaccggcacgcgctgggcaagtacagcggcgagcactgggccgagagcgtgggctacctggagatcagcctgcggctgcaccgcttgctgcgcgacagcgaggccttctgccaccgcaactgcagcgccgcgccgcagcccgagcccgccgccggcctcgccagctatcccgagctgcgcctcttcgggggcctgctgcgccgcgcgcactgcctcaagcgctgcaagcagggcctgccagccttccgccagtcccagcccagccgcgaggtgctggcggacttccagcgccgcgagccctacaagttcctgcagttcgcttacttcaaggcaaataatctccccaaagccatcgccgctgctcacacctttctactgaagcatcctgatgacgaaatgatgaagaggaacatggcatattataagagcctgctggtgccgaggactacattaaagacctggaaaccaagttcatatgaaaagcctgttcatccgancagtgcgggcatacaacggtgaaaactggagaacattcatcacagacatggaactggcccctttccgaatttcttcaaaagncttttacgaatggtcttgcancctggcgaagggttncaagggaagaatcaagggacttt

SEQ ID NO: 3644 - DNA, 773 bp, Homo sapiens
  misc_feature (550)..(550): "n" may be a, t, c, g, other or unknown
  misc_feature (642)..(642): "n" may be a, t, c, g, other or unknown
  misc_feature (684)..(684): "n" may be a, t, c, g, other or unknown
  misc_feature (722)..(722): "n" may be a, t, c, g, other or unknown
  misc_feature (766)..(766): "n" may be a, t, c, g, other or unknown
ccctaatcaagtaccccctcctcctccaccacctcctgccccacccctccctgcatctggattctttttggcatccatgtcagaagacaatcgccctttaactggacttgcagctgcaattgccggagcaaaacttaggaaagtgtcacggatggaggatacctctttcccaagtggagggaatgctattggtgtgaactccgcctcatctaaaacagatacaggccgtggaaatggaccccttcctttagggggtagtggtttaatggaagaaatgagtgccctgctggccaggaggagaagaattgctgaaaagggatcaacaatagaaacagaacaaaaagaggacaaaggtgaagattcagagcctgtaacttctaaggcctcttcaacaagtacacctgaaccaacaagaaaaccttgggaaagaacaaatacaatgaatggcagcaagtcacctgttatctccagaccaaaatccacacccttatcacagcccagtgccaatggagtccagacggaaggacttgactatgacaggctgaagcangacattttagatgaaatgagaaaagaattaacaaagctaaaagaagagctcattgatgcaatcaggcaggaactgagcaagtcaaatactgnatagaggaacagactaaggagagataggactttaatctggangaaaaatatcctacaaacaacaactggtcacaacagcnaacccctacatttatgagctgtaagaagaaaatggagaccaacngaaaggg

SEQ ID NO: 3645 - DNA, 872 bp, Homo sapiens
ctctttgccctcgcgacgccgccacctccggaacaagccatggtggcggcgacggtggcagcggcgtggctgctcctgtgggctgcggcctgcgcgcagcaggagcaggacttctacgacttcaaggcggtcaacatccggggcaaactggtgtcgctggagaagtaccgcggatcggtgtccctggtggtgaatgtggccagcgagtgcggcttcacagaccagcactaccgagccctgcagcagctgcagcgagacctgggcccccaccactttaacgtgctcgccttcccctgcaaccagtttggccaacaggagcctgacagcaacaaggagattgagagctttgcccgccgcacctacagtgtctcattccccatgtttagcaagattgcagtcaccggtactggtgcccatcctgccttcaagtacctggcccagacttctgggaaggagcccacctggaacttctggaagtacctagtagccccagatggaaaggtggtaggggcttgggacccaactgtgtcagtggaggaggtcagaccccagatcacagcgctcgtgaggaagctcatcctactgaagcgagaagacttataaccaccgcgtctcctcctccaccacctcatcccgcccacctgtgtggggctgaccaatgcaaactcaaatggtgcttcaaagggagagacccactgactctccttcctttactcttatgccattggtcccatcattcttgtgggggaaaaattctagtattttgattatttgaatcttacagcaacaaataggaacttctgggcaatgagacttcttgaccagtgaatcaccagccgatacgaacgtcttgccaacaaaaatgtgtggca

SEQ ID NO: 3646 - DNA, 523 bp, Homo sapiens
gatgtagctcgcagagaagagcaggagcagaattagccctttcttcaggccatcttgcctcaaagggtacacatgtttggcggttaagatgaaactaacccttatgtttcatcctggccccatgatgtacacatcttagccatgtagtggccttggggggccacagagatttcctttgaggagcatggtagagtccacagccatggctgaagtcagtggacaccgaggggacaggactgcaggccaccaggggcctctgcccagagggaggcagagaggatggcggccacgggtgctctcctggcatcctcatggggtgatgccaggccgggcacttcaaaacaggctcagccgactgggagatcctttgtactttgcacagttcacacacacaaacacacacaccctatcccaagtgtttttgttagacacaaatgtcagcgtgtgattttggaagacttgtcagtgatgacaaaccatgatgcctgtgtttctgagtctttaaataaaaatgaacatggag

SEQ ID NO: 3647 - DNA, 726 bp, Homo sapiens
  misc_feature (667)..(667): "n" may be a, t, c, g, other or unknown
  misc_feature (690)..(690): "n" may be a, t, c, g, other or unknown
  misc_feature (717)..(717): "n" may be a, t, c, g, other or unknown
tgtgccttctctttcggagttgttccgtgctcccacgtgcttccccttctccactggctgggatcccccgggctcggggcgcagtaataatttttcaccatgcatcggaaaaaggtggataaccgaatccggattctcattgagaatggagtagctgagcggcaaagatctctccttgttgtagttggggatcgaggaaaagatcaggtggtaatacttcatcacatgttatccaaagcaactgtgaaggctcggccttcagtgctgtggtgttataagaaagagctggggtttagcagtcaccggaagaaaagaatgcgacagctgcagaagaaaataaagaatggaacactgaacataaagcaggacgacccctttgaactcttcatagcagccacaaacattcgctactgctactacaacgagacccacaagatcctgggcaataccttcggcatgtgtgtgctgcaggattttgaagccttaactccaaacttgctggccaggactgtagaaacagtggaaggtggtgggctagtggtcatcctcctacggaccatgaactcactcaagcaattgtacacagtgactatggatgtgcattccaggtacagaactgaggcccatcaggatgtggtgggaagatttaatgaaagggttattctgnctctggcctcttgtaagaagtgnctcgtcattgatgaccagcttaacatnctgccatct

SEQ ID NO: 3648 - DNA, 861 bp, Homo sapiens
  misc_feature (784)..(784): "n" may be a, t, c, g, other or unknown
  misc_feature (797)..(797): "n" may be a, t, c, g, other or unknown
  misc_feature (823)..(823): "n" may be a, t, c, g, other or unknown
ggtggcggtgcaaccgtcatgtggagagcatcgacaagcgccactgctcgctggtctacgtccccgaggagatctaccgctatgcccggagcctggaggagctgctgctggacgccaaccagctccgcgagctgcccgagcaatttttccagctagtcaaattacgaaagcttggacttagtgataatgaaattcagcggctccctccagaaatagcaaacttcatgcagctggtggaactagatgtgtctcgaaatgagattcctgaaattccagaaagcatttcattctgtaaagcactgcaggtagctgacttcagcggaaacccactgactaggttgccagaaagctttcctgaattacagaatttaacatgtctttctgtaaatgacatctcactacagtctctacctgaaaatattggcaatctttataacctggcttcactggaactgagagagaatcttcttacatatcttcctgactctcttacccagctgcgaagactagaagaacttgatttaggaaacaatgaaatatataatttgccagaatcaattggagccctcttacatctaaaagatctctggttggatggaaatcaactgtcagaattacctcaggaaataggaaatctgaagaacctgctgtgtttagatgtctctgaaaacaggttggaaagacttcctgaagaaatcagtggcctgacttcattaacggatttagtcatttcccagaacttattagaaacgattccggatggattggaaaactaaagaactgncaatcttgaaggnggatcagaatagacttacacagttgnctgaagcagttgggggatgtgaaagtcttactgggtta

SEQ ID NO: 3649 - DNA, 830 bp, Homo sapiens
  misc_feature (647)..(647): "n" may be a, t, c, g, other or unknown
  misc_feature (760)..(760): "n" may be a, t, c, g, other or unknown
  misc_feature (771)..(771): "n" may be a, t, c, g, other or unknown
  misc_feature (830)..(830): "n" may be a, t, c, g, other or unknown
tggaaaaggcggcggcggcggcggcggcagcggcagcagcaggtggagcgagctacagcgtttggcctgaaacccactgctgcagccacccgggctggagttggcccgttgggtggagccagtgctcgccccggtccgacccccggtttccgggacacttgggttgcggaggccggctggccggagtcacggttggggacgggcgcgcctcggagcgcacggctgcgctggaagccgcgtctggggcgcaggaccaacgggacctacctcctcccggctacctaaagactccttctctcgggaaagagcgctgcccggctctgggatttgggaggagctcggaggccgctcgggcacctcgctggacactatccgtttgcgccccggtggcgcgggagggtccggagcggagcgctcgtctctcctcagcggtttagtggagaaaagcagagagctcttcctggggcgaatgggacctcctccctcggtcctccgtggagtcgtcgcatcgcttgtcgtgttggtctcgaggggctcacagcttggcactaatttgcaggtgttcgctgctgatttggtttcttcttcgatttgcggacggttcccttcagcgactctcgacacacgttttcctgtcttcgccgganggccgggtctggggtcgccggacctgcgggaatccagcgcttattcgctgaccctcgagtcgcttcgctagctgtgcgcctctgggcactacctggaaggagctgcaacccgntcttgaggatncgtcttaggagcatcgctctaaggcttttgcttgtgtggatggtcgcgcatgcttattn

SEQ ID NO: 3650 - DNA, 689 bp, Homo sapiens
  misc_feature (604)..(604): "n" may be a, t, c, g, other or unknown
  misc_feature (617)..(617): "n" may be a, t, c, g, other or unknown
  misc_feature (665)..(665): "n" may be a, t, c, g, other or unknown
gtgcagaacctttgcctcctggccagagggacccttctgcaggctgattccagcagtgcccgatggtgggacccacaccagaccaagccttcgcctcccagaggcctcctggccctcctgtcatggcctgtgagagccacacccctaggccccgtctcctagtctgcaggccgcaggaccagctgcccacggccccagggggcaagggctgtagatgagggtctcagaggtggtgggagcaccccccccacccacagttcctgggcatttctttagagctttaaaatggcacctggagaccaccaggcgcggcgatcagatcgggtggtgtggtgcctcctgggactgaccacttcttgctctccgaccaggcaggggcgagtggcctgggaggttcccggaccctcagggcgcctgtgtctctgggcaccgcagctccgccccactccttcctccagaacattccccactcgggctagagaattgcgtctgctccaggaatgcatcctagcgtgtgtacgatcgcgcctgggtgtcctgttctcatgagcaagcggttttaaccagcagcataatttatactcatagacaggactgggggaanggctgttcctgangctggggtgcagtgccttggaaagcacccctgaaacagtggaccttgnatttttaagtgtccctgcaaccat

SEQ ID NO: 3651 - DNA, 737 bp, Homo sapiens
  misc_feature (666)..(666): "n" may be a, t, c, g, other or unknown
  misc_feature (707)..(707): "n" may be a, t, c, g, other or unknown
  misc_feature (718)..(718): "n" may be a, t, c, g, other or unknown
ctttttccctctgtgatggttgtagtagaacaaattaaaagtcaaaagattcatggttgtcaaatcctggaaacagtctacaaacacagctgtggggggttgcctcctgttcgaagtgcactggaaaaaatcctggccgtttgtcatggggtcatgtataaacagctctcagcctggatgctccatggactcctcttggaccagcatgaagaattctttatcaaacaggggccatcttctggtaatgtcagtgcccagccagaagaggacgaggaggatctgggcattgggggactgacaggaaaacaactgagagaactgcaggacttgcgcctgattgaggaagagaacatgctggcaccatctctgaagcagttttccctacgagtggagattttgccatcctacattccagtgagggttgctgaaaaaatcctatttgttggagaatctgtccagatgtttgagaatcaaaatgtgaacctgactagaaaaggatccattttgaaaaaccaggaagacacttttgctgcagagctgcaccgtctcaagcagcagccactcttcagcttggtggactttgaacaggtggtggatcgcattcgcagcactgtggctgagcatctctggaagttgatggtagaagaatccgatttactgggtcanctgaagatcattaaagacttttaccttcttgggacgtgganaactggttcangccttcatttgacacagtt

SEQ ID NO: 3652 - DNA, 733 bp, Homo sapiens
  misc_feature (663)..(663): "n" may be a, t, c, g, other or unknown
  misc_feature (713)..(713): "n" may be a, t, c, g, other or unknown
  misc_feature (732)..(732): "n" may be a, t, c, g, other or unknown
gtagtttcgagcccgctgccctttgcctcctgggcggagaagctgcttcctcctgggaacaaccgcctcccgctcctagcaggttgctactgccccgaacccgcgctgcagggaacagcggggcaaacagtgagtggggttcagcgtagactctggaccaggagaggcccgcggtgaccgaggcctgggccccggaaaccaatagagccatggcgactccctctgctgccttcgaggcccttatgaatggtgtgacaagctaggatgtacccgaagatgctgttccatgtgaactgcttcttattggagaggcttcatttcctgtgatggtgaatgacatgggccaggtcctcattgctgcctcctcctatggccgtggccgcctggtggtcgtgtcccatgaggactacttggtggaagcccagctcacgccctttctcctgaacgcagtggggtggctttgctcttcccctggggctcccattggtgtacacccatccctggcacctttggccaaaatcctcgagggctctggagtggatgcaaaggttgagccagaagtgaaagactccctgggggtttactgtattgatgcctacaatgaaaccatgacagaaaagctggtcaagttcatgaaatgtggtggcggcttgctcataggangacaagcctggggttgggccaaccagggggaggatgaaagggttctggtnacgttccctgggaaccttng

SEQ ID NO: 3653 - DNA, 654 bp, Homo sapiens
  misc_feature (548)..(548): "n" may be a, t, c, g, other or unknown
  misc_feature (596)..(596): "n" may be a, t, c, g, other or unknown
  misc_feature (599)..(599): "n" may be a, t, c, g, other or unknown
  misc_feature (649)..(649): "n" may be a, t, c, g, other or unknown
agtgctgcggctgcctagttgacgcacccattgagtcgctggcttctttgcagcgcttcagcgttttcccctggagggcgcctccatccttggaggcctagtgccgtcggagagagagcgggagccgcggacagagacgcgtgcgcaattcggagccgactctgggtgcggactgtgggagctgactctgggtagccggctgcgcgtggctggggaggcgaggccggacgcacctctgtttgggggtcctcagagattaatgattcatcaagggatagttgtacttgtctcgtgggaatcacttcatcatgcgaaatctgaaattatttcggaccctggagttcagggatattcaaggtccagggaatcctcagtgcttctctctccgaactgaacaggggacggtgctcattggttcagaacatggcctgatagaagtagaccctgtctcaagagaagtgaaaaatgaagtttctttggtggcagaaggttttctcccagaggatggaagtggccgcattgttggtgttcaggacttgctggatcangagtcagtgtgtgtggccacagcctctggagacgtcatactctgcagnctnacacacaacagctggaatgtgttgggaggtgtaaccagtggtatctctgntatga

SEQ ID NO: 3654 - DNA, 860 bp, Homo sapiens
  misc_feature (339)..(339): "n" may be a, t, c, g, other or unknown
  misc_feature (395)..(395): "n" may be a, t, c, g, other or unknown
  misc_feature (498)..(498): "n" may be a, t, c, g, other or unknown
  misc_feature (602)..(602): "n" may be a, t, c, g, other or unknown
  misc_feature (608)..(608): "n" may be a, t, c, g, other or unknown
  misc_feature (642)..(642): "n" may be a, t, c, g, other or unknown
  misc_feature (781)..(781): "n" may be a, t, c, g, other or unknown
  misc_feature (838)..(838): "n" may be a, t, c, g, other or unknown
  misc_feature (857)..(857): "n" may be a, t, c, g, other or unknown
atgcggtcccgggttctgtggggcgccgcccggtggctctggccccgccgggccgttggcccagcccgccggcccctgagctccggtagcccgccgctggaggagctgttcgcccggggcgggcccttgcggaccttcctcgagcgccaggcggggtctgaagcccatttgaaggtcaggaggcccgagttgctggcggtgatcaaactgctgaacgagaaggagcaggagctgcgggagactgagcacttgctgcacgatgagaatgaagatttaaggaaacttgcagagaatgaaatcactttgtgtcaaaaagaaataactcagctgaagcatcanaagaaacagatgaaaatgatttgatcctggaagtaactgcaggagttggaggtcangaggcaatgttgtttacatcagagatatttgatatgtatcagcaatatgctgcatttaaaagatggcattttgaaaccctggaatattttccaagtgaactangtggccttagacatgcatctgccagcattgggggttcagaagcctataggcacatgaaatttgaaggaggtgttcacagagtacaaagagtgccaaagacaganaagcanggccgcgtccatactagcaccatgactgtagcantattaccccagcctactgagattaatctggtgattaatccgaaagatttgagaattgacactaagcgagccagtggactgggggggcagcatgtaaatccacggacagtgcttgtccggatggtcatctttcaacaggngtggttctgaatgcaacaagagagatctcacttaaaaataagacttgctttgacaangtacctgcaaactgtcagntgc

SEQ ID NO: 3655 - DNA, 782 bp, Homo sapiens
  misc_feature (640)..(640): "n" may be a, t, c, g, other or unknown
  misc_feature (755)..(755): "n" may be a, t, c, g, other or unknown
  misc_feature (766)..(766): "n" may be a, t, c, g, other or unknown
  misc_feature (780)..(780): "n" may be a, t, c, g, other or unknown
ctcttccggtctccggccgccccttacctgcaggctcttctcccgccgcggcccggcgctctccgagtcgcccctgcggactggtctcgcacagtgcctgggcaccgggcgccagacagacactggccatgacgagcggcgcaaccaggtaccggctgagctgctcgctccggggccacgagctggacgtacggggcctggtgtgctgcgcctatccgccgggagcctttgtgtccgtgtcccgagaccgcaccacccgcctctgggccccagacagtccaaacaggagctttacagaaatgcactgtatgagtggccattccaattttgtatcttgtgtatgcatcataccctcaagtgacatctaccctcatggcctaattgccaccggtggaaatgaccacaatatatgcattttctcactggacagtccaatgccactttatattctaaaaggccacaaaaatactgtttgtagtctatcatctggaaaatttgggacattacttagtggttcatgggacaccactgctaaagtctggctgaatgacaagtgcatgatgaccttgcagggtcatacaagctgcagtgtgggcggtaaagatcttacctgaacagggcttaatgttgactggatcancaggcaagactgttaaactgtggaaggctggaagatgtgaagaggactttttcagggcatgaagactgtgtaagaagtttggcaattttgagtgaaacaagaatttctttcctgngccaaatgaangcttagtatttaanaa

SEQ ID NO: 3656 - DNA, 774 bp, Homo sapiens
  misc_feature (630)..(630): "n" may be a, t, c, g, other or unknown
  misc_feature (639)..(639): "n" may be a, t, c, g, other or unknown
  misc_feature (692)..(692): "n" may be a, t, c, g, other or unknown
  misc_feature (747)..(747): "n" may be a, t, c, g, other or unknown
  misc_feature (772)..(772): "n" may be a, t, c, g, other or unknown
gagcctaccaaacctttggttcgcagggctggagctaagtctcgctccaggagaaagaagcagaagaagaactccaggcaggaagcagtgccctggaaaaaacccaaaggcatcaattccaacagcacagctaacttggaggatcctgaggtgggtgatgctgaaagcatggcgatctcagagccgatcaagggcagcagaaagccctgtgtgaataaggaggagttggctttgaagaagcccatggcgaaatgtgcctggaagggtcccagagagccacctcaggatgcccgggcagaagccgagagcccaggaggcgcctctgagtcagaccaagatggtggccatgaaagcccaccaaagaagaaggccgtggcctgggtgtctgccaagaaccccgctcccatgaggaagaagaagaaggtgagcttgggccctgtctcctacgtcttggttgactcagaagatggcaggaagaagccggtgatgccaaagaaagggccaggctcaagaagggaggcatcagatcagaaggcccctcggggccagcagcctgccgaggcaacagcctcaacctctaggggtccgaagccaagccagaaggctctcctcggcgtgccccaatgaatncagaaaggnttgatctgggggaccacccatacttgaggagttgaaagaacaaggaagacgtnccaagtcaaccaagtttctctctttgtcacttgaattaagacttttggacttttnttaaggggccccttgtttgattagnaa

SEQ ID NO: 3657 - DNA, 870 bp, Homo sapiens
  misc_feature (802)..(802): "n" may be a, t, c, g, other or unknown
  misc_feature (818)..(818): "n" may be a, t, c, g, other or unknown
  misc_feature (847)..(847): "n" may be a, t, c, g, other or unknown
ctcggctttgtgcggcggtggagctctacccttctccaaaagaagagccaagagaaggtccttttctacaaatatcagagccatggctcaggagtcagtgatgttcagtgatgtgtccgtagacttctctcaggaggagtgggaatgcctgaatgatgatcagagagatttatacagagatgtgatgttggagaattacagcaacctggtttcaatggggcattctatttctaaaccaaatgtgatctcctacttggagcaagggaaggagccctggttggctgacagagagctaacaagaggccagtggccagtcctggaatcaagatgtgagaccaagaaattatttctgaagaaagaaatttatgaaatagaatcaacccagtgggaaataatggaaaaactcacaagacgtgattttcagtgctccagtttcagagatgattgggaatgtaataggcagtttaagaaagaactcggctctcaggggggacatttcaatcaattggtattcactcatgaagatctgcccactttgagtcaccatccatccttcacattacagcaaatcattaacagtaaaaagaaattctgtgcatctaaagaatataggaaaacctttagacatggctcacagtttgctacacatgagataattcataccattgagaaccttatgaatgtaaggaatgtggaaagtcctttagacatccctcaagactcactcatcatcagaaaattcatactggcaagaaaccctttgaatgtaaggaatgtggaaaaacctttattggggcttcanaccttactcgacatcnccggaattcacactgggtgagaaaccctntgaatgtaaggaatgtgggaaaa

SEQ ID NO: 3658 - DNA, 784 bp, Homo sapiens
  misc_feature (739)..(739): "n" may be a, t, c, g, other or unknown
  misc_feature (779)..(779): "n" may be a, t, c, g, other or unknown
  misc_feature (783)..(783): "n" may be a, t, c, g, other or unknown
actttcaaaatggcggagtgtggagcgagcggcagcgggagcagcggggacagtctggacaagagcatcacgctgccccccgacgagatcttccgcaacctggagaacgccaagcgcttcgccatcgacataggcgggtcgttaaccaagctggcctactattcaacggtacagcacaaagtcgccaaggtgcggtctttcgaccactccggaaaggacacagaacgtgaacatgagccgccctatgagatttcagttcaagaagagatcactgctcgactgcacttcattaagtttgagaatacctacatcgaagcctgcctggacttcatcaaagaccatctcgtcaacacagagaccaaggtcatccaggcgaccgggggcggggcctacaagttcaaggacctcatcgaagagaagctgcggctgaaagtcgacaaggaggacgtgatgacgtgcctgattaaggggtgcaacttcgtgctcaagaacatcccccatgaggccttcgtgtaccagaaggattccgaccctgagttccggttccagaccaaccacccccacattttcccctatcttcttgtcaatatcggctctggagtctccatcgtgaaggtggagacggaggacaggttcgagtgggtcggcggcagctccattggaggcggcaccttctgggggcttggcgctctgctcaccaaaacgaagaagtttgacgagctcctgcacctggctcgangggccagcacagcaatgtggacatgctggtgccggacgtntacng

SEQ ID NO: 3659 - DNA, 764 bp, Homo sapiens
  misc_feature (555)..(555): "n" may be a, t, c, g, other or unknown
  misc_feature (706)..(706): "n" may be a, t, c, g, other or unknown
  misc_feature (722)..(722): "n" may be a, t, c, g, other or unknown
  misc_feature (737)..(737): "n" may be a, t, c, g, other or unknown
ggaagaacccgcagcagctcccaggatgaactggttgcagtggctgctgctgctgcgggggcgctgagaggacacgagctctatgcctttccggctgctcatcccgctcggcctcctgtgcgcgctgctgcctcagcaccatggtgcgccaggtcccgacggctccgcgccagatcccgcccactacagggagcgagtcaaggccatgttctaccacgcctacgacagctacctggagaatgcctttcccttcgatgagctgcgacctctcacctgtgacgggcacgacacctggggcagtttctctctgactctaattgatgcactggacaccttgctgattttggggaatgtctcagaattccaaagagtggttgaagtgctccaggacagcgtggactttgatattgatgtgaacgcctctgtgtttgaaacaaacattcgagtggtaggaggactcctgtctgctcatctgctctccaagaaggctggggtggaagtagaggctggatggccctgttccgggcctctcctgagaatggctgacgaggcggnccgaaaacttctcccagcctttcagacccccactggcatgccatatggaacagtgaacttacttcatggcgtgaacccaggagagacccctgtcacctgtacggcagggattgggaccttcattggtgaatttgccaccctgagcagcctnactggtgacccggtgntcgaagatgtggccngaagtggcttttgatgcgcctctggga

SEQ ID NO: 3660 - DNA, 788 bp, Homo sapiens
  misc_feature (697)..(697): "n" may be a, t, c, g, other or unknown
  misc_feature (757)..(757): "n" may be a, t, c, g, other or unknown
  misc_feature (766)..(766): "n" may be a, t, c, g, other or unknown
attgataatacttttaatgtgttggtaatgatgtttaaaattgaaagatttttaaaataaaaatgatagattttcttactaaaaatgtttttattaaccttgcttttattggaaaaaatcaagcaatatttctttttcttttgtgttatattgtactttactgattcatttactggtgatacatatgtttttatggattttccagtttaatttgcatatacaaatgaatgcaatggtctattggtgagcattgagcaacactgtataaagttttaaaaatgtaaacactttttaatctactttcctctaaaaatcaataatattctattatttctaatccttttccacttgggaaataacaatgaagaatctgagaatttgacatctataactttacagattcatttttccatttaaatttcagtttcttggatcactgaatatgggaagggagagcttcactaattagacgcagcttcttaagaacttatattctctttgacatacatctctattgtagttttttgttttgttttgttttttgagatggagtcttgctctgtcacccaggctggagtgcagtggtgcaatctcagctcactgcaacctctgcctcctgggttcaagtgattctcgtacctcagactcccgagtagttgggattacaggtgcccaccaccacacccgctaattttgnatttttagtagccatgtggtttgccatgttggccagctggttcgactctgcctcagtganccccactanctccaagtgtggatacgggtga

SEQ ID NO: 3661 - DNA, 738 bp, Homo sapiens
  misc_feature (648)..(648): "n" may be a, t, c, g, other or unknown
  misc_feature (707)..(707): "n" may be a, t, c, g, other or unknown
  misc_feature (732)..(732): "n" may be a, t, c, g, other or unknown
acttactgagaacattaaagggaaatgataaactcgtggtggggatatggcagacaggtgcttgtttgtttgagagaagtagcagaagagataaaatacaaagtgctatatgtttcagctggagaggaaagagagagaatttattagattatatacttgtcccatggcataccacgtatatgtttaaatagggacacatctccctatgtttaactatacttataaacaactttgatacacattgcgtcttttattctgtcacctgatattttagtgtatctcaagttacagattacatgtgtccttaaactatttctgaatttggacttagttccatatacagaaagaactttagaaaattcattaatttggatcttctattgatagccataaatattatgtttatgtattctaaaacctctttgtttagttagtactgttcatgaatgtaacaagcttcaatttctcatttgtgagtagtacatttgctttttgtttgtttgtttgtttgtttttgagatggagtctcacgctgtcaccaggctggagtgcagtggcgcgatttcagctcactgcaacctccacctcccaggtgcaagtgatgcccctgcctcagcctcccgagtagctgggactacagacacccgncaccacacctggctaatttttgtatttttagtagagacggggtttcaccatgttgctangctggtctcaaactcttgacctcgngatttg

SEQ ID NO: 3662 - DNA, 866 bp, Homo sapiens
  misc_feature (768)..(768): "n" may be a, t, c, g, other or unknown
  misc_feature (809)..(809): "n" may be a, t, c, g, other or unknown
  misc_feature (846)..(846): "n" may be a, t, c, g, other or unknown
tgatattgaatatttcagaaaagatccaagaccattcttcaagtttgcaaaggaaatatatcctggacaattccagccatctctctgtcacaaattcatagccttgtcagataaggaaggaaaactacttcgcaactatacccagaacatagacacgctggaacaggttgcgggaatccaaaggataattcagtgtcatggttcctttgcaacagcatcttgcctgatttgtaaatacaaagttgactgtgaagctgtacgaggagatatttttaatcaggtagttcctcgatgtcctaggtgcccagctgatgaaccgcttgctatcatgaaaccagagattgtgttttttggtgaaaatttaccagaacagtttcatagagccatgaagtatgacaaagatgaagttgacctcctcattgttattgggtcttccctcaaagtaagaccagtagcactaattccaagttccataccccatgaagtgcctcagatattaattaatagagaacctttgcctcatctgcattttgatgtagagcttcttggagactgtgatgtcataattaatgaattgtgtcataggttaggtggtgaatatgccaaactttgctgtaaccctgtaaagctttcagaaattactgaaaaaccttcacgaacacaaaaagaattggcttatttgtcagagttgccacccacacctcttcatgtttcagaagactcaagttcaccagaaagaacttcaccaccagattcttcagtgattgncacacttttagaccaagcagcttagagtaatgatgatttanatgtggctgaatcaaaagggtgtatggaagaaaaccncaggaagtccaaactttttg

SEQ ID NO: 3663 - DNA, 816 bp, Homo sapiens
  misc_feature (726)..(726): "n" may be a, t, c, g, other or unknown
  misc_feature (786)..(786): "n" may be a, t, c, g, other or unknown
  misc_feature (792)..(792): "n" may be a, t, c, g, other or unknown
gggagccgcaatgtctcttgacagcggcggcggcgcagccggttccgggttcggcgcggggcggggatgtgaatcccgatggagcggcccgaggaaggcaagcagtcgccgccgccgcagccctggggacggctcctgcgtctgggcgcggaggagggcgagccgcacgtcctcctgaggaagcgggagtggaccatcgggcggagacgaggttgcgacctttccttccccagcaataaactggtctctggagatcactgtagaattgtagtggatgaaaaatcaggtcaggtgacactggaagataccagcaccagtggaacagtgattaacaagctgaaggttgttaagaagcagacatgccctttacagactggggatgtcatctacttggtgtacaggaagaatgaaccggaacacaacgtggcatacctctatgaatctttaagtgaaaagcaaggcatgacacaagaatcctttgatacctcaggtgcaggtgcagggcgaggggccgatccccgggtccctccgtcgtcgcccgccactcaggtgtgctttgaggaaccacagccatcaacatcgacgtcagacctcttccccacagcctcggcctcttccacggagccttctcctgcagggcgagagcgttcctccagttgtgggtctgggggtggtggcatcttccctaaaggaagtggtccctctgtggcaagtgatgaaagtctncagctttgcttaactcttccagacagaaagactgcgtccttttcgtcgttggaaccccangatcangaggattttggagcccgtgaagaa

SEQ ID NO: 3664 - DNA, 874 bp, Homo sapiens
  misc_feature (716)..(716): "n" may be a, t, c, g, other or unknown
  misc_feature (778)..(778): "n" may be a, t, c, g, other or unknown
  misc_feature (812)..(812): "n" may be a, t, c, g, other or unknown
  misc_feature (830)..(830): "n" may be a, t, c, g, other or unknown
gtttggggacctgtttgaagaggagtattccactgtgtctaataatcagtatggaaaagggaagaaattaaagactaaagctttggagccacctgctcctagagaattcaccaatttaagcggaatcagaaatcagggtggaacctgttacctcaattcccttcttcagactcttcatttcacacctgaattcagagaagctctattttctcttggcccagaagagcttggtttgtttgaagataaggataaacccgatgcaaaggttcgaatcatccctttacagttacagcgcttgtttgctcagcttctgctcttagaccaggaagctgcatccacagcagacctcactgacagctttgggtggaccagtaatgaggaaatgaggcaacatgatgtgcaggaactgaatcgaatcctcttcagcgctttggaaacttctttagttgggacctccggtcatgacctcatctatcgtctgtaccatggaaccattgttaaccagattgtttgtaaagaatgtaagaacgttagcgagaggcaggaagacttcttagatctaacagtagcagtcaaaaatgtatccggtttggaagatgctctctggaacatgtatgtagaagaggaagtttttgattgtgacaacttgtaccactgtggaacttgtgacaggctggttaaagcagcaaagtcggccaaattacgtaagctgcctncttttcttactggttcattactaagatttaattttgattttgtgaaatgcgaacgcttcaanggaaactagctggtatacattcccttttccggantaatctcagcccttttgnggaacagaagggaattgggatgacttagaatatatatatgaccc

SEQ ID NO: 3665 - DNA, 801 bp, Homo sapiens
  misc_feature (609)..(609): "n" may be a, t, c, g, other or unknown
  misc_feature (714)..(714): "n" may be a, t, c, g, other or unknown
  misc_feature (752)..(752): "n" may be a, t, c, g, other or unknown
  misc_feature (769)..(769): "n" may be a, t, c, g, other or unknown
agtaacccctcggctttctgttcctggacggtggcggccgccggctctatgatggagcccccgaagcccgagcctgagctccagcggttttaccaccggctgctgcgtccgctgtcgctcttccccactaggacgacgtccccagagcctcagaagcgccccccgcaggagggccggattctgcagtccttccctctggcgaagctgacggtggcgtcgctgtgcagccaggtggccaagctgctggccggcagcgggatagcagcgggagtgcctcctgaggcccgactacgtctcatcaaggtcatcctggacgagctgaagtgcagctggcgggagccgcccgccgaacttagtctgagccacaaaaacaaccagaagctgcggaagcggctcgaggcctacgtgctgctgagcagcgagcagctcttcttgcgctacctgcacctgctggtgaccatgtcgactcccaggggggtcttcactgaatcagccaccctcacccggttggccgccagcctcgccagggactgcacactcttccttactagtcccaacgtctaccgtggcctgcttgccgacttccaggccctgctgagggcagagcangcctctggggatgtggacaagctgcaccctgtctgcccgctgggacgttcaagctgtgccctatcctggctacagcactggcttcgccaatgcagtgtctaactnaactgactactatcaactagcgtcacaagttctatgancagaagatgatcatgangatgatcatcctcgtgagagaaaagcttcatg

SEQ ID NO: 3666 - DNA, 750 bp, Homo sapiens
  misc_feature (670)..(670): "n" may be a, t, c, g, other or unknown
  misc_feature (674)..(674): "n" may be a, t, c, g, other or unknown
  misc_feature (711)..(711): "n" may be a, t, c, g, other or unknown
actccctccccgcggggcgcgcagctcgcgggtctttggacaccaccggtcctgagtccgcggactgccattttcattaagaactgccacttagaggtaccaaaataaagggtatttgctacctttaatacttgccagttcaggttggaggcacaggcagcagcaagaatggaaagaaatgttcttacaacattttcacaggaaatgtcccagttaattttgaatgaaatgccaaaagctgaatattccagtttattcaatgattttgttgaatctgaattttttttgattgatggggattcattacttatcacatgtatctgtgagatatcatttaagcctgggcagaacctccatttcttctatctggttgaacgctatcttgtggatcttattagcaaaggaggacaattcaccatagttttcttcaaggatgccgagtatgcgtatttcaacttccctgaacttctttctttgagaactgctttaatccttcatcttcagaagaataccaccattgatgttcgaacaacattttcgagatgcttatcaaaagagtggggaagtttcttggaagagagttacccatatttcctgatagttgcagacgaagcctgaacgatctacaaacacagcttttcaactttttaatcattcattcttgggcaangaangtcaacggttggactttcctcagggcaagaatctganggtctttggctttatgcataccttttttccaacatgtcc

SEQ ID NO: 3667 - DNA, 857 bp, Homo sapiens
  misc_feature (828)..(828): "n" may be a, t, c, g, other or unknown
gaggcgggcaaggcgggcgccgaggtttgcaaaggctcgcagcggccagaaacccggctccgagcggcggcggcccggcttccgctgcccgtgagctaaggacggtccgctccctctagccagctccgaatcctgatccaggcgggggccaggggcccctcgcctcccctctgaggaccgaagatgagcttcctcttcagcagccgctcttctaaaacattcaaaccaaagaagaatatccctgaaggatctcatcagtatgaactcttaaaacatgcagaagcaactctaggaagtgggaatctgagacaagctgttatgttgcctgagggagaggatctcaatgaatggattgctgtgaacactgtggatttctttaaccagatcaacatgttatatggaactattacagaattctgcactgaagcaagctgtccagtcatgtctgcaggtccgagatatgaatatcactgggcagatggtactaatattaaaaagccaatcaaatgttctgcaccaaaatacattgactatttgatgacttgggttcaagatcagcttgatgatgaaactctttttccttctaagattggtgtcccatttcccaaaaactttatgtctgtggcaaagactattctaaagcgtctgttcagggtttatgcccatatttatcaccagcactttgattctgtgatgcagctgcaagaaggggcccacctcacacctcctttaagcactttattttctttggtcaggagtttaatctgattgatagcgtgaacttggcacctcttcaagaattaatagagaaacttggatcaaaagacngataatggttcttctaaacacagtacccc

SEQ ID NO: 3668 - DNA, 867 bp, Homo sapiens
  misc_feature (709)..(709): "n" may be a, t, c, g, other or unknown
  misc_feature (730)..(730): "n" may be a, t, c, g, other or unknown
  misc_feature (802)..(802): "n" may be a, t, c, g, other or unknown
  misc_feature (825)..(825): "n" may be a, t, c, g, other or unknown
  misc_feature (850)..(850): "n" may be a, t, c, g, other or unknown
ctcgtagcgagcctagtggcgggtgtttgcattgaaacgtgagcgcgacccgaccttaaagagtggggagcaaagggaggacagagccctttaaaacgaggcgggtggtgcctgcccctttaagggcggggcgtccggacgactgtatctgagccccagactgccccgagtttctgtcgcaggctgcgaggaaaggcccctaggctgggtctgggtgcttggcggcggcggcttcctccccgctcgtcctccccgggcccagaggcacctcggcttcagtcatgctgagcagagtatggaagcacctgactacgaagtgctatccgcgcgagaacagctattccacgagaggatccgcgagtgtattatatcaacacttctgtttgcaacactgtacatcctctgccacatcttcctgacccgcttcaagaagcctgctgagttcaccacagtggatgatgaagatgccaccgtcaacaagattgcgctcgagctgtgcacctttaccctggcaattgccctgggtgctgtcctgctcctgcccttctccatcatcagcaatgaggtgctgctctccctgcctcggaactactacatccagtggctcaacggctccctcatccatggcctctggaaccttggttttctcttctccaacctgtccctcatcttcctcatgccctttgcatatttcttcactgagtctganggctttgctggcttcagaaanggtgtcctgggccgggtctatgagacagtggtgatgttgatgcttcttactttgctggtgctaaggtatggngtgggttggcattaagccattgnggacaagaaccaagggccaacaganagtcactctatgacttt

SEQ ID NO: 3669 - DNA, 865 bp, Homo sapiens
  misc_feature (770)..(770): "n" may be a, t, c, g, other or unknown
  misc_feature (775)..(775): "n" may be a, t, c, g, other or unknown
  misc_feature (799)..(799): "n" may be a, t, c, g, other or unknown
tgtattgtgactatcagcattctggtgcaaatgaacttttctccatcatcgactgtggaaaattgatacttttaaagcatattcttctatgagcacaggtcctcctagtgaagcttagtttgacaaagggtgtcatatgctttcctaacctgatttgtagttaacattcacagagcctacattttctcattagggttatgatgctcagtatctttccaagtgccaggcacgggcttccttttctgatcaaacataccattttttgtatttcacaactatagacagtcacttctgcagtcccaatttaaaaatgcagaactgctttatccaagaatgctgaaaaatactgttctatccaggtttcctaaactataaaagcagattttgcttttgtttgttaatcataggcatggccgagcattgtggattagcctgaggcttaaaatcagatgcatgtctggtaagatgaccactgtctcactatcaagagcctgcagagccattttccagacctgtgattgcccagaacacatagtccccacgtttctaatttggagcaaatctaaaaggtgctgagggattggacagctctgactttcctcgagactatggatatagtccttctcggattagctggaaatggggacagagttctcatttatcccagacatatacattggcttttttggaatctacagattgagattttgatgaatttatattgggttttaatgagacccaaatggactcttctcttaacaattcaagcngtagnaccaaaggttggctcaccaaattnccggaaaaaaccatcttttttgggcctacctttcgccaaggttttccaaaaaccgtggataaatta

SEQ ID NO: 3670 - DNA, 852 bp, Homo sapiens
  misc_feature (789)..(789): "n" may be a, t, c, g, other or unknown
  misc_feature (806)..(806): "n" may be a, t, c, g, other or unknown
  misc_feature (840)..(840): "n" may be a, t, c, g, other or unknown
agttaacagattcttgctcgatagcttgtttgtgtctgtcgtgttattagagggaactccactatatatggtcacttgaaattatgatgcaaaggtttctcttgcattgaaaccctcttggatattacagtatttttaattgaaagtcctaattctgttaaggaaaggagttgattaaattttaaggtaccactggtattttgggagattataatcagtttgttttcaagataatagaaaataaggtccatgagaatagaagttatgtgatttcagtgagttgatgtgtacagcatggctgtgctccatctgatttaccccattcttaagttctgagagtatgttctcaaggaagatttaactctctttggttttaaattactttttaaccagcctaataaataagtcttactacttttcataatatttcataatagttaaaagtaggtgtttttttcgtgctcaatttggcactcaaaataatgttcattatggaagtttggtaatactgagcaagcctgtggaattttctttatgaaaaatgattttagcctttgcaaatgttaaccatgtgaaacacattttcagtataagtatgcgttacagggtttgatactttcctgcacttaggtttgtcctattcttcatttattcatactaggatagaaaattttggaatcagaaaatagatccagtgtttagctacatacaatctagtacaagtgaatttttattcttaaacataggtgtgttggctctttttttaaaagatgcgctctacctgaaaanggaaattgggattttanaactgggatgtgggtgccggtgaaagtattttanggcccaggtctg

SEQ ID NO: 3671 - DNA, 880 bp, Homo sapiens
  misc_feature (695)..(695): "n" may be a, t, c, g, other or unknown
  misc_feature (859)..(859): "n" may be a, t, c, g, other or unknown
  misc_feature (863)..(863): "n" may be a, t, c, g, other or unknown
  misc_feature (867)..(867): "n" may be a, t, c, g, other or unknown
gaactgtggcgctttctgggtaaagatggacgtccacgatctctttcgccggctcggcgcgggggccaaattcgacacgagacgcttctcggcagacgcagctcgattccagataggaaaaaggaaatatgactttgattcttcggaggtgcttcagggactggacttttttggaaacaagaagtctgtcccaggtgtgtgtggagcatcacaaacacatcagaagccccaaaatggagagaaaaaagaagagagcctaactgaaaggaagagggagcagagcaagaaaaaaaggaagacgatgacttcagagacagggtttcaccatgttggccagtatggtctcgatctcctgacctcgtgattcacccaccttgggctcccaaagtgctgggattacagatgtgagccaccacgcccagccagaaattgcttcccaagaagaaggtgctactatacagtggatgtcatctgtagaagcaaagattgaagacaaaaaagttcagagagaaagtaaactaacttccggaaagttggagaatctcagaaaagaaaagataaacttcttgcggaataaacacaaaattcacgtccaaggaaccgatcttcctgacccaattgctacatttcagcaacttgaccaggaatataaaatcaattctcgactacttcagaacattctagatgcaggcttncaaatgcctacgccaatccaaatgcaagccatcccagttatgctgcatggtccgggaacttcttggcttctgctccaactggatctggaaaaacattagcttttagcattcctattttaatgccacttgaaacaacccgcaaattaaggctttaaaaccctgantatntcanccaacacgagaac

SEQ ID NO: 3672 - DNA, 845 bp, Homo sapiens
  misc_feature (674)..(674): "n" may be a, t, c, g, other or unknown
  misc_feature (756)..(756): "n" may be a, t, c, g, other or unknown
  misc_feature (791)..(791): "n" may be a, t, c, g, other or unknown
  misc_feature (831)..(831): "n" may be a, t, c, g, other or unknown
tctccccgcccgccggcccctccagcctcctccaaggcggcggaccaggccgggccggagttttcggggttcagcccgcgagcgggaggaccggggaggcgagggaggaggaaggcgagaagggccagatcgcgggagagcccaatcacggggcgagctggacctggctgtgatcatttataatccttgactcctccgctccgccacttgtcaagatgacaggggtcatccgtgaataacacttcacgctgatgaatggctcttgccggctttcggctctgatgaggggtctgcccgccgccgattgaaaacactaatgaacttactgcgccatttgaaattcacacgcaccaacaaaatggggggtgggcatttcaggtcagctgagtcacccgaggaggtggcagtgcaagacactgccgggaagacggattccgaggcagaagggtgtaattaaggatttccacccccggtaggcggcccgtcctttgcagagcctctgaaaatgacccgcgccttcctttccacagtgttctttcgtccgagaccgaaaagcgcaaatgacctttggacagggaagggaggcagtaaacactcagacttccttaccagcccctggtgggcactgcagcagaacaattgtctgcccccaggttcaagcacctagcctccgncccgcatacctgccaggggcggaccccgggagtccttcgaagcttcactcccacttttactactcttctttctctcattctnccctcaaattaacgggccggacacttgtcccttgnctcgaattttggttgcttgtgggaaaggaaaaaaaaaagntttgctggttcctt

SEQ ID NO: 3673 - DNA, 835 bp, Homo sapiens
  misc_feature (762)..(762): "n" may be a, t, c, g, other or unknown
  misc_feature (774)..(774): "n" may be a, t, c, g, other or unknown
  misc_feature (791)..(791): "n" may be a, t, c, g, other or unknown
ggagcctagcggctctccccgcgtccaagatggcggcagaagcagctggtgggaaatacagaagcacagtcagcaaaagcaaagacccctcggggctgctcatctctgtgatcaggactctgtctactagtgacgatgtcgaagacagggaaaatgaaaagggtcgccttgaagaagcctacgagaaatgtgaccgtgacctggatgaattgattgtacagcactacacagaattgacgacagccattcgcacataccagagcatcacagagcgcatcactaactcccgaaataaaataaagcaggtaaaagagaacctgctttcatgcaagatgctgctgcactgcaaacgggatgagcttcggaaactgtggattgaaggaattgagcataagcatgtcctgaacttgttggatgaaattgagaatatcaagcaagtgcctcaaaagctggaacagtgcatggccagcaagcactatctcagtgccactgacatgttggtgtcagcagttgagtctttggagggccccctgctccaggtggaaggactgagtgaccttcgactagagcttcacagcaagaagatgaaccttcacttggtctcatagatgaactacaccggcacctgtacatcaaatcgactagccgagttgtgcagcgtaacaaggaaaaagggaaaatcagcttcctcgtgaaagatgcttctgttcctctgattgatgttacaaacctcctactcctcgaaaattccttgatcctctnctattctactgntggaactcaagtgtganggagataaatctgcaggacatcagggaagattagaattggatcc

SEQ ID NO: 3674 - DNA, 882 bp, Homo sapiens
  misc_feature (726)..(726): "n" may be a, t, c, g, other or unknown
  misc_feature (798)..(798): "n" may be a, t, c, g, other or unknown
  misc_feature (820)..(820): "n" may be a, t, c, g, other or unknown
  misc_feature (874)..(874): "n" may be a, t, c, g, other or unknown
ctaaaaatcaagcatggcgatttgttgttcctgtttccctcgagccttgctgggccctcatctgaaatggagacgtcagttccaccgggcttcaaagtctttggcgctcccaacgtggtggaggatgagattgatcagtacctcagcaaacaggacgggaagatttacagaagccgagacccacagctatgccgccacggccctttggggaaatgcgtgcactgcgtccctctagagccattcgatgaggactatctaaaccatctcgagcctcccgtgaagcacatgtccttccacgcctacatccggaagctgactggaggggctgacaaggggaagtttgttgccctggagaacatcagctgcaagattaagtcagggtgcgaggggcacctcccgtggccgaatggcatctgtactaagtgccagccgagcgccatcacgctgaacagacagaagtacaggcatgtggacaatatcatgtttgagaatcacaccgtcgctgaccgctttcttgacttctggagaaagacagggagccagcattttgggtacttatacggacggtacacggagcacaaagacattccccttggcatcagggctgaagtggctgcgatttatgagccacctcagattggtacacagaacagcttggagcttcttgaggatccaaaagctgaagtggtcgatgaaattgcttgccaaacttggcctgcggaaggntggctggatatttacagacctcgtcttaaaaagatacccgaaagggtacccgtccgcttcaagtcgaaatanggcacctattttctaagttcanaagaatgcatcactgcaggagactttcagaacaagcattccaacatgtgccggnttttttca

SEQ ID NO: 3675 - DNA, 885 bp, Homo sapiens
  misc_feature (712)..(712): "n" may be a, t, c, g, other or unknown
  misc_feature (733)..(733): "n" may be a, t, c, g, other or unknown
  misc_feature (821)..(821): "n" may be a, t, c, g, other or unknown
  misc_feature (849)..(849): "n" may be a, t, c, g, other or unknown
  misc_feature (852)..(852): "n" may be a, t, c, g, other or unknown
agatttccagtgggttcaaggagatgtgtgtgaagttcagctgatggtatataacccaatgccgtttgaacttcgagttgaaaacatggggctgctcaccagcggagtggagttcgagtctctccctgcggcgctttctcttccggctgaatctggtctgtacccagtgacgctcgtcggggtcccgcagacgactggaacgattactgtgaacggttaccataccacggtcttcggtgagttcagtgactgtttgctggataacctgccgggaataaaaaccagtggctccacagtggaagtcattcccgcgttgccaagactgcagatcagcacctctctgcccagatctgcacattcattgcaaccttcttctggtgatgaaatatctactaatgtatctgtccagctttacaatggagaaagtcagcaactaatcattaaattggaaaatattggaatggaaccattggagaaactggaggtcacctcgaaagttctcaccactaaagaaaaattgtatggcgacttcttgagctggaagctagaggaaacccttgcccagttccctttgcagcctgggaaggtggccacgttcacaatcaacatcaaagtgaagctggatttctcctgccaggagaatctcctgcaggatctcagtgatgatggaatcagtgtgagtggctttcccctgtccagtccttttcggcangtcgttcggccccgaatgganggcaaacctgtgaacccacccgagagcaacaaagcaggcgactacagccacgtgaagaccctggaagctgtcctgactttaaatactntggaggcccgggccacacttgaaggatnttncaggaatctcttcctggggcttgcatgtaaaaa

SEQ ID NO: 3676 - DNA, 886 bp, Homo sapiens
  misc_feature (733)..(733): "n" may be a, t, c, g, other or unknown
  misc_feature (747)..(747): "n" may be a, t, c, g, other or unknown
  misc_feature (754)..(754): "n" may be a, t, c, g, other or unknown
  misc_feature (856)..(856): "n" may be a, t, c, g, other or unknown
aagtggcaggcaggcaggctggccccggggacttctctctggccctgctccctccgagcgctccgccgttgcccgcctggcccctacggagtccttagccaggatggaggctgttgtgaacttgtaccaagaggtgatgaagcacgcagatccccggatccagggctaccctctgatggggtcccccttgctaatgacctccattctcctgacctacgtgtacttcgttctctcacttgggcctcgcatcatggctaatcggaagcccttccagctccgtggcttcatgattgtctacaacttcccactggtggcactctccctctacattgtctatgagttcctgatgtcgggctggctgagcacctatacctggcgctgtgaccctgtggactattccaacagccctgaggcacttaggatggttcgggtggcctggctcttcctcttctccaagttcattgagctgatggacacagtgatctttattctccgaaagaaagacgggcaggtgaccttcctacatgtcttccatcactctgtgcttccctggagctggtggtggggggtaaagattgccccgggaggaatgggctctttccatgccatgataaactcttccgtgcatgtcataatgtacctgtactacggattatctgcctttggccctgtggcacaaccctacctttggtggaaaaagcacatgacaagccattcagctgatccagtttgncctggtctcactgnacatctnccagtactactttatgtccaactgtaactaccaagtacccagtcattattcacctcatctgggatgtatggcaccatcttcttcatgctggtcttcaacttntgggattacttcttataccaagggcaagcg

SEQ ID NO: 3677 - DNA, 844 bp, Homo sapiens
  misc_feature (704)..(704): "n" may be a, t, c, g, other or unknown
  misc_feature (794)..(794): "n" may be a, t, c, g, other or unknown
  misc_feature (831)..(831): "n" may be a, t, c, g, other or unknown
  misc_feature (843)..(843): "n" may be a, t, c, g, other or unknown
tgcttggccgtgcttgccctgtcatcccacctgagaaccatgctcaccgaccctggggcagtacccaaaggaaacgctacgaaagaatacatggagagcttgcagctgaagcccggggaagtcatctacaagtgccccaagtgctgctgtattaaacccgagcgcgcccaccactgcagtatttgcaaaagatgtattcggaaaatggatcatcactgcccgtgggtgaacaattgtgtaggagaaaagaatcaaagattttttgtgctcttcactatgtatatagctctgtcttcagtccatgctctgatcctttgtggatttcagttcatctcctgtgtccgagggcagtggactgaatgcagtgatttttcacctccgataactgtaatcctgttgatcttcctgtgccttgagggtcttctgtttttcactttcactgcagttatgtttggcacccaaatccactccatatgcaacgacgagacggagatcgagcgattgaaaagtgagaagcccacatgggagcggaggctgcgatgggaagggatgaagtccgtctttggggggcccccctcactcctctggatgaatccctttgtgggcttccgatttaggcgactgcccacgagacccagaaaaggcggcccggagttctcagtgtgaggcgtggctcatcagactgaaacttgctcacagacttncagttatttatttggggtctgaaggatatcaacaagctcatctgtgaccaacagggcaactgggaacctacacaaaccaattgcttgcancaagcagaagtttatatatttatagtcccaatggcanaggaagaggctnt

SEQ ID NO: 3678 - DNA, 811 bp, Homo sapiens
  misc_feature (765)..(765): "n" may be a, t, c, g, other or unknown
  misc_feature (773)..(773): "n" may be a, t, c, g, other or unknown
  misc_feature (778)..(778): "n" may be a, t, c, g, other or unknown
cagcgccagctccgcgtcccgaccggcccgcggcagcctgcgccgcgccatggccacctccccgcagaagtcgccttctgtccccaagtctcccactcccaagtcgcccccgtcccgcaagaaagatgattccttcttggggaaactcggagggaccctggcccggaggaagaaagccaaggaggtgtccgagctgcaggaggagggaatgaacgccatcaacctgcccctcagcccaattccctttgagctggaccccgaggacacgatgctggaggagaatgaggtgcgaacaatggtggatccaaactcacgcagtgaccccaagcttcaagaactgatgaaggtattaattgactggattaatgatgtgttggttggagaaagaatcattgtgaaagacctagctgaagatttgtatgatggacaagtcctgcagaagcttttcgagaaactggagagtgagaagctaaatgtggctgaggtcacccagtcagagattgctcagaagcaaaaactgcagactgtcctggagaagatcaatgaaaccctgaaacttcctcccaggagcatcaagtggaatgtggattctgttcatgccaagagcctggtggccatcttacacctgctcgttgctctgtctcagtatttccgcgcaccaattcgacttccagaccatgtttccatccaagtggttgtggtccagaaacgagaaggaatccttcatctcggcaaatccaagaggaaataactggtaacacagangctctttncggangcatgaacgtgatgcctttgacaccttgttcga

SEQ ID NO: 3679 - DNA, 702 bp, Homo sapiens
  misc_feature (661)..(661): "n" may be a, t, c, g, other or unknown
  misc_feature (667)..(667): "n" may be a, t, c, g, other or unknown
  misc_feature (692)..(692): "n" may be a, t, c, g, other or unknown
gaggctcggccgcctgagccgcggacggtttgctgagcccgttagtgcgcccggccgagacacgccgccgccatgtcccgctacctgcgtccccccaacacgtctctgttcgtcaggaacgtggccgacgacaccaggtctgaagacttgcggcgtgaatttggtcgttatggtcctatagttgatgtgtatgttccacttgatttctacactcgccgtccaagaggatttgcttatgttcaatttgaggatgttcgtgatgctgaagacgctttacataatttggacagaaagtggatttgtggacggcagattgaaatacagtttgcccagggggatcgaaagacaccaaatcagatgaaagccaaggaagggaggaatgtgtacagttcttcacgctatgatgattatgacagatacagacgttctagaagccgaagttatgaaaggaggagatcaagaagtcggtcttttgattacaactatagaagatcgtatagtcctagaaatagaccgactggaagaccacggcgtagcagaagccattccgacaatgatagattcaaacaccgaaatcgatctttttcaagatctaaatccaattcaagatcacggtccaagtcccagcccaagaaagaaatgaagctaaatcacgttctangtctgnatttacaccaaactagaggcacctntaaacagatt

SEQ ID NO: 3680 - DNA, 826 bp, Homo sapiens
aagtcacgtgctgtgacagtagctggggtgaggccgtcgtcgccgcacgggctggttggggctgtgtctgtgggaggcgccggggtgatggcggtggagactctgtccccggactgggagtttgaccgcgttgacgacggctcgcagaaaattcatgccgaagtccaacttaagaattatgggaaatttcttgaggagtatacctctcaactgagaagaattgaggacgctctggatgactcaattggagatgtttgggatttcaatcttgatcctatagcattaaagcttttgccttatgaacagtcctctcttttggaactcataaagactgaaaacaaggtcttaaacaaagtcatcactgtttatgctgcactttgttgtgaaatcaagaaattaaaatatgaggctgaaactaaattttacaatggtctcttgttttatggagaaggagctacagatgccagcatggtggaaggtgattgccaaattcaaatggggagatttatttcattcttacaggaactgtcttgctttgttacgaggtgctatgaagtggtgatgaacgtagtccaccagttggctgccctctatatcagtaacaagattgcacccaaaattatagagacaactggagttcattttcagactatgtatgagcacttgggagaactgctaacagttttgctcaccctggatgaaattattgataatcatatcacactgaaagaccactggactatgtcaaaaggttactgaaatctgtccatcacaatccttcaaaatttggaattcaggaagaaaaattaaagccatttgaaaggtt

SEQ ID NO: 3681 - DNA, 824 bp, Homo sapiens
  misc_feature (725)..(725): "n" may be a, t, c, g, other or unknown
  misc_feature (813)..(813): "n" may be a, t, c, g, other or unknown
ctcttgacagcggcggcggcgcagccggttccgggttcggcgcggggcggggatgtgaatcccgatggagcggcccgaggaaggcaagcagtcgccgccgccgcagccctggggacggctcctgcgtctgggcgcggaggagggcgagccgcacgtcctcctgaggaagcgggagtggaccatcgggcggagacgaggttgcgacctttccttccccagcaataaactggtctctggagatcactgtagaattgtagtggatgaaaaatcaggtcaggtgacactggaagataccagcaccagtggaacagtgattaacaagctgaaggttgttaagaagcagacatgccctttacagactggggatgtcatctacttggtgtacaggaagaatgaaccggaacacaacgtggcatacctctatgaatctttaagtgaaaagcaaggcatgacacaagaatcctttgagatggtgccttgctgtgttgcccaggctggtctaaaactcctgggatcaagtgatcctcccaccttggcctcccaaagtattgtgattacagggtctgggggtggtggcatctcccctaaaggaagtggtccctctgtggcaagtgatgaagtctccagctttgcctcagctctcccagacagaaagactgcgtccttttcgtcgttggaaccccaggatcaggaggatttggagcccgagaagaagaaaatgagangagatggggaccttgacctgaacgggcagttgttggtcgcacaaccgcgtagaaatgcccaaaccgtccacgaggacgtcagaacacngctggggaagc

SEQ ID NO: 3682 - DNA, 813 bp, Homo sapiens
  misc_feature (115)..(115): "n" may be a, t, c, g, other or unknown
  misc_feature (402)..(402): "n" may be a, t, c, g, other or unknown
  misc_feature (510)..(510): "n" may be a, t, c, g, other or unknown
  misc_feature (774)..(774): "n" may be a, t, c, g, other or unknown
  misc_feature (808)..(808): "n" may be a, t, c, g, other or unknown
agagtagaggcggcggcggcggcggccggacccagactggtagtgaggcgttggaccccgagccgctgcaatgccgctggagctggagctgtgtcccgggcgctgggtgggcggncaacacccgtgcttcatcattgccgagatcggccagaaccaccagggcgacctggacgtagccaagcgcatgatccgcatggccaaggagtgtggggctgattgtgccaagttccagaagagtgagctagaattcaagtttaatcggaaagccttggacaggccatacacctcgaagcattcctgggggaagacgtacggggagcacaaacgacatctggagttcagccatgaccagtacagggagctgcagaggtacgccgaggaggttgggatcttcttcactgnctctggcatggatgagatggcagttgaattcctgcatgaactgaatgttccatttttcaaagttggatctggagacactaataattttccttatctggaaaagacagncaaaaaaggtcgcccaatggtgatctccagtgggatgcagtcaatggacaccatgaagcaagtttatcagatcgtgaagcccctcaaccccaacttctgcttcttgcagtgtaccagcgcatacccgctccagcctgaggacgtcaacctgcgggtcatctcggaatatcagaagctctttcctgacattcccatagggtattctgggcatgaaacaggcatagcgatatctgtggccgcagtggcttttggggaccaaggtgntggaacgtcacatactttggacaagacctggaangggag

SEQ ID NO: 3683 - DNA, 822 bp, Homo sapiens
  misc_feature (809)..(809): "n" may be a, t, c, g, other or unknown
  misc_feature (822)..(822): "n" may be a, t, c, g, other or unknown
actgcagcctccatcttggaagcggccgccggcgcctagaactgtatttcagaaaaaagaaactacagttttagcatgcagaaaggaaaagggagaacaagccggatcagaagacgaaaactctgcggaagttctgaatcaagaggagtgaatgagagccacaagtctgaatttatagagctgaggaagtggctgaaagctaggaagtttcaagattcaaacttagcgcctgcttgttttccaggtacaggaagagggctgatgagtcaaacatccctgcaggagggacagatgattatttcgttgcctgagagttgcctgctcaccacggacacagtgattcgaagctacttaggggcatacattactaagtggaagcctcctccatctcctctgctggcgctgtgcacctttttagtttcagaaaagcatgctgggcaccgatctctttggaagccttacctggagattttacccaaggcgtatacctgccctgtttgtttggagccggaagtggtgaaccttcttcccaaatctttaaaagcaaaggctgaagagcagagagcccacgtgcaggagttctttgcttcctccagagactttttctcttctctgcagcctctgtttgcggaggctgttgacagcatcttcagctacagtgccctgctgtgggcttggtgcaccgtcaacaccagagccgtgtacctgaggcccaggcagcgggaatgcctttcttgcagagcccggacacctgtgcacttcgcttccgtacctggacctgctgaatcatagcccacattgtccaggtnaaaagcagcgttn

SEQ ID NO: 3684 - DNA, 691 bp, Homo sapiens
  misc_feature (5)..(5): "n" may be a, t, c, g, other or unknown
  misc_feature (81)..(81): "n" may be a, t, c, g, other or unknown
  misc_feature (609)..(609): "n" may be a, t, c, g, other or unknown
  misc_feature (631)..(631): "n" may be a, t, c, g, other or unknown
  misc_feature (682)..(682): "n" may be a, t, c, g, other or unknown
accangcgcggtccggaggccgagggcgaccacagcagcctccgcctcctgctgctccggactattctgcgctgggctagncggcggtgacccggactgcgcccggcagtggcttcgcgggcgacgcgtcgccatgggctctcgctggagcagcaaagaggagaggcagccgctgctggggcccgggctcgggcctgggctgggggcctcctggagaagccgggaggcggcggcggcggcgctgcccgcggcggtcccgggtcccgggcgggtatacgggcgccgctggctggtgctgctgctcttctcgctgctggcgttcgttcagggcctggtctggaacacctggggtcccatccagaactcggcgcgccaggcctacggcttctccagctgggacatcgcgctgctcgtgctgtgggggcccatcggcttcctgccctgcttcgcgttcatgtggctcctggacaagagaggtctccggataactgtgctcctgacatccttccttatggttttgggaactggtctaagatgcatacctatatcagacttaatccttaaaaagaagattaattcatggaggacagatgttaaatggattggcangtccaactgtaatgaatgcagnaccattttctctctacgacgtggttttctgcagatgaaaagggccacaagncacagctat

SEQ ID NO: 3685 - DNA, 821 bp, Homo sapiens
  misc_feature (709)..(709): "n" may be a, t, c, g, other or unknown
  misc_feature (780)..(780): "n" may be a, t, c, g, other or unknown
  misc_feature (796)..(796): "n" may be a, t, c, g, other or unknown
  misc_feature (821)..(821): "n" may be a, t, c, g, other or unknown
tacacatacaataggaattctctataattcccaaggacaggccataattgaaagaactaatagaacactcaaagctcaattggttaaacaaaaaaaaggaaaagacaggagtataacactccccagatgcaacttaatctagcactctatactttaaatgttttaaacatttatagaaatcagaccactacctctgcagaacaacatcttactggtaaaaggaacagcccacatgaaggaaaactgatttggtggaaagataataaaaataaaacatgggaaatggggaaggtgataacgtgggggagaggttttgcttgtgtttcaccaggagaaaatcagcttcctgtttggatacccactagacatttaaagttctacaatgaactcactggagatgcaaagaaaagtgtggagatggagacaccccaatcgactcgccaggtaaacaaaatggtgatatcagaagaacagaaaaagttgccttccatcaaggaagcagagttgccaatataggcacaattaaagaagctgacacagttagctaaaaaaaaaagcctagagaatacaaaggtgacaccaactccagagagtatgctgcttgcagctctgatgattgtatcaacggtggtaagtcttcccaagtctgcaggagcagctgcagctaattatacttactgggcctatgtgcctttcccacccttaattngggcagttacatagatggataatcctattgaagtagatgttaataatagtgcatgggtgcctggcccacanatgactggtgccctgnccaacctgaagaaggaatgatgatn

SEQ ID NO: 3686 - DNA, 817 bp, Homo sapiens
  misc_feature (753)..(753): "n" may be a, t, c, g, other or unknown
ttatttgaatattggtgaggaaggctgcacttgtgaaatgaatgggctcaccctcccaggtcctgtgggatttgcttcaaccaccactatcaaggatgcccctaagccagccactccatcctctagcagtgggattgcctctgagttcagcagtgagatgtccacctcagaggtgagcagtgaagtggggtccactgcttctgatgagcataatgctgggggcctggacactgccttgcttccgaggccagagcggcgctgcagcctccacccaacacccacctctgggctgtttcagcgccagccttcttctgctaccttctccagtaaccagtctgacaacggcctggacagtgatgatgaccagcccgttgagggggtcataaccaatggcagcaaggtagaggtggaagtagacatccactgctgcagggggagggatctggagaactcaccccctctcatagagagttctcctaccctgtgttctgaggaacatgctagagggtcgtgttttgggatccgaagacagaacagtgtgaatagtggcatgctcctgccaatgagcaaggacaggatggagttacagaagtctccctccacctcctgcctctatgggaagaaactctccaatggctctattgtgcccctagaggacagcctgaacctcattgaagtggccacagaagtgcccaagaggaaaactggctattttgctgcccccactcagatggaaccagaggaccagtttgntgtgcctcatgacctggaagaagaagtgaaggaacaaatgaaacagcaccaggacagccggctc

SEQ ID NO: 3687 - DNA, 800 bp, Homo sapiens
  misc_feature (706)..(706): "n" may be a, t, c, g, other or unknown
  misc_feature (761)..(761): "n" may be a, t, c, g, other or unknown
  misc_feature (786)..(786): "n" may be a, t, c, g, other or unknown
gtgtggcgaggcggggaaggaagacacggtggaagaggaggaaggcaagtttaacctcatgctcatggagtgctccatctgcaatgaaatcatccaccctggatgccttaagattaaggagtcagagggtgtggtcaacgacgagcttccaaactgctgggagtgtccgaagtgtaaccacgccggcaagaccgggaaacaaaagcgtggccctggctttaagtacgcctccaacctgcccggctccctgctcaaggagcagaagatgaaccgggacaacaaggaagggcaggaacctgccaagcggaggagtgagtgtgaggaggcgccccggcgcaggtcggatgagcactcgaagaaggtgccgccggacggccttctgcgcagaaagtctgacgacgtgcacctgaggaagaagcggaaatacgagaagccccaggagctgagtggacgcaagcgggcctcatcgcttcaaacgtcccccggttcctcctctcacctctcgccgaggccccctctaggcagcagcctcagcccctggtggagatccagtctcacttacttccagcagcagctcaaacctggcaaagaagataagcttttcaggaaaaagcggcggtcctggaagaacgccgaggaccgcatggcgctggccaacaagcccctccggcgcttcaagcaggaacccgaggacgaactgcccgangcgccccccaagaccaggggagagcgaccacttcccgcttcagcttccccaccgngggacccaaccaccgaaggggcccnaaggccccggagga

SEQ ID NO: 3688 - DNA, 816 bp, Homo sapiens
  misc_feature (727)..(727): "n" may be a, t, c, g, other or unknown
  misc_feature (762)..(762): "n" may be a, t, c, g, other or unknown
ggctgacttatgttttttggtgcagcattatgatttggcttacagttgctatcatactgcaaagaaagattttcttaatgatcaagcaatgctttatgcagctggtgccttggaaatggcagcagtgtctgcttttcttcaaccaggagcacctaggccatatcctgctcattacatggatacagcaattcagacatacagagatatctgcaagaatatggtgttggctgaaagatgtgtgttgcttagtgctgaacttttaaaaagccaaagcaaatattcagaggctgcagctctcctaatacggttgaccagtgaggattctgatcttcgaagtgcacttcttttggaacaggcagcacattgctttataaacatgaaaagtcccatggttagaaaatatgcatttcatatgatattggcaggccatcgatttagtaaagcagggcagaaaaagcatgctttacgctgttattgtcaagccatgcaagtttacaaaggaaaaggctggtctcttgcagaggatcacattaatttcactattgggcgccagtcctatactcttagacagctggataatgctgtgtctgcttttaggcatattctaattaatggaagtaaacaatctgctgctcaacagggggctttcctcagagaatatctttatgtttacaagaatgtaagtcagctgtcaccagatggcctttgccacagcttcctttaccgnatattaacagttcaacaacacgggttttttttggncatgacagacgaccagccggatggtgaaaaaacaagcagctactcatgtaagtt

SEQ ID NO: 3689 - DNA, 766 bp, Homo sapiens
  misc_feature (729)..(729): "n" may be a, t, c, g, other or unknown
  misc_feature (732)..(732): "n" may be a, t, c, g, other or unknown
  misc_feature (751)..(751): "n" may be a, t, c, g, other or unknown
aatcatcttgttggccctgacctcgttggaaaacgaagctccccgcagggtcccggcctctagggctgctgtgcgggcgggggtggcctggagctatttccattcggcggcgggaacaggtgccggcgcctccgccccatccccaggggccgcctcccccggggcggcctccaggctgccgagacctataaaggcgccaggttttctcaatgaagccgggacgcactccggagcgcactgcgtggtcgcaccctacccgggctgccttggaagtcgtccccgccgcccctccgcaccggcatgaagctcatcgtgggcatcggaggcatgaccaacggcggcaagaccacgctgaccaacagcctgctcagagccctgcccaactgctgcgtgatccatcaggatgacttcttcaagccccaagaccaaatagcagttggggaagacggcttcaaacagtgggacgtgctggagtctctggacatggaggccatgctggacaccgtgcaggcctggctgagcagcccgcagaagtttgcccgtgcccacggggtcagcgtccagccagaggcctcggacacccacatcctcctcctggaaggcttctgctctacagctacaagcccctggtggacttgtacaagccgccggtacttctgaccgtcccgtatgaagagtgcaagtggaggagaagtacccgcaactacacagtcccttgatccccccggnctnttcgatggccacgtgtggnccatgtaccaaaagt

SEQ ID NO: 3690 - DNA, 598 bp, Homo sapiens
  misc_feature (507)..(507): "n" may be a, t, c, g, other or unknown
  misc_feature (518)..(518): "n" may be a, t, c, g, other or unknown
  misc_feature (570)..(570): "n" may be a, t, c, g, other or unknown
tggtagcggcagcagctcgcgcccgcgccctcctcgtacccgtgcgcccccggagaccgatcccgccccgcggcccaggccgggcctgaacccagcgggtgccgcttctccacccgaggcttccacctccaacgagccatgttccaggctgcaggagccgcccaggccaccccctctcatgacgccaaaggcggcggcagcagcacggtgcagcgctccaagtccttcagcctgcgggcccaggtgaaggagacctgcgccgcctgccagaagaccgtgtaccccatggagcggctggtggccgacaagctcattttccgcaactcttgcttctgctgcaagcactgtcacaccaagctcagcctgggcagctacgccgcgctgcacggggagttctactgcaaaccccacttccagcagctgtttaagagcaaaggcaactacgacgaggggtttggccgcaagcagcacaaggagctctgggcccacaaggaggtggaccccggnaccaagacggnctgaggcctctgtaaccttccaccccctctgcggaaggcctggagccggcanggggaaggtgggaaggaggtccaagctt

SEQ ID NO: 3691 - DNA, 816 bp, Homo sapiens
  misc_feature (748)..(748): "n" may be a, t, c, g, other or unknown
  misc_feature (754)..(754): "n" may be a, t, c, g, other or unknown
  misc_feature (794)..(794): "n" may be a, t, c, g, other or unknown
gtttcaggtcagacagataaatgtagggaggaaacttttaaacaagaatcacaacctccagaaaaaaattcaggacattctacaagcaaaggagacagagtggcacaaagtgagagcaagagaagaaaaactgaggaaattctgaaaagtcagactccaaagggaggagacaagaaggaatcctccaagtcattagtgcgacaagggagcttcactatagaaaaacccagcccaaacatacccatagaacttattccccatataaataaacagacttcctctactccttcttctttagcattaacatctgcaagtagaatacgagaaagaagtgagtctttggatcctgattctagtatggacacaacccttattctaaaagacacagaagcagtaatggcttttctagaagctaaactacgtgaagataataaaactgatgaaggaccagatactcccagttataatagagacaattctatttcaccagaatctgatgtagatacagctagtacaatcagtctggttactggagaaactgaaagaaagtcaacccaaaagcgaaagagtttcactagcctctataaagataggtgttccacaggttctccttccaaagatgttacaaaatcatcatcttcaggtgctagggaaaaaatggaaaagaaaacaaaaagtcgttccacagatgtgggttcaagagcagatggccgtaaatttggtcagtccagtgggagaataagacagncctcantagacttaacagatgatgaccaaacctctagggacctcantcttggcatctctgaaattatg

SEQ ID NO: 3692 - DNA, 912 bp, Homo sapiens
  misc_feature (764)..(764): "n" may be a, t, c, g, other or unknown
  misc_feature (840)..(840): "n" may be a, t, c, g, other or unknown
  misc_feature (880)..(880): "n" may be a, t, c, g, other or unknown
  misc_feature (890)..(890): "n" may be a, t, c, g, other or unknown
accgcgggcatttacccgtgctttcccaagcctggaagaactcgtcatgctctttgtagcgtggtgcttctgttgctcacagaggtgcctgcttccccttctgccatgattggaagtttcctgaggcctccccagccatgtggaactgacaacttgcctttgatgattttcaagagagttgtgctatgatgtggcaaaagtatgcaggaagcaggcggtcaatgcctctgggagtaaggatccttttccacggtgtgttctatgccgggggctttgccattgtgtattacctcattcaaaagtttcattccagggctttatattacaagttggcagtggagcagctgcagagccatcccgaggcacaggaagctctgggccctcctctcaacatccattatctcaagctcatcgacagggaaaacttcgtggacattgttgatgccaagttgaagattcctgtctctggatccaaatcagagggccttctctacgtccactcatccagaggtggcccctttcagaggtggcaccttgacgaggtctttttagagctcaaggatggtcagcagattcctgtgttcaagctcagtggggaaaacggtgatgaagtgaaaaaggagtagagacgacccagaagacccagcttgcttctagtccatccttccctcatctctaccatatggccactggggtggtggcccatctcagtgacagacactcctgcaacccagtttttcagccaccagtgggatgatggcctncctattccctgagacacaacagtattgaaattgggcccattaataacttcacaagtggcctctcactaaatgtganaagtgaaggaagcttgcaggaaaaaaatttgaacttacantggtcatganaagtaagtaaaagaagccatct

SEQ ID NO: 3693 - DNA, 845 bp, Homo sapiens
  misc_feature (761)..(761): "n" may be a, t, c, g, other or unknown
  misc_feature (821)..(821): "n" may be a, t, c, g, other or unknown
  misc_feature (842)..(842): "n" may be a, t, c, g, other or unknown
aactccaggaatttgtggcggagagggcaaataactgcggctctcccggcgccccgatgctcgcaccatgtcgaggcgcaagcaggcgaaaccccagcacatcaactcggaggaggaccagggcgagcagcagccgcagcagcagaccccggagtttgcagatgcggccccagcggcgcccgcggcgggggagctgggtgctccagtgaaccacccagggaatgacgaggtggcgagtgaggatgaagccacagtaaagcggcttcgtcgggaggagacgcacgtctgtgagaaatgctgtgcggagttcttcagcatctctgagttcctggaacataagaaaaattgcactaaaaatccacctgtcctcatcatgaatgacagcgaggggcctgtgccttcagaagacttctccggagctgtactgagccaccagcccaccagtcccggcagtaaggactgtcacagggagaatggcggcagctcagaggacatgaaggagaagccggatgcggagtctgtggtgtacctaaagacagagacagccctgccccaccccccaggacataagctatttagccaaaggcaaagtggccaacactaacgtgaccttgcaggcactacggggcaccaaggtggcggtgaatcagcggagcgcggatgcactccctgcccccgtgcctggtgccaacagcatcccgtgggtcctcgagcagatcttgtgtcttgcagcagcagcaagcttcagcagatccagcttnaccgacagatccgcattccaggtgaacattgtgggccttccacgcccttcaattaaagcngggcaaggggcccgacacttnttg

SEQ ID NO: 3694 - DNA, 928 bp, Homo sapiens
  misc_feature (859)..(859): "n" may be a, t, c, g, other or unknown
  misc_feature (862)..(862): "n" may be a, t, c, g, other or unknown
  misc_feature (915)..(915): "n" may be a, t, c, g, other or unknown
gagggagagctggggcctgctcccggagagatacggctatgtcgatcgaaatcgaatcttcggatgtgatccgccttattatgcagtacttgaaggagaacagtttacatcgggcgttagccaccttgcaggaggagactactgtgtctctgaatactgtggacagcattgagagttttgtggctgacattaacagtggccattgggatactgtgttgcaggctatacagtctctgaaattgccagacaaaaccctcattgacctctatgaacaggttgttctggaattgatagagctccgtgaattgggtgctgccaggtcacttttgagacagactgatcccatgatcatgttaaaacaaacacagccagagcgatatattcatctggagaaccttttggccaggtcttactttgatcctcgtgaggcatacccagatggaagtagcaaagaaaagagaagagcagcaattgcccaggccttagctggcgaagtcagtgtggtgcctccatctcgtctcatggcattgctgggacaggcactgaagtggcagcagcatcagggattgcttcctcctggtatgaccatagatttgtttcgaggcaaggcagctgtcaaagatgtggaagaagaaaagtttcctacacaactgagcaggcatattaagtttggtcagaaatcacatgtggagtgtgctcgattttctccagatggtcagtatttggtcactgggtctggtgatggattcattgaagtatggaactttactactggaaaaatcagaaaggatcttaagtaccaggcccaagataacttttatgatgatggatgatgctggccctctgcatggggtttcanccngaagatcccgaaatggttaccactgggggcccaagaatggaaaaaatcaaggnggtggaagaattc

SEQ ID NO: 3695 - DNA, 877 bp, Homo sapiens
  misc_feature (704)..(704): "n" may be a, t, c, g, other or unknown
  misc_feature (806)..(806): "n" may be a, t, c, g, other or unknown
  misc_feature (828)..(828): "n" may be a, t, c, g, other or unknown
  misc_feature (854)..(854): "n" may be a, t, c, g, other or unknown
tcctggtcatcgatgtcatccacgaggtggcccacagttggttcggcaacgctgtcaccaacgccacgtgggaagagatgtggctgagcgagggcctggccacctatgcccagcgccgtatcaccaccgaaacctacggtgctgccttcacctgcctggagactgccttccgcctggacgccctgcaccggcagatgaagcttctgggagaggacagcccggtcagcaaactgcaggtcaagctggagccaggagtgaatcccagccacctgatgaacctgttcacctacgagaagggctactgcttcgtgtactacctgtcccagctctgcggagacccacagcgctttgatgactttctccgagcctatgtggagaagtacaagttcaccagcgtggtggcccaggacctgctggactccttcctgagcttcttcccggagctgaaggagcagagcgtggactgccgggcagggctggaattcgagcgctggctcaatgccacaggcccgccgctggctgagccggacctgtctcagggatccagcctgacccggcccgtggaggcccttttccagctgtggaccgcagaacctctggaccaggcagctgcctcggccagcgccattgacatctccaagtggaggaccttccagacagcactcttcctggaccggcttctggatgggtccccgctgccgcangaagtgggtgatgaacctgtccaaagtgctactccttcctggttggacttcgatgaacgctgagatcccgcatccgctggcttgcaagaatgaaggtcccgnaacgaacttactatccttgganctttcacaagggttgccggcgctttnctgggaaaagccccgaatgttca

SEQ ID NO: 3696 - DNA, 887 bp, Homo sapiens
  misc_feature (498)..(498): "n" may be a, t, c, g, other or unknown
  misc_feature (727)..(727): "n" may be a, t, c, g, other or unknown
  misc_feature (791)..(791): "n" may be a, t, c, g, other or unknown
  misc_feature (853)..(853): "n" may be a, t, c, g, other or unknown
  misc_feature (884)..(884): "n" may be a, t, c, g, other or unknown
gaaaaaaccctatgaatgtacgcagtgtgggaaagcattatcctctcttacaagttttcaaacacacataagaatgcactctggagaaagaccttatgaatgtaagatatgtgggaaaggcttttgttctgccaattcatttcaaagacatgaaaaaactcacagtggagagaaaccctataaatgcaagcaatgtggtaaagccttcattcattccagttcccttcgttatcatgaaaggattcacactggagagaaacctatgagtgtaagcaatgtgggaaggccttcagatcttcctcacaccttcaattgcatggtaggactcacactggagagaagccctatgaatgtcaggaatgtgggaaagccttcagatctatgaagaaccttcaaagtcatgaaaggacacaaacacacgtaagaatacactctggagaaagaccttataaatgtaagctatgtgggaaaggcttttattgtcccaaatcattgcanagacatgaaaaaactcacactggagagaaactctatgaatgcaagcaatgtggtgaagccttcagtagttccagttcctttcgataccatgaaaggactcacactggagagaaaccctataaatgcaagcaatgtgggaaagccttcagagctgcctcagtccttcgaatgcatggtaggactcaccctgaagataaaccctatgagtgtaagcaatgagggaaagccntcagatctgcctcacacctttgaatgcatggtaggacacacaatcaagagaaaccatgaatgtnaagaatgtgggaaacccttcaggtctgcccagaaccttcgaattcataaaggacacagcccncttaaaatgcattctggaagctgaccaaagnacc

SEQ ID NO: 3697 - DNA, 754 bp, Homo sapiens
  misc_feature (663)..(663): "n" may be a, t, c, g, other or unknown
  misc_feature (686)..(686): "n" may be a, t, c, g, other or unknown
  misc_feature (753)..(753): "n" may be a, t, c, g, other or unknown
ctggtgcttctgcttctccgtgaccctgatcatcctcatcgtggagctgtgcgggctccaggcccgcttccccctgtcttggcgcaacttccccatcaccttcgcctgctatgcggccctcttctgcctctcggcctccatcatctaccccaccacctatgtccagttcctgtcccacggccgttcgcgggaccacgccatcgccgccaccttcttctcctgcatcgcgtgtgtggcttacgccaccgaagtggcctggacccgggcccggcccggcgagatcactggctatatggccaccgtacccgggctgctgaaggtgctggagaccttcgttgcctgcatcatcttcgcgttcatcagcgaccccaacctgtaccagcaccagccggccctggagtggtgcgtggcggtgtacgccatctgcttcatcctagcggccatcgccatcctgctgaacctgggggagtgcaccaacgtgctacccatccccttccccagcttcctgtcggggctggccttgctgtctgtcctcctctatgccaccgccttgttctctggcccctctaccagttcgatgagaagtatggcggccagcctcggcgctcgagagatgtaagctgcagccgcagccatgcctattacgtgtgtgcctgggaccgncgactggctgtggcatctgacgncatcaactactggcgtatgtggctgaactggtgcactctgccactggttttggcaaggctaagactnt

SEQ ID NO: 3698 - DNA, 822 bp, Homo sapiens
  misc_feature (729)..(729): "n" may be a, t, c, g, other or unknown
  misc_feature (794)..(794): "n" may be a, t, c, g, other or unknown
  misc_feature (799)..(799): "n" may be a, t, c, g, other or unknown
tctcaaataaagatagatgcacacctgaacaaagtatgtccaaccactgagaccatttacaatgatgagttctatactaaacaagatgtaattattacagcattagataatgtggaagccaggagatacgtagacagtcgttgcttagcaaatctaaggcctcttttagattctggaacaatgggcactaagggacacactgaagttattgtaccgcatttgactgagtcttacaatagtcatcgggatcccccagaagaggaaataccattttgtactctaaaatcctttccagctgctattgaacacaccatacagtgggcaagagataagtttgaaagttccttttcccacaaaccttcattgtttaacaaattttggcaaacctattcatctgcagaagaagtcttacagaagatacagagtggacacagtttagaaggctgttttcaagttataaagttacttagcagaagacctagaaattggtcccagtgtgtagaattagcaagattaaagtttgaaaaatattttaaccataaggctcttcagcttcttcactgtttccctcttgacatacgattaaaagatggcagtttattttggcagtcaccaaagaggccaccctctccaataaaatttgatttaaatgagcctttgcacctcagtttccttcagaatgctgcaaaactatatgctacagtatattggattccatttgcagaagangacttatcagcagatgccctcttgaatattctttcagaagtaaagattcaggaattcaagccttncaatnaggtggtcataccgatgaaactg

SEQ ID NO: 3699 - DNA, 929 bp, Homo sapiens
  misc_feature (905)..(905): "n" may be a, t, c, g, other or unknown
  misc_feature (916)..(916): "n" may be a, t, c, g, other or unknown
  misc_feature (923)..(923): "n" may be a, t, c, g, other or unknown
ttcaaaaatatgcttcggttaaaagaactgggaatcaacaatatgggcgagctcgtttctgtcgaccgctatgccctggataacttgcctgaactcacaaagctggaagccaccaataaccctaaactctcttacatccaccgcttggctttccgaagtgtccctgctctggaaagcttgatgctgaacaacaatgccttgaatgccatttaccaaaagacagtcgaatccctccccaatctgcgtgagatcagtatccatagcaatcccctcaggtgtgactgtgtgatccactggattaactccaacaaaaccaacatccgcttcatggagcccctgtccatgttctgtgccatgccgcccgaatataaagggcaccaggtgaaggaagttttaatccaggattcgagtgaacagtgcctcccaatgatatctcacgacagcttcccaaatcgtttaaacgtggatatcggcacgacggttttcctagactgtcgagccatggctgagccagaacctgaaatttactgggtcactcccattggaaataagataactgtggaaaccctttcagataaatacaagctaagtagcgaaggtaccttggaaatatctaacatacaaattgaagactcaggaagatacacatgtgttgcccagaatgtccaaggggcagacactcgggtggcaacaattaagggtaacgggacccttctggatggtacccaggtgctaaaaatatacgtcaagcagacagaatcccattccatcttagtgtcctggaaagttaattccatgtcatgacgtcaacttaaaatggtcgtctggcaccatgaagatgataacccttacatacatatactggcagggtcccaatcgatgtccatgaatccacctaacgcatntgcagccttcncagattntgaagg

SEQ ID NO: 3700 - DNA, 936 bp, Homo sapiens
  misc_feature (762)..(762): "n" may be a, t, c, g, other or unknown
  misc_feature (794)..(794): "n" may be a, t, c, g, other or unknown
  misc_feature (897)..(897): "n" may be a, t, c, g, other or unknown
  misc_feature (899)..(899): "n" may be a, t, c, g, other or unknown
  misc_feature (911)..(911): "n" may be a, t, c, g, other or unknown
agtccagggccgctgagagtgggggtggctgggagcagcgcagcctccggaggaggaggcggaggccgaggaccaggaatcaccttcaagcctatgtcgtgaggctttggcagaaattaagaaggaaatatctccattgttcattggcatggaaaaatgttcagtgggaggattagagttgactgaacagactcctgctttattagggaatatggccatggcaactagtctcatggacataggggattcatttggtcatccagcttgtcctttagtcagtagatctaggaactcaccagtggaagatgatgatgatgatgatgatgttgtgtttattgaatctatacaacctccttcaatttctgctccagcaatagctgatcaaagaaacttcatatttgcatcatcaaaaaatgaaaagcctcaaggaaattattctgtaattcctccttcttcaagagatttggcatctcagaaaggaaatataagtgagacaattgttattgatgatgaagaggacatagaaacaaatggaggagcagagaaaaagtcttcctgttttatcgaatggggacttcctggaactagaaacaaaaccaacgatttggatttctccacttccagtctttcaagaagtaagaccaagactggagtaagaccttttaaccctggtagaatgaatgtggcaggagacttatttcagaatgggagaatttgcaactcatcatagtcctgagatgcatctaccaagaaggctaatgncattctttcagtagaaatcaagcaaatccttncaagaattttatagtacatcttggttgcctcctgtgaaaacaactggaatcttaaaaaaggagttttaataagtccagatgtccattggagtaaattaccgangnctggattttatnctaagtggtggttagctacagggta

SEQ ID NO: 3701 - DNA, 914 bp, Homo sapiens
  misc_feature (785)..(785): "n" may be a, t, c, g, other or unknown
  misc_feature (852)..(852): "n" may be a, t, c, g, other or unknown
  misc_feature (899)..(899): "n" may be a, t, c, g, other or unknown
  misc_feature (907)..(907): "n" may be a, t, c, g, other or unknown
acaagacacttcctttattctgtgtattgtggtgatacaaccagaaatacctgtgaaacaactgaagaacctcaacactgttcccagcagcaagctgctgtaccaccggctggatctccttggccagcccagtgcttgcctccacttcaaacagctggcaaccctagaaagtcccaccatcatgctgtctgctggcagcttttcctccccctatgagcacctcagccagccagagacaaagcgcatggtagagcactacaccgcctatctcagcgacaacacccgcctcattgctaacccgggcctcaaattctctgtcagaaatgaagtaatggctaccagccacgtcacagatgaatggatgacacaaatggaaatgagtagcctgaacacttacattgtccgccgttacatagcaacacccaatggcgtcctcagaatttatcctggttccctcatggacaaagcatttgatcccactaggagacaatggtatctccatgcagtagctaatccagggttgatttctttgactggtccttacttagatgttggaggagctggttatgttgtgacaatcagtcacacaattcattcatccagtacacagctgtcttctgggcacactgtggctgtgatgggcattgacttcacactcagatacttctacaaagttctgatggacctattacctgtctgtaaccaagatggtggcaacaaaataaggtgcttcataatggaggacaggggttatctggtggcgcacccgactctcatcgaccccnaaggacatgccctgtggagcagcagcacatacccacaaggagcccctggtagcaaatggatatcctnaacaccccactttgtaaaggaaaacctgggcaacaagtttagtggcnggaacggnccaaagg

SEQ ID NO: 3702 - DNA, 894 bp, Homo sapiens
  misc_feature (77)..(77): "n" may be a, t, c, g, other or unknown
  misc_feature (810)..(810): "n" may be a, t, c, g, other or unknown
  misc_feature (831)..(831): "n" may be a, t, c, g, other or unknown
  misc_feature (884)..(884): "n" may be a, t, c, g, other or unknown
ttcaagtagcacctctatcagttatggctaaatcctgtccatctgtgtgtcgctgcgatgcgggtttcatttactgnaatgatcgctttctgacatccattccaacaggaataccagaggatgctacaactctctaccttcagaacaaccaaataaataatgctgggattccttcagatttgaaaaacttgctgaaagtagaaagaatatacctataccacaacagtttagatgaatttcctaccaacctcccaaagtatgtaaaagagttacatttgcaagaaaataacataaggactatcacttatgattcactttcaaaaattccctatctggaagaattacatttagatgacaactctgtctctgcagttagcatagaagagggagcattccgagacagcaactatctccgactgcttttcctgtcccgtaatcaccttagcacaattccctggggtttgcccaggactatagaagaactacgcttggatgataatcgcatatccactatttcatcaccatctcttcaaggtctcactagtctaaaacgcctggttctagatggaaacctgttgaacaatcatggtttgggtgacaaagttttcttcaacctagttaatttgacagagctgtccctggtgcggaattccctgactgctgcaccagtaaaccttccaggcacaaacctgaggaagctttatcttcaagataaccacatcaatcgggtgccccccaaatgctttttcttatctaaggcagctctatcgactggatatgtccaataataacctaagtaatttacctcanggtatctttgatgatttggancatataccacactggattcttcgcaacaatccctgggattgcgggtgccaganggaaatgggt

SEQ ID NO: 3703 - DNA, 789 bp, Homo sapiens
  misc_feature (749)..(749): "n" may be a, t, c, g, other or unknown
  misc_feature (771)..(771): "n" may be a, t, c, g, other or unknown
  misc_feature (774)..(774): "n" may be a, t, c, g, other or unknown
ctttcggagttagcgcagcgcgaacgctgggtgcggcgcctttaagcgtcgcggtgacacgtgtgtgaggcgccggaggcccggatggtgcgcgtgctgggccgcgggccgaaggagtcgccagggctgcgtaggcttgtggcgcgcccgcggagaggccggggctctgacgcccgctctgcggcttcggtgtttgaacaggccacagtccaggagcgcttacattcaggagctccgcgtagcacctgcccaaccaaactcagccctccgttaagatcctggttccatgccgcagtaggacagcaggcccaagtctgcacatcccagtgatgcaccatgccaatagtggataagttgaaggaggccctgaaacccggccgcaaggactcggctgatgatggagaactggggaagcttcttgcctcctctgccaagaaggtccttttacagaaaatcgagttcgagccagccagcaagagcttctcctaccagctggaggccttaaagagcaaatatgtgttgctcaaccccaaaacagagggagctagtcgccacaagagtggagatgacccaccggccaggagacagggcagtgagcacacgtatgagagctgtggtgacggagtcccagccccgcagaaagtgcttttccccacggagcgactgtctctgaagtgggagcgggtcttccgcgtgggcgcaggacttcacaaccttggcaacacctgctttctcaatgccccatccantgctttgaccttacacaccaanctntagccaactaccttg

SEQ ID NO: 3704 - DNA, 891 bp, Homo sapiens
  misc_feature (766)..(766): "n" may be a, t, c, g, other or unknown
  misc_feature (861)..(861): "n" may be a, t, c, g, other or unknown
  misc_feature (865)..(865): "n" may be a, t, c, g, other or unknown
  misc_feature (881)..(881): "n" may be a, t, c, g, other or unknown
gctgctagctcgcggcgacgtcgggccgattttcccaggatgacagagctgaggcagagggtggcccatgagccggttgcgccacccgaggacaaggagtcagagtcagaagcaaaggtagatggagagactgcatcggacagtgagagccgggcagaatccgcacccctgccagtctctgcagatgataccccggaggtcctcaatagggccctttccaacttgtcttcaagatggaagaactggtgggtgagaggcatcctgactttggccatgattgcatttttcttcatcatcatttacctgggaccaatggttttgatgataatcgtgatgtgcgttcagattaagtgtttccatgagataatcactattggctacaacgtctaccactcatatgatctgccctggttcaggacgctcagctggtactttctcctgtgtgtaaactatttcttctatggtgagacagtgacggattacttcttcaccctggtccagagagaagagcctttgcggattctcagtaaataccaccggttcatttcctttactctctatctaataggattctgcatgtttgtactgagtctggtcaagaagcattatcgactgcagttctacatgtttggctggacccatgtgacattgctgattgttgtaacacagtcacatcttggtatccacaacctatttgaaggaatgatctggttcattggccccatatcttgtgtgatctgtaatgacatcatggcctatatggttnggctttttctttgggcggaccccactcattaagctgtccccgaagaagacctgggaaggcttcattgggggcttctttgctactggggggttggncttntggtggcctatgggangtccggtcca

SEQ ID NO: 3705 - DNA, 879 bp, Homo sapiens
  misc_feature (805)..(806): "n" may be a, t, c, g, other or unknown
  misc_feature (863)..(863): "n" may be a, t, c, g, other or unknown
tatacctaatgataatatttctgatgagccaagtctctgtgactgtgatgtacataaacataatcaaaatgaaaatttagtacctaacaatcgtgttcaaatacacagaagccctgcacagaatttagttggagagaacaatcatgatgttgataacagtgacctcccagtattgtccactgatcaagatgaaagtttgctgttatttgaagatgttaatacagagttcgacgatgtgagtctttcacccttgaacagtaaaagcgaatctttacctgtgtcagacaaaactgctattagtgaaacgcctctggtctctcagttcttaatttctgatgaacttttgttggacaataattctgaactccaagatcaaatcacccgtgatgctaatagttttaaatctcgtgatcagagaggtgtacaggaagaaaaagtgaagaatcatgaggatatttttgattgctctagggatttattttctgttacctttgatttaggattctgtagtccagattctgatgatgaaatattggaacatacatcagatagcaatagacctctagatgatctatatggaaggtatttggaaattaaggagataagtgatgcaaattatgtttcgaatcaagcactaataccaagagatcatagtaaaaattttactagtggaactgttattatcccatcaaatgaagatatgcagaatccaaattatgtcatttgccactgagtgcacaaaaaatgaagaatggtatctcctggtattctcagtttctttccagtgcaaaaaaagttatgagtnnccctctctaaatcaaaccattgactcatttctaagataagaaggaatcttagaaccngatctggaaggaaaag

SEQ ID NO: 3706 - DNA, 864 bp, Homo sapiens
  misc_feature (733)..(733): "n" may be a, t, c, g, other or unknown
  misc_feature (770)..(770): "n" may be a, t, c, g, other or unknown
  misc_feature (842)..(842): "n" may be a, t, c, g, other or unknown
  misc_feature (847)..(847): "n" may be a, t, c, g, other or unknown
agatatgaaactggttctggagtgagatgagctcggctggggacgctacttgagaaggcctttccccacagggtgacttaaatgtcccaggctggaaggtggagcgagaagtggatgcccccagggctctgggtcacactccaggatgacttctcggaaccagctggtgcagaaggtgctgcaggagctgcaggaagcagtggagtgcgaaggcctggagggtctcataggtgcttccttggaggccaagcaggtcctgtcttccttcactctccccacctgccgggagggaggccctggcctccaggtgctggaagtggactcggtggccctgagcctgtatccagaagatgctccacggaacatgctgccgctggtgtgcaagggggagggcagcctgctgttcgaggcggccagcatgctgctgtggggtgacgcaggcctcagcctggagctgcgggcccgcaccgtggtagagatgctgctgcacagacactactacctccagggcatgatcgactccaaagtgatgctgcaggccgtgcgctactccctatgctctgaggagtcccctgagatgaccagcttgccccccgccacgctggaggccatcttcgatgccgacgtcaaggcctcctgtttccccagcagcttcttcaacgtgtggcacttgtatgctctcgcctctgtccttcagcggaacatctacttcatctaccccatgcgcaacctnaagatccggcctacttcaaccgtgtcatccggcccgncgttgcgacactgccctcagctgacatatgtggctggcagccttacagcattttcgcacatcttgcctgggnggctnaaatgactaaggccctg

SEQ ID NO: 3707 - DNA, 845 bp, Homo sapiens
  misc_feature (752)..(752): "n" may be a, t, c, g, other or unknown
  misc_feature (839)..(839): "n" may be a, t, c, g, other or unknown
  misc_feature (842)..(842): "n" may be a, t, c, g, other or unknown
accggtaccggccgcgcgctggtaagtcgccggtgtggctgcacctcaccaatcccgtgcgccgcggctgggccgtcggagagtgcgtgtgcttctctcctgcacgcggtgcttgggctcggccaggcggggtccgccgccagggtttgaggatgggggagtagctacaggaagcgaccccgcgatggcaaggtatatttttgtggaatgaaaaggaagtattagaaatgagctgaagaccattcacagattaatatttttggggacagatttgtgatgcttgattcacccttgaagtaatgtagacagaagttctcaaatttgcatattacatcaactggaaccagcagtgaatcttaatgttcacttaaatcagaacttgcataagaaagagaatgggagtctggtcaaataaagatgactatatcagagacttgaaaaggatcattctctgttttctgatagtgtatatggccattttagtgggcacagatcaggatttttacagtttacttggagtgtccaaaactgcaagcagtagagaaataagacaagctttcaagaaattggcattgaagttacatcctgataaaaacccgaataacccaaatgcacatggcgattttttaaaaataaatagagcatatgaagtactcaaagatgaagatctacggaaaaagtatgacaaatatggagaaaagggacttgaggataatcaaggtggccagtatgaaagctggaactattatcgntatgaattttggtatttatgatgatgatcctgaaatcatacattggaaagaagagaattgatgctgctggtaattctggaaaactgnggnttg

SEQ ID NO: 3708 - DNA, 883 bp, Homo sapiens
  misc_feature (771)..(771): "n" may be a, t, c, g, other or unknown
  misc_feature (811)..(811): "n" may be a, t, c, g, other or unknown
  misc_feature (858)..(858): "n" may be a, t, c, g, other or unknown
  misc_feature (882)..(882): "n" may be a, t, c, g, other or unknown
agttttgctccgaaagacttaccgaggagggagcttgcggtgcgttctgggaaagttgctgggccagctcctttgtttccagtctgagcgttgcgttcggtttcccgagggtcttctgaggcaccgcggctgcgggcttctgagttcccggctctccgcagggaagcctcctcttcgtacctcgttttttggctcgtggggggtcctcccaccgctggccgacgcagccagcatgtccggggtgcgcgcagtgcggatcagcatcgaatcggcctgcgagaagcaggtccatgaggtgggcctggatggcaccgagacgtacctgcccccgctgtccatgtcgcagaatctggcgcgtctggcccagcggatagacttcagccagggttcgggctccgaggaggaggaggcggcggggaccgagggggacgcgcaggactggccgggcgccgggtccagcgcagaccaggacgacgaggaaggagtggtaaaatttcagccttccctttggccttgggactcagtgaggaacaatttgagaagtgccctgacagagatgtgtgttctctatgatgttctcagtattgttagggataaaaaatttatgactcttgatcctgtctctcaggatgcacttcttcaaaacagaatcctcagacgttgcaattgatatctaaaaagaagtcacttgctggagcagcacaaatcttattgaaagggggcagaaagaactgacttaaatcagttacccgaaaaccaagaaaacagctncaaagaagacttcaattcttaacttttgcaatacgggacncttggaactttgaaaagttgggaataaaattttggaaattggcttcnaaaggcaggactttttttcctaana

SEQ ID NO: 3709 - DNA, 848 bp, Homo sapiens
  misc_feature (826)..(826): "n" may be a, t, c, g, other or unknown
  misc_feature (837)..(837): "n" may be a, t, c, g, other or unknown
  misc_feature (844)..(844): "n" may be a, t, c, g, other or unknown
agaaaataccggagttgcagggtataggtaaatttctcaaggttataggttggggttcttagaactttttgtggtgtgtgttggcctagagcgactcagaagcgttagtgacttcacctaaaaaagctaacctctctgctgagcgcgaccggtatgcggcgcaggatgagcctcagggcttctgttaagagtctgtctgagaaagccggtctgcgctgttcctcggtggcgaccttaattatgagatgagctaatgctttactgacttaaccatggcgcagcgggcagtgtggctcataagccacgaaccgggaactccactttgtggcaccgtgagattctccagacggtatccaactgttgaaaaacgagccagagtcttcaatggagcaagttatgtgcctgttcctgaagatggtccctttcttaaagcactgctctttgaacttagattattggatgatgataaagacttcgttgagagtcgtgatagctgttcacgcatcaataaaacatccatttatggactcctgataggaggtgaagaactctggccagttgttgcttttctgaagaatgacatgatatatgcttgtgttccactagttgaacaaactctgtcccctcgtccgccactaattagtgtcagtggagtttcacaaggctttgaatttctttttgggatacaggattttctttattcaggtcaaaaaaatgactctgagctgaatacaaaattgagccagttgcctgacttgcttctgcaggcttggccatttggtactttattagatgccacttacagaattcattagataataccaantttgcatctgngacttancccc

SEQ ID NO: 3710 - DNA, 917 bp, Homo sapiens
  misc_feature (740)..(740): "n" may be a, t, c, g, other or unknown
  misc_feature (798)..(798): "n" may be a, t, c, g, other or unknown
  misc_feature (855)..(855): "n" may be a, t, c, g, other or unknown
  misc_feature (892)..(892): "n" may be a, t, c, g, other or unknown
  misc_feature (911)..(911): "n" may be a, t, c, g, other or unknown
ctcttcccttaggtgtttaagttccgcgcgcaggccaggctgcaacctgacggccagatccctcgctgtcctagtcgctgctccttggagtcatgttcccagccgccccttctccgcggaccccgggtaccgggtcccgaaggggcccgctggccggactcgggcccggctccacgccccggacggctagcaggaagggtctgcccctggggtctgcagtcagctccccagtgctcttctcgccggtcggccggcgtagctcgctaagctcggggggaacaccaacacgaatgttcccacaccactccataactgagtctgtgaactatgatgtgaaaacgtttggatcttctcttcctgttaaagtcatggaagccctaacattggctgaagtcgatgaccagctgaccattaacatagatgaaggtggatgggcttgtctggtgtgcaaagagaagctcattatttggaagattgctctgtcacctattactaagttatccgtttgcaaagaacttcagctgccatctagtgatttccactggagtgccgacttagtggctctttcttactcttctccctcaggtgaagcacattctactcaggctgttgctgtcatggttgccaccagagaaggatctatccgctattggccaagccttgctggtgaagatacctacacagaggcttttgtagattcgggaggtgataagacttacaggttcctaacagcagtgcangggaggaagttttattttggcttcatcaggaagccaactaattcgggtgatacctganactcaggaaagattcatcacatatcctgctcagggcaaggatgctttcaggaatggnccaaaagttcttctctttttgaatttatctctaatangactccactttaagggtcnctggat

SEQ ID NO: 3711 - DNA, 827 bp, Homo sapiens
  misc_feature (731)..(731): "n" may be a, t, c, g, other or unknown
  misc_feature (793)..(793): "n" may be a, t, c, g, other or unknown
  misc_feature (814)..(814): "n" may be a, t, c, g, other or unknown
atgtgatgcatgctcacgtgtctccgcagccggctcgggaaagaatcccccaagctccatttcatgagtaagcgtgagagccgctcagtttcctccagctctgctgaagccagcacagaagtagcccaaactcttccctctgctgacagcaaattttaggcaaagtcttgagaaagaagaaattgggtccagaaagggaagtgaggagaatcagatcccagacctttggggagaaggagcaaccgcctctggcacagcccatcagggagaaagagcaggttgagaagagtcctaagctaacagccccaaacaggtgggtgttgctcagctccctgaggcatgtggttgtaaggcagaacccacagaccttgcaggaagaaggctctcggggccatggcccaggtcagcatcaacaatgactacagcgagtgggacttgagcacggatgccggggagcgggctcggctgctgcagagtccctgtgtggacacagcccccaagagtgagtgggaagcctctcctgggggtctggacagaggcaccacttccacacttggggccatcttcatcgtcgtcaacgcgtgcctgggtgcagggttactcaacttcccagcagccttcagcactgcggggggcgtggcagcaggcatcgcactgcagatgggtatgctggttttcatcatcagtggccttgtcatcctggcctactgctcccaggccagcaatgagangacctaccaggaagtggtatggctgtgtgtggcaagctgacaggtgtgctatgtgaagtggncatcgctgctacaccttttgnacctgcttggctt

SEQ ID NO: 3712 - DNA, 700 bp, Homo sapiens
  misc_feature (415)..(415): "n" may be a, t, c, g, other or unknown
  misc_feature (532)..(532): "n" may be a, t, c, g, other or unknown
  misc_feature (617)..(617): "n" may be a, t, c, g, other or unknown
  misc_feature (655)..(655): "n" may be a, t, c, g, other or unknown
  misc_feature (674)..(674): "n" may be a, t, c, g, other or unknown
ttaagctacagataaagcttttgtggtagtgtctgaagtgactagagtttttttcaaatgctagcagccctgaagttgtattcccaattaggatatgtcagacgttaagcaggcacccccagagtaactattatgactgattaacatatgccaaaataatttttaaaaattatatcaagtataacagaacttattaaagatttcacaggttattataccctcacactagggtggggtgaagctctttactgctctaaactcaacaacctgctgtgtagaggtgaactggcacttatccttagtgacagcctgttcatccttaggggtgtgtgtgtgtgtgtgtgtgtgtgtgtgtgtgtgtgtgtgtgtgtgtaagagagaaagaaatgtctacttaaaatttgcagctcaaaanaacattttgcagttcacatgtgcaagagaatcccacccctgcaaacttctctcaatacttgaaacattaggttactgctatgattttttctattattgagtttgttacttttctcangttttaatttgactgtataagtttgaagcagagtagactaaagataaaagggaacatacacaattcagaagaacacaaaaaattntgtcatatgttttcaattggggcaatgacatataagtnccctctgggtctcaagganagaggatctacccttgacaaataaaa

SEQ ID NO: 3713 - DNA, 857 bp, Homo sapiens
  misc_feature (699)..(699): "n" may be a, t, c, g, other or unknown
  misc_feature (749)..(749): "n" may be a, t, c, g, other or unknown
  misc_feature (763)..(763): "n" may be a, t, c, g, other or unknown
  misc_feature (829)..(829): "n" may be a, t, c, g, other or unknown
  misc_feature (849)..(849): "n" may be a, t, c, g, other or unknown
actggcgtccggcgtgtaccgagagactggcgtccggtgtgcaggtggccacatggatcctggcagccggtggcggaacctgcccagcgggcctagcctaaagcacttgactgacccctcttatggaatcccgcgggaacagcaaaaggcagcgttgcaggagctgacgcgggcgcacgtggagtccttcaactacgctgtgcacgagggtctcggcctcgcggtgcaggctatacctccctttgaatttgctttcaaagatgagcgtatctcttttactattctggatgctgttatcagtccacctacagttccaaaagggaccatctgcaaagaggccaatgtttatccagcagaatgccggggccgaaggagtacctaccgtgggaagttgacagctgatatcaactgggcagtgaatggaatctcaaaaggaatcattaagcagtttcttggctatgttcccatcatggtgaaatccaagctttgcaacttacgtaaccttcccccacaagccctcattgagcaccatgaggaggcagaggaaatggggggctattttataatcaatggcattgaaaaagtcatccgaatgttgattatgcctcggagaaattttcccattgcaatgataagaccaaaatggaaaaccagagggcctggttatactcagtatggagtttcaatgcactgtgtganggaagaacattccgctgtcaatatgaaccttcactactttggaaaatggnacaattatgtttgnaactttatttacccgaaaagaactggtctttctttcctttgggatttgcacttaaaggcccttgtnaactttttctggattatcanaactttta

SEQ ID NO: 3714 - DNA, 745 bp, Homo sapiens
  misc_feature (178)..(178): "n" may be a, t, c, g, other or unknown
  misc_feature (411)..(411): "n" may be a, t, c, g, other or unknown
  misc_feature (444)..(444): "n" may be a, t, c, g, other or unknown
  misc_feature (538)..(538): "n" may be a, t, c, g, other or unknown
  misc_feature (589)..(589): "n" may be a, t, c, g, other or unknown
  misc_feature (700)..(700): "n" may be a, t, c, g, other or unknown
  misc_feature (731)..(731): "n" may be a, t, c, g, other or unknown
  misc_feature (737)..(737): "n" may be a, t, c, g, other or unknown
atacggtgcaacgggtccgcgggactcttggatgcgcggaggtcccgagaccaggtgcgtgtgctaagctcaggtctgagcacggtggatcccatgggtgtggctctgaggaaattgacgcagtggactgctgccggacatggaactggaatcctcgaaatcacccctctaaatgaancgatattgaaagaaattattgtgtttgtggagagttttatctataaacatcctcaagaggcaaaatttgtttttgtggaaccacttgaatggaacacaagtttggcgccctcagcatttgaatcaggttatgttgtcagtgaaacaacagtcaaatcagaagaagttgataaaaatggacagcctttgctatttctctctgtaccacaaattaaaattaggagctttgggcanctgtcacgcttgttacttattgccaaaactggnaagttgaaggaagcccaagcatgtgttgaagctaacagagaccccatagtaaaaatcctgggctctgattataatacaatgaaagaaaactcanttgcattaaatattcttggcaaaattaccagagatgatgatcctgaaagtnaaattaagatgaagattgctatgctgcttaagcaattggatctgcacctcctcaatcattctctaaaacatatttcattagaaataagtttaagtcccatgaccggtgaanaaggatatagaactgctcaaacgtttctcangaaaanggaaaccc

SEQ ID NO: 3715 - DNA, 907 bp, Homo sapiens
  misc_feature (697)..(697): "n" may be a, t, c, g, other or unknown
  misc_feature (777)..(777): "n" may be a, t, c, g, other or unknown
  misc_feature (809)..(809): "n" may be a, t, c, g, other or unknown
  misc_feature (844)..(844): "n" may be a, t, c, g, other or unknown
  misc_feature (900)..(900): "n" may be a, t, c, g, other or unknown
gacctgaccgcaagaggccaatggagtgtgggagctgaaagggtcttcgctggcggccggacagtactgcttttaaagagacagtgttagggatcttggaagcacagccaacatgtgtgacattgaagaagccactaaccaactcctagatgtgaaccttcatgagaaccagaagtctgtacaagtgacagaaagtgacctcggaagtgaatctgagcttctagtcactattggagccactgtacctactggctttgagcaaacagctgcagatgaagtcagagagaaacttgggtcatcatgcaaaatcagcagagaccgtggcaagatatattttgtcatttcagtggaaagtctggcacaggttcattgtctgagatcagttgataacttatttgtggtggttcaggagtttcaagattaccagttcaaacaaacaaaggaagaagttctaaaggattttgaagacttggctggaaaactcccatggtcaaaccccttaaaagtgtggaaaattaatgccagttttaaaaagaaaaaagcaaagcgcaaaaagataaatcagaattcaagtaaagagaagattaataatggacaagaagtcaaaatcgatcagagaaatgttaaaaaagagttcactagccatgctttagattctcatatcttagattattatgaaaatccagccatcaaagangatgtatcaacattaataggtgatgatttggcatcttgcaaagatgagactgatgaaagctcaaaagaagaactgacctnaagtgctgaagtttagagtcacatgccaacanggcaggagaagaaacattgctttacctcaaatgangcttcaagaaaattttgggggtgcctgtcaagaattttttaagtggaaggccgacntgaccac

SEQ ID NO: 3716 - DNA, 864 bp, Homo sapiens
  misc_feature (713)..(713): "n" may be a, t, c, g, other or unknown
  misc_feature (781)..(781): "n" may be a, t, c, g, other or unknown
  misc_feature (845)..(845): "n" may be a, t, c, g, other or unknown
  misc_feature (850)..(850): "n" may be a, t, c, g, other or unknown
gtacaaaaccggagcctcgggccgggctgcgtgagggaggagggttcatcatgcctagtggcgtataagaagaccccgccaccggtccctccacgcaccacttcaaagccgttcatctcagtcacagtccagagcagtactgagtctgcccaggacacctacctggacagccaggaccacaagagcgaggtgactagccggtcgggcctgagcaactcgtcggacagcctggacagcagtacccgaccgcccagcgtgacacggggtggagtcgccccagcccctgaggccccagagccacccccaaaacatgcagctctgaaaagtgaacaagggacgctgaccagctctgagtcccaccccgaggccgcccccaaaaggaaactgtcatcgataggaatacaagttgactgcattcagccagtgccaaaagaggagcccagtcccgctaccaaattccagtccatcggggttcaggtagaggacgactggcgaagcagcgtcccctctcacagtatgtcctcccgacgggacacagactcggatacccaggatgccaatgactcaagctgcaagtcatctgagaggagcctcccggactgtacccctcaccccaactccatcagcatcgatgccggtccccggcaggcccccaagattgcccagatcaagcgcaacctctcctatggagacaacagcgacccttgccctanaggcgtcctcgctgcccccacccgacccctggcttcgagaacttcttcagcttcccaacagaaccggnacaagccaggggccttgccgccgaaaacgggttactgggttccttaaagcttactggaaggccngaaancagaaccgggttgg

SEQ ID NO: 3717 - DNA, 877 bp, Homo sapiens
  misc_feature (803)..(803): "n" may be a, t, c, g, other or unknown
  misc_feature (825)..(825): "n" may be a, t, c, g, other or unknown
  misc_feature (876)..(876): "n" may be a, t, c, g, other or unknown
agtggggcccccgcagctctcgtcccggccgccgctggtgaccactcgccgcccctccggaggcttcacccgcgccctcccccaggacgcgccagcggagctccggctccttcgccctggacgcggaggccgcggtgtgcggggcgacggcgaggccggaagatggcctgggtgctcaagatggacgaggtgatcgagtccgggctggtgcacgacttcgacgccagcctctcgggcatcgggcaggaactgggcgccggcgcttacagcatgagtgatgtcttggcattgcccattttcaagcaggaagattccagccttccattggatggtgaaacagagcacccaccctttcagtatgtgatgtgtgctgcaacgtcaccagcagtaaaactgcatgatgaaacgcttacttatttgaaccaaggtcagtcatatgatcggatgctggataatcggaaaatgggtgatatgcctgagatcaatggaaaattagtaaagagcatcataagggttgtattccatgacagacggctacaatacacagagcatcagcaacttgaaggatggaagtggaatcgcccaggagacagacttcttgatttagatattccaatgtctgtgggaataattgacacaaggacgaatccaagccagttaaatgcggttgaatttctgtgggacccagcaaaacgcacctctgctttcattcaggtacactgcatcagcacagaatttacttcacggaagcacggaggtgaaaagggagtgccctttaggatccaggttgacacctttaagcngaatgaaaatggagaatccccngatcatctacacttcacttactggcaaatcaaagttttaaagcctaaaggnc

SEQ ID NO: 3718 - DNA, 950 bp, Homo sapiens
  misc_feature (853)..(853): "n" may be a, t, c, g, other or unknown
  misc_feature (869)..(869): "n" may be a, t, c, g, other or unknown
  misc_feature (906)..(906): "n" may be a, t, c, g, other or unknown
tttcagcagatggaatgcgtttggctctggctgatgctggtgacactgtagaagatgccaactttgtggaagccatggcagatgcaggtattctccgtctgtacacctgggtagagtgggtgaaagaaatggttgccaactgggacagcctaagaagtggtcctgccagcactttcaatgatagagtttttgccagtgaattgaatgcaggaattataaaaacagatcaaaactatgaaaagatgatgtttaaagaagctttgaaaacagggttttttgagtttcaggccgcaaaagataagtaccgtgaattggctgtggaagggatgcacagagaacttgtgttccggtttattgaagttcagacacttctcctcgctccattctgtccacatttgtgtgagcacatctggacactcctgggaaagcctgactcaattatgaatgcttcatggcctgtggcaggtcctgttaatgaagttttaatacactcctcacagtatcttatggaagtaacacatgaccttagactacgactcaagaactatatgatgccagctaaagggaagaagactgacaaacaacccctgcagaagccctcacattgcaccatctatgtggcaaagaactatccaccttggcaacataccaccctgtctgttctacgtaaacactttgaggccaataacggaaaactgcctgacaacaaagtcattgctagtgaactaggcagtatgccataactgaagaaatacatgaagaaagtcatgccatttggtgccatgattaaggaaaatctggaaaaagatggggccctcgtattctggatttgcaattagaatttgatgaaaangctgggcttatggagnatatagtctatctgactaattcgcttgacctagaacnccttgaagtcaagtttggcttcgaaccgaagataaatcagggaa

SEQ ID NO: 3719 - DNA, 810 bp, Homo sapiens
  misc_feature (761)..(761): "n" may be a, t, c, g, other or unknown
  misc_feature (764)..(764): "n" may be a, t, c, g, other or unknown
  misc_feature (785)..(785): "n" may be a, t, c, g, other or unknown
tacttttcctgttggaacttctgacctgtcagaaagattttaccaattattttggacacctggaaggctgtggtgctgatctacacaaagaaattcgagacacttactatcaacttgttctgtttttggtcaaagcagttaaaggatttagtagcctaaatgacaggtccttgctccctgccttatcctgtgttcagacagccctgcttcatcttttggatatgggctgggaacccaatgatctcgccttctttgttgatattcagttaccagatctcctcatgaaaatgtcacaggagaatataagtgtccatgacagtgtgatcagccaatggagtgaagaagatgagcttgctgatgccaagcagaattcagaatggatggatgagtgtcaggatggcatgtttgaggcctggtatgaaaaaatagcccaggaagatccagagaagcagaggaaaatgcacatgttcattgctcgctactgtgacctgttaaatgtggacatctcttgtgatgggtgtgatgagattgccccctggcatcgataccgctgtctgcagtgcagcgacatggatctctgcaaaacttgcttcctaggtggggtgaagcctgagggccacggagacgaccatgaaatggtcaacatggagtttacctgtgaccactgccagggtttgatcataggccggaggatgaactgcaatgtttgcgatgactttgatctttgctacggatgctatgcagcgaagaaatctcctacnggncatttgcctacccacagcatnacgggccacccaatggtaaccattc

SEQ ID NO: 3720 - DNA, 774 bp, Homo sapiens
  misc_feature (631)..(631): "n" may be a, t, c, g, other or unknown
  misc_feature (699)..(699): "n" may be a, t, c, g, other or unknown
  misc_feature (721)..(721): "n" may be a, t, c, g, other or unknown
  misc_feature (742)..(742): "n" may be a, t, c, g, other or unknown
actccggccttggtggcgggtggctggcggttccgttaggtctgagggagcgatggcggtacgcgcgttgaagctgctgaccacactgctggctgtcgtggccgctgcctcccaagccgaggtcgagtccgaggcaggatggggcatggtgacgcctgatctgctcttcgccgaggggaccgcagcctacgcgcgcggggactggcccggggtggtcctgagcatggaacgggcgctgcgctcccgggcagccctccgcgcccttcgcctgcgctgccgcacccagtgtgccgccgacttcccgtgggagctggaccccgactggtcccccagcccggcccaggcctcgggcgccgccgccctgcgcgacctgagcttcttcgggggccttctgcgtcgcgctgcctgcctgcgccgctgcctcgggccgacggccgcccactcgctcagcgaagagatggagctggagttccgcaagcggagcccctacaactacctgcaggtcgcctacttcaagatcaacaagttggagaaagctgttgctgcagcacacaccttcttcgtgggcaatcctgagcacatggaaatgcagcagaacctagactattaccaaaccatgtctggagtgaangaggccgacttcaaggatcttgagactcaaccccatatgcaagaatttcgaattgggagtgcgacttntacttagaaggaacagccacanggaagcttgtgccccaactanaaggcgggcgcttgcaagaaatactttggggg

SEQ ID NO: 3721 - DNA, 743 bp, Homo sapiens
  misc_feature (677)..(677): "n" may be a, t, c, g, other or unknown
  misc_feature (712)..(712): "n" may be a, t, c, g, other or unknown
  misc_feature (736)..(736): "n" may be a, t, c, g, other or unknown
ctcgatagctttccggaagaaagggatctgggagcgagatgcgtgtagctagcacgatgcgtcgcgcggtgacgctctggcccgacgccgacggcctctcagtggctcccggaggacccggcgggcccagtgttggagagctgaaggtcaggccaggacagtgagacctgactccttgctcctaccagcctactatggcttaagacccagggccagggtcccgttgatgtaacagagcagaggaccagcagatgaatggacaccttgaagcaggggagcagcaggaccagaggccagaccaggagctgaccgggagctggggccacgggcctaggagcaccctggtcagggctaaggccatggccccgcccccaccgccactggctgccagcaccccgctcctccatggcgagtttggctcctacccagcccgaggcccacgctttgccctcacccttacatcgcaggccctgcacatacagcggctgcgccccaaacctgaagccaggccccggggtggcctggtcccgttggccgaggtctcaggctgctgcaccctgcgaagccgcagcccctcagactcagcggcctacttctgcatctacacctaccctcggggccggcgcggggcccggcgcaaaagccactcgcacctttccgggcaaaatggggcccgncaccttacgaaagagaacccgtgcccaaggcccancgcttgggccaattggcccttaanctgtctg

SEQ ID NO: 3722 - DNA, 833 bp, Homo sapiens
  misc_feature (689)..(689): "n" may be a, t, c, g, other or unknown
  misc_feature (769)..(769): "n" may be a, t, c, g, other or unknown
  misc_feature (780)..(780): "n" may be a, t, c, g, other or unknown
  misc_feature (801)..(801): "n" may be a, t, c, g, other or unknown
gaatgaaatgactgttactcacatatttacttcagatggtctgcatgctgaggttactggagttggctataatcaatttggggaagtgattgttgatggtgatgttgttcatggattctataacccagctgttagcagaattgttgaggcgggctgtgtgtgcaatgatgctgtaattagaaacaatactctaatggggaagccaacagaaggggccttaattgctcttgcaatgaagatgggtcttgatggacttcaacaagactacatcagaaaagctgaatacccttttagctctgagcaaaagtggatggctgttaagtgtgtacaccgaacacagcaggacagaccagagatttgttttatgaaaggtgcttacgaacaagtaattaagtactgtactacataccagagcaaagggcagaccttgacacttactcagcagcagagagatgtgtaccaacaagagaaggcacgcatgggctcagcgggactcagagttcttgctttggcttctggtcctgaactgggacagctgacatttcttggcttggtgggaatcattgatccacctagaactggtgtgaaagaagctgttacaacactcattgcctcaggagtatcaataaaaatgattactggagattcacaggagactgcagttgcaatcgccagtcgtctgggattgnattccaaaacttccagtcagtctcaggagaagaaatagatgcaatggatgttcaacagcttttcacaaatagtaccaaanggttgcagtanttttacagagcttagcccaanggcaccaggatgaaaaattatttaagtcgctt

SEQ ID NO: 3723 - DNA, 843 bp, Homo sapiens
  misc_feature (746)..(746): "n" may be a, t, c, g, other or unknown
  misc_feature (784)..(784): "n" may be a, t, c, g, other or unknown
  misc_feature (824)..(824): "n" may be a, t, c, g, other or unknown
ctggaaaaagctcgcttgtccccggaaccgccctgctgccgccgcctgcttcctctgctcgcggttagcccgtcagtccctgctctgtgcgcgcctccatctgggccatggatggcggggatctgatgagcttctttcttctggcatcattaacggaccttttaccatgaatagttctactccttctacaggtgtgtatggctttcttagaaatggcttctgaggaagctgccgttactatggtgaattattacactcctattactcctcaccttcgaagccagcctgtttatattcagtattccaatcacagagaacttaagactgacaatctacctaatcaagctcgagcccaagctgcactgcaggctgtcagtgccgtccaatcaggaagcctggccctttctggaggtccttccaatgaaggcacagtcctacctgggcagagccctgtgcttcgaataattattgaaaacctcttttaccctgttaccctggaagttcttcatcagatattttctaaatttggcacagtcttgaagattatcacctttacaaagaataatcagtttcaagccttgcttcagtatgctgacccagtaaatgcacattatgccaaaatggctctggatggccagaatatctataatgcatgctgactctgcgcattgacttcttcaagctcatcagccttaatgtgaaatataataatgacaaaagcagagacttcactcgcttaaaccttnctactggtgatggccagccatcccttgaacccctatgnttctgcttttgggccccgggtataattcttcccatatcangggcttctggatttgccca

SEQ ID NO: 3724 - DNA, 899 bp, Homo sapiens
  misc_feature (782)..(782): "n" may be a, t, c, g, other or unknown
  misc_feature (858)..(858): "n" may be a, t, c, g, other or unknown
  misc_feature (861)..(861): "n" may be a, t, c, g, other or unknown
  misc_feature (884)..(884): "n" may be a, t, c, g, other or unknown
atttggctggggctaggcttccggggctctgcagtcctcggcgtgtgctggcagcttcggagcccaccgagccgggcggctaggatgatgaaccggacgacccccgaccaggagctggcgccagcgtcggagcccgtgtgggagcggccgtggtcgatggaggagatccgcaggagcagccagagctggtcgctggcggccgacgcgggcctactacagtttctacaggaattctcacagcaaactatctctaggacccatgaaatcaagaaacaagtggacggactaattcgggaaaccaaagccacagattgtcgcctgcataatgtcttcaatgacttccttatgctctctaatacccagttcattgagaatcgtgtatatgatgaagaaggctctgtaggcagtgatcgtggcagtattgtggacactgaggaagagaaagaagaggaggagtcagatgaagattttgcccatcatagtgacaatgaacaaaaccggcacaccacacaaatgagtgatgaggaagaggatgatgatggctgtgaccttttcgctgactctgagaaggaggaggaagatattgaggacattgaagaaaatactagacctaaaagaagcagacctacatcgtttgcagatgagctggctgccgcatcaagggggatgccgtgggtcgagtggacgaagagcccgacaaccttaccctcaggagaagcaaaacctcggaagacactcaaagagaagaaggaaaggagaacttctttcagaccatgaaagangataactttattcgcaccccccccaagcttgacccgaccaaggaactttttcgccattttggctttttggaaggtnggncctggttcaatgggggggccaanggggcttcttttgga

SEQ ID NO: 3725 - DNA, 847 bp, Homo sapiens
  misc_feature (754)..(754): "n" may be a, t, c, g, other or unknown
  misc_feature (798)..(798): "n" may be a, t, c, g, other or unknown
  misc_feature (838)..(838): "n" may be a, t, c, g, other or unknown
ctaggcgcgtttcctgaaggtcgatggccaggtggtcttcataaactatactgccttgtgatgcctccctagaaatgagaggtctcaataccagctcagaccatgtggaccgcggatgagattgctcagctatgctatgaacactatgggatcaggctgcccaagaaggggaagcctgagccaaaccatgagtggacattattggcagcggtggtgaagatacaatctccagctgacaaggcctgcgacacccctgataagccggtgcaagtgacaaaggaagttgtgtcaatgggaacaggaacaaaatgcataggacagtccaaaatgaggaagaacggaaccagaccctctccagcttccatatgtcttcacctggtgtcctatctttgccgcaggagacatcctcaatgatagccatgctgaggtcatagccagaaggagtttccaaaggtaccttctccaccaactccagttggcagccaccctgaaagaggatagcatctttgtcccaggaactcaaaaaggagtgtggaaacttagacgagacctcatttttgtgtttttctccagccatacaccctgtggggatgcctccatcattccgatgcttgagcttgaagatcagccttgctgtcctgtcttcagaaattgggcccacaactcatcagtagaagccagtagtaacctggaagctcctggaaatgaaagaaaatgtgaagaccctgacagtcctgtaacccaaaaagatgangctttgagcctggggactgcaagcccagggaaggtcacccaacnggagcaagcttcaccattcagaagtttttgggcaaagccngaaaaaagt

SEQ ID NO: 3726 - DNA, 825 bp, Homo sapiens
  misc_feature (744)..(744): "n" may be a, t, c, g, other or unknown
  misc_feature (750)..(750): "n" may be a, t, c, g, other or unknown
  misc_feature (823)..(823): "n" may be a, t, c, g, other or unknown
cacgataaaggggacatgccgggagttgcagtaccctcaggaagaagtcattgtcatggacatggacccttttcttcactgtgtgatcccaaacttcatccaaagccaagacttcttagaagggcttcagaaggaactgatgaacttggacttccatgagaatctgatgatttgaagaagagaagagagcctcacatctccactttaaggaaaattctgtttgaagatttccggtcctggctttctgatatttctaaaattgacctggaatcaaccattgacatgtcctgtgctaaatatgaattcactgatgccctgctgtgccatgatgatgagctggaagggcgccggattgccttcatcctgtacctggttccttcctgggacaggagcatgggtggtaccctggacctgtacagcatagatgaacactttcagccgaagcagattgtcaagtctcttatcccttcgtggaacaaactggttttctttgaagtatctcctgtgtcctttcaccaggtgtctgaagtgctgtctgaagaaaagtcacgtttgtctataagtggctggtttcatggtccatcattgactcggcctcccaactactttgaaccccccatacctcggagccctcacatcccacaagatcatgagattttgtatgattggatcaaccctacttatctggacatggattaccaagttcaaattcaagaagagtttgaagaaagttctgaaattctnctgaangagtttcttaagcctgagaaattcacgaaaagtctgtgaaggccttggagcattggacatgtgggaatggganca

SEQ ID NO: 3727 - DNA, 892 bp, Homo sapiens
  misc_feature (423)..(423): "n" may be a, t, c, g, other or unknown
  misc_feature (777)..(777): "n" may be a, t, c, g, other or unknown
  misc_feature (805)..(805): "n" may be a, t, c, g, other or unknown
  misc_feature (869)..(869): "n" may be a, t, c, g, other or unknown
  misc_feature (892)..(892): "n" may be a, t, c, g, other or unknown
gcagtggtcatctatttccagggcttccgagtggacctgccaatcaagtcggcccgctaccgtggccagtacaacacctatcccatcaagctcttctatacgtccaacatccccatcatcctgcagtctgccctggtgtccaacctttatgtcatctcccaaatgctctcagctcgcttcagtggcaacttgctggtcagcctgctgggcacctggtcggacacgtcttctgggggcccagcacgtgcttatccagttggtggcctttgctattacctgtcccctccagaatcttttggctccgtgttagaagacccggtccatgcagttgtatacatagtgttcatgctgggctcctgtgcattcttctccaaaacgtggattgaggtctcaggttcctctgccaaagatgttgcaaagcanctgaaggagcagcagatggtgatgagaggccaccgagagacctccatggtccatgaactcaaccggtacatccccacagccgcggcctttggtgggctgtgcatcggggccctctcggtcctggctgacttcctaggcgccattgggtctggaaccgggatcctgctcgcagtcacaatcatctaccagtactttgagatcttcgttaaggagcaaagcgaggttggcagcatgggggccctgctcttctgagcccgtctcccggacaggttgaggaactgctccagaacgcctcggaaggggaactctcatcatggcgcgtgctgctgcgcatatggacttttaataatggtnttgaattcgaattctttcattccactgngtaaagtgctagacattttccaattaaaatttgcttttatcctggcactggcaaaaagaactgngaaagtgaaaatttattcagccn

SEQ ID NO: 3728 - DNA, 820 bp, Homo sapiens
  misc_feature (747)..(747): "n" may be a, t, c, g, other or unknown
  misc_feature (797)..(797): "n" may be a, t, c, g, other or unknown
  misc_feature (817)..(817): "n" may be a, t, c, g, other or unknown
gattgccggcattcccgcttctgctggttgcttcatgctgcaggctgcggccgtcagccctcgctcgcattggtggcgctgaggtgccggggcagcaagtgacatgtcgtcgggcctccgcgccgctgacttcccccgctggaagcgccacatctcggagcaactgaggcgccgggaccggctgcagagacaggcgttcgaggagatcatcctgcagtataacaaattgctggaaaagtcagatcttcattcagtgttggcccagaaactacaggctgaaaagcatgacgtaccaaacaggcacgagataagtcccggacatgatggcacatggaatgacaatcagctacaagaaatggcccaactgaggattaagcaccaagaggaactgactgaattacacaagaaacgtggggagttagctcaactggtgattgacctgaataaccaaatgcagcggaaggacagggagatgcagatgaatgaagcaaaaattgcagaatgtttgcagactatctctgacctggagacggagtgcctagacctgcgcactaagctttgtgaccttgaaagagccaaccagaccctgaaggatgaatatgatgccctgcagatcacttttactgccttggagggaaaactgaggaaaactacggaagagaaccaggagctggtcaccagatggatggctgagaaagcccaggaagccaatcggcttaatgcagagaatgaaaaagacttcaggangcggcaaagccccggcttgcaagaaagagctttgcagaaaccagccaaanggaaccttttaccagttcgnaac

SEQ ID NO: 3729 - DNA, 870 bp, Homo sapiens
  misc_feature (819)..(819): "n" may be a, t, c, g, other or unknown
  misc_feature (829)..(829): "n" may be a, t, c, g, other or unknown
  misc_feature (842)..(842): "n" may be a, t, c, g, other or unknown
caagaagttctggagataaaaaaaatacgagtgatagaagtagcaagacacaagcctctgtcaaaaaagaagagaaaagatcgtctgagaaatctgaaaaaaaagaaagcaaggatactaagaaaatagaaggtaaagatgagaagaatgataatggagcaagtggccaaacatcagaatcgattaaaaaaagtgaagaaaagaagcgaataagttccaagagtccaggacatatggtaatactagaccaaactaaaggagatcattgtagaccatcaagaagaggaagatatgagaaaattcatggaagaagtaaggaaaaggagagagctagtctagataaaaaaagagataaagactacagaaggaaagagatcttgccttttgaaaagatgaaggaacaaaggttgagagaacatttagttcgttttgaaaggctgcgacgagcaatggaacttcgaagacgaagagagattgcagagagagagcgtcgagagcgagaacgcattagaataattcgtgaacgggaagaacgggaacgcttacagagagagagagagcgcctagaaattgaaaggcaaaaactagagagagagagaatggaacgcgaacgcttggaaagggaacgcattcgtattgaacaggaacgtcgtaaggaagctgaacggattgctcgagaaagagaggaactcagaaggcaacaacagcagcttcgttatgaacaagaaaaaaggaattccttgaaacgcccacgtgatgtagatcatagcgagatgatccttactggacgagaataaaagtggctctagatcagatgcncgatttggcntggatccgctctntcgccacagacagattatgcttgtcccg

SEQ ID NO: 3730 - DNA, 806 bp, Homo sapiens
  misc_feature (740)..(740): "n" may be a, t, c, g, other or unknown
  misc_feature (767)..(767): "n" may be a, t, c, g, other or unknown
  misc_feature (774)..(774): "n" may be a, t, c, g, other or unknown
accgccttcgccgcggaccttcagctgccgcggtcgctccgagcggcgggccgcagaggttcaagcgattctcctgcttcagcctccggagtagctgggattacaggcacgtgccaacacacccagccaccaaaatgccagaagagatggacaagccactgatcagcctccacctggtggacagcgatagtagccttgccaaggtccccgatgaggcccccaaagtgggcatcctgggtagcggggactttgcccgctccctggccacacgcctggtgggctctggcttcaaagtggtggtggggagccgcaaccccaaacgcacagccaggctgtatccctcagcggcccaagtgactttccaagaggaggcagtgagctccccggaggtcatctttgtggctgtgttccgggagcactactcttcactgtgcagtctcagtgaccagctggcgggcaagatcctggtggatgtgagcaaccctacagagcaagagcaccttcagcatcgtgagtccaatgctgagtacctggcctccctcttccccacttgcacagtggtcaaggccttcaatgtcatctctgcctggaccctgcaggctggcccaagggatggtaacaggcaggtgcccatctgcggtgaccagccagaagccaagcgtgctgtctcggagatggcgctcgccatgggcttcatgcccgtggacatgggatccctggcgtcagcctgggaggtggangccatgcccctgcgccttcttcccggnctggaangtgcccacccttgttggcccttggggcttctt

SEQ ID NO: 3731 - DNA, 754 bp, Homo sapiens
  misc_feature (678)..(678): "n" may be a, t, c, g, other or unknown
  misc_feature (686)..(686): "n" may be a, t, c, g, other or unknown
  misc_feature (731)..(731): "n" may be a, t, c, g, other or unknown
acgtggtacggaaccggcgccgcgcttgctgctggtaacagggccttgcctagtgggccttccttcccaggtcgcccctcagtctccactagagacaggactgaccagttgctcttccttccaagaaccttcgagatctgcggtctggggtctggttgaaagatggcggccctcactaccctgtttaagtacatagatgaaaatcaggatcgctacattaagaaactcgcaaaatgggtggctatccagagtgtgtctgcgtggccggagaagagaggcgaaatcaggaggatgatggaagttgctgctgcagatgttaagcagttggggggctctgtggaactggtggatatcggaaaacaaaagctccctgatggctcggagatcccgctccctcctattctgctcggcaggctgggctccgacccacagaagaagaccgtgtgcatttacgggcacctggatgtgcagcctgcagccctggaggacggctgggacagcgagcccttcaccctggtggagcgagacggcaagctgtatgggggaggttcgactgatgataagggcccggtggccggctggataaacgccctggaagcgtatcagaaaacaggccaggagattcctgtcaacgtccgattctgcctcgaaggcatggaaggagtcaaggctcttganggcctaanacgaagcttgattttttgccccgggaaaggaacaccattcttttnaagggattgtggggacctaatgg

SEQ ID NO: 3732 - DNA, 839 bp, Homo sapiens
  misc_feature (682)..(682): "n" may be a, t, c, g, other or unknown
  misc_feature (763)..(763): "n" may be a, t, c, g, other or unknown
  misc_feature (765)..(765): "n" may be a, t, c, g, other or unknown
  misc_feature (816)..(816): "n" may be a, t, c, g, other or unknown
acacctcgtggagtccggccggaagagcaaccgagatgaaggtgaagatgctgagccggaatccggacaattatgtccgcgaaaccaagttggacttacagagagttccaagaaactatgatcctgctttacatccttttgaggtcccacgagaatatataagagctttaaatgctaccaaactggaacgagtatttgcaaaaccattccttgcttcgctggatggtcaccgtgatggagtcaattgcttggcaaagcatccagagaagctggctactgtcctttctggggcgtgtgatggagaggttagaatttggaatctaactcagcggaattgtatccgtacaatacaagcacatgaaggctttgtacgaggaatatgtactcgcttttgtgggacttcttttttcactgttggtgatgacaaaactgtgaagcagtggaaaatggatgggccaggctatggagacgaggaagagccattacatacaatattaggaaagacagtgtatactgggattgatcatcactggaaagaagctgtttttgccacatgtggacagcaagtagacatttgggatgaacaaagaactaatcctatatgttcaatgacctggggatttgacagtataagtagtgttaaatttaacccaattgaggtaatgtttttttttaagtatgntttacttattatggcttaataatttcagttctggttagaaaacttttgaatgtatgatagaaacttctgaattttaatggngntttggcatttttgcagttttcccgattggaaatgaattctggaacccttgnttcaaatcccaacttggtttccc

SEQ ID NO: 3733 - DNA, 773 bp, Homo sapiens
  misc_feature (755)..(755): "n" may be a, t, c, g, other or unknown
  misc_feature (772)..(773): "n" may be a, t, c, g, other or unknown
tacaagctcaagtctgtggcccaccttccctggcgcatgctcacctacaaggccctcaacacattcatcgacgacctgttcgcctttgtcatcaagatgcccgttatgtaccggatcggctgcctgcgggacggcccacctggctgtggacgggccagcccgacctcacactgcctcccacccctctccagatgtggttttcttcatctacctctaccaacggtggatctaccgcgtcgaccccacccgagtcaacgagtttggcatgagtggagaagaccccacagctgccgcccccgtggccgaggttcccacagcagcaggggccctcacgcccacacctgcacccaccacgaccaccgccaccagggaggaggcctccacgtccctgcccaccaagcccacccagggggccagctctgccagcgagccccaggaagcccctccaaagccagcagaggacaagaaaaaggattagtcgagactggtcctcacctgctccggctcctggcgaccactacccctgcgtcccggccccctcgcctcccctccctgtcgccctttccctggacagatcaggccggggcggtgggaggcccgcctcaggtcagggcccagcgtgtgacgtaggggccggggcaggccagggtttgtttgtggaggcgctgtctgtccctctgtcctctgtgtttcagcatcttggcctgcagcccagcaccactgggaatcatggtgaactgatgcagcgtgccganggggtgggttgggccgnn

SEQ ID NO: 3734 - DNA, 808 bp, Homo sapiens
  misc_feature (766)..(766): "n" may be a, t, c, g, other or unknown
  misc_feature (780)..(780): "n" may be a, t, c, g, other or unknown
  misc_feature (798)..(798): "n" may be a, t, c, g, other or unknown
aatccgatggcagccgccagcagaggacaagatcaatggcatcctcctgggcttccggatccgataccgggagctgctctatgaaggactgaggggcttcacgcttcgaggcatcaacaacccaggggccacatgggctgagcttacctacctgaacaagcacaggcggtacgagatacggatgagcgtgtacaacgctgtgggtgaggggccctccagccccccgcaggaggtctttgttggggaggcagtgcccacagcagcacctcgtaacgtggtcgtccacggcgccacggccacacagctggacgtgacttgggagccacctccgctggacagccagaatggagacatccaggggtacaagatttatttctgggaagcccagcgggggaacctcacagagcgagtgaagacgcttttcccggctgagaacagcgtgaagctcaagaacttgactggctacacggcctacatggtcagcgtggccgccttcaacgccgctggggatgggcctcggagcacccccacccaaggccagacccagcaagcagcccccagcgctcccagctcggtcaagttcagtgagctgaccacaacctcagtgaatgtgtcctgggaagccccgcagttccccaatggcatcctggagggctacaggctggtgtacgagccctgcagccccgtggatggagtcagcaagatcgtgaccgtggacgtgaaggggaacaagccccctgtggctgaaggtgaaggacctgcgganggggtgacctacangttccgcattagaaccanactttactac

SEQ ID NO: 3735 - DNA, 701 bp, Homo sapiens
  misc_feature (673)..(673): "n" may be a, t, c, g, other or unknown
  misc_feature (682)..(683): "n" may be a, t, c, g, other or unknown
aagatggcggcggggaggtaggcagagcaggacgccgctgctgccgccgccaccgccgcctccgctccagtcgcctctggtccttcaaactcacacctcccgggaggagctgtcctggcgccgggtcccgcggggaaaatggtggagccagggcaagatttactgcttgctgctttgagggagagtggaattagtccgaatgacctctttgatattgatggtggagatgcagggcttgcaactccaatgcctaccccgtcagttcagcagtcagtgccacttagtgcattagaactaggtttggagaccgaagcagcagttcctgttaaacaagaaccagagactgtacctactccagcactattaaatgtgaggcagcctccatctactacaacatttgtgctgaatcaaataaatcatcttccacccttgggatctacaattgtaatgactaaaacaccacctgtaacaaccaacaggcaaaccatcactttaactaagtttatccagactactgcaagcacacgcccgtcagtctcagcaccaacagtacgaaatgccatgacctctgcaccttcaaaagaccaagttcagcttaaagatctactggaaaataatagtcttaatgaactgatgaaactaaagccacctgctaatattgcttacccagtancaacaagcnnctactgatgtaagccaat

SEQ ID NO: 3736 - DNA, 876 bp, Homo sapiens
  misc_feature (801)..(801): "n" may be a, t, c, g, other or unknown
  misc_feature (817)..(817): "n" may be a, t, c, g, other or unknown
  misc_feature (876)..(876): "n" may be a, t, c, g, other or unknown
gtgccacatcctggctctgtgcgctgggctcccgccgctgctgcgcgcctggcgcgtgccccccgcgccgcccgtctcgggccccggacccagtccgcatccgtcgtccggcccgctgctgccgccgcgcttctacccgcgctacgtgctaccgctcgccttcggcaagtacttcgcgtccgtgtcagcgcacgtcagcatctggaaggtgcccgtgtcctatgcacacaccgtcaaggccaccatgcccatctgggtggtcctcctgtcccggatcattatgaaggagaagcagagcaccaaggtatacttgtcactcatccccatcatcagcggtgtcctgctggccaccgtcaccgagttgtcttttgacatgtggggactcgtcagcgccctcgccgccacgctgtgcttctcgcttcagaacattttctccaaaaaggtcttgcgagattcacggatccaccatctccggctgctcaacatcctgggctgccacgccgtcttctttatgatccccacctgggttctggtggacctctcggctttcctggtcagcagcgacttgacctacgtctaccagtggccctggacgctcctgctcctggctgtcagcggcttctgtaactttgcccagaatgttatcgccttcagcatcctcaacctcgttagccccctgagctactcggtcgcaatgccaccaaaagaatcatggtcatcacggtgtccctgatcatgcttgcgcaacccagtcaccaacaccaacgtctgggcatgatgaccggcatcctgggggtcttnctttataacaagaacnagtaccaatgcaaaaccaagcaagccaaggaagcaccttcttccccgttaccacaagcn

SEQ ID NO: 3737 - DNA, 836 bp, Homo sapiens
  misc_feature (775)..(775): "n" may be a, t, c, g, other or unknown
  misc_feature (818)..(819): "n" may be a, t, c, g, other or unknown
aagatggcggcggggaggtaggcagagcaggacgccgctgctgccgccgccaccgccgcctccgctccagtcgcctctggtccttcaaactcacacctcccgggaggagctgtcctggcgccgggtcccgcggggaaaatggtggagccagggcaagatttactgcttgctgctttgagggagagtggaattagtccgaatgacctctttgatattgatggtggagatgcagggcttgcaactccaatgcctaccccgtcagttcagcagtcagtgccacttagtgcattagaactaggtttggagaccgaagcagcagttcctgttaaacaagaaccagagactgtacctactccagcactattaaatgtgaggcagcctccatctactacaacatttgtgctgaatcaaataaatcatcttccacccttgggatctacaattgtaatgactaaaacaccacctgtaacaaccaacaggcaaaccatcactttaactaagtttatccagactactgcaagcacacgcccgtcagtctcagcaccaacagtacgaaatgccatgacctctgcaccttcaaaagaccaagttcagcttaaagatctactgaaaaataatagtcttaatgaactgatgaaactaaagccacctgctaatattgctcaaccagtagcaacagcagctactgatgtaagcaatggtacagtaaagaaagagtcttctaataaagaaggactagaatgtggataaacgacatgaagatgaggagtttttncccaaccatgaaggttcctgttgtaaaagaagatgatgaaccnnaggaagaagatgaagaa

SEQ ID NO: 3738 - DNA, 877 bp, Homo sapiens
  misc_feature (692)..(692): "n" may be a, t, c, g, other or unknown
  misc_feature (783)..(783): "n" may be a, t, c, g, other or unknown
  misc_feature (809)..(809): "n" may be a, t, c, g, other or unknown
  misc_feature (870)..(870): "n" may be a, t, c, g, other or unknown
gtttttggagctgcgacgccaaacatggcgtgttcctagaagccgctttcggcatcagtaggcggcggcgtggggtctggcagcgtggggagagggaccaaccgacgccacttcgtgttgggaagtgggagcgggagggccgggcaattcccgaccgaaccaaacggtttccatggatctcaatagtgccagcactgttgttcttcaggtgttaacacaggccaccagtcaggatactgctgtgttaaaaccagctgaggagcagttgaagcagtgggagacacagccaggtttctattcagtgttgctgaatattttcaccaaccacactttggatataaatgtaaggtggcttgctgtactgtattttaaacatggaattgatcgctactggagacgtgtagcacctcatgctctctcagaggaggagaaaactactctgcgtgcagggctcatcaccaacttcaatgaaccaataaaccagattgcaactcagattgcagtgctcattgcaaaagttgctagattggattgtcccagacagtggcctgaactaattcccactcttatagagtctgttaaagtccaggatgatcttcgacagcacagagcattacttaccttctatcatgttaccaagacactggcatctaaacgacttgctgctgatagaaaactattttatgatttancttctggaatttataattttgcctgctctctgtggaatcaccacacagacacattcctgcaagaagtttcttcttgcaatgaactgcaacntttgagttcactagaacgaacactgntatcattgaaagtgctgcgtaagttaactggtaatggatttgtggaaacctcataagaatntggaggt

SEQ ID NO: 3739 - DNA, 857 bp, Homo sapiens
  misc_feature (801)..(801): "n" may be a, t, c, g, other or unknown
  misc_feature (836)..(836): "n" may be a, t, c, g, other or unknown
  misc_feature (855)..(855): "n" may be a, t, c, g, other or unknown
acacaaaggaaatgcaggcagatgatgaactgcttcatccattaggtccagatgataaaaatattgaaacaaaagagggatctgaattctcattttcagatggagaagtggcagaaaaagcagaggtttacaggtcagaaaatgaaagtgaacggaactgtctagaagaatcagagggctgctattgcagatcatctggagaccctgaacaaataaaggaagacagtttatcagaagagagtgctgatgcacggagttttgaaatgactgaattcaatcaagctttagaagaaataaaagggcaggttgttgaaaacaactctgtaactgaattttctgaggagaaaaacagaactgaaaattacaacaggcaagatggtcagagagttcaaggaggagtccctgctggctctgacgagtatgaagatgaatgccctcatctaattgccttgtcgtcattaaatagagaattcaggcctttcagagatgaagaaaatgtgggagctatgaatcagtatagaacaagaactctgagtatcacttcttcaggcagtgctgtaagctgttcaacaattcctccagaactggtgaaacagaaggtgaaacgtcagttgacaaaacagcaaaaatcagctgtcagacgtcgattgcagaaaggagaagcaaatatatttaccaagcaacgtagggaaaacatgcaaaatatcaaatcaagtttggaagcagctagcttttggggagaataatatatttaggatcttggatatggttaatatattttttaaaggtactggaattccnttttgaaccctcattggccttttttgagcccaggntatcatatattaataaatnaa

SEQ ID NO: 3740 - DNA, 874 bp, Homo sapiens
  misc_feature (772)..(772): "n" may be a, t, c, g, other or unknown
  misc_feature (797)..(797): "n" may be a, t, c, g, other or unknown
  misc_feature (866)..(866): "n" may be a, t, c, g, other or unknown
  misc_feature (873)..(873): "n" may be a, t, c, g, other or unknown
atgcgcataacggccgccatcttaacagcgcgttcccgttggcgtctgaggaacagcatctctgccttcctgttcacggtgaccttcgcttggtgtcctcctggcctcagcaacctgacaattctgtcgtgtcccgagagatggctaatgaatggcgcttgatgacagatgagtaatgcctgttgctgaaagattgacggtatgagatcatctttctcaagatgttttctgtcttcatgagtcaaaatttgaagaggaaaggatggtggctgggtggttgacaaattactctcaggactcagtgacctttgaggatgtggctgtggacttcacccaggaggagtggactttgctggatcaaactcagagaaacttatacagagatgtgatgctggagaactataagaatctagttgcagtagattgggagagtcatattaataccaaatggtcagcacctcagcagaattttttgcaggggaaaacatccagtgtggtggaaatgaattcagagtaaaagggagaatctcaatgaaataaatttggaaaacttctatgaaccatcattaattttcaccaacaggagagaaaccattttggagaggaactgtttgactttaaccaatgtgaaaaagccttgagtgaacactcatgccttaagactcacaggagaacttactttagaaagaaaacctgtgagtgtaatcaatgtgaaaaagccttcagaaaaccctctatctttactttacacaagaaaactgatatcggagangaactttctactgtaatcaatgtgnaacagcctttagccaacatctacatcttggttgcaagaaaactacccaaatctacatcttgtttgcaanaaacttnc

SEQ ID NO: 3741 - DNA, 931 bp, Homo sapiens
  misc_feature (807)..(807): "n" may be a, t, c, g, other or unknown
  misc_feature (859)..(859): "n" may be a, t, c, g, other or unknown
  misc_feature (919)..(919): "n" may be a, t, c, g, other or unknown
  misc_feature (922)..(922): "n" may be a, t, c, g, other or unknown
tttaaaaataaagagcatatgaagtactcaaagatgaagatctacggaaaaagtatgacaaatatggagaaaagggacttgaggataatcaaggtggccagtatgaaagctggaactattatcgttatgattttggtatttatgatgatgatcctgaaatcataacattggaaagaagagaatttgatgctgctgttaattctggagaactgtggtttgtaaatttttactccccaggctgttcacactgccatgatttagctcccacatggagagactttgctaaagaagtggatgggttacttcgaattggagctgttaactgtggtgatgatagaatgctttgccgaatgaaaggagtcaacagctatcccagtctcttcatttttcggtctggaatggccccagtgaaatatcatggagacagatcaaaggagagtttagtgagttttgcaatgcagcatgttagaagtacagtgacagaactttggacaggaaattttgtcaactccatacaaactgcttttgctgctggtattggctggctgatcactttttgttcaaaaggaggagattgtttgacttcacagacacgactcaggcttggtggcatgttggatggtcttgttaatgtaggatggatggactgtgccacccaggataacctttgtaaaagcttagatattacaacaagtactactgcttattttcctcctggagccactttaaataacaaagagaaaaccgtattttggttctcactcattggatgctaaagaaattatttggaagtaatacataatcttncagattttgactctttcgcaaacaccttaaagacgtttggctcatcatcggngctgtatttttcattttggaaaaatgaaaatcaatgatcctgacctgaaaactaaaactntcntaaaatgac

SEQ ID NO: 3742 - DNA, 867 bp, Homo sapiens
  misc_feature (782)..(782): "n" may be a, t, c, g, other or unknown
  misc_feature (839)..(839): "n" may be a, t, c, g, other or unknown
  misc_feature (859)..(859): "n" may be a, t, c, g, other or unknown
actattttgctgccatgtttactaatgatgtcagagaggcaagacaagaagaaataaaaatggaaggtgtagaaccaaattcgttgtggtccttgatccagtatgcttatacaggccgccttgaattaaaagaagataatattgagtgcctgttatctacagcttgccttcttcagctttcacaggttgtagaagcatgctgtaagtttttaatgaaacagcttcatccatccaactgtcctggaattcgttcttttgctgatgcccaaggttgtacagatttgcataaagtggctcacaattatactatggagcatttcatggaagtaatcagaaaccaggaatttgtattattaccagccagcgaaattgcaaagctcttggctagtgatgacatgaacattcctaatgaggagacaatattgaatgcacttcttacttgggtccgtcatgatttggaacagagacggaaagatctaagtaaacttttggcttatattaggctacctcttcttgcaccacagttcctggcagacatggaaaataatgtactttttcgggatgatatagaatgtcagaaactcattatggaagcaatgaagtaccatttattaccagagagacgacccatgttacaaagtcctcggacaaaacctaggaagtcaactgttggtacattatttgcagttgggggaatggattcaacaaaaggagcaacaagcattgaaaaagtatgatctccgtacaaatatgtggactccagtagcaaatatgaatgggangaggctacagttcggtggtgcagtgctagatgacaaactgtatgtggttggaggaanaaatggactgaagactttgnatactgga

SEQ ID NO: 3743 - DNA, 848 bp, Homo sapiens
  misc_feature (774)..(774): "n" may be a, t, c, g, other or unknown
  misc_feature (786)..(786): "n" may be a, t, c, g, other or unknown
  misc_feature (805)..(805): "n" may be a, t, c, g, other or unknown
ccgtgcggccagagctctagagagtggtgccgccttccaaccttcttccccaagccctggtggccggctccgcctcttctcgaatcttttccacagcccaaaatggccgcagaggtgtattttggcgatctagagctcttcgagccgttcgaccacccaggggagtcgattccgaagcccgttcacactcgcttcaaggacgacgacggcgacgaggaggacgaaaatggggtcggcgacgcggagctacgggagcggcttcggcagtgcgaggagaccatcgagcagctccgcgccgagaatcaagaacttaaacgaaaattgaacattctgactcgaccgagtggaatattggtgaacgatactaagttagatggacctatattacagattctattcatgaacaatgctatttcaaagcaatatcatcaagaaatagaggaatttgtatcaaatttagtaaaaagatttgaggaacagcagaaaaatgatgtggaaaagacttcctttaatcttttgccccagccatccagtattgtgctagaggaggaccacaaagtggaagagtcctgtgccattaaaaacaacaaggaagctttcagtgttgtaggaagtgtcctgtattttactaatttttgccttgataaattggggcaacccgcttctaaatgaaaaccctcagctttccgaaggatgggaaatacccaagtaccatcaagtcttcagccccattggttctctagaagggcaagaaatacaagttaaggcaaaaanggccaaagcctnactggtttcaaatgggggntcttgaagaaccccccaatggaaagaattggcccaatggcctt

SEQ ID NO: 3744 - DNA, 793 bp, Homo sapiens
  misc_feature (704)..(704): "n" may be a, t, c, g, other or unknown
  misc_feature (761)..(761): "n" may be a, t, c, g, other or unknown
  misc_feature (790)..(790): "n" may be a, t, c, g, other or unknown
agtctccgcagagcccgggcgggagtagctggtggaccccgttgagctgccgaacttccgggactcccccgcgaccccttcccagcttcccgtccgctccgccgcagcgattgtctcggtgggttgattcggcacaaaccgcccgacccaggggccggtgcgcgtgtggaaggggaagcactcccctcgtggtcgcctggaggtgcgctggaggagggggtgacataaccagggactcgaggtccgccgtgggaatgatccacgaactgctcttggctctgagcgggtaccctgggtccattttcacctggaacaagcggagtggcctgcaggtatcgcaggacttccctttcctccaccccagtgagaccagtgtcctgaatcgactctgccggctcggcacagactatattcgcttcactgagttcattgaacagtacacgggccatgtgcaacagcaggatcaccatccatctcaacagggccaaggtgggttacatggaatctacctgcgggccttctgcacagggctggattctgttttgcagccttatcgccaagcactgcttgatttggaacaagagttcctgggtgatccccatctctccatatcacatgtcaactacttctagaccagttccagcttctttttccctctgtgatggttgtagtagaacaaattaaaaagtcaaaagattcatggntgtcaaatcctggaaacagtctacaaacacagcttgtggggggttggcttctgttcnaagtgcactgggaaaaaatcctggcccgnttg

SEQ ID NO: 3745 - DNA, 590 bp, Homo sapiens
  misc_feature (290)..(290): "n" may be a, t, c, g, other or unknown
  misc_feature (333)..(333): "n" may be a, t, c, g, other or unknown
  misc_feature (343)..(343): "n" may be a, t, c, g, other or unknown
  misc_feature (446)..(446): "n" may be a, t, c, g, other or unknown
  misc_feature (522)..(522): "n" may be a, t, c, g, other or unknown
  misc_feature (562)..(562): "n" may be a, t, c, g, other or unknown
  misc_feature (584)..(584): "n" may be a, t, c, g, other or unknown
aaaaaaaaaagtacgcggacaagatggcggcggcagcagtcgacagcgcgatggaggtggtgccggcgctggcggaggaggccgcgccggaggtagcgggcctcagctgcctcgtcaacctgccgggtgaggtgctggagtacatcctgtgctgcggctcgctgacggccgccgacatcggccgtgtctccagcacctgccggcggctgcgcgagctgtgccagagcagcgggaaggtgtggaaggagcagttccgggtgaggtggccttcccttatgaaacactacagncccaccgactacgtcaattggttggaagagtataaagttcggnaaaaagctgngttagaagcgcggaagattgtagcctcgttctcaaagaggttcttttcagagcacgttccttgtaatggcttcagtgacattgagaaccttgaaggaccaganattttttttgaggatgaactggtgtgtatcctaaatatggaaggaagaaaagctttgacctgtaaatactacgcanaaaaaattctttactacctgcggcaacagaagatcttaantaatcttaatgcctttcttcancagcca

SEQ ID NO: 3746 - DNA, 840 bp, Homo sapiens
  misc_feature (789)..(789): "n" may be a, t, c, g, other or unknown
  misc_feature (801)..(801): "n" may be a, t, c, g, other or unknown
  misc_feature (813)..(813): "n" may be a, t, c, g, other or unknown
agccgcgcgacgccgccgccttagaacgcctttccagtactgctagcagcagcccgaccacgcgttaccgcacgctcgcgcctttcccttgacacggcggacgccggaggattggggcggcaatttgtcttttccttttttattaaaattatttttcctgcctgttgttggatttggggaaattttttgtttgttttttatgatttgtatttgactgagagaaacccactgaagacgtctgcgtgagaatagagaccaccgaggccgactcgcgggccgctgcacccaccgccaaggacaaaaggagcccagcgctactagctgcacccgattcctcccagtgcttagcatgaagaaggccgaaatgggacgattcagtatttccccggatgaagacagcagcagctacagttccaacagcgacttcaactactcctaccccaccaagcaagctgctctgaaaagccattatgcagatgtagatcctgaaaaccagaactttttacttgaatcgaatttggggaagaagaagtatgaaacagaatttaattctcttgacatttgtgtcaatattttccctgtattctgttcatctccttttgaagactgccaatgaaggagggtctttattatatgaacaattgggatataaggcatttggattagttggaaagcttgcagcatctggatcaattacaatgcagaatattggagctatgtcaagctacctcttatagtgaaatatgagttgcctttgggtgatccaggcattaacgaacattgaagatnaaactggattgnggtatctgaacnggaactattgggtctgtggggcattgg

SEQ ID NO: 3747 - DNA, 806 bp, Homo sapiens
  misc_feature (22)..(22): "n" may be a, t, c, g, other or unknown
  misc_feature (167)..(167): "n" may be a, t, c, g, other or unknown
  misc_feature (588)..(588): "n" may be a, t, c, g, other or unknown
  misc_feature (769)..(769): "n" may be a, t, c, g, other or unknown
  misc_feature (779)..(779): "n" may be a, t, c, g, other or unknown
  misc_feature (787)..(787): "n" may be a, t, c, g, other or unknown
gctgacgggtttgaaatggctncgatgttagccgggacccgactcagatcgatgctatagaagacaaacaaggaaaggttttttttccttttgcatcatggctcaatttggaggacagaagaatccgccatgggctactcagtttacagccactgcagtatcacagncagctgcactgggtgttcaacagccatcactccttggagcatctcctaccatttatacacagcaaactgcattggcagcagcaggccttaccacacaaactccagcaaactatcagttaacacaaactgctgcattgcagcaacaagccgcagctgcagcagctgcattacaacagcaatattcacaacctcagcaggccctgtatagtgtgcaacaacagttacagcaaccccagcaaaccctcttaacacagccagctgttgcactgcctacaagccttagcctgtctactcctcagccaacagcacaaataactgtatcatatccaacaccaaggtccagtcaacagcaaacccagcctcagaagcagcgtgttttcacaggggtggttacaaaactacatgatacatttggatttgnggatgaagatgtattctttcagcttagtgctgtcaaagggaaaaccccccaagtaggtgacagagtattggttgaaagctcttataatcctaatatgccttttaaatggaatgcacagagaattcaaacactccaaatcagaatcagtcggaaacccagccattactgaagactcttctgntggactttanccaattgnaccacagacaacaatttgg

SEQ ID NO: 3748 - DNA, 727 bp, Homo sapiens
  misc_feature (578)..(578): "n" may be a, t, c, g, other or unknown
  misc_feature (598)..(598): "n" may be a, t, c, g, other or unknown
  misc_feature (660)..(660): "n" may be a, t, c, g, other or unknown
  misc_feature (713)..(713): "n" may be a, t, c, g, other or unknown
  misc_feature (725)..(725): "n" may be a, t, c, g, other or unknown
atcactcaagatggctgcccccatcaagatgaccggggtgtgccggggggaaaggggcagcatgatggtctgagatggtgtagcgtcggaccatgtggcagtttctgaggctggggagccggataatggggggtggggcccgttggggggtaaaggggcaatagcgtcctttcacaggctaacctcggctcttcccagtcctctggactaaaatggggaacacattgggcctggcaccaatggggactttgccccgccggagcccccgccgagaggaacccctgcccaaccctgggagcttcgatgagctgcaccgtctatgcaaagatgtattcccagcacagatggagggagtgaagctcgttgtcaacaaggttctgagcagccatttccaggtggcgcacactatacacatgagtgccctgggcttgccgggatatcacctccatgcggcctatgcaggggattggcagctcagtcccactgaggtgttccccactgtggtaggggatatggacagcagtggcagcctgaacgcccaggtcttgctcctcttggcagaacggctccgagctaangctgtcttcagacgcagcangccaagttcctgacatggcagtttgatggcgagtatcggggagatgactacacagccacttntgaccctaggaaatcctgacctgattggggaatccgtgatcatgggttgcttnactttcctgganaa

SEQ ID NO: 3749 - DNA, 798 bp, Homo sapiens
  misc_feature (743)..(743): "n" may be a, t, c, g, other or unknown
  misc_feature (766)..(766): "n" may be a, t, c, g, other or unknown
  misc_feature (791)..(791): "n" may be a, t, c, g, other or unknown
aaggaaattcaggaagcaaaagctcccagtccttccataaaccggcaaaccagcattgaaacggatagagtgtctaaggagttcatagaatttctcaagaccttccacaagacaggccaagaaatctataaacagaccaagctgtttttggaaggaatgcattacaaaagggatctaagcattgaagaacagtcagagtgtgctcaggatttctaccacaatgtggccgaaaggatgcaaactcgtgggaaagtgcctccagaaagagtcgagaagataatggatcagattgaaaagtacatcatgactcgtctctataaatatgtattctgtccagaaactactgatgatgagaagaaagatcttgccattcaaaagagaatcagagccctgcgctgggttacgcctcagatgctgtgtgtccctgttaatgaagacatcccagaagtgtctgatatggtggtgaaggcgatcacagatatcattgagatggattccaagcgtgtgcctcgagacaagctggcctgcatcaccaagtgcagcaagcacatcttcaatgccatcaagatcaccaagaatgagcccggcgtcagcggatgacttcctccccaccctcatctacattggtttgaagggcaaccccccacgccttcagtctaatatccagtatatcacgcgcttctgcaatccaagcccgactgatgactggagaggatggctactatttcaccaatctgggctgnctggggctttcattgggaagctngacgcccagtcttttgaatcttaantccggga

SEQ ID NO: 3750 - DNA, 869 bp, Homo sapiens
  misc_feature (758)..(758): "n" may be a, t, c, g, other or unknown
  misc_feature (804)..(804): "n" may be a, t, c, g, other or unknown
  misc_feature (819)..(819): "n" may be a, t, c, g, other or unknown
  misc_feature (862)..(862): "n" may be a, t, c, g, other or unknown
aacttcatgccctctttactcttgcccaagctgaggattctgtccttgttatagtgaataaagaaaaaccagatatatttcagctggtttcagtgaaactgccaaaatcctcaagccaggaagtagaagccaaggagctgtcctttgttttggattacataaaccagtcacccaagtgcattgcctttggaaacgagggagtatatgttgctgcagtacgggaattttacttgtctgtttattttttcaaaaagaaaacaacatcaaggtttactttatcatcatcaagaaataagaagcatgctaaaaacaattttacatgtgtagcatgtcacccaacggaagactgcatcgcatctggtcacatggatggcaaaattcgtctttggaggaatttttatgatgataagaaatatacgtacacatgtttacattggcaccatgatatggttatggatttggctttttcagtgacaggcaccagtctgctgagtggcggtcgtgaatctgtacttgtagagtggcgcgatgcaatagagaagaataaggagtttctcccgcgtttaggagctactattgaacatatctcagtctcgcctgcaggagatttattctgcacttctcactctgataataagataataattattcaccgaaaccttgaagcatccgcagtaattcaaggcctagtgaaagataggagtatcttcactggtttgatgattgatccaagaactaaagctttggttttgaatggnaaacctggccacctgcagtttatctcttcagagtgataacagtatncatttagatttatcngcaggaatttttaatgatatggctgatcaaattgactacaagntgatttg

SEQ ID NO: 3751 - DNA, 803 bp, Homo sapiens
  misc_feature (720)..(720): "n" may be a, t, c, g, other or unknown
  misc_feature (723)..(723): "n" may be a, t, c, g, other or unknown
  misc_feature (783)..(783): "n" may be a, t, c, g, other or unknown
ttttgcttcgatgtgctctactgtcacctgtatggataccagcagccccggaccccccgattcaccaacgagccctacccactgtttgtaacatggaagattggtcgagacaaaagattacgtggatgcatgggtactttttctgccatgaatttgcattcaggactcagggagtacacacttaccagtgcccttaaagatagccgttttcccccaatgacaagggatgagctgccacggcttttctgctcagtgtctctgctcactaactttgaagatgtctgtgattatttggactgggaggtgggtgtacatggcattagaatagaattcatcaatgaaaaaggatcaaaacgcaccgccacctacctaccggaggttgcaaaggagcaaggatgggaccatatacagaccatagactccttattgaggaaaggaggatacaaagctccgattactaatgaattcaggaaaaccataaaactgaccaggtatcgtagtgaaaagatgaccctgagctatgctgaataccttgctcatcgccagcatcatcatttccaaaatggcattgggcatccccttccgccatacaaccattattcctgacactgagccgcacaaccagtcactgggcctctctgcagacctcttccaggagaccctacaccttcttggtctagctatctcttttactgtccattttatgatgatagtttccgntgncatggtgaagcttcgacattggcaactaagatcatcatggtaacgggtagaaaaatggcnttttggttaagaaccctggt

SEQ ID NO: 3752 - DNA, 837 bp, Homo sapiens
  misc_feature (777)..(777): "n" may be a, t, c, g, other or unknown
  misc_feature (792)..(792): "n" may be a, t, c, g, other or unknown
  misc_feature (822)..(822): "n" may be a, t, c, g, other or unknown
agagccgcgagctggaccagccgtgcaaatctctagaagatgacggtgttctttaaaacgcttcgaaatcactggaagaaaactacagctgggctctgcctgctgacctggggaggccattggctctatggaaaacactgtgataacctcctaaggagagcagcctgtcaagaagctcaggtgtttggcaatcaactcattcctcccaatgcacaagtgaagaaggccactgtttttctcaatcctgcagcttgcaaaggaaaagccaggactctatttgaaaaaaatgctgccccgattttacatttatctggcatggatgtgactattgttaagacagattatgagggacaagccaagaaactcctggaactgatggaaaacacggatgtgatcattgttgcaggaggagatgggacactgcaggaggttgttactggtgttcttcgacgaacagatgaggctaccttcagtaagattcccattggatttatcccactgggagagaccagtagtttgagtcataccctctttgccgaaagtggaaacaaagtccaacatattactgatgccacacttgccattgtgaaaggagagacagttccacttgatgtcttgcagatcaagggtgaaaaggaacagcctgtatttgcaatgaccggccttcgatggggatctttcagagatgctggcgtcaaagttagcaagtctgggatcttgggcctctaaaaatcaaagcagcccactttttcagcactctttaaggagtggcctcanacttcatcaagcctntatctcatccccgggaccttccgaagagancttccaatgaacccc

SEQ ID NO: 3753 - DNA, 778 bp, Homo sapiens
  misc_feature (575)..(575): "n" may be a, t, c, g, other or unknown
  misc_feature (590)..(590): "n" may be a, t, c, g, other or unknown
  misc_feature (722)..(722): "n" may be a, t, c, g, other or unknown
  misc_feature (737)..(737): "n" may be a, t, c, g, other or unknown
  misc_feature (775)..(775): "n" may be a, t, c, g, other or unknown
agagctgaacctgcatcccggacctgcggcgaccgtcgtacaccatgggcctccacctccgcccctaccgtgtggggctgctcccggatggcctcctgttcctcttgctgctgctaatgctgctcgcggacccagcgctcccggccggacgtcaccccccagtggtgctggtccctggtgatttgggtaaccaactggaagccaagctggacaagccgacagtggtgcactacctctgctccaagaagaccgaaagctacttcacaatctggctgaacctggaactgctgctgcctgtcatcattgactgctggattgacaatatcaggctggtttacaacaaaacatccagggccacccagtttcctgatggtgtggatgtacgtgtccctggctttgggaagaccttctcactggagttcctggaccccagcaaaagcagcgtgggttcctatttccacaccatggtggagagccttgtgggctggggctacacacggggtgaggatgtccgaggggctccctatgactggcgccgagccccaaatgaaaacgggccctacttcctggccctncgcgagatgatcgangagatgtaccagctgtatgggggccccgtggtgctggttgccacagtatgggcaacatgtacacgctctactttctgcacggcagccgaagcctggaaggacaagtatatccggccttcgtgtactggtgcncctggggggcgtggncaaaacctggcgtctgcttcagagaaacaacggtccantat

SEQ ID NO: 3754 - DNA, 808 bp, Homo sapiens
  misc_feature (731)..(731): "n" may be a, t, c, g, other or unknown
  misc_feature (745)..(745): "n" may be a, t, c, g, other or unknown
  misc_feature (795)..(795): "n" may be a, t, c, g, other or unknown
gaaaatgctaaacgactcaataaactaagagatgagcttgttaaactcaaatcctttgcactcatgctggtggatgaaagacaaatgcacattgaacaacttggcctgcaaagccagaaagtacaggatcttactcagaagctgagggaagaagaagagaagctcaaagccattacttccaaatccaaagaagacagacagaaattgctcaagttagaagtggactttgaacacaaggcttcgaggttttctcaagagcatgaagagatgaacgctaaactggctaatcaagagtctcacaataggcaacttagactcaagctggttggcttaacccaaagaatcgaggagctagaagagaccaacaaaaatctgcagaaggcagaggaagaacttcaagaattaagagataaaattgccaaaggagaatgtggaaactctagcctcatggcagaagtggaaaatcttcgaaagcgtgtgcttgaaatggaaggtaaagatgaggagatcactaaaactgaatcccagtgtagggaattgaggaagaagctgcaagaggaagaacaccatagtaaggagctcagacttgaagttgagaagctacagaagagaatgtctgaactagagaaattggaagaagcatttagcaagagtaaatctgagtgcacccagctacatttaaatctggagaaagaaaagaacttaccaaagacctgctaaatgaattggangtgggcaagaatcnagttaaagaattggaatggtctgaagtagaatggaaaaggctgaattaanctaaaagatgatc

SEQ ID NO: 3755 - DNA, 797 bp, Homo sapiens
  misc_feature (556)..(556): "n" may be a, t, c, g, other or unknown
  misc_feature (713)..(713): "n" may be a, t, c, g, other or unknown
  misc_feature (774)..(774): "n" may be a, t, c, g, other or unknown
  misc_feature (778)..(778): "n" may be a, t, c, g, other or unknown
ttcggaactcgccaggggcgccgccggcggcggagggagcgtgactgcgctgcgcagggcgctaggaggcattgtcgccgctcaggcccttttgtgagaagcagaccagcctgggggctggcggcaggacacctgtgtctgcatgctgaagaagatgggtgaggccgtggccagagtagcaaggaaggtcaacgagacggtggagagcggctctgacactctggagctccacctggaggggaacttcctacaccgcctccccagcgaggtcagtgccctgcagcacctcaaggccattgacctgtcccggaaccagttccaggacttccctgagcagcttaccgccctgccggcgctggagaccatcaacctggaggagaacgagatcgtagatgtgcccgtggagaagctggccgccatgccagccttgcgcagcatcaacctccgcttcaacccactcaacgccgaggtgcgcgtgatcgccccgccgctcatcaagtttgacatgctcatgtctccggaaggcgcaagagcccccctaccttacgccaccctnctcatgcccacccagcaagggacagaggccacaggcctggaaccctggaagggagggaggcccatgggaggccaagcctgggggctgggggcgggtggccgagcaacacgtggtgggtggggtgcaactggtctggatagatagcttacagcagtantgggctcttggaatgcccaagggaaaagcaaggtggggccttgaacctggacttgggactnacanttgttgggcaaactcaggc

SEQ ID NO: 3756 - DNA, 850 bp, Homo sapiens
  misc_feature (811)..(811): "n" may be a, t, c, g, other or unknown
  misc_feature (815)..(815): "n" may be a, t, c, g, other or unknown
  misc_feature (821)..(821): "n" may be a, t, c, g, other or unknown
taaatgtccactttgctccccggattgtagttgaccccaaacccacaaccacagacattggctctgatgtgacccttacctgtgtctgggttgggaatccccccctcactctcacctggaccaaaaaggactcaaatatggtcctgagtaacagcaaccagctgctgctgaagtcggtgactcaggcagacgctggcacctacacctgccgggccatcgtgcctcgaatcggagtggctgagcgggaggtgccgctctatgtgaacgggccccccatcatctccagtgaggcagtgcagtatgctgtgaggggtgacggtggcaaggtggagtgtttcattgggagcacaccacccccagaccgcatagcatgggcctggaaggagaacttcttggaggtggggaccctggaacgctatacagtggagaggaccaactcaggcagtggggtgctatccacgctcaccatcaacaatgtcatggaggccgactttcagactcactacaactgcaccgcctggaacagcttcgggccaggcacagccatcatccagctggaagagcgagaggtgttacctgtgggcatcatagctggggccaccatcggcgcgagcatcctgctcatcttcttcttcatcgccttggtattcttcctctaccggcgccgcaaaggcagtcgcaaagacgtgaccctgaggaagctggatatcaaggtggagacagtgaacccgagagccacttacgatgcattcttgaccgggaggatgacaccggcagccgtcttcacaagcaaccccgggtcattgaaggncatnttactnggtcgtttaaaggatgatggtgggatctg

SEQ ID NO: 3757 - DNA, 894 bp, Homo sapiens
  misc_feature (753)..(753): "n" may be a, t, c, g, other or unknown
  misc_feature (820)..(820): "n" may be a, t, c, g, other or unknown
  misc_feature (857)..(857): "n" may be a, t, c, g, other or unknown
  misc_feature (879)..(879): "n" may be a, t, c, g, other or unknown
aggagatcctggggccttacctactagcggaatcgactgaagagacgcctgccagtgcgggaggtaggaagctcgatccccaaagaaaagagcgagtgggcaggcagctgcgagacagaaccggagtgtgcagggtccctagaggccggttcctggtctgtgctgctctcctggaagccatggtacaggcagagctcagggcgatccccaggtgagggcagcggctctgcctgggattccaccgcagtacaaccgggtagatgcggggtggagaagaaaggatgttgcctgcactgctcgccaatagcaccctgagaggctacatttgcagaagcagcagcagcagaagacacagcgccggtccaggaggcggctcgagctgttcgtaaagtcgcccgacagctttttctccgtagtatgcgagttgacaaaacagccagagaacagggctccccattacaatcttttcgagatcttttcccttgctaaccggatctgatttgtgcgaaaacatgccttgcacttgtacctggaggaactggagacagtggattcgacctttagtagcggtcatctacctggtgtcaatagtggttgcggttcccctatgcgtgtgggaattacagaaactggaggttggaatacacaccaaggcttggtttattgctggaatctttttgctggtgactattcctatatcactgtgggtgatattgcaacacttaagtgcattatacacaaccttgaactacnaaaaccaataattaaggattctttggatggtacctatttacaggtttaaatagttggatacttttgnaatatcccggaattgcaatatatgtggatccctgcanaaaatgcttttgaagcttatgnaatttacaacttttt

SEQ ID NO: 3758 - DNA, 736 bp, Homo sapiens
  misc_feature (618)..(618): "n" may be a, t, c, g, other or unknown
  misc_feature (643)..(643): "n" may be a, t, c, g, other or unknown
  misc_feature (676)..(676): "n" may be a, t, c, g, other or unknown
  misc_feature (732)..(732): "n" may be a, t, c, g, other or unknown
gcgaagctgagaggcctatggatgaggaggacgcggcggccccggtttgttctcatgaacaagatggatgacctcaacctgcactaccggtttctgaattggcgccggcggatccgggagattcgagaggtccgagctttccgatatcaggagaggttcaaacatatccttgtagatggagatactttaagttatcatggaaactctggtgaagttggctgctacgtggcttctcgacccctgaccaaggacagcaattattttgaggtgtctattgtggacagtggagtccggggcaccattgctgtggggctggtccctcagtactacagcttggatcaccagcctggctggttgcctgactctgtagcctaccatgctgatgatggcaagctgtacaatggccgagccaagggccgccagtttgggtcaaagtgcaactccggggaccggattggctgtggcattgagcctgtgtcctttgatgtgcagaccgcccagatcttcttcaccaaaaatgggaagcgggtgggctctaccatcatgcccatgtccccagatggactgttcccagcagtgggcatgcactccctgggtgaagaggtgcggctgcacctnaacgctgaactgggccgtgaggacnacagcgtcatgatggtggacagttaccaggatnaatggggcccggctacatgatgtcagaatctgtgggactcttgctggaatacttanggaa

SEQ ID NO: 3759 - DNA, 767 bp, Homo sapiens
  misc_feature (713)..(713): "n" may be a, t, c, g, other or unknown
  misc_feature (752)..(752): "n" may be a, t, c, g, other or unknown
  misc_feature (765)..(765): "n" may be a, t, c, g, other or unknown
actgccggcctgcgcggtactcactgccggcctccgcggtacccactgccggcctccgcgctacccggccgcagcgcgcgagtcacatggaagctcctgaggagcccgcgccagtgcgcggaggcccggaggccacccttgaggtccgtgggtcgcgctgcttgcggctgtccgccttccgagaagagctgcgggcgctcttggtcctggctggccccgcgttcttggttcagctgatggtgttcctgatcagcttcataagctccgtgttctgtggccacctgggcaagctggagctggatgcagtcacgctggcaatcgcggttatcaatgtcactggtgtctcagtgggattcggcttatcttctgcctgtgacaccctcatctcccagacgtacgggagccagaacctgaagcacgtgggcgtgatcctgcagcggagtgcgctcgtcctgctcctctgctgcttcccctgctgggcgctctttctcaacacccagcacatcctgctgctcttcaggcaggacccagatgtgtccaggcttacccagacctatgtcacgatcttcattccagctcttcctgcaacctttctttatatgttacaagttaaatatttgctcaaccagggaattgtactgccccagatcgtaactggagttgcagccaacttgtcaatgccctcgcaactatctgttctcatcaactgcatnttggggtgataggctctgactggcaaacttgatttccantacaccctggctnta

SEQ ID NO: 3760 - DNA, 872 bp, Homo sapiens
  misc_feature (715)..(715): "n" may be a, t, c, g, other or unknown
  misc_feature (806)..(806): "n" may be a, t, c, g, other or unknown
  misc_feature (817)..(817): "n" may be a, t, c, g, other or unknown
  misc_feature (825)..(825): "n" may be a, t, c, g, other or unknown
aacctcagtcaggaccgcctgcaccgcagtccggggatcgggtcgaggggagaagaaaaaggggtgctcgggagcagcccccggctacctcccctggaggcacagagggcgggggccttggcgaatggctttcttgctggccacttgcggaggtttggattcaggatttgttcctagtgtccaagattttgataagaaacttacagaagctgatgcttacctacaaatcttgattgaacaattaaagctttttgatgacaagcttcaaaactgcaaagaagatgaacagagaaagaaaattgaaactctcaaagagacaacaaatagcatggtagaatcaattaaacactgcattgtgttgctgcagattgccaaaagtactattaatcccgtagatgcaatatatcaacctagtcctttggaacctgtgatcagcacaatgccttcccagactgtgttacctccagaacctgttcagttgtgtaagtcagagcagcgtccatcttccctaccagttggacctgtgttggctaccttgggacatcatcagactcctacaccaaatagtacaggcagtggccattcaccaccgagtagcagtctcacttctccaagccacgtgaacttgtctccaaatacagtcccagagttctcttactccagcagtgaagatgaattttatgatgctgatgaattccatcaaaagtggctcatncccaaagcgcttaatagattcttctggatctgcctcaatccttgacacacagcagcttcgggaaatagtctaaaacgcccaaaatcccccnggaatcacttnaattcttncttgggccaatgggaaccaagtggatgcctgaccctggttggaattc

SEQ ID NO: 3761 - DNA, 826 bp, Homo sapiens
  misc_feature (779)..(779): "n" may be a, t, c, g, other or unknown
  misc_feature (812)..(812): "n" may be a, t, c, g, other or unknown
  misc_feature (826)..(826): "n" may be a, t, c, g, other or unknown
tactaaagaatgagaaagatgaggtgcaaaaattacaaaatatcattgcaagtcgagctactcagtataatcatgatatgaagagaaaagagcgtgaatataataaactgaaggaacgtctacatcaacttgttatgaacaagaaagataagaaaatagctatggacattttgaattatgtcgggagagctgatggaaaaagaggctcctggaggactggtaaaactgaagccaggaatgaagatgaaatgtataaaattctcttgaatgattatgaatatcgtcagaaacaaatcctaatggaaaatgcagaacttaagaaggttcttcaacaaatgaaaaaggaaatgatttctcttctttctccccaaaagaagaaacctagagaaagagtagatgatagtacaggaactgttatttccgatgttgaagaagatgccggggaactaagcagagagagtatgtgggacctttcctgtgaaactgtgagagagcagcttacaaacagcatcagaaaacagtggagaattttgaaaagtcatgtagaaaagcttgataaccaagtttcaaaggtacacctggaaggttttaatgatgaagatgtaatctcacgacaagaccatgaacaagaaactgaaaaactcgagttagaaattcagcagtgtaaagaaatgattaaaactcagcaacagcttttacagcagcagctcgctactgcatatgatgatgatccacttcctattacgagactggtatttggttggaagaaaaggaccgtntcaaagaaaaatgggccctttttaaagaacccnaaaaagaaattttn

SEQ ID NO: 3762 - DNA, 818 bp, Homo sapiens
  misc_feature (738)..(738): "n" may be a, t, c, g, other or unknown
  misc_feature (795)..(795): "n" may be a, t, c, g, other or unknown
  misc_feature (816)..(816): "n" may be a, t, c, g, other or unknown
gcgcgagggaggcgagccggagcccgagcactagcagcagccggagtcggcggaaagcacccgggcgcagccggagccggtgccgcagctgcgatggccgtggccgtggggagaccgtctaatgaagagcttcgaaacttgtctttgtctggccatgtgggatttgacagcctccctgaccagctggtcaacaagtctacttctcaaggattctgtttcaacatcctttgtgttggtgagacaggcattggcaaatccacgttaatggacactttgttcaacaccaaatttgaaagtgacccagctactcacaatgaaccaggtgttcggttaaaagccagaagttatgagcttcaggaaagcaatgtacggctgaagttaaccattgttgacaccgtgggatttggagaccagataaataaagatgacagctataagccgatagtagaatatattgatgcccagttcgaggcctacctgcaagaggaattgaagattaaacgttctctcttcaactaccatgacacgaggatccatgcctgcctctactttattgcccctactggacattcactaaagtccctggatctggtcaccatgaaaaagctggacagtaaggtgaacatcattccaataattgcaaaagctgacaccattgccaagaatgaactgcacaaattcaagagtaaagatcatgagtgaactggtcagcaatggggtccagatatatcaagtttnccactgatgaagaaaccggtggcagaagattaacgcaacaattgatggtccatcttnccattttgcaatgggtggcanca

SEQ ID NO: 3763 - DNA, 839 bp, Homo sapiens
  misc_feature (567)..(567): "n" may be a, t, c, g, other or unknown
  misc_feature (719)..(719): "n" may be a, t, c, g, other or unknown
  misc_feature (755)..(755): "n" may be a, t, c, g, other or unknown
  misc_feature (827)..(828): "n" may be a, t, c, g, other or unknown
tggagagaagccacatgagtgtaaggaatgtggaaaggcctttcgtcagttttcccaccttgtgggtcataaaagaattcatactggagaaaaaccctatgaatgcaaggaatgcgggaagggctttacatgtaggtatcaacttaccatgcatcagagaatttattcaggggagaaacactatgaatgtaaagaaaatggggaggcttttagtagtggccatcaacttactgcacctcatacatttgaaagtgttgagaaaccttataagtgtgaggaatgtgggaaagcctttagtgtgcatggacgacttactcgacatcagggtattcatagtggtaagaaaccctatgaatgtaacaaatgtgggaagtcctttaggctcaattcatcccttaaaatacatcaaaatattcataccggtgagaaaccctacaaatgtaaggaatgtgggaaggccttcagtcagcgtgcacaccttgcccatcataacagaattcatactggttacaaaccctttgaatgtaaagaatgtgggaagtcctttcgttgtgcctcatatcttgntatacatgagagaattcatacaggagagaaaccctatgtatgtcaagagtgtgggaagggttttagttatagccataaactcactatcatcgcagagttcatactggtgagaaaccttatgaatgtaaggaatgtgggaaggcctttaatgnatctggacacttactcagcatctgagtattcacagnggtaagaaacccttttgaatgccacaaatgccgggaagtctttaaggtcatttctggccttaaggcccatcnnaatattcatag

SEQ ID NO: 3764 - DNA, 722 bp, Homo sapiens
  misc_feature (635)..(635): "n" may be a, t, c, g, other or unknown
  misc_feature (659)..(659): "n" may be a, t, c, g, other or unknown
  misc_feature (714)..(714): "n" may be a, t, c, g, other or unknown
aaggcgcgagcctgcgttttccggccagaggacatgatgcagggggaggcacaccctagtgcttcccttattgacagaaccatcaagatgagaaaagaaacagaggctaggaaagtggtcttagcctggggactcctaaatgtatctatggctggaatgatatatactgaaatgactggaaaattgattagttcatactacaatgtgacatactggcccctctggtatattgagcttgcccttgcatctctcttcagccttaatgccttatttgatttttggagatatttcaaatatactgtggcaccaacaagtctggttgttagtcctggacagcaaacacttttagggttgaaaacagctgttgtacagactacgcctccacatgatctggcagcaacccaaatccctcccgctccaccttccccttcaattcagggtcagagtgtgttgagttatagcccttctcgttcgcccagtaccagtcccaagttcaccaccagctgtatgactggttacagccctcagctgcaaggtctgtcctcaggtggcagtggttcttatagccctggagtgacctactcgcccgtcagtggttataataagttggcgagctttacccctctcttcttctncgtaccctaccactgttggaccantggagagcagtggattgagatctcgctaccggtcttcacctaccgtctacaactnacctactg

SEQ ID NO: 3765 - DNA, 746 bp, Homo sapiens
  misc_feature (658)..(658): "n" may be a, t, c, g, other or unknown
  misc_feature (693)..(693): "n" may be a, t, c, g, other or unknown
  misc_feature (732)..(732): "n" may be a, t, c, g, other or unknown
ataaggctacggatgggcgggacggagcagcccaccgcaaagtggcggtttacttgaggcggttaccttagtactccgagtagactgagtctgtggcgagctgcgggccgattcctggccagtgccatctcagccggagcaggcctcggggcctcagaagcaggcttttatctggcccgaggctcccagccgttcagcgcgtcttcccataacctataccgattattgggactctcggctgcagacacaggagtcacagatgctgggaagtatggcccgaaagaaacctcgaaatacctcaaggttgcccctggctttaaaccccctgaagagcaaggacgtgttggcagtgctggctgagaggaacgaggctatagtaccagttggggcatgggtggaacctgcctcaccaggtagttcggaaatcccagcatatacatcagcatatttaattgaagaagaactaaaggaacagctaagaaaaaaacaagaagctttgaaacattttcagaaacaagttaaataccgagtaaatcaacaaattaggttgagaaaaaagcaacagcttcagaagtcttatgaaagagcacaaaaagaagctccatagccatgcagtcttcagcaacacacttaactttcaaaaggacaagtggttttncaaacaatttgaatggtgctattggaaagttctanggtaccttctttccttgatgcctgggggatggaatagangatgaagaagaatc

SEQ ID NO: 3766 - DNA, 840 bp, Homo sapiens
  misc_feature (699)..(699): "n" may be a, t, c, g, other or unknown
  misc_feature (777)..(777): "n" may be a, t, c, g, other or unknown
  misc_feature (799)..(799): "n" may be a, t, c, g, other or unknown
  misc_feature (805)..(805): "n" may be a, t, c, g, other or unknown
attgaggaacatggcgttgctggtgcgagtccttaggaaccagactagcatttctcagtgggttccagtatgcagccgattgatacctgtgtctcctacccaaggacagggggacagggctctgtctcgcacttcccagtggccccagatgagccagtcccaagcatgtggtggatcagaacagattcctggaatagacatacagctgaataggaagtatcacaccacacgtaagctttctactaccaaagattccccacagcctgttgaggagaaggttggtgctttcacaaagataatagaagccatgggattcacgggacctttgaaatacagtaaatggaagattaagattgcggccctgcgcatgtatactagctgtgtggagaaaactgacttcgaggaattccttctaaggtgtcagatgcctgatacattcaattcatggtttcttataaccctactccacgtctggatgtgtctagtccgaatgaagcaggaaggccggagtgggaagtacatgtgtcgtatcatagttcattttatgtgggaggatgttcagcagcgcggcagagtcatgggggttaatccctatatcctgaagaagaacatgatcctcatgacaaatcatttctatgcagcgatcttgggatatgatgaggggatcctttcagatgatcatgggctgccgctgccctntggagaaccttcttcaaccggaaatgtgaagaccctcgacatcttgaattgctggtagagtatgtgaggaaacagatncagtacctggactccatgaacnggggangatctggttctgacaggggaagtgaactgcgccct

SEQ ID NO: 3767 - DNA, 811 bp, Homo sapiens
  misc_feature (780)..(780): "n" may be a, t, c, g, other or unknown
  misc_feature (790)..(790): "n" may be a, t, c, g, other or unknown
  misc_feature (808)..(808): "n" may be a, t, c, g, other or unknown
acggcgcgcgcgcaccccttccgcgcagccccctgacctgcagcctccggacctcgctgcagcgcggacccggcccgcccgcccgaatgagtcagctgaggctgctgccgtcccgtcttggggtacaggctgcgaggctcctggctgcacatgacgtcccggtgtttggctggcgcagcaggtcctccgggccaccggccaccttcccaagcagcaaaggtggaggcggctccagttacatggaggagatgtacttcgcctggttggaaaacccccagagtgtccacaagtcctgggacagcttcttcagggaagccagcgaggaagccttttctggctctgctcagccacggcccccttctgttgtccatgagggcaggtctgcagtctcaagtcggaccaagaccagcaaattggtggaggaccacctggctgtacagtccctgatccgggcctaccagatccggggtcaccatgtggcccagctggaccccctgggcattctggatgcagacctggactcctttgtgccctcagacttgatcacaaccattgataaactggccttctatgaccttcaggaggctgaccttgataaggagttcagctgccgacaaccaccttcattgggggctctgaaaacaccctttctctgcgggagatcattcggcgcctggagaacacctactggcagcacattggcctggagttcatgttcatcaacgatgtggagcaatgccagtggatccggcagaagtttgagaccctggtgtgatgcanttctcaccangagaaacggacctgtggnccg

SEQ ID NO: 3768 - DNA, 857 bp, Homo sapiens
  misc_feature (813)..(813): "n" may be a, t, c, g, other or unknown
  misc_feature (820)..(820): "n" may be a, t, c, g, other or unknown
  misc_feature (835)..(835): "n" may be a, t, c, g, other or unknown
gcgccagcaggaagtgggagaagaggcgacccaaggcgggctggcgggctggcggcagtcgctacttgcctagtagcctcagccgctgtgggctcctggggagatggaggggccggggctgggctcgcagtgcaggaatcacagccatggcccccaccctccaggatttggtcgatatggcatctgtgcacatgaaaacaaagaacttgccaatgcaagagaagctcttcctcttatagaggactctagtaactgtgacattgtcaaagctactcaatacggaatttttgaacgatgtaaagagttggtagaagcaggatatgatgtcaggcaaccagataaagaaaatgtgtcgcttcttcattgggctgctattaacaacagactggatcttgtaaggttttatatttcaaaaggtgctgttgtagatcagttgggtggagatttaaattcaactcctcttcactgggccatccgacaaggacatttacctatggtcatattattactccagcatggtgcagaccccactcttattgatggagagggattcagcagcatccacctggcagtattgtttcaacacatgcctattatagcatatctcatctcaaagggacagagtgtgaatatgacagatgtaaatgggcagacacctctcatgttatcagctcacaaagtaattgggccagaccaactggatttcttttaaaggttaatccttctctcaatgtgggtgataaaatcaccaaaacactccacttcactgggcagttgcagcaggaaatgttaatgcattgataagcttttggnaactggntctaccctggatatncagaatggtaaagggagaaaca

SEQ ID NO: 3769 - DNA, 873 bp, Homo sapiens
  misc_feature (762)..(762): "n" may be a, t, c, g, other or unknown
  misc_feature (780)..(780): "n" may be a, t, c, g, other or unknown
  misc_feature (842)..(842): "n" may be a, t, c, g, other or unknown
  misc_feature (870)..(870): "n" may be a, t, c, g, other or unknown
aagtgcacggaggagttccgggggccaggcggccgccgcgagtctggtatcctgagcttcgtgagttgagcgctgctgctccgcggtggagtcaccgcaccgctcccgggatcatggtgttctacttcaccagcagcagcgttaattcatctgcctacactatttacatgggaaaagataaatatgaaaatgaagatctgatcaagcatggctggcctgaagatatctgggagagaatatagaagacatcccaaaggaagtgctgatggactgtgcccaccttgtgaaggccaatagcattcaaggctgcaagatgaacaacgttaatgtggtatatacgccgtggtctaacctgaagaaaacagctgacatggatgtggggcagataggctttcacaggcagaaggatgtaaaaattgtgacagtggagaagaaagtaaatgagatcctgaaccgattagaaaagaccaaagtcgagcggttcccagacctagcagcagagaaagaatgcagagatcgtgaagagaggaatgagaaaaaagcccaaattcaggaaatgaaaaagagagaaaaagaagaaatgaagaagaagagggaaatggatgaacttaggagctattcatcactaatgaaagttgaaaatatgtcttcaaatcaggatggcaatgattcagatgaattcatgtaaaaggagaaaaggagaaaaggacctttgaaagatgtgaatgtagagacaattgcagaccttttgggttcatctgngttctgaagtataaaatncaccaaaattctaccttcatcctacccagaaattattgattttcaagttttaaaaaaattgnaccttttttgcttgccggaaaaggatcngat

SEQ ID NO: 3770 - DNA, 790 bp, Homo sapiens
  misc_feature (651)..(651): "n" may be a, t, c, g, other or unknown
  misc_feature (756)..(756): "n" may be a, t, c, g, other or unknown
  misc_feature (780)..(780): "n" may be a, t, c, g, other or unknown
  misc_feature (790)..(790): "n" may be a, t, c, g, other or unknown
cttcgcgcacctcatggaatcccttctgcagcacctggatcgcttttccgagcttctggcggtctcaagcactacctacgtcagcacctgggaccccgccaccgtgcgccgggccttgcagtgggcgcgctacctgcgccacatccatcggcgctttggtcggcatggccccattcgcacggctctggagcggcggctgcacaaccagtggaggcaagagggcggctttgggcggggtccagttccgggattagcgaacttccaggccctcggtcactgtgacgtcctgctctctctgcgcctgctggagaaccgggccctcggggatgcagctcgttaccacctggtgcagcaactctttcccggcccgggcgtccgggacgccgatgaggagacactccaagagagcctggcccgccttgcccgccggcggtctgcggtgcacatgctgcgcttcaatggctatagagagaacccaaatctccaggaggactctctgatgaagacccaggcggagctgctgctggagcgtctgcaggaggtggggaaggccgaagcggagcgtcccgccaggtttctcagcagcctgtgggagcgcttgcctcagaacaacttcctgaaggtgatagcggtggcgctgttgcaacccgnctttgtctcgtcggccccaagaagagttggaacccggcattcacaaatcacctggaaaaggggagccaaagtgctaagtccacttggctttttggggaattcggnaagtctttgctggccttttgtcgngcccttccan

SEQ ID NO: 3771 - DNA, 753 bp, Homo sapiens
  misc_feature (666)..(666): "n" may be a, t, c, g, other or unknown
  misc_feature (676)..(676): "n" may be a, t, c, g, other or unknown
  misc_feature (688)..(688): "n" may be a, t, c, g, other or unknown
gaagaagaatttacaggttttaaccaagaagatctggaagaagaaaaaggtgaaacacaggtaaaagaagcagaagattcagattctgatgataacataaagagaggaaaacatatggactttctgtcagattttgagatgatgttgcagcgaaaaaagagcatgagtggcaagcgcagacggaaccgcgatggtggcacctttattagtgatgcagacgacgtcgtgagtgccatgatcgtcaagatgaatgaagctgctgaggaagacagacagttgaacaatcaaaaaaagccggcactgaaaaaattaactttactgcctgctgtagttatgcaccttaagaagcaggaccttaaagaaacattcattgacagtggtgtgatgtctgccatcaaagaatggctctcacctctaccagataggagtttgcctgcactcaagatccgggaggagctgctgaagatcctgcaagagctgcctagtgtgagccaggagaccctgaagcatagtgggattggacgagcagtgatgtatctctataaacaccccaaggagtcaaggtctaacaaggacatggcagggaaattaatcaatgagtggtctaggcctatatttggtcttacctcaaactacaaaggaatgacaagagaagaaagggagcanagagatctanaacagatgcctnaacgacgaagaatgaacagcactggtggtcaagacacccagaagagacctgggaaaaagtgcttg

SEQ ID NO: 3772 - DNA, 821 bp, Homo sapiens
  misc_feature (676)..(676): "n" may be a, t, c, g, other or unknown
  misc_feature (789)..(789): "n" may be a, t, c, g, other or unknown
  misc_feature (799)..(799): "n" may be a, t, c, g, other or unknown
  misc_feature (811)..(811): "n" may be a, t, c, g, other or unknown
ctgcatcagcacagaatttactccacggaagcacggaggtgaaaagggagtgccctttaggatccaggttgacacctttaagcagaatgaaaatggagaatacacagatcatctacactcagctagctgccaaatcaaagtttttaagcctaaaggtgcagacaggaaacaaaaaactgaccgagagaagatggagaagagaacagctcatgaaaaagaaaagtatcagccgtcctatgataccacaatcctcacagagtgttctccgtggcccgatgcctccacagcctatgtgaataacagcccttccccagcgcccactttcacctccccacagcagagcacttgcagtgtcccagacagcaattcttcttccccaaatcatcagggagatggagcttcacagacctctggtgaacaaattcagccttcagctacgatccaggaaacacagcaatggctgctcaaaaacagattctcttcctacacaagactgttctctaatctttcaggtgccgacttattaaaactgacaaaggaggatttagctcaaatttgtggtgcagccgatggaattcggctctataattcactgaagtcaaggtcggttagaccccgtttaaccatctatgtctgccgggagcagccaagcagcacagtgctgcaagggcagcancaagctgcaagcagtgcaagcgagaatggcagtggggcaccctatgtttatcatgcaatctacttgggaagaaatgattggctcagaagttggttcgaaaactttgcgctggnggttaatatnccttttccaccnaatttaatca

SEQ ID NO: 3773 - DNA, 846 bp, Homo sapiens
  misc_feature (703)..(703): "n" may be a, t, c, g, other or unknown
  misc_feature (753)..(753): "n" may be a, t, c, g, other or unknown
  misc_feature (845)..(845): "n" may be a, t, c, g, other or unknown
gctctacagcggaggtggctgtggcggtggcgctggtggctgcggcggcggcggcggcagcggcgctcgagcggttcctgtcagggtcagccggcgggccccctgggtggtccacctgcaaatcgcggagcggcgccccagggatcgatggcgatgaactataacgcgaaggatgaagtggacggtgggcccccgtgtgctccggggggcaccgcgaagactcggagaccggataacacggccttcaaacagcaacggctgccagcttggcagcccatccttacggctggcacggtgctacctattttcttcatcatcggtctcatcttcattcccatcggcattggcatttttgtcacctccaacaacatccgcgagatcgagattgattataccggaacagagccttccagtccctgtaataaatgtttatctccggatgtgacaccttgcttttgtaccattaacttcacactggaaaagtcatttgagggcaacgtgtttatgtattatggactgtctaatttctatcaaaaccatcgtcgttacgtgaaatctcgagatgatagtcaactaaatggagattctagtgctttgcttaatcccagtaaggaatgtgaaccttatcgaagaaatgaagacaaaccaattgctccttgtggagctattgccaacagcatgtttaatgatacattagaattgnttctcattggcaatgattcttatcctatacctatcgctttgaaaaagaangtattgcttggtggacagataaaatgtgaaattcgaaatcccctggaggaacaacctggaaaacgattaaaggtccacaaacctgtgactgnt

SEQ ID NO: 3774 - DNA, 860 bp, Homo sapiens
  misc_feature (791)..(791): "n" may be a, t, c, g, other or unknown
  misc_feature (819)..(819): "n" may be a, t, c, g, other or unknown
  misc_feature (851)..(851): "n" may be a, t, c, g, other or unknown
ctgggccgagagcgggtggctgagccgggacctcgcgtgattctcggaacccgaggagaagcggcgtccggggctatggctgtgactctggacaaagacgcttattatcggcgagtgaagagactgtacagcaattggcggaaaggagaagatgagtatgccaacgttgatgccattgttgtatcagtgggtgttgatgaagaaattgtttatgccaaatcaactgccttacagacatggctctttggttatgaactaactgatactatcatggtcttttgtgatgacaaaatcatctttatggccagcaagaaaaaagtggagttcttgaaacagattgccaacactaagggcaatgagaatgctaatggagcccctgccatcacactgctaatacgagaaaagaatgaaagtaataagagtagctttgacaaaatgattgaagccattaaagaaagcaagaatggcaagaaggttggagtgttcagcaaagacaaattccctggagagttcatgaagagctggaatgactgcctcaacaaagaaggctttgacaaaatagatatcagtgcagttgtggcatataccatcgctgtaaaggaggatggggagctcaacctaatgaagaaagcagccagcatcacttctgaagtcttcaacaaattcttcaaggaaagagtcatggaaatagttgatgcagatgagaaagttcgacacagcaaactggctgagtctgtggaaaaggccattgaagagaaaaaatccttgcttggggcagacccttctactgnggaaatgtggtacccttctatcattcanagtggtggcactattaatctcaagttcagtgnggtgaagtg

SEQ ID NO: 3775 - DNA, 871 bp, Homo sapiens
  misc_feature (1)..(1): "n" may be a, t, c, g, other or unknown
  misc_feature (3)..(3): "n" may be a, t, c, g, other or unknown
  misc_feature (632)..(632): "n" may be a, t, c, g, other or unknown
  misc_feature (713)..(713): "n" may be a, t, c, g, other or unknown
  misc_feature (731)..(731): "n" may be a, t, c, g, other or unknown
  misc_feature (871)..(871): "n" may be a, t, c, g, other or unknown
ngngcccgcgcagcgttgagttgcacagcggtattctcaccaggccctgcaatcggtgggccacagtgccggccacagagatggtggaaggaccaggctgtactctgaatggagagaagattcgcgcgcgggtgctcccgggccaggcggtgaccggcgtgcggggaagcgctctgcggagtccgcagggccgcgccttgcggctcgcagcctccacggttgtggtctccccgcaggctgctgcactgaataatgattccagccagaatgtcttgagcctgtttaatggatatgtttacagtggcgtggaaactttggggaaggagctctttatgtactttggaccaaaagctttacggattcatttcggaatgaaaggcttcatcatgattaatccacttgagtataaatataaaaatggagcttctcctgttttggaagtgcagctcaccaaagatttgatttgtttctttgactcatcagtagaactcagaaactcaatggaaagccaacagagaataagaatgatgaaagaattagatgtatgttcacctgaatttagtttcttgagagcagaaagtgaagttaaaaaacagaaaggccggatgctaggtgatgtgctaatggatcanaacgtattgcctggagtagggaacatcatcaaaaatgaagctctctttgacagtggtctccacccagctgttaaagtttgncaattaacagatgaacanatccatcacctcatgaaaatgatacgtgatttcagcattctctttttacaggtgcccgtaaaacaaggactttgctctcttttaaacactttaaggtttacaagccgttcctaaaattggggggccagtggccacttgcn

SEQ ID NO: 3776 - DNA, 834 bp, Homo sapiens
  misc_feature (770)..(770): "n" may be a, t, c, g, other or unknown
  misc_feature (800)..(800): "n" may be a, t, c, g, other or unknown
  misc_feature (833)..(833): "n" may be a, t, c, g, other or unknown
agaaagttactgggagataacttcgaaggattttgcaacaaattcgagctgtccgactctgagaatgagacatgaaaaatgctgtaattggaaacaacaagcagaaagccaatctcattgttttaggagctgttccaagattgttgtacttgcttcagcaagaaacctcaagcacagggctgaaaactgaatgtgcagtggtgttgggaagtcttgctatgggtactgaaaacaatgtcaagtctctactggactgccatattatccctgccttattgcaaggactactgtccccagacctgaagtttattgaagcttgcctccgatgcctgcgtaccatcttcaccagtcctgtcactccagaggagctactgtatacagatgccacagtgataccacacctcatggcactgcttagcaggtcccgctatacccaggagtacatctgtcagatcttctcacactgctgtaaagggccagatcatcaaacaattttatttaaccacggtgcagttcagaatattgctcacctactaacctcactgtcctacaaagttcgaatgcaagcactgaaatgtttctcagttttagcttttgaaaacccccaggtatcgatgaccctggtaaatgttttggttgatggagaattgttaccacagatttttgtgaagatgttacagagggataagcctattgagatgcagctcacatcagcaaaatgtttaacttacatgtgtagagctggagcaattcggacagatgataactgnattggattaaaagacattaccttggttggntcgaatgtgcataaggagagattactagaggana

SEQ ID NO: 3777 - DNA, 846 bp, Homo sapiens
  misc_feature (792)..(792): "n" may be a, t, c, g, other or unknown
  misc_feature (818)..(818): "n" may be a, t, c, g, other or unknown
  misc_feature (826)..(826): "n" may be a, t, c, g, other or unknown
tatccaaggacatgagcagtttacacatctcacccaattcagggaatgtcactagtgcatctgggtctcagatggcaagcggcatcagcctggtctccttcaacagccgacccgacggcatgcaccagcgctcctactcagtctccagtgccgaccagtggagtgaggctacggtcattgcaaactcggccatcagcagtgacacagggctgggtgactccgtatgctccagccccagtatctccagcaccaccagccccaagctcgacccgcccccctcccctcacgccaacagaaagaagcaccgaaggaagaaaagcactagcaacttcaaagccgacggcctgtccggcactgctgaagaacaagaagaaaattttgagtttatcattgtgtccctcactggccaaacatggcactttgaagccacgacgtatgaggagcgggacgcctgggtccaagccatcgagagccagatcctggccagcctgcagtcgtgcgagagcagcaagaacaagtcccggctgacgagccagagcgaggccatggccctgcagtcgatccggaacatgcgcgggaactcccactgtgtggactgcgagacccagaatcccaactgggccagtttgaacttgggagccctcatgtgcatcgaatgctcagggatccaccggaatcttggcacccacctttcccgagtccgatctctggacctggatgactggccaatcgagctcatcaaggtgatgtcatccatcgggaacgagctagccaacagcgttttgggaaganagcagccaggggcggacgaaaccatngtagactncacaagggaagagaaggaac

SEQ ID NO: 3778 - DNA, 788 bp, Homo sapiens
  misc_feature (762)..(762): "n" may be a, t, c, g, other or unknown
  misc_feature (774)..(774): "n" may be a, t, c, g, other or unknown
  misc_feature (781)..(781): "n" may be a, t, c, g, other or unknown
acaggaagtgaagagcttccgccgggagaccgcggctgcaggaacggaggcggaaggggccctgcggcgacgacgtcgtcgacgggggtggccgtgggagctgagcacggagaagactccctctctcggaagccggatcccgagccgggcaggatggatcaccaccagccggggactgggcgctaccaggtgcttcttaatgaagaggataactcagaatcatcggctatagagcagccacctacttcaaacccagcaccgcagattgtgcaggctgcgtcttcagcaccagcacttgaaactgactcttcccctccaccatatagtagtattactgtggaagtacctacaacttcagatacagaagtttacggtgagttttatcccgtgccacctccctatagcgttgctacctctcttcctacatacgatgaagctgagaaggctaaagctgctgcaatggcagctgcagcagcagaaacatctcaaagaattcaggaggaagagtgtccaccaagagatgacttcagtgatgcagaccagctcagagtggggaatgatggcattttcatgctggcatttttcatggcatttattttcaactggcttggattttgtttatccttctgtatcaccaataccatagctggaaggtatggtgctatctgcggatttggcctttccttgatcaaatggatccttattgtcaggttttctgattattttactggatatttcaatgggacaagtattggctttggnggatattcttgnacttggnctggttc

SEQ ID NO: 3779 - DNA, 813 bp, Homo sapiens
  misc_feature (624)..(624): "n" may be a, t, c, g, other or unknown
  misc_feature (670)..(670): "n" may be a, t, c, g, other or unknown
  misc_feature (737)..(737): "n" may be a, t, c, g, other or unknown
  misc_feature (793)..(793): "n" may be a, t, c, g, other or unknown
  misc_feature (812)..(812): "n" may be a, t, c, g, other or unknown
agaaccgctgtggcaccgctactccgtgccgcgcccgtcgagcattgcgttgctgcattgcgccccaccgactccactatgttgaagaaattcgacaagaaggatgaggagtcaggtggaggctccaacccattccagcaccttgagaagagtgcggtactccaggaggcccgtgtatttaatgaaactcccatcaaccctcggaaatgtgcccacatcctcaccaagattctttatctcataaaccagggggagcacctggggaccacggaagcgaccgaggccttctttgccatgaccaagctctttcagtccaatgatcccacactccgtcggatgtgctacttgaccatcaaggagatgtcttgcattgcagaggatgtcatcattgtcaccagcagcctaacaaaagacatgactgggaaagaagacaactaccggggcccggccgtgcgagccctctgccagatcactgatagcaccatgctgcaggctattgagcgctacatgaaacaagccattgtggacaaggtgcccagtgtctccagctctgccctcgtgtcttccttgcacctgctgaagtgcagctttgacgtggtcaagcgctgggtgaatgaagctcangaggcagcatccagtgataacatcatggtccagtaccacgcactanggcttctgtaccatgtgcgtaagaatgaccgctaccgtcaataagatgatcagcaaggtcacacggnatgggcttaagtcttcctttggctactggatgatgatcccggtgggcaacaagcanctggaaaaagaggatggcna

SEQ ID NO: 3780 - DNA, 852 bp, Homo sapiens
  misc_feature (747)..(747): "n" may be a, t, c, g, other or unknown
  misc_feature (810)..(810): "n" may be a, t, c, g, other or unknown
  misc_feature (840)..(840): "n" may be a, t, c, g, other or unknown
atggcttgggtaccacaacttccggtgcgcctttctttacagttcgtaaggttcataggcgggtggtcctgggctccaggaaccactgcaacttggggagttggatatcacttctgatgaattcatcctggatgaagtggatgttcacattcaggcaaatctggaggatgagttagtaaaggaagctcttaaaacgggtgtagatctccgtcactattcaaagcaagttgagctggagctacagcagattgaacagaaatccattcgggattatattcaagagagtgagaatatagcatctctacacaaccagatcacagcctgtgatgctgtcctggagcgaatggagcagatgttgggagcttttcagagtgacctcagctccatcagctctgagatccggacactgcaggaacagtcaggagccatgaacattcgacttcgaaatcgccaggcagttcgggggaaacttggggagcttgttgatggtctggtggtgccttctgctctggtcacggcaattctggaggctccagtgacagagcccaggttcttggagcagctacaggagctggatgccaaggcagccgcagtcagagagcaggaagctagaggcacagcagcctgcgcagatgtcagagcgtgctcgatcggctccgggtcaaggcagtgaccaagatccgagagtttatccttcagaagatttattccttcaggaaacccatgaccaactatcagatcccccanacgggcctgctgaagtacagggtcttctatcagtttctgctgggcaatgaaccagccacagcnaaggagatcagggatgaatatgtggaaacncttaccagaatt

SEQ ID NO: 3781 - DNA, 831 bp, Homo sapiens
  misc_feature (437)..(437): "n" may be a, t, c, g, other or unknown
  misc_feature (693)..(693): "n" may be a, t, c, g, other or unknown
  misc_feature (764)..(764): "n" may be a, t, c, g, other or unknown
  misc_feature (772)..(772): "n" may be a, t, c, g, other or unknown
  misc_feature (810)..(810): "n" may be a, t, c, g, other or unknown
cgattccagccaatgaagctgtttgctatatgcctgaatcaaagtatgctgttgtgaaatgttctaagtctggagacctctacgtactggcggcagataaagtagcatctgttgcttctactttggaaacaacatttgagactatttcaacactttcaggtgtagatttggaaaatggtacttgcagtcatccattaattcctgataaagcctctcctcttttacctgcaaatcatgtgaccatggcaaaaggaacgggattggttcacacagccccagctcatggtatggaagactacggtgtagcgtctcagcacaacctgcccatggattgtctagtggacgaagatggagttttcacagatgttgcaggtcctgaacttcaaaacaaggctgtccttgaagagggaactgatgtggttataaagatgcttcanactgcaaagaatttgttgaaagaggagaaattggtgcatagctatccgtatgactggaggaccaagaaacctgtggttattcgtgccagcaagcagtggtttataaacatcacggatattaagactgcagccaaggaattgttaaaaaaggtgaaatttattcctggatcagcactgaatggcatggttgaaatgatggacaggcggcatattggtgtatatcaaggcaaagagtttggggtgttccaattcctgngtttcatcataagaccaaggatgaatcttgatcaacagccaaaccactgagcatattggtaaactagtggnaccacccnggagtgatatctggtggactttttccctgaacaacttnttccaaaagaagcttatctga

SEQ ID NO: 3782 - DNA, 876 bp, Homo sapiens
  misc_feature (738)..(738): "n" may be a, t, c, g, other or unknown
  misc_feature (797)..(797): "n" may be a, t, c, g, other or unknown
  misc_feature (825)..(825): "n" may be a, t, c, g, other or unknown
  misc_feature (839)..(839): "n" may be a, t, c, g, other or unknown
aaatgtctgatgctcagggcagctacaaactggatgaagctcaggctgtcttgagagaaacaaaagccatcaaaaaggctattacctgtggggaaaaggaaaagcaagatctcattaagagccttgccatgttgaaggacggcttccgcactgacagggggtctcactcagacctgtggtccagcagcagctctccggagagttcgagtttcccgctaccgaaacagtacctggatgtgagctcccagacagacatctcgggaagcttcggcatcaacagcaacaatcagttggcagagaaggtcagattgcgccttcgatatgaagaggctaagagaaggatcgccaacctgaagatccagctggccaagcttgacagtgaggcctggcctggggtgctggactcagagagggaccggctgatccttatcaacgagaaggaggagctgctgaaggagatgcgcttcatcagcccccgcaagtggaccccctcctggctggtgatgccttcctcaactccttggagtttgaagacccggagctgagtgccactctttgtgaactgagccttggtaacagcgcccaggaaagataccggctggaggaaccaggaacggagggcaagcagctgggccaagctgtgaatacggcccaggggtgtggcctgaaagtggcctgtgtctaacccgccgtatcggacgagtcagtggctggagacagtggtgtgtaccaagcttncgtgccagagactgggttgctttaaaaactggctgcatttgacaagtgaccaaatcggnaagccatggggtgccaacccgaattcanaattggccttgaantattgatgaagaagaattaagccattttgcaatatta

SEQ ID NO: 3783 - DNA, 862 bp, Homo sapiens
  misc_feature (805)..(805): "n" may be a, t, c, g, other or unknown
  misc_feature (812)..(812): "n" may be a, t, c, g, other or unknown
gtgaggccgtcgtcgccgcacgggctggttggggctgtgtctgtgggaggcgccggggtgatggcggtggagactctgtccccggactgggagtttgaccgcgttgacgacggctcgcagaaaattcatgccgaagtccaacttaagaattatgggaaatttcttgaggagtatacctctcaactgagaagaattgaggacgctctggatgactcaattggagatgtttgggatttcaatcttgatcctatagcattaaagcttttgccttatgaacagtcctctcttttggaactcataaagactgaaaacaaggtcttaaacaaagtcatcactgtttatgctgcactttgttgtgaaatcaagaaattaaaatatgaggctgaaactaaattttacaatggtctcttgttttatggagaaggagctacagatgccagcatggtggaaggtgattgccaaattcaaatggggagatttatttcattcttacaggaactgtcttgctttgttacatgaagtggtgatgaacgtagtccaccagttggctgccctctatatcagtaacaagattgcacccaaaattatagagacaactggagttcattttcagactatgtatgagcacttgggagaactgctaacagttttgctcaccctggatgaaattattgataatcatatcacactgaaagaccactggactatgtacaaaaggttactgaaatctgtccatcacaatccttcaaaatttggaaattcaggaagaaaaattaaaagccatttgaaaaagttcttgctgaanctagaanggcaattactggatggaatgatattccaggcctgtatagaacaaccattt

SEQ ID NO: 3784 - DNA, 845 bp, Homo sapiens
  misc_feature (790)..(790): "n" may be a, t, c, g, other or unknown
  misc_feature (821)..(821): "n" may be a, t, c, g, other or unknown
  misc_feature (835)..(835): "n" may be a, t, c, g, other or unknown
aatatgtatcgtctccctgccacccaggaggtggtgacgcagctgcagagccagatcttggagctgcagggggagctgaaggagtttaaaacttgtaataagcaacttcaccaaaagttaattctggctgaggcagtgatggaggggaggccaacgcccgacaaaacgttgctgaatgactctgagatttgcccacctgatgaccttgccagcttgccatcatgcaaagaaaatcctgaagatgttctgagcccaacttcagtagctacttacctgagttccaagagtcagccttctgctaaagtcagtgtgatggggactgatcagtcagagagcattaatacctcaaatgagacagaatacttaaaacagaaaatccatgacttggaaactgagctggaaggctaccagaatttcatatttcagcttcaaaagcactcccagtgcagtgaggccataattacagttttgtgtgggacagaaggggcccaggatggcttgagcaagcccaagaatggttctgatggggaagaaatgaccttttcaagtttgcaccaagtgcgatatgtgaaacacgtgaaaatcctcggtccgctggccccagagatgattgacagcagggtgctggagaacctcaaacagcagctggaggaacaggaatacaagctgcagaaggagcagaatttgaacatgcaacttttcagtgagatccataatctgcagaaataagttcagagatctctcaccttccagatacgattcattagttcagtcccaagccagggagctnttcctttaacgggagcagattaaaggatggncatggcatctgggncatcttccgt

SEQ ID NO: 3785 - DNA, 793 bp, Homo sapiens
  misc_feature (722)..(722): "n" may be a, t, c, g, other or unknown
  misc_feature (772)..(772): "n" may be a, t, c, g, other or unknown
  misc_feature (777)..(777): "n" may be a, t, c, g, other or unknown
caagttgtggaagcccttgggtcctctctagagaatccagaaccccgaactcgggcacgaggaatccagcttttgtcacaggtgctactccactgtcacaccttgctcctggagaaggaagtggtacacctgatactgttctatgagaaccggctgaaggaccatcatcttgtgatcccatctgtcctgcagggtttgaaggcacttagcctgtgtgtggccctgcccccagggctggctgtttctgtgcttaaagccatcttccaggaagtgcatgtacagtccctgccacaggtggaccgacacacagtctacaatatcatcaccaattttatgcgaacccgggaagaagagctaaagagcctaggagctgacttcacctttggcttcatccaggtgatggatggggaaaaggatccccgtaatcttctggtggccttccgcatcgtccatgacctcatctccagggactatagcctgggaccctttgtggaggagttgtttgaagtgacatcctgttatttccctatcgattttacccctccacctaatgatccccatggtatccagagagaagacctcatcctgagtcttcgcgctgtgctggcttctacaccacgatttgctgagtttctgctgcccctgttgattgagaaagtggattctgaggttctgagtgccaagttggattctctacagactctgaatgcttgctgtgctgngtatggacagaaggaactgaaggacttcctcccagctttgggcttctatncgcanagagagcagccaccgg

SEQ ID NO: 3786 - DNA, 664 bp, Homo sapiens
  misc_feature (206)..(206): "n" may be a, t, c, g, other or unknown
  misc_feature (309)..(309): "n" may be a, t, c, g, other or unknown
  misc_feature (361)..(361): "n" may be a, t, c, g, other or unknown
  misc_feature (369)..(369): "n" may be a, t, c, g, other or unknown
  misc_feature (493)..(493): "n" may be a, t, c, g, other or unknown
  misc_feature (531)..(531): "n" may be a, t, c, g, other or unknown
  misc_feature (623)..(623): "n" may be a, t, c, g, other or unknown
  misc_feature (653)..(653): "n" may be a, t, c, g, other or unknown
  misc_feature (658)..(658): "n" may be a, t, c, g, other or unknown
gtaatgctgggaaaccccggctgacgcgcccctcccccgcccgcagtgcggctcggcggagtacatggccccggaggtagtggaggccttcagcgaggaggctagcatctacgacaagcgctgcgacctgtggagcctgggcgtcatcttgtatatcctactcagcggctacccgcccttcgtgggccgctgtggcagcgactgcngctgggaccgcggcgaggcctgccctgcctgccagaacatgctgtttgagagcatccaggagggcaagtacgagttccccgacaaggactgggcccacatctnctgcgctgccaaagacctcatctccaagctgctggtccgtgacgccaagcanaggctgantgccgcccaagtcctgcagcacccctgggttcaggggtgcgccccggagaacaccttgcccactcccatggtcctgcataggtgggacagtcacttcctcctccctccccacccctgtcgcatncacgtgcgacctggaggactggtcaaaaccgttactgngaatgagtgaagatcctggaggaccctgggccccaggccagctcccatcgctgggggacggtgaacggccatgtgttaatgttacgatgttnttaaaagacaacttgaaggaacttggccgntctgnaagcat

SEQ ID NO: 3787 - DNA, 850 bp, Homo sapiens
  misc_feature (1)..(1): "n" may be a, t, c, g, other or unknown
  misc_feature (771)..(771): "n" may be a, t, c, g, other or unknown
  misc_feature (787)..(787): "n" may be a, t, c, g, other or unknown
  misc_feature (847)..(847): "n" may be a, t, c, g, other or unknown
ngctcacgtgacaaagctcccggaggtgggagccctgggccaaaatggcggcctacctgcagtggcggcgcttcgttttcttcgacaaggagctggtgaaggagccgctgagcaatgatggggccgctcccggggccacacctgcttctggatccgctgcttccaagttcctttgcctccctcctggcatcactgtctgcgactcaggccgagggagcctggtctttggagatatggaaggccagatctggttcttgccacgttccctacagcttacaggcttccaagcctacaaactacgggtgacacacctgtaccaactgaagcagcacaatattctggcatctgttggagaagatgaagagggcatcaaccccttggttaagatctggaacctggagaagagagatggtggcaatccactctgcactcgaatcttccctgctattccaggaacagagccaactgttgtatcttgtttgactgtccatgaaaatctcaactttatggccattggtttcacagatgggagtgttacattgaacaaaggagacatcacccgggaccggcatagcagacccagattttgcacaagggcaactatcctgtaactggattggcctttcgccaagcaggaaagaccactcacttgtttgttgtgacaacagagaacgtccagtcctatatagtttctggaaaagactaccctcgcgtggagttggacacccatggttgtggcctgcgctgttaaccctaagtgacccttctcangacctgcagttattgngggccggggatgatgggctacttgtccagcctgatgaactgggccctgcttcgcctttanggc

SEQ ID NO: 3788 - DNA, 667 bp, Homo sapiens
  misc_feature (71)..(71): "n" may be a, t, c, g, other or unknown
  misc_feature (324)..(324): "n" may be a, t, c, g, other or unknown
  misc_feature (331)..(331): "n" may be a, t, c, g, other or unknown
  misc_feature (449)..(449): "n" may be a, t, c, g, other or unknown
  misc_feature (464)..(464): "n" may be a, t, c, g, other or unknown
  misc_feature (524)..(524): "n" may be a, t, c, g, other or unknown
  misc_feature (575)..(575): "n" may be a, t, c, g, other or unknown
  misc_feature (613)..(613): "n" may be a, t, c, g, other or unknown
  misc_feature (627)..(627): "n" may be a, t, c, g, other or unknown
acacgtcttccagctccacatcctgagaggacgcttctggagccgcgactgcccggggttgtgccggccgncgctgccgcccaggccgcctcagctctcctctgcgccggaccgctcactccgcccggccccagccctagcgctggccgcgaccccggcgcctttgaaacttctgctggtgtgagtgccctcgggggttccccaggaatatcgatacaacaccaacaggagatcatgaatcagacagataaaaatcaacaagaaatcccatcataccttaatgatgaaccaccagaaggttcaatgaaagatcacccacagcancagccangcatgttgtcccgtgtgactgggggtatcttcagtgttacaaagggagctgttggtgccaccattggtggtgtggcttggattggtggaaagagtctggaagtgaccaaaacagctgntacaactgtgccttncatgggaatagggctggtgaaagggggtgtctctgctgtggctggaggtgtacaagctgntgggtctgctgttgtaaacaaagtgcccttaacaggaaagaagaaagacanatctgactgaaatatagagatacacttgcgctccacancactgtaatgccanttggcattgaaattgctaaattatggactaccaaccaagt

SEQ ID NO: 3789 - DNA, 749 bp, Homo sapiens
  misc_feature (461)..(461): "n" may be a, t, c, g, other or unknown
  misc_feature (557)..(557): "n" may be a, t, c, g, other or unknown
  misc_feature (673)..(673): "n" may be a, t, c, g, other or unknown
  misc_feature (730)..(730): "n" may be a, t, c, g, other or unknown
  misc_feature (739)..(739): "n" may be a, t, c, g, other or unknown
tctactcctctgattatttgaaatgctgaggaaaatgtccctcccatagtaaaacttgtaaataaggaactatatcatattcagtagctgtgttctgttccatctttttttttttttttgagatggagttttgcttgttgcccaggctggagtgcagcggcacgatcttggttcactgcaacctccgcctcccaggttcaagcgattctcttgcctcagcctcccgagtagctggggactacaggtgtgcgacaccatgcctggctaatttttttgtatttttagtagagatggggtttcaccatgttggccaggctggtctcaaactcctgacctcaaaggatccacccgccttggcctcccaaagtgctgggatcacaggcgtgagccaccatgcccggcccatctttttttttttttttttttttaaagatgttaataaactttatacctttctgganactttgttctaaaatgtacataaatgctcatctagttaacatatttacttagaatgtgggaggaggagtcacattattatccctgaatctcaagtncagcagaagtgaattcctgggatagtaggatagactaacatgtaaaaaggccaggtgatgcataggttctcatttcactgccctcagccttcctctccttctgagctggccttctncatgttcagtcaactccagggaatattggctccatcttctggatagaactagttgcnggatccgtncaagaattca

SEQ ID NO: 3790 - DNA, 759 bp, Homo sapiens
  misc_feature (703)..(703): "n" may be a, t, c, g, other or unknown
  misc_feature (709)..(709): "n" may be a, t, c, g, other or unknown
  misc_feature (716)..(716): "n" may be a, t, c, g, other or unknown
aggtggcggagattgcaccggaagacgcttcctgggtttgaggagttcagtgactgctattgaaccaccaaaagtccattatgaaactgtattgcctgtcagggcacccaaccttaccatgcaatgtgctcaaattcaaatcaaccaccattatgttggactgcggactggacatgacttctaccctcaatttccttcctttgccacttgttcaaagtcccaggctgtccaatcttcctggctggtccctgaaggatggaaatgctttcttggacaaggagctaaaggagtgctcgggtcatgtatttgtggattctgtgccggaattctgtttaccagagacggagctaatagatctgtctacagtagatgtgattctcatctctaactatcactgtatgatggcgctgccatacatcaccgagcacaccggcttcacaggcacagtgtatgccacggaacccaccgtccagatcggcaggcttctcatggaagagctggtgaatttcattgaaagagtgccaaaggctcagtctgcctccttgtggaagaataaggacattcagaggctgttaccttctcctctcaaggatgcagtggaagtctcaacctggagaagatgctatacaatgcaagaggtgaactctgcccttagtaaaatccactggtgggatattctcagaaaattgagctttttggtgcngtccangtgactnctctgagctctggctatgcccttgggagcttcaactggatcat

SEQ ID NO: 3791 - DNA, 778 bp, Homo sapiens
  misc_feature (694)..(694): "n" may be a, t, c, g, other or unknown
  misc_feature (723)..(723): "n" may be a, t, c, g, other or unknown
  misc_feature (733)..(733): "n" may be a, t, c, g, other or unknown
agaaaagatggcgaaagtcaacataactagagacctcatccgtaggcagatcaaggagcggggtgccctgagctttgagcggcgctaccatgtcactgacccctttatccggcggctgggcctggaagcagagctgcagggtcactcaggatgtgtcaactgtctggagtggaatgagaaaggagacttgctggcctctggttccgatgaccagcacacgattgtgtgggacccgctgcaccacaagaagctgctctccatgcacacgggacacaccgcaaatatcttctctgtcaagttcctgcctcacgctggggaccgcatcttgatcacgggggcagccgactctaaggtgcatgtgcacgacctgacagtaaaggagaccatccacatgtttggagaccacacaaaccgggtgaagcgcatcgccacagcgcccatgtggcccaacacattctggagtgctgctgaggatgggcttatccgccagtatgaccttcgagagaacagcaaacactcggaggtgctgattgacctgacagagtactgtggccagctggtggaggccaagtgcctcactgtcaacccccaggacaacaactgcctggcagttggggccagcgggcccttcgtgaggctctatgacatccgcatgatccataaccacagaaagagcatgaacagagcccttcancgggtgtgcacaccttctgtgaccggcanaaaccccttncggacggtgcagcccagtattacgtaacaggtcacctggccaatg

SEQ ID NO: 3792 - DNA, 863 bp, Homo sapiens
  misc_feature (733)..(733): "n" may be a, t, c, g, other or unknown
  misc_feature (766)..(766): "n" may be a, t, c, g, other or unknown
  misc_feature (847)..(847): "n" may be a, t, c, g, other or unknown
  misc_feature (857)..(857): "n" may be a, t, c, g, other or unknown
gtgggcaagccgcgcagcgggaagagccggccgaagcgtggcggccacagactgtgggtaccgggtccgagggactcgcgcttttctctccgtgccatggcgccagcgaaagccacgaacgtggtgcggctgctactaggctccacagcgctgtggctttcgcagctcggctccgggacggtcgccgcgtccaagtcggtgactgcccacttggccgcgaagtggcccgagaccccgctgctgctggaggcaagtgaatttatggcggaagaaagtaatgaaaaattttggcagtttttggaaactgtgcaagaattagcaatttataagcaaacagaatcagattattcttattacaacttaatcctgaagaaagctggacagtttctagacaatttacacatcaaccttttaaagtttgctttctctataagggcatactccccagctattcagatgtttcagcagattgcagctgatgagccaccaccagatggttgtaatgcatttgtggttattcataagaagcacacctgtaaaattaatgagattaaaaagctgctgaagaaagctgcttcaaggactagaccttatctatttaaaggagatcacaaatttcctacaaacaaagagaacttaccagtggtgattctctatgccgaaatgggtactagaacatttagtgcatttcacaaagtattgtctgaaaaagctcaaaatgaggaaattctgnatggtcttcgccattatattcagaaccaagctnacggaaaatgtacttatctgggtatggtgtggaactagcaatttaagagtcccgaatcaaagcactggatgatacccaagnttaaactggngactta

SEQ ID NO: 3793 - DNA, 709 bp, Homo sapiens
  misc_feature (629)..(629): "n" may be a, t, c, g, other or unknown
  misc_feature (695)..(695): "n" may be a, t, c, g, other or unknown
  misc_feature (707)..(707): "n" may be a, t, c, g, other or unknown
gcgttttccggccgtgcgtttgtggccgtccggcctccctgacatgcagccctctggaccccgaggttggaccctactgtgacacacctaccatgcggacactcttcaacctcctctggcttgccctggcctgcagccctgttcacactaccctgtcaaagtcagatgccaaaaaagccgcctcaaagacgctgctggagaagagtcagttttcagataagccggtgcaagaccggggtttggtggtgacggacctcaaagctgagagtgtggttcttgagcatcgcagctactgctcggcaaaggcccgggacagacactttgctggggatgtactgggctatgtcactccatggaacagccatggctacgatgtcaccaaggtctttgggagcaagttcacacagatctcacccgtctggctgcagctgaagagacgtggccgtgagatgtttgaggtcacgggcctccacgacgtggaccaagggtggatgcgagctgtcaggaagcatgccaagggcctgcacatagtgcctcggctcctgtttgaggactggacttacgatgatttccggaacgtcttagacagtgaggatgagatagaggagctgagcaagaccgtggtccangtggcaaagaaccagcatttcgatggcttcgtggtggaagtctggaaccagctgctaagccagaancgcgtgggcctnat

SEQ ID NO: 3794 - DNA, 856 bp, Homo sapiens
  misc_feature (3)..(3): "n" may be a, t, c, g, other or unknown
  misc_feature (683)..(683): "n" may be a, t, c, g, other or unknown
  misc_feature (709)..(709): "n" may be a, t, c, g, other or unknown
  misc_feature (774)..(774): "n" may be a, t, c, g, other or unknown
  misc_feature (802)..(802): "n" may be a, t, c, g, other or unknown
  misc_feature (845)..(845): "n" may be a, t, c, g, other or unknown
atncgtagcggccgccattgttccgcgccgatggcgagatccttgttcctcagatagcgttcatcgcccgtcgtggtcaacgggccagccgagtctggagtggttgcgaacccttctggctgcagatctggaggtggaggcagtaccctggactctattctgctgccccttcagggtttggaggagccggagcatccctcgcgtcctgtcacttccagcgaggcacacaaaactgaccgtagggatggccaccagggtccggacagcttctatttgggtcccacctctccaagaacgaaacagttcatgggataggatcagaaagctccaaggtcaggaatccatcttgggccaagggactcctggtctgcaacctctccctggaacacccaggcagaagcagaagagtcgcagaatagagaaagtcctagagtggctgtttatttcccaagagcagccaaaaatcaccaagtcctggggacctttgtcattcatggatgtgtttgtggattttacctgggaggagtggcagctgctagacccagcacagaagtgcctgtacaggagtgtgatgttggagaactatagcaacctggtgtccctagggtaccaacacaccaaacctgatatcatcttcaagttggaacaaggagaagagctgtgtttggcgcaagcccaagttncaaatcagacctgtccaattttgaangctggaaagtccaaagccaaggtgctggcaggtttggtgtctggtgaaggcctgctctgggcttncaagatgacgccttggtgctgcatcctntggagaccagtcttggaaaattggatgatcttatggattggcntcagggaaaat

SEQ ID NO: 3795 - DNA, 869 bp, Homo sapiens
  misc_feature (714)..(714): "n" may be a, t, c, g, other or unknown
  misc_feature (781)..(781): "n" may be a, t, c, g, other or unknown
  misc_feature (840)..(840): "n" may be a, t, c, g, other or unknown
gtcgtttaaaagaaacacttgctcagctttcaagagagacagacgtgtcaccatttccaccccgtaagcgcccatcagctgagcattccctttccatagggtcactcctagatatctccaacacaccagagtctagcattaactatggagacaccccaaagtcttgtactaagtcttctaaaagctccactccagttccttcaaagcagtcagcaaggtggcaagttgcaaaagagctttatcaaactgaaagtaattatgttaatatattggcaacaattattcagttatttcaagtaccattggaagaggaaggacaacgtggtggacctatccttgcaccagaggagattaagactatttttggtagcatcccagatatctttgatgtacacactaagataaaggatgatcttgaagaccttatagttaattgggatgagagcaaaagcattggtgacatttttctgaaatattcaaaagatttggtaaaaacctaccctccctttgtaaacttctttgaaatgagcaaggaaacaattattaaatgtgaaaaacagaaaccaagatttcatgcttttctcaagataaaccaagcaaaaccagaatgtggacggcagagccttgttgaacttcttatccgaccagtacagaggttacccagtgttgcattacttttaaatgatcttaagaagcatacagctgatgaaaatncagacaaaagcactttagaaaaagctattggatcactgaaaggaagtaatggccccttattaatganggttagaagaaaaaccgaagctcaaaagccaaatttttggatggtgggttatgaagtanatggatgcccactaatcttttatcttctc

SEQ ID NO: 3796 - DNA, 811 bp, Homo sapiens
  misc_feature (689)..(689): "n" may be a, t, c, g, other or unknown
  misc_feature (750)..(750): "n" may be a, t, c, g, other or unknown
  misc_feature (752)..(752): "n" may be a, t, c, g, other or unknown
  misc_feature (789)..(789): "n" may be a, t, c, g, other or unknown
gggctgtttgaatggctttgggatggagcaggggagagagtggctccgtttgcctccccgctttggtgatgctgtgcgagcggcttcgggggccctggagacgtccgagtcactgagggtgggctgggactcggggcccgcgtcccatctccccgccgattggtccgccccccgtgcgagtgtaacacagccagcctcgaagacttccctctgagttggaatgataatgaccggatcccgagaagttatagacttagaccccccagctgagacttcccaggagcaggaagaccttttcatagtgaaggtggaagaagaagactgcacctggatgcaggagtacaacccgccaacgtttgagactttttaccagcgcttcaggcacttccagtaccatgaggcttcaggaccccgggaggctctcagccaactccgggtgctctgctgtgagtggctgaggcccgagctgcacacgaaggagcagatcctggagctgctggtgctggagcagttcctgaccatcctgcctgaagagttccagccctgggtgagggaacatcaccctgaaagtggagaagaggcggtggccgtgatagaaaatatacagcgagaacttgaggaacgcagacagcagattgttgcctgccctgatgtgcttctcggaagatggcaacacctggacaatgcangagtcctgcagcccccatccctgaccgtggacacccaacctgacaacgccacaaaagcctngncttctggaggaaaatgccttctgtctccaagttcttnccttccctgaaggacagccaga

SEQ ID NO: 3797 - DNA, 805 bp, Homo sapiens
  misc_feature (689)..(689): "n" may be a, t, c, g, other or unknown
  misc_feature (743)..(743): "n" may be a, t, c, g, other or unknown
  misc_feature (786)..(786): "n" may be a, t, c, g, other or unknown
  misc_feature (804)..(804): "n" may be a, t, c, g, other or unknown
acgcctggtctctgggacgcccctccggacccgtttcgcctcgcggagccggtaggtccaggtgcagcggccgcagtgctgcgtccgtgcgccgcgggctggggcggtctcaggtgtgccgaagctctggtcagtgccatgatccggcaggagcgctccacatcctaccaggagctgagtgaggagttggtccaggtggttgagagctcagagctggcagacgagcaggacaaggagacggtcagagtccaaggtccgggtatcttaccaggcctggacagcgagtccgcctccagcagcatccgcttcagcaaggcctgcctgaagaacgtcttctcggtcctactcatcttcatctacctgctgctcatggctgtggccgtcttcctggtctaccggaccatcacagactttcgtgagaaactcaagcaccctgtcatgtctgtgtcttacaaggaagtggatcgctatgatgccccaggtattgccttgtaccccggtcaggcccagttgctcagctgtaagcaccattacgaggtcattcctcctctgacaagccctgccagccgggtgacatgaattgcaccacccagaggatcaactacacggaccccttctccaatcagactgtgaaatctgccctgattgtccaggggccccgggaagtgaaaaagcgggagctgggcttncttcagttccgcctgaacaagagtagtgaggacttaacgccatttgattacctnctcttctcttcttttcaggagttccttgcaaaagcccaaacangggtaaggcttcatgcang

SEQ ID NO: 3798 - DNA, 797 bp, Homo sapiens
  misc_feature (633)..(633): "n" may be a, t, c, g, other or unknown
  misc_feature (675)..(675): "n" may be a, t, c, g, other or unknown
  misc_feature (677)..(677): "n" may be a, t, c, g, other or unknown
  misc_feature (741)..(741): "n" may be a, t, c, g, other or unknown
  misc_feature (775)..(775): "n" may be a, t, c, g, other or unknown
  misc_feature (796)..(796): "n" may be a, t, c, g, other or unknown
ataatccttttgcaaacatctcaacgctggctctccaggtggagcaccatggaaggcgactgtctgagctgcatgaagtatctgatgtttgtattcaatttcttcatatttctgggcggggcctgcctgctggccatcggcatctgggtcatggtggaccccaccggcttccgggagatcgtggctgccaatcctctgctcctcacgggcgcctacatcctcctggccatggggggcctgctctttctgctcggcttcctgggctgctgcggggccgtccgtgagaacaagtgtctgctgctatttttcttcctgttcatcctgatcatcttcctggcagagctctcagcagccatcctggccttcatcttcagggaaaatctcacccgagaattcttcaccaaggagctcaccaagcactaccagggcaataacgacacagacgtcttctctgccacctggaactcggtcatgatcacatttggttgctgcggggtcaacgggcctgaagactttaagtttgcatctgtgtttcgactcctgaccctggatagtgaagaggtgccggaggcctgctgccggagggaaccccaaagtcgggacggggtcctgctgagccgggaggagtgcctnctgggaaggagcctattcctaaacaagcagggctggtacacngngatcctcaacaccttcgagacctacgtctactttggcccgaacccttggcattggggtactggncattgaaccttttcgccatgaacttttgccatgngcctttttccgggcattccant

SEQ ID NO: 3799 - DNA, 692 bp, Homo sapiens
  misc_feature (607)..(607): "n" may be a, t, c, g, other or unknown
  misc_feature (646)..(646): "n" may be a, t, c, g, other or unknown
  misc_feature (669)..(669): "n" may be a, t, c, g, other or unknown
tcaccggtgccgtgctcttcctgaaccacgcccacgcgccgggcacggcgcccccacctgtcgtcagcactggggctgccagcgccaacagcgccctggtcactgtggaaagggcggacagctcgcacctcagcatcctcattgacccgcgctgccccgacctcaccgacagcttcgcacgcctggagagcgcccaggcctcggtgctgcaggcgctgacagagcaccaggcccagccacggctggtgggcgaccaggagcaggagctgctggacacgctggccgaccagctgccccggctgctggcccgagcctcagagctgcagacggagtgcatggggctgcggaaggggcatggcacgctgggccagggcctcagcgccctgcagagtgagcagggccgcctcatccagcttctctctgagagccagggccacatggctcacctggtgaactccgtcagcgacatcctggatgccctgcagagggaccgggggctgggccggccccgcaacaaggccgaccttcagagagcgcctgcccggggaacccggccccggggcttgtgccactggctcccggccccgagactgtcttggacgtcctnctaagcgggacaagcaaggacgatggcgtctactctggncttttcccaccccaattaccccnggcccgggcttttccaaggtggt

SEQ ID NO: 3800 - DNA, 784 bp, Homo sapiens
  misc_feature (724)..(724): "n" may be a, t, c, g, other or unknown
  misc_feature (729)..(729): "n" may be a, t, c, g, other or unknown
  misc_feature (741)..(741): "n" may be a, t, c, g, other or unknown
caaacagcagaaggaggtagagaaggttaaaccccagtgtaaggaagttcatcagaccctgattctggacccagcacaaaggaagagactccagcagcagatgcagcagcatgttcagctcttgacacaaatccaccttcttgccacctgcaaccccaatctcaatccggaggccagtagcaccaggatatgtcttaaagagctgggaacctttgctcaaagctccatcgcccttcaccatcagtacaaccccaagtttcagaccctgttccaaccctgtaacttgatgggagctatgcagctgattgaagacttcagcacacatgtcagcattgactgcagccctcataaaactgtcaagaagactgccaatgaatttccctgtttgccaaagcaagtggcttggatcctggccacaagcaaggttttcatgtatccagagttacttccagtgtgttccctgaaggcaaagaatccccaggataagatcctcttcaccaaggctgaggacaatttgttagctttaggactgaagcattttgaagggactgagtttcttaaccctctaatcagcaagtaccttctaacctgcaagactgcccggcaactgacagtgagaatcaagaacctcaacatgaacagagcttctgacaacatcattaaattttataagaagaccaaacagctgccagtcctaggaaaatgctgtgaagagatccagccncattnagtgggaagccncctattgagagaggaagaacaccgggttccaatctgggttaaa

SEQ ID NO: 3801 - DNA, 740 bp, Homo sapiens
  misc_feature (687)..(687): "n" may be a, t, c, g, other or unknown
  misc_feature (710)..(710): "n" may be a, t, c, g, other or unknown
  misc_feature (735)..(735): "n" may be a, t, c, g, other or unknown
gagttgatatcttcccatccacccgccgcttctttcctccatctagcgatttttattttttaagtgtctcttcctttttctttcttttcttcttttttattttttatatatattttttggcattgctttgcagatgttgggatgagagtcggagccgaataccaagctcggatccctgaatttgatccaggtgctacaaagtacacagataaagacaatggagggatgcttgtatggtctccatatcacagtatcccagatgccaaattggatgaatacattgcaattgcaaaggaaaagcatggctacaatgtggaacaggcacttggcatgttgttctggcataaacataacattgagaagtcccttgctgatctccctaatttcactccctttccggatgagtggacagtggaagataaagtcctatttgaacaagcctttagttttcatggaaagagctttcacaggattcagcaaatgcttccagataagacaattgcaagccttgtaaaatattactattcttggaaaaaaactcgctctaggacaagtttgatggatcgccaggctcgtaaactagctaatagacataatcagggtgacagtgatgatgatgtagaagaaacacattcaatggatgggaatgatagtgattatgatccccaaaaagaagcccaaaaaganggtaatactggacaacctgttcnaactagccagaatggacttgggaanaaaga

SEQ ID NO: 3802 - DNA, 784 bp, Homo sapiens
  misc_feature (719)..(719): "n" may be a, t, c, g, other or unknown
  misc_feature (743)..(743): "n" may be a, t, c, g, other or unknown
  misc_feature (770)..(770): "n" may be a, t, c, g, other or unknown
gaaacagatattaacaaactaaaaccccagcaagaaccgggacgaacaatagaagatctaaaaatgtatgaacaccttttccctgagcttgttgatgattttcaggactatgatttaatctccaaagaaccaaagccttttgtatttgagggaaaagtacgtggtcctattgttgttcctacggcaggcgaggaaacatctgggaattctggcaatttaagaaaggttgtaatgaaggagaacatatcttctaaaggagatgaaggtgaaaagaagtctacctttgtggatctagcaaaagaagatattaaagataatgatagaacattacaacagcagccaggtgatcaaaatagaactatttcatcagtccatggtttaaacaatgatattgtaaaggccttggaccgaattacattgcagaatattccttctcaaacagccccaggttttactgcagaaatgaagaaggactgcagtcttcctcttactgtccttacctgtgctaaagcatgtccacacatggctacttgtggaaatgttctgtttgagggaagaacagttcagctagggaagctttgctgcactggagttgaaactgaagatgatgaagatactgagtcaaattcatcggtagaacaagcatcggttgaagtacctgatggaccaacacttcatgacccagacctctatattgaggattgtgaaaaatacgaaantctgtcccagaatattcagaaggnggcttatcccgaatattttgggcacanttccggcttccttt

SEQ ID NO: 3803 - DNA, 806 bp, Homo sapiens
  misc_feature (621)..(621): "n" may be a, t, c, g, other or unknown
  misc_feature (650)..(650): "n" may be a, t, c, g, other or unknown
  misc_feature (763)..(763): "n" may be a, t, c, g, other or unknown
  misc_feature (795)..(795): "n" may be a, t, c, g, other or unknown
  misc_feature (801)..(801): "n" may be a, t, c, g, other or unknown
atgcaagaagcatcgactcagctggaagactctctcctggggaagatgctggagacgtgtggagatgctgagaatcagctggctctcgagctctcccagcacgaagtctttgttgagaaggagatcgtggaccctctgtacggcatagctgaggtggagattcccaacatccagaagcagaggaagcagcttgcaagattggtgttagactgggattcagtcagagccaggtggaaccaagctcacaaatcctcaggaaccaactttcaggggcttccatcaaaaatagatactctaaaggaagagatggatgaagctggaaataaagtagaacagtgcaaggatcaacttgcagcagacatgtacaactttatggccaaagaaggggagtatggcaaattctttgttacgttattagaagcccaagcagattaccatagaaaagcattagcagtcttagaaaagaccctccccgaaatgcgagcccatcaagataagtgggcggaaaaaccagcctttgggactcccctagcagaacacctgaagaggagcgggcgcgagattgcgctgcccattgaagcctgtgtcatgctgcttctggagacaggcatgaaggagganggccttttccgaattggggctggggcctncaagttaaagaagctgaaagctgctttggactggtctacttctcacctggatgagttctattcagacccccatgctgtagcaggtgctttaaaatcctatttaccggaattgnctgacctttgatgacttttaatctggatgaanaatggncccag

SEQ ID NO: 3804 - DNA, 695 bp, Homo sapiens
  misc_feature (684)..(684): "n" may be a, t, c, g, other or unknown
  misc_feature (690)..(690): "n" may be a, t, c, g, other or unknown
  misc_feature (694)..(694): "n" may be a, t, c, g, other or unknown
atcttgtgttgttgaggctgaggactgactggggttctgagactccctgtcccggaccgcagattatagtgggaccagtctcattaggttgaatctacagcctatgttggtgttaacccaggtctcttagagcgttaaaaggatctgaacaaagtctgctcaaatctcctgctgtgaaccagcagaatttttgaacagagaccacgtctccacctcctgggctccaacgattctcccatcttggcctcccaaagcgctggatttacaggtttcttcacatataaaaatctattgtaaaaatacggaacagaatggcagcggaaacgcagacactgaactttgggcctgaatggctccgagctctgtccagtggtgggagtattacatcccctcctctttctccagcattgccgaagtataaattagcagattatcgttacggcagagaagaaatgttagcacttttccttaaagacaacaagataccttcagaccttctggataaagaatttctgcctatcctccaggaggaaccccttccaccattggctctggtaccctttacagaagaagaacagagaaacttttccatgtctgtaaatagtgctgctgtcctgcgattgacaggacgaggaggaggaggaacagtggtgggggctcctagaggtcgaagttcttcaaganggccangcana

SEQ ID NO: 3805 - DNA, 745 bp, Homo sapiens
  misc_feature (124)..(124): "n" may be a, t, c, g, other or unknown
  misc_feature (490)..(490): "n" may be a, t, c, g, other or unknown
  misc_feature (579)..(579): "n" may be a, t, c, g, other or unknown
  misc_feature (610)..(610): "n" may be a, t, c, g, other or unknown
  misc_feature (622)..(622): "n" may be a, t, c, g, other or unknown
  misc_feature (686)..(686): "n" may be a, t, c, g, other or unknown
  misc_feature (724)..(724): "n" may be a, t, c, g, other or unknown
  misc_feature (726)..(726): "n" may be a, t, c, g, other or unknown
aaatactgccaggattttaccacctctcgcccatttatttacttctcggtcaccgctttcgggggacagataaacaccacagatgcccatcaaaggggcgcacgggtctggaggcgcagctcangtttttgcgttggtcaccctgccctccgcacgtggagagggcaggcataaagcaccttgaaaggaaggtgctgtcaatgctatccgacgacctgtcgccgggcaccgcagcatcctcgctcgctccgatgggacgagggacgccggccccagggtaacaggaggcgcctcgccggccgcgcgctggatgctgtgatccaggtccggagccgggttccgccgcggccgcagcgacccgaccccacccgacaggccagagaaacagaaaggtcaaatgattctggaaatggtgagcacaaatctgagagaaagtcacctgaagagaatctacaaggtgctgtaaaatctttctgcacaagtgcctcangagcacccttgggtcccaaaggagatggtcattatccatggagttgtccagtgactcatacacgggaaaaaatttatgccatctgttcngactatgcctttctcaaccaggcgacctcantctataaaactncaaatccatcccgctcttcttgctcctgatagtacctctttatctgctggaaataattcatcangatacattggtatcccgactagtacatcggaaattatntncattgaaaaaattgcttgg

SEQ ID NO: 3806 - DNA, 849 bp, Homo sapiens
  misc_feature (626)..(626): "n" may be a, t, c, g, other or unknown
  misc_feature (802)..(802): "n" may be a, t, c, g, other or unknown
  misc_feature (819)..(819): "n" may be a, t, c, g, other or unknown
  misc_feature (847)..(847): "n" may be a, t, c, g, other or unknown
cgagctcgcccgctgtccgccagcccgcgggagggaggagagaagcgaagcgtttccgcggttggctactcagtgtcttggtctcaagttgcctcattgcggctggcgttcccaatacagacgcatcgtttcttttttaatactccctaagaaagggaataaccttcaagctggcgggagcaatggttcacataaagaaaggcgagctgacccaggaggagaaggagctactggaagtcatcgggaaaggtactgtccaagaagctggaacattattatccagcaagaatgttcgtgtcaactgtttggacgagaatggaatgactcctctaatgcatgcagcatataaaggaaaactcgatatgtgcaaattactactgcgacatggagccgatgtaaattgtcatcagcatgaacatggatacacagccctcatgtttgctgcactttctggtaataaagacatcacatgggtaatgttagaagctggtgctgagacagatgttgtcaactctgtgggaagaacagcagctcagatggcagcctttgtgggtcaacatgattgtgtgaccataatcaacaatttctttcctcgagagagactggattattacactaagccccanggactgggtaaagagccaaaactgcccccaaagttggcaggcccgctgcacaaaattatcaccacaacgaatcttcatcctgtcaagatcgtgatgctttgtaaatgaagaatcctcttgcttgcagaaagaagcagcccctgaataaatgctacagagtgatggatttgatttgngagaaatgtatgaacanagagacctgaattgaaatattggctttnaa

SEQ ID NO: 3807 - DNA, 770 bp, Homo sapiens
  misc_feature (631)..(631): "n" may be a, t, c, g, other or unknown
  misc_feature (642)..(642): "n" may be a, t, c, g, other or unknown
  misc_feature (647)..(647): "n" may be a, t, c, g, other or unknown
  misc_feature (741)..(741): "n" may be a, t, c, g, other or unknown
  misc_feature (746)..(746): "n" may be a, t, c, g, other or unknown
  misc_feature (768)..(768): "n" may be a, t, c, g, other or unknown
agttggcgacatggtggcacccgtgctggagacttctcacgtgttttgctgcccaaaccgggtgcggggagtcctgaactggagctctgggcccagaggacttctggcctttggcacgtcctgctccgtggtgctctatgaccccctgaaaagggttgttgttaccaacttgaatggtcacaccgcccgagtcaattgcatacagtggatttgtaaacaggatggctccccttctactgaattagtttctggaggatctgataatcaagtgattcactgggaaatagaggataatcagcttttaaaagcagtgcatcttcaaggccatgaaggacctgtttatgcggtgcatgctgtttaccagaggaggacatcagatcctgcattatgtacactgatcgtttctgcagctgcagattctgctgttcgactctggtctaaaaagggtccagaagtaatgtgccttcagactttaaactttggaaatggatttgctttggctctctgcttatcttttttgccaaatactgatgtaccaatattagcatgtggcaatgatgattgcagaattcacatatttgctcaacaaaatgatcagtttcagaaagtgctttctctctgtggacatgangattggattanaggantggaatgggcaacctttggtagagatcttttcctagcaagctgttcacaagattgcctgataagaatatggaaactgtatattaagtcaacatntttanaaacttcaggatgaccattacntt

SEQ ID NO: 3808 - DNA, 692 bp, Homo sapiens
  misc_feature (471)..(471): "n" may be a, t, c, g, other or unknown
  misc_feature (507)..(507): "n" may be a, t, c, g, other or unknown
  misc_feature (556)..(556): "n" may be a, t, c, g, other or unknown
  misc_feature (600)..(600): "n" may be a, t, c, g, other or unknown
  misc_feature (631)..(631): "n" may be a, t, c, g, other or unknown
  misc_feature (681)..(681): "n" may be a, t, c, g, other or unknown
aaaagaagaaacgcaggcggggcagaaaagaggagcccgaaggtggtagcaggccggcgtgtgggggagctggcacccaggggcctgtgcagctggtcaaggaggtggtggccgaggatggcaccgtggtcaccattaagcaggtgctcaccgcgccaggctcggcggggcagccccggtctgaggacgaagacagccttgaggaggccggcagccccgcacctgggccgtgtccacgctccaacgccatgctggctgtgaagcatggggtgctctacgtctatgggggcatgtttgaggccggcgaccgccaggtcaccctcagcgacctgcactgcctggacctgcacaggatggaggcgtggaaggccttggtggagatggacccagaaactcaggagtggctggaggagacggactcggaagaggacagtgaggaggttgagggcgccgagggtggggtcgacgacnaagacagcggagaggagagcggtgcggaggactgangctgtgacaaaccctgtgcccacgctgccttcactgccgggagactcanggcttgggggagacatgccctggtcaccacttgcggagactcanggcttggggggagacatgccctggccaccantggtgaaccagccgaagacaggaccccaacgcgccgcttacccggggacnccatggaactt

SEQ ID NO: 3809 - DNA, 850 bp, Homo sapiens
  misc_feature (710)..(710): "n" may be a, t, c, g, other or unknown
  misc_feature (744)..(744): "n" may be a, t, c, g, other or unknown
  misc_feature (746)..(746): "n" may be a, t, c, g, other or unknown
aacctcgtgctttctgcagaggagaccggagggcagaaggcagagtccaggcttagactgcagttcctcgcttacctgtgcagtctaattttgagctgcctctttgtagtcttaaaaggcaggagcttcgtgttgtgggtctgctaacccgtacgtttccgtgggcaagtcgtgtgtactcctcgccatggctcagctccaaacacgcttctacactgataacaagaaatatgccgtagatgatgttcccttctcaatccctgctgcctctgaaattgccgaccttagtaacatcatcaataaactactaaaggacaaaaatgagttccacaaacatgtggagtttgatttccttattaagggccagtttctgcgaatgcccttggacaaacacatggaaatggagaacgtctcatcagaagaagttgtggaaatagaatacgtggagaagtatactgcaccccagccagagcaatgcatgttccatgatgactggatcagttcaattaaaggggcagaggaatggatcttgactggttcttatgataagacttctcggatctggtccttggaaggaaagtcaataatgacaattgtgggacatacggatgttgtaaaagatgtggcctgggtgaaaaaagatagtttgtcctgcttattattgagtgcttctatggatcagactattctcttatgggagtggaatgtanagagaaacaaagtgaaagccctacactgctgtanangtcatgctggaagtgtagattctatagctggtgatggctcaggaactaaatttgcagtggcttctgggataagatgctaaagatctggctacagtccctacaga

SEQ ID NO: 3810 - DNA, 849 bp, Homo sapiens
  misc_feature (651)..(651): "n" may be a, t, c, g, other or unknown
  misc_feature (739)..(739): "n" may be a, t, c, g, other or unknown
  misc_feature (797)..(797): "n" may be a, t, c, g, other or unknown
  misc_feature (849)..(849): "n" may be a, t, c, g, other or unknown
aaagtccttgcaccatgtagatcagcgtcccccactttggcatcccggccggccggggacctcccagtctgcggccatgaacgcgagcagcgagggcgagagcttcgcgggctcggtgcaaattccaggtggcacaacggtgctggtggagctgactcccgacatccatatctgcggcatctgcaagcagcagtttaacaacctggatgcctttgtagctcacaagcaaagtggctgccagctgacaggcacatccgcagcagcccccagcacggtccagtttgtatcggaggaaacagtgcctgccacccagactcagaccaccaccagaaccatcacctcggagacccagacaatcacaggttgccaattcaagactgcttatggcatgaaggacatggagcggcatttaaaaattcacacgggagacaaaccccataagtgtgaagtctgtggcaagtgctttagccggaaagacaagctgaaaactcacatgcggtgccacacgggcgtgaagccctacaagtgtaagacgtgtgactacgccgctgccgacagcagcagcctcaacaagcacctgaggatccactcggacgagcggcccttcaaatgccagatctgccctacgccagccgcaactccagccagctnctgtccacctgcgatcccacacgggggacgcccccttccagtgctggctctgtagcgccaagttcaaaatcagctcggacttgaaaangcacattgcgggtgcacttcgggggagaacctttcaagtgcaattctgcaatgtccgntgaccatgaaggggaaccttaagtcgcacatccgtatcaagcccagcgggan

SEQ ID NO: 3811 - DNA, 793 bp, Homo sapiens
  misc_feature (751)..(751): "n" may be a, t, c, g, other or unknown
  misc_feature (777)..(777): "n" may be a, t, c, g, other or unknown
  misc_feature (788)..(788): "n" may be a, t, c, g, other or unknown
gttggagcggcgctgctcggccgcggacacacgagggacgcgcccgaggagctgcaggtggcagcccaggcggtccgaacccgtcggccggccgagcctggagtattgcctaagtgtaatcttgaacatgggcggtgctgtgagtgctggtgaagacaatgaagagctgatagataatttgaaagaagcacagtatatccggactgagctggtagagcaggctttcagagctatcgatcgtgcagactattatcttgaagaatttaaagaaaatgcttataaagacttggcatggaagcatggaaacattcacctctcagccccgtgcatctactcggaggtgatggaagccctagatctgcagcctggactctcgtttctgaacctgggcagtggcactgggtatctcagctccatggtgggcctcattctaggtccttttggtgtgaaccatggggtggaacttcactcagatgtgatagagtatgcaaagcagaaactggacttcttcatcagaacaagtgatagttttgacaagtttgacttctgtgaaccttcctttgttactgggaattgcctggagatttctccggattgttctcagtatgatcgtgtatactgtggggctggcgtgcagaaagagcatgaagagtacatgaagaatcttctcaaagtgggagggatccttgtcatgccactggaagagaagttgactaagataacacgcacaggtccttcacttgggaaaccnaaaagattctgctggttcttttgctnctctgatccanccctg

SEQ ID NO: 3812 - DNA, 825 bp, Homo sapiens
  misc_feature (743)..(743): "n" may be a, t, c, g, other or unknown
  misc_feature (797)..(797): "n" may be a, t, c, g, other or unknown
  misc_feature (800)..(800): "n" may be a, t, c, g, other or unknown
agcaaataatcaatttagcattacaaaaaacagggatggtagggaaaatagaaggagaaaactctaaaataggtgatgataatgaaaatttaacctttaaattagaagtaaatgagctgagtggtaaattagacaacactaacgaatacaatagtaatgatggtaagaaattaccccagggtgaatcacgaagttacgaagtcatgggaagtatggaagaaaccttatgcaatatagatgacagagatggaaatcgcaatgtccatttagaatttacagaaagagagagtaggaaggatggagaggatgaatttgtcaaagaaatgagagaggaaagaaaatttcagaaattgaagaataaagaggaggttttaaaagcctccagagaagaaaaagtgttgatggatgaaggagcagtacttaccctggcagccgacctttcatcagcaacactggatattagtaagcaatggagtaatgtcttcaacattctgagagaaaatgattttgaacctaaatttctgtgtgaagttaaattagcatttaaatgtgatggtgaaataaagacattttcagatctgcaaagccttagaaaatttgccagccaaaaatcttctatgaaagaattactgaaagatgtactcccacaaaaggaagaaataaatcaaggaggaagaaaatatggaattcaagaaaaaagggataaaaccctaatagactcaaagcatagagctggagaaatnaccagtgatggcttgagcttcctatttcttaaagaagtaaaagttgctaagccngangagatgaaaacttagagactcagga

SEQ ID NO: 3813 - DNA, 743 bp, Homo sapiens
  misc_feature (631)..(631): "n" may be a, t, c, g, other or unknown
  misc_feature (661)..(661): "n" may be a, t, c, g, other or unknown
  misc_feature (666)..(666): "n" may be a, t, c, g, other or unknown
  misc_feature (740)..(740): "n" may be a, t, c, g, other or unknown
agcaaccattgctagtaattctttaatgtgtataaattcaatttcaggtataacaaatgtgatcatgacatgaaaatattctagaatagatactgtattaaatattgccatgtttacaatatgtaatatgtttttagccgatggatttaaacatgtagattcaactagaatccatttgtgatatttgtaaataaaggtagaaatattagatccatttctgcagaacttactgtacagtttagttggagtgtagcactgaagaactgtcagctcagcgttgactgaggagatagtgaaaatagcctatacacagcatcttgtgaaaagtactggcagccgtggttgcagcaaataatagggcaaaaaaaataataatagggtggtcggttccctttcatctccctcttctgaaaggaaaaaattgaattggaacgttcaagtccagtttgtgttcagtcataaaactgggccagttgttaaccttacagaatgagtcatgtggccagaccttcaagtccaaggccttcagacactaaggatgggaaaatgggtatttttctttggagaaaagctggaaatataaacatggcatttttaggtaaagctcttccactagttgaattttcatgcncatattttttcttaaccgttggtgccagtnaagcnaagagtattatgatggaaaaagaccagtccaagccccatcggtccggaatgggagcccatggtcttggctaatnggt

SEQ ID NO: 3814 - DNA, 812 bp, Homo sapiens
  misc_feature (676)..(676): "n" may be a, t, c, g, other or unknown
  misc_feature (706)..(706): "n" may be a, t, c, g, other or unknown
  misc_feature (744)..(744): "n" may be a, t, c, g, other or unknown
  misc_feature (796)..(796): "n" may be a, t, c, g, other or unknown
  misc_feature (806)..(806): "n" may be a, t, c, g, other or unknown
cgcacgttctggctggcaccgctaatccgacggttgccaaaagaaacatgactttgcctggcgagaacggtcaaaacttggtggaatggagattccgaaaagagcaagcccaagggaaagtcaatgtctttggccgcaagctcagggttaatggcagaaacctcctttcagttgactttgatcgaacaacaaagacagaaaagatctatgacgaccaccgtaaatttctactgaggatcgcctacgacacgtctgggcacccgactctctggctgccaagcagcaagctgatggccgtcaatgtcacctattcatccacaggtcaaattgccagcatccagcgaggcaccactagcgagaaagtagattatgacggacaggggaggatcgtgtctcgggtctttgctgatggtaaaacatggagttacacatatttagaaaagtccatggttcttctgcttcatagccagcggcagtacatcttcgaatacgatatgtgggaccgcctgtctgccatcaccatgcccagtgtggctcgccacaccatgcagaccatccgatccattggctactaccgcaacatatacaaccccccggaaagcaacgcctccatcatcacggactacaacgaggaagggctgcttctacaaacagctttcttgggtacaagtcgganggtcttattcaaatacagaaggcagactangctctcagaaattttatatgatagcacaagaagtcagntttacctatgatgaaacagcaggagtcctaaagacagtaaaccttcagaggngatggtttanttgccc

SEQ ID NO: 3815 - DNA, 771 bp, Homo sapiens
  misc_feature (285)..(285): "n" may be a, t, c, g, other or unknown
  misc_feature (499)..(499): "n" may be a, t, c, g, other or unknown
  misc_feature (586)..(586): "n" may be a, t, c, g, other or unknown
  misc_feature (723)..(723): "n" may be a, t, c, g, other or unknown
  misc_feature (730)..(730): "n" may be a, t, c, g, other or unknown
  misc_feature (750)..(750): "n" may be a, t, c, g, other or unknown
ggagacgcggcggcgctggacgcggaggcgctgggcgcacggcgcggagccggccggagctcgaggccggcggcggcgggagagcgacccgggcggcctcgtagcggggccccggatccccgagtggcggccggagcctcgaaaagagattctcagcgctgattttgagatgatgggcttgggaaacgggcgtcgcagcatgaagtcgccgcccctcgtgctggccgccctggtggcctgcatcatcgtcttgggcttcaactactggattgcgagctcccggancgtggacctccagacacggatcatggagctggaaggcagggtccgcagggcggctgcagagagaggcgccgtggagctgaagaagaacgagttccagggagagctggagaagcatcgggagcagcttgacaaaatccagtccagccacaacttccagctggagagcgtcaacaagctgtaccaggacgaaaaggcggttttggtgaataacatnaccacaggtgagaggctcatccgagtgctgcaagaccagttaaagaccctgcagaggaattacggcaggctgcagcaggatgtcctncagtttcagaagaaccagaccaacctggagaggaagttctcctacgacctgagccagtgcatcaatcagatgaaggaagttgaaggaacagtgtgaggaaccgaaatttaagaggtcaccaaaaagggggaatgaancttgtanctttccagagaccttgaatngaaaaaccaacgaaccagaag

SEQ ID NO: 3816 - DNA, 850 bp, Homo sapiens
  misc_feature (705)..(705): "n" may be a, t, c, g, other or unknown
  misc_feature (800)..(800): "n" may be a, t, c, g, other or unknown
  misc_feature (802)..(802): "n" may be a, t, c, g, other or unknown
  misc_feature (811)..(811): "n" may be a, t, c, g, other or unknown
gtgaaaggagggaacgcaggtgagaaagcgagacaggcaggtagggaaatcgtgaggtgagcgtgatcctagctccttgtggcagagcctagagagaaggcgaggacgctgaagaaccaggcggacagctggcagagagagaagttggctagcatggaatcaccagaggagcctggagcatccatggatgagaactactttgtgaactacactttcaaagatcggtcacattcaggccgtgtggctcaaggcatcatgaaactgtgtctagaggaggagctctttgctgatgtcaccatttcggtggaaggccgggagtttcagctccatcggctggtcctctcagctcagagctgcttcttccgatccatgttcacttccaacctgaaggaggcccacaaccgggtgattgtgctgcaggatgtcagcgagtctgttttccagctcctggttgattatatctaccatgggactgtgaaacttcgagctgaggagttgcaggaaatttatgaggtgtcagacatgtatcagctgacatctctctttgaggaatgctctcggtttttggcccgcacagtgcaagtgggaaactgccttcaggtgatgtggctggcagatcggcacagtgatcctgagctctatacggctgccaagcactgtgccaagacccacctggcccagctgcagaatacagaggaatttctncacttgccccaccgcttactccagatatcatctcggatggagttccgtgttctcagacccaacagaggcaatagaacctggatcactttataaanangaaagaaangcttttgcagaatcctcaggacagcttgaaggaaattgg

SEQ ID NO: 3817 - DNA, 823 bp, Homo sapiens
  misc_feature (12)..(12): "n" may be a, t, c, g, other or unknown
  misc_feature (32)..(32): "n" may be a, t, c, g, other or unknown
  misc_feature (225)..(225): "n" may be a, t, c, g, other or unknown
  misc_feature (251)..(251): "n" may be a, t, c, g, other or unknown
  misc_feature (734)..(734): "n" may be a, t, c, g, other or unknown
  misc_feature (771)..(771): "n" may be a, t, c, g, other or unknown
  misc_feature (822)..(822): "n" may be a, t, c, g, other or unknown
gtacttgggcanagctccccggggttcattgncttcgcttcacaggatctgtttgagtcctgtccaccggatcctacggggggtaccttcgaaaaaaaacgggctatgctgctgttgcgtgtgggtaccctctcctgacgcctccgccgcccgggtcatgtggaccctcgtgggtcggggctgggggtgcgcacgcgctctcgcgccacgagccactggggccgngcttctggtggccccggggccccggnccgcgccgacccttggggctgctccagagtcctgggctaccgacaggctctacagctccgcagaattcaaggaaaaacctgacatgtctaggtttcctgttgaaaatattagaaatttcagtattgttgcacacgtggatcatggcaaaagtactttaactgacaggctcctagaacttacagggacaattgataaaacaaagaataataagcaggttcttgataaattgcaagtggaacgagaaagaggaatcactgttaaagcacagacagcatctctcttttacaattgtgaaggaaagcagtaccttttaaatctcattgatacaccgggccatgttgattttagttatgaagtatccaggtcactttctgcttgccagggtgttttacttgtggttgatgcaaatgagggaattcaagcccaaactgtagcaaacttctttcttgccttcgaagcacagctatcggtaattccagttntaaataagatagatctgaagaatgctgatcctgaaanggttgaaaaccaaattgagaaagtggttgatatttccaagtgatgaaatgna

SEQ ID NO: 3818 - DNA, 879 bp, Homo sapiens
  misc_feature (768)..(768): "n" may be a, t, c, g, other or unknown
ttggatattgaatctgtaattaccttttattgtaaatcacgtaacattaaatatagcacatcccttagctggatacatctactgaaaccattggtgcatcttcaactgccacgcagcgatttatacaactgcttttatgccataatgaataagtacattcccagggattgttcccagaaagggagaccatttcatctcttcaggttgctcatccaataccatgagcctgagctttgttcttatcttgatacaaagaaaattactccagactcctatgcactcaactggcttggaagtctttttgcatgttactgttccactgaagtcactcaggcaatatgggatggatatctacaacaagcagatccattttttatttatttcttaatgttaattatccttgttaatgcaaaagaagttattttaacacaagagtcagacagcaaagaagaagttatcaagttcttggaaaatactccatccagtctgaatatagaagatatagaagaccttttctctctggctcagtattattgcagcaaaacaccggcttcttttaggaaggataatcaccatctctttggtagtactttgttgggaattaaggatgatgatgcagatctgagtcaggctctttgtctggccatctccgtgtcagagatccttcaagcgaatcagctacaaggggaaggagtccggttctttgtggtggattgccgtcctgcagaacaatataatgctgggcatttatcaactgctttcccttanattcagacctgagcttcagaatccatctgagttgcacagtcagtaaaatcctgctggaacccagaagcagtccatgggtctgggttcataacttggtggggagcaccttgt

SEQ ID NO: 3819 - DNA, 735 bp, Homo sapiens
  misc_feature (683)..(683): "n" may be a, t, c, g, other or unknown
  misc_feature (707)..(707): "n" may be a, t, c, g, other or unknown
  misc_feature (718)..(718): "n" may be a, t, c, g, other or unknown
ggattttttctgaaccagccaggaaataccggaacccaccaaactttaaacaccagcctaaattattcctgttcttttaagcaggcagcagaaatgacagaaacccgttaacagaaaaaaaaaaaataatgcttttcatttgaactcctgtgcattttctttttaacttatatgtgttcctaattttccttactctttttgtttgtttgtttcttagtgtggtttattgacaatcatttacaatgccgaagagtgctgtagtgagccagcacagtgggtaacacagcaacggagaacagatgcaggtttgaggaatttaacttgctaaaaccttgaactgaagtcttagagattggaacatacgggtttgtataaataggcttttaagccctgtttgcaatgggttactgataggagaaacttgcttgtggaatgtcagctgcgtgagctcactgtcagacaagatggaagaagaagggctggagtgtccaaactcttcctctgaaaaacgctattttcctgaatccctggattccagcgatggggatgaggaagaggttttggcctgtgaggatttggaacttaacccctttgatggattgccatattcatcacgttattataaacttctgaaagaaagagaagatcttcctatatggaaagaaaaatactcctttatgganaacctgctttcaaaatcaaatcgngattggttcanggagatgctaaatgtgg

SEQ ID NO: 3820 - DNA, 816 bp, Homo sapiens
  misc_feature (708)..(708): "n" may be a, t, c, g, other or unknown
  misc_feature (755)..(755): "n" may be a, t, c, g, other or unknown
  misc_feature (799)..(799): "n" may be a, t, c, g, other or unknown
  misc_feature (813)..(813): "n" may be a, t, c, g, other or unknown
agcggcccggccgggggggcaagatggcggcggcagtaggggttcgtggccggtacgagctgccgccttgctccggcccaggctggctcctcagcctttccgccttgctgagtgtggcggcacgaggggccttcgccaccacgcactgggtcgtcacggaggacgggaaaatccagcagcaggtggattcaccaatgaacttgaagcatcctcatgacctagtcatattaatgagacaagaagcaacagttaactacctcaaagaattagagaaacaattagttgctcaaaaaattcacatagaagagaatgaggacagagacacaggactggaacagagacataataaagaagacccagactgcatcaaagccaaggtgcccttaggggacctggatctatatgatggcacatacataactttggagagcaaagacatcagtcctgaagattatatagacacagaatctcctgtccctccagacccagagcaacctgattgtactaaaattctagaacttccatgtagtatacatgcttttcagcacttgagaggtgtacaggagagagttaatctttctgcacctctgctacctaaagaagacccaatcttcacatatttatctaaacggttaggaaggagtatagatgacataggtcacctcattcatgaaggcctacagaagaacacttcctcgtgggtactgnataacatggcttcattttactggagaattaagaatgagccatatcangtagtagaatgtgccatgccagcacttcacttctctttcaggcncaattaaaagacanttg

SEQ ID NO: 3821 - DNA, 887 bp, Homo sapiens
  misc_feature (833)..(833): "n" may be a, t, c, g, other or unknown
  misc_feature (856)..(856): "n" may be a, t, c, g, other or unknown
  misc_feature (887)..(887): "n" may be a, t, c, g, other or unknown
tgtttttatgttaaaccaaacatgtctcttcggaacacagtctgtatacaaataacatgcatgaggactttccatttaatctgtgattcagccacatgatgtttttgccaaatgatgtgatactttccaaagcaccttgagtgtgaaatgtcaacagaaatatcagcaagcttttatgttgcagagtattatggtacctctgaattagcctgtatagttctcttcctgctttaagcattacctggttagctcagacggcttgaggcagtcccttaataatagggatgcttttcatctctaaggatgtaagaggcaaacaaatcatgtcattctttaagtgggctatgctttgatagatgtgctctttaaaggtgtgagattggaatttagagttgttaaattgaaatgtttgcattgcaccaaaggagctcagttttcaaactttaatggaaccttgggtaaagggaaaaaatttttaatgaaatctggggttttatattttgattagcctaaaagtaaaaatacagctttatccattaagtgacttttaaaaatcagttttgccataccaaagaaattagattcttagtgtcacatgctatacttttgtctgtgcttgaaacgagcaatgccaacattgggagcaatgacagaggtttgcatcagtttgtcttggctttggtaaggacttctgccagaaatgtgctcgtggttgacaacccaggatcattggtcaagttcttatgcagacacctttgaaaacaattcagatcgtgtcacaagaatctgggaattgaaaatatcatttattttttaatgccaggaatacccanatgtgggttcacttcagcagtanctataggggtcacttatatacattctggtcn

SEQ ID NO: 3822 - DNA, 863 bp, Homo sapiens
  misc_feature (772)..(772): "n" may be a, t, c, g, other or unknown
  misc_feature (791)..(791): "n" may be a, t, c, g, other or unknown
  misc_feature (857)..(857): "n" may be a, t, c, g, other or unknown
acacatccgcgcagaccaggaagcggatcccgtggattgaaggtcgcaccgcggcggattgacttctaaagacttggtacgtgaggaaaaaacacggaagaggaagaggaaagcaaaggagtcagggatggctcttcctcagggtctactgacattcagggatgtggccatagaattctctcaggaggagtggaaatgcctggaccctgctcagaggactctatacagagacgtgatgctggagaattataggaacctggtctccctggatacctcttccaaatgcatgatgaagatgttctcatcaacaggacaaggcaatacagaagtggtccacacagggacattgcaaatacatgcaagtcatcacattggagatacttgcttccaggaaattgagaaagatattcatgactttgtgtttcagtggcaagaaaatgaaacaaatggccatgaagcactcatgacaaaaatcaaaaagttgatgagtagtacagagcgacatgatcaaaggcatgctggaaacaaacctattaaaaatgagcttggatcaagctttcattcgcatctgcctgaagtgcacatatttcaccccgaagggaaaattggtaatcaagttgagaaggccatcaacgatgctttctcagtttcagcatcccaacgaatttcctgtaggccaaaaactcgtatttctaataagtataggaataatttcctccagtcttcattactccacaaaaaccgggaagtacacacaagagaaaaatctttncaacgtaatgagagtggcnaagcctttaatggtagcttacttcttaaaaaaacatcagattaatccatttaggagacaaacagtntaaatg

SEQ ID NO: 3823 - DNA, 835 bp, Homo sapiens
  misc_feature (722)..(722): "n" may be a, t, c, g, other or unknown
  misc_feature (753)..(753): "n" may be a, t, c, g, other or unknown
  misc_feature (811)..(811): "n" may be a, t, c, g, other or unknown
  misc_feature (822)..(822): "n" may be a, t, c, g, other or unknown
aaatccagcagctcttccagctggtcagacagttcagctaactggacaacctaacataactccatcttcttcaccatcacctgtcccagctactaataaccaagtccctactgccatgtcgtcgtcctctacccctcaatcacagggaccacctcctactgtcagtcaaatgttatctgtgaaaaggcagcaacagcagcaacattcaccagcacccccaccacagcaggtacaagtacaagttcagcagccccaacgagtacagatgcaagttcaacctcaacagtcgaatgcaggagttggtcagcctgcctctggtgagtcgagtctgattaaacagcttctgcttccgaaacgtggtccttcaacaccaggtggtaagcttattctcccagctccacagattcctccccctaataatgcaagagctcctagccctcaggtggtctatcaggtggccagtaaccaagccgcaggttttggagtgcaggggcaaactccagctcagcagctattggttgggcagcaaaatgttcagttggtcccaagtgcaatgccaccctcagggggagtacaaactgtgcccatttcgaacttacaaatattgccaggtccactgatctcaaatagcccagcaaccattttccaagggacttctggcaaccaggtaaccataacagttgtgccaaatacgaagttttgcacctgcaactgtgagtcanggaaatgcaactcagctcattgcttcagcanggaattaccatgagcgggaacgcagacaggagttgggactttcagtacaaacgctttncaagccacttnaggcattttcctg

SEQ ID NO: 3824 - DNA, 562 bp, Homo sapiens
  misc_feature (81)..(81): "n" may be a, t, c, g, other or unknown
  misc_feature (475)..(475): "n" may be a, t, c, g, other or unknown
  misc_feature (489)..(489): "n" may be a, t, c, g, other or unknown
  misc_feature (556)..(556): "n" may be a, t, c, g, other or unknown
gacgccgccgccaccgcctcctcagagcggggcccgggcccagccgccgccaccgctgccgccgccgagctccggcgccgncgagcaccatgggagacgctgggagcgagcgcagcaaagcgcccagcctgccgcctcgctgtccctgcggcttctgggggtccagcaagactatgaatctctgttccaaatgctttgctgattttcaaaagaaacagccagacgatgattccgctccaagtacaagtaacagccaatcagatttgttttccgaagagaccaccagtgacaacaacaatacctcgataaccacgccaactcttagtcccagccagcagccgcttccgacagaactgaatgtaacttcaccgagtaaagaggagtgtgggccatgcacagacacagctcatgtctcattaatcacaccaacaaaaagatcctgtggtacagattcacagtctgagaatgaggcttnaccagtaaaacggncacgactacttgagaatacggaacggtccgaggaaaccagtcgatctaaacagaagagtcgacgtcngtgctt

SEQ ID NO: 3825 - DNA, 831 bp, Homo sapiens
  misc_feature (716)..(716): "n" may be a, t, c, g, other or unknown
  misc_feature (802)..(802): "n" may be a, t, c, g, other or unknown
  misc_feature (814)..(814): "n" may be a, t, c, g, other or unknown
  misc_feature (826)..(826): "n" may be a, t, c, g, other or unknown
agttggcgggaatggctgctcgcggaggggcagtgtacgcggggccgctgtaggctgtccagcgatggatcccaccgcgggaagcaagaaggagcctggaggaggcgcggcgactgaggagggcgtgaataggatcgcagtgccaaagccgccctccattgaggaattcagcatagtgaagcccattagccggggcgccttcgggaaagtgtatctggggcagaaaggcggcaaattgtatgcagtaaaggttgttaaaaaagcagacatgatcaacaaaaatatgactcatcaggtccaagctgagagagatgcactggcactaagcaaaagcccattcattgtccatttgtattattcactgcagtctgcaaacaatgtctacttggtaatggaatatcttattgggggagatgtcaagtctctcctacatatatatggttattttgatgaagagatggctgtgaaatatatttctgaagtagcactggctctagactaccttcacagacatggaatcatccacagggacttgaaaccggacaatatgcttatttctaatgagggtcatattaaactgacggattttggcctttcaaaagttactttgaatagagatattaatatgatggatatccttacaacaccatcaatggcaaaacctagacaagattattcaagaaccccaggacaagtgttatcgcttatcaactcgntgggatttaacacaccaattgcagaaaaaaatcaagaaccctgcaaacatcctttcaacctgctgtcttgaaacattacagctttnttaaggactcgnatgcccctatgnctgta

SEQ ID NO: 3826 - DNA, 539 bp, Homo sapiens
  misc_feature (183)..(183): "n" may be a, t, c, g, other or unknown
  misc_feature (460)..(460): "n" may be a, t, c, g, other or unknown
  misc_feature (486)..(486): "n" may be a, t, c, g, other or unknown
  misc_feature (522)..(522): "n" may be a, t, c, g, other or unknown
atttattgaggggcgtatcctagtggcccccatccggtctccgttttggaagacccgcctcggcacagccaggctcagtccggccttgcgctgagaaaagatgacagcaatcaagcatgcattacaaagagacatttttacaccaaatgatgaacgcctgctgagcattgtgaatgtctgcanagcaggaaaaaagaaaaagaactgttttttatgtgccacagtgacaactgaacgccctgtgcaggttaaggtggtcaaagtcaagaaatccgataagggagatttctacaaaaggcagattgcatgggcccttcgagatcttgctgtggtagatgccaaagatgctatcaaagaaaatcctgaatttgatttacactttgaaaaaatatataaatgggttgccagcagcactgctgaaaagaatgcatttatctcatgcatttggaaattgaatcancgatatctccggaagaaaattgattntgtcaatgttagctcacagcttttggaagaatctgntccaagtggagaaaatc

SEQ ID NO: 3827 - DNA, 860 bp, Homo sapiens
  misc_feature (683)..(683): "n" may be a, t, c, g, other or unknown
  misc_feature (691)..(691): "n" may be a, t, c, g, other or unknown
gtgctggcatcaagtaagccgactacctcggcaaaggcttagggacaagagaccagcagcctgaactggctggggcatccggaaggcttagatcttgtggccaagagttcagaccgtggcgaagtggagagtgacatgcagttggatggcggtgactgcgtggtatggaagaaaattcagctgaaatttgctagaaaatgagttgttttggaaagagactgtagagaaaggcaaatggaagaagaaagcttctgtgcccccacagataccgactgaaaagtgttagcatgagcaaaagttcctatctaatattatatgctttcctttgctcccaggtcttgcaaccctggttccagtctggcaagcattgtagacctggctgctgaagactgacggggcccagggtccgctgcccccaccgccatcaccacctcggaacccagggtaacgctgtcagtctttggaccaacctcgctgtgcctaacaagaattccagaagtcacccatccgaaaggcactggcccatgacactctccacttccaatcttaaatcttttacttcataccttgtctcagatctctcctggtaccccttccccacgcccttagataatccatctcaatccctcatgctaattgaggagctatggctgcaaggcacctttcaggatttcacacctacncaaatctnctttttctccttttgccttctctgcttatgggatattctgagtccccacccccaatcactgacagctgggccccttcattaagctacacaccacgtattaagtcaagtcacaatcttcccttttctctactgctggatttgctttctaccacacccatgattcacgggt

SEQ ID NO: 3828 - DNA, 850 bp, Homo sapiens
  misc_feature (714)..(714): "n" may be a, t, c, g, other or unknown
  misc_feature (819)..(819): "n" may be a, t, c, g, other or unknown
  misc_feature (824)..(824): "n" may be a, t, c, g, other or unknown
  misc_feature (845)..(845): "n" may be a, t, c, g, other or unknown
ttgctacatatggaactattattattagaaacctttcagtggaacctctgccttccaacagccgcccatttcattgagtattatctctctgaagcagtacacgaaacagatcttcatgacggctggccaatgatttgcttggaaaagactaaactctacatggccaaatatgcagattacttcctggaagtatctttgcaagctgctgcatgtgtggcttcttcgaggattatacttcgtctttctccaacgtggcctacaagactacatcgtcttactgcctactcttgggatttcttagtgcagtgtattgaacgactgttgatcgctcatgataatgatgtgaaagaagcaaacaaacagagagggcaagcaggacctcagtcagcgcaactaagtgtattccagacagcctcccagccatcacggccagttcactttcagcaacctcagtatctccatcagacacatcagacctcactgcagtatcgccatcctacgtcagaacaaccaagctgtcagcagattgtatcgaccacacacacctcatcttacacactacagacatgtcctgctggcttccaaactagtgttcagggccttgggcacatgcagactggtgttgggatgtcactggcaataccagtagaagttaagccctgtctgagtgtttcttacaaccggagttatcagataaatgaacattacccttgnattactccatgttttgaaaggtgattatttgtgaagctgataacccgacccagactgctttgtgacatgaactatgggtaaccgttttggaaactttggtcaaanggaanggatctaaatgacatcgactnttagg

SEQ ID NO: 3829 - DNA, 202 bp, Homo sapiens
gggccatgaggtccaccagccccagcaagagcacaagaggaagagagagaccctcactgctggggagtccctgccacactcagtcccccaccacactgaatctcccctcctcacagttgccatgtagaccccttgaagaggggaggggcctagggagccgcaccttgtcatgtaccatcaataaagtaccctgtgctcaacc

SEQ ID NO: 3830 - DNA, 880 bp, Homo sapiens
  misc_feature (784)..(784): "n" may be a, t, c, g, other or unknown
  misc_feature (831)..(831): "n" may be a, t, c, g, other or unknown
  misc_feature (856)..(856): "n" may be a, t, c, g, other or unknown
actagtgagaggaagatggcggccgcggctgtggtggttcccgcagagtggataaagaactgggagaaatcagggagaggcgaatttttgcatttatgtcggatcctcagtgaaaataaaagccatgatagttcaacatacagagatttccagcaagctctctatgagttgtcatatcatgtaattaaaggaaatctaaagcatgaacaggcatctaatgttcttagtgacattagtgaatttcgtgaggatatgccctccattcttgctgatgtattctgcatattagacattgagacaaattgtttagaagaaaaaagcaagagagactattttacacagttggtattagcatgtttgtttcagacacagttctaaaggaacgcctggatccagaaacactggaatcattagggcttatcaaacaatcacagcagttcaatcaaaagtcagttaaaatcaagacaaaactcttttataagcagcaaaaattcaatttgttaagagaagagaatgaaggttatgccaagctgattgctgaattggggcaagatttatctggaagtattactagtgatttaatcttagaaaatatcaaatctttaataggatgctttaatctggatcccaatagagttttggatgtcattttagaagtgtttgaatgcaggccagaacacgatgacttctttatatctttggtagaatcttacatgagtatgtgtgaaccgcaaacactgtgtcatattctttgggttcaaattcaagttttacccaggaaccnaatggcgaagacaccatcatctttataccgagttgcagcagtacttntacaatttaatcttattggtttaanatgatccttatgtccatcttcttc

SEQ ID NO: 3831 - DNA, 824 bp, Homo sapiens
  misc_feature (759)..(759): "n" may be a, t, c, g, other or unknown
  misc_feature (786)..(786): "n" may be a, t, c, g, other or unknown
  misc_feature (816)..(816): "n" may be a, t, c, g, other or unknown
aaacgcaggtagccaaagtggcttgtggagtggcgaccgttagtgaggcggttgctgagacagacgctgaggcgggtaggaggagcccgagccgtaagggaagccgtgatgagggccgtgttgacgtggagagataaagccgagcactgtataaatgacatcgcatttaagcctgatggaactcaactgattttggctgccggaagcagattactggtttatgacacctctgatggcaccttacttcagcccctcaagggacacaaagacactgtgtactgtgtggcatatgcgaaggatggcaagcgctttgcttctggatcagctgacaaaagcgttattatctggacatcaaaactggaaggcattctgaagtacacgcacaatgatgctatacaatgtgtctcctacaatcctattactcatcaactggcatcttgttcctccagtgactttgggttgtggtctcctgaacagaagtctgtctccaaacacaaatcaagcagcaagatcatctgctgcagctggacaaatgatggtcagtacctggcgctggggatgttcaatgggatcatcagcatacggaacaaaaatggcgaggagaaagtaaagatcgagcggccggggggctccctctcgccaatatggtccatctgctggaacccttcaagagaggaacgtaatgacatcctgctgtggctgactggggacagaaagtttccttctaccactgagtggaaaacagattggaaaggatcnggcactgactttgacccctgctgcatnactctttactaaaggcagtacattttgctngggggtta

SEQ ID NO: 3832 - DNA, 828 bp, Homo sapiens
  misc_feature (739)..(739): "n" may be a, t, c, g, other or unknown
  misc_feature (785)..(785): "n" may be a, t, c, g, other or unknown
  misc_feature (823)..(823): "n" may be a, t, c, g, other or unknown
tttattgaccacagccactttagaaaagcttcctgtaccccaggtcagtgcaactacagcacctgctggatcagctccaccctcgagcactttgccagcagcttctagccttaaaaccccaggaacttctttaaacatgaatggacccactttaagaccaacctctagtatccctgctaataatcctttagtgactcagctgcttcaaggcaaagatgttcccatggagcaaattctgcctaaacctctcaccaaagttgaaatgaaaacggttccactgactgcaaaagaggaaagggggatgggagcgctcatagctaccaacacaacagaaaatagcaccagagaggaagttaatgagagacagtcccatccagctacgcagcagcagctgggcaaaaccttgcaaagtaagcagctcccccaggttccaaggccccttcagctcttttcagctaaggagctgagggactccagcattgacacacaccaataccacgaaggactaagtaaagcaacccaagatcagatccttcagactctcattcagagggttcggaggcagaatcttctctcagttgtgccgcctcacagttcaacttcgctcactcaggtttccagctggaagacatctccacaagccagaggttcatgctgggttttgctggcagaaggacatccaaacctgcaatggcagggcactacttactgaatatttctacctacggccggggctcanagagctttaggaggacccattctgtaaaccctggaaatcggtttgnctaacagccccactgaagccttgaaaatgggatatacngactg

SEQ ID NO: 3833 - DNA, 797 bp, Homo sapiens
  misc_feature (704)..(704): "n" may be a, t, c, g, other or unknown
  misc_feature (730)..(730): "n" may be a, t, c, g, other or unknown
  misc_feature (767)..(767): "n" may be a, t, c, g, other or unknown
actgttccgcgggcaccggcagcgcagcgtctccgatagtaagtcgggctgccggccggctcattcccccagggtaactctgagcccccggctccgagctccctcgaggccgcctaccggcgtcgggaacatggatgagaaatccaacaagctgctgctagctttggtgatgctcttcctatttgccgtgatcgtcctccaatacgtgtgccccggcacagaatgccagctcctccgcctgcaggcgttcagctccccggtgccggacccgtaccgctcggaggatgagagctccgccaggttcgtgccccgctacaatttcacccgcggcgacctcctgcgcaaggtagacttcgacatcaagggcgatgacctgatcgtgttcctgcacatccagaagaccgggggcaccactttcggccgccacttggtgcgtaacatccagctggagcagccgtgcgagtgccgcgtgggtcagaagaaatgcacttgccaccggccgggtaagcgggaaacctggctcttctccaggttctccacgggctggagctgcgggttgcacgccgactggaccgagctcaccagctgtgtgccctccgtggtggacggcaagcgcgacgccaggctgagaccgtccaggaacttcactacatcaccatccttcgagaccagtgtcccggtacttgagtgaatggaggcatgtncagagaggggcaacatggaaagcatncctgcatgtctgcgatggaaggctcaacttcgaaaanttgccacttgtacactggcgatactggctg

SEQ ID NO: 3834 - DNA, 602 bp, Homo sapiens
  misc_feature (363)..(363): "n" may be a, t, c, g, other or unknown
  misc_feature (415)..(415): "n" may be a, t, c, g, other or unknown
  misc_feature (504)..(504): "n" may be a, t, c, g, other or unknown
  misc_feature (570)..(570): "n" may be a, t, c, g, other or unknown
  misc_feature (593)..(593): "n" may be a, t, c, g, other or unknown
ataacagcatgaagtgccgtggaactggaataggcgtgtcctctccctcgaccctccccctccttgtccctctgctcacccctcgctcgttccctccctccggcgagggccgcctttataacaactgctcagagtgcgagggcgggatagctgtccaaggtctcccccagcactgaggagctcgcctgctgccctcttgcgcgcgggaagcagcaccaagttcacggccaacgccttggcactagggtccagaatggctacaacagtccctgatggttgccgcaatggcctgaaatccaagtactacagactttgagataaggctgaagcttggggcatcgacctagaaacggtggccacagncggggttgtgacctcggtggccttcatgctcactctcccgatcctcgtctgnaaggtgcaggactccaacaggcgaaaaatgctgcctactcagtttctcttcctcctgggtgtgttgggcatctttggcctcaccttcgncttcatcatcggactggacgggagcacagggcccacacgcttcttcctctttgggatcctcttttncatctgcttctactgcctgctgnctcatgctg

SEQ ID NO: 3835 - DNA, 869 bp, Homo sapiens
  misc_feature (815)..(815): "n" may be a, t, c, g, other or unknown
  misc_feature (841)..(841): "n" may be a, t, c, g, other or unknown
  misc_feature (857)..(857): "n" may be a, t, c, g, other or unknown
tgtttcgaacactaaatagagaagaaattcctgttaatgatggaatagagctattgcagatggttctgaactttgataccaaggatcccctcatcctgtcctgcgtccttactaatgtctctgcactctttccatttgtcacctacagaccagagttcctgccccaggtcttctctaagctattttcatctgtcacttttgaaactgttgaagaaagtaaggcccccagaacccgggcagtgaggaatgtgaggaggcatgcttgttcctccatcatcaagatgtgtcgtgactacccccagcttgtgctgcccaattttgacatgctttataaccatgtgaagcaactcctctccaatgagctactcctgacacaaatggagaagtgtgccctcatggaagccctggttctcattagcaaccaatttaagaactacgagcgtcagaaggtgttcctagaggagctgatggcaccagtggccagcatctggctttctcaagacatgcacagagtgctgtcagatgttgatgctttcattgcgtatgtgggtacagatcagaagagctgtgacccaggcctggaggatccgtgtggcttaaaccgtgcacgaatgagcttttgtgtatacagcattctgggtgtggtgaaacgaacttgctggcccactgacctagaagaggccaaagctgggggatttgtggtgggttatacatccagtggaaatccaatcttccgtaacccctgcacagagcaaaattctgaaacttcttgacaatttgcttgcgcttataagaacccacaatcattatatgcnccagaaatgctaccaaaatggcaaancctttcaccaaggctntggatatgcttg

SEQ ID NO: 3836 - DNA, 806 bp, Homo sapiens
  misc_feature (767)..(767): "n" may be a, t, c, g, other or unknown
  misc_feature (784)..(784): "n" may be a, t, c, g, other or unknown
  misc_feature (794)..(794): "n" may be a, t, c, g, other or unknown
agtgtcatggctgcccacaggtctgcaggcactcggtacgccgctaacgcggcgaggtagctcggtgcgtctcgcggtaccagtgcgaatcatcgggctatccaggtccgagatcctagtctcctgtcggctctgaggaggatggatccttctgcggatacatgggacctcttctcacctttaatatcattatggataaacaggttttacatttatttgggctttgctgttagcattagcctttggatttgtgtccagattgtcatcaagacgcagggcaagaacttacaggaaaaatctgttccaaaagcagctcaggatttgatgacaaatggttatgtctcccttcaagagaaagacatctttgtgtctggagtgaagattttttatggttctcagactggaacagcaaagggattcgcaacagttcttgctgaagcagttacatccctggatctgcctgtggccattattaatctaaaagaatatgatccagatgatcatctgatagaagaggtgactagtaaaaatgtctgtgtcttcctggttgcgacatacactgacggcctaccaactgaaagtgcagagtggttctgcaaatggttagaggaagcatccattgattttcgatttggcaaaacttacctgaagggtatgagatatgcggtatttggcctgggaaattctgcctatgctagccacttcaacaaggttggccaaaaatgttgacaagtggctctggatgcttggcgcgcatcgtgtgattnaagcagggggaaggccnactgcgactnggttaaaaacca

SEQ ID NO: 3837 - DNA, 870 bp, Homo sapiens
  misc_feature (681)..(681): "n" may be a, t, c, g, other or unknown
  misc_feature (772)..(772): "n" may be a, t, c, g, other or unknown
  misc_feature (807)..(807): "n" may be a, t, c, g, other or unknown
atgctgcaaatgccgaagttaaatgaaatacctccggggagggcaggccgcagggaggctcggggggagggaagatggcctggacaaacaggtcctgaagctgcgaggctggagtggagggcgcaggggcaggcgggcggcgccagagctccatgggacagctggggaagctccaggctacctacacaacctggcccaggctggtcacggtgtcccccctccctgctctgtgccctctccttccagaaatccaccatggagagtaaggatgaggtcagcgacaccgacagtggcatcatcctgcagtctggccccgacagcccggtctccccaatgaaggagctgacccatgcagtgcacaagcagcagagggccctggaagcgaggctggaggcctgcctggaggagctgaggagactctgccttcgggaagcggagctgacgggcaccttgccagcggagtatcccctcaaaccaggggaaaaggcccccaaggttcgccgcaggatcggagcggcttacaaactggatgactgggccttgcacagagaggaccccctaagcagcctggagcgccagctggccctgcagctgcagatcacagaggcaagccgtcggctgtgcctggaggagaacctcagcaggcaggctcggcggcagcggaagcacttcatgctgcangaggagaagaactgcaggagcttcagcgcttgctggtcgagcggcggcgcaatagcgagccaccttccggctgctggtctcccctgggccnaaaactcaatggcttttgatgacagttccttgtanaatggctcttctggaaggaaaaggattccaagtggccaaaacttcttcagagtttcagccccc

SEQ ID NO: 3838 - DNA, 843 bp, Homo sapiens
  misc_feature (764)..(764): "n" may be a, t, c, g, other or unknown
  misc_feature (795)..(795): "n" may be a, t, c, g, other or unknown
  misc_feature (833)..(833): "n" may be a, t, c, g, other or unknown
acgtctgctcagctccgcggtaatggaggctagggatgggtgctgaagtatcaggctctggctctagctttagctctggcactggaactgcgtcggagtctgggtctgagtctggcagcccgaagcctggacaccttttcttgattctctaggcgggggctgcctgcgtccaagcagctggtttgcagcgttccaacgctgggagggagttcccttacctggggtccagtctgtaaagttgtcgccgctttctagggaccccgccccaccggctgggactcttccatgcagttgaaactggttgacaaccattaacctgggttgcaactacaggtggcactggaagcagactggttcctggacatgcccggtggaaggaggggccctagtcggcaacagctaagccgttcagctttaccttctttgcagactttggttggtggaggctgtggcaatggaacaggcttgagaaacaggaatggtagtgctattggccttccagtcccacctatcacagccttaatcaccccaggtcctgttcgtcattgccaaattcctgacttgcctgtggatgggagcctactctttgaattcctttttttcatctacctgttggttgctcttttcattcagtacatcaacatttataaaacagtgtggtggtatccttacaatcatcctgcttcttgtacatcactgaattttcatctcattgattatcatctggcagcattcatcacagtgatgcttgcgaagaagcttgnatggctctcatctcagaagctactaaggcangtgcagcatcaatgattcactacatgggtctgatatcncttgctttgg

SEQ ID NO: 3839 - DNA, 794 bp, Homo sapiens
  misc_feature (639)..(639): "n" may be a, t, c, g, other or unknown
  misc_feature (702)..(702): "n" may be a, t, c, g, other or unknown
  misc_feature (780)..(780): "n" may be a, t, c, g, other or unknown
  misc_feature (792)..(792): "n" may be a, t, c, g, other or unknown
taagtttcctttgattctacagtttgggggttctcaagcagttgcggctggtccgtattctgcgcagcaccgtgatggttcgcgttggtggaggatggatggccttggatgaatttttagtgaaaaatgatccctgccgagcacgaggtagaactaacattgaacttagagagaaattcatcctaccagagggagcatcccagggaatgacccccttccgctcacggggtcgaaggtccaaaccatcttcccgggcagcttcccctactcgttccagctccagtgctagtcagagtaaccacagctgtacatccatgccatcttctccagccaccccagccagtggaaccaagacttcacttcagttctctcgctgttatgacaaaccctggttggtaaacagtaaagctggcacccctatcagggacagccattctcctgacctccagctgcccacccccgaggttatcccatcatcaggtagcaagttgaaacgaccaacaccaacttttcattctagtcggacatcccttgctggtgataccagcaatagttcttccccggcctccacaggtgccaaaactaatcgggcaggtaagtacctgccccgtgacctacaagccaggctgagaatttggnaacaacagcctatgtggaatgtttcactgctcccaaggagcgggtaatgagagtggcacttantgtgatgcccaaaaagacagacctgcagatgctcaagtgacctttactttttctgtcattacagctagcttttaagcnttccttctgaanat

SEQ ID NO: 3840 - DNA, 754 bp, Homo sapiens
  misc_feature (487)..(487): "n" may be a, t, c, g, other or unknown
  misc_feature (677)..(677): "n" may be a, t, c, g, other or unknown
  misc_feature (690)..(690): "n" may be a, t, c, g, other or unknown
  misc_feature (739)..(739): "n" may be a, t, c, g, other or unknown
gacggcaccgtacacgagctcaccaagcaatgccatcctcttcctgcagcagcttttggacttccaggagacggcaggcgccatgctggcctcccaagagaccagctcttcggccaccagctacagctctgagttcagcaagcggctgctaagcacctatatctgtaaagtgctgggcaacctgcagttgaacttgctgagcaagtccctggagaagtctgaactgatccagctggtggcagtgacacagaagactgctgagcgctcctaccgggagcacattgagcagcagatccagacctaccagcgcagctggttaaaggtgactgattacatcgcagagaagaatctacctgtgttccagccgggagtcaagctccgggacaaggagcggcagattatcaaggagcgttttaagggcttcaatgatggcctcgaagaactgtgcaaaatccagaaggcctgggctattccagacacagagcanagggacaggattcgccaggcccagaagaccattgtcaaggagacctacggggcctttctacagaagtttggcaacgtgcccttcaccaagaacccggagaagtacatcaagtacggggtggagcaagtgggcgacatgatcgatcgccttttcgacacctctgctgagcctgctgctaaccctgcctggntcaacaaactggngtgtcattggcagttaaccaatgttacttgcctccgggctgggtgaacntgaagtcctctggga

SEQ ID NO: 3841 - DNA, 794 bp, Homo sapiens
  misc_feature (405)..(405): "n" may be a, t, c, g, other or unknown
  misc_feature (556)..(556): "n" may be a, t, c, g, other or unknown
  misc_feature (600)..(600): "n" may be a, t, c, g, other or unknown
  misc_feature (741)..(741): "n" may be a, t, c, g, other or unknown
  misc_feature (745)..(745): "n" may be a, t, c, g, other or unknown
  misc_feature (753)..(753): "n" may be a, t, c, g, other or unknown
gcattccggtaccggacgccgagagcggtttgtctccgtctctggagttgtaggcgagaggtgatcatgtccggtcgcgggaaacagggcggcaaagtgcgagcaaaggccaaatcccgctcctcccgcgcgggcctgcagttcccggtgggccgagtgcacagactgctgcgcaaagggaactacgcggagcgagtgggcgccggggcgccggtgtacctggcggcggtgttggagtaccttacggcggagatcctggagctggctggcaacgccgcgcgtgacaacaagaagaccaggataattccccgccacctgcagctcgccatccgcaacgacgaggagttaaacaagctgctgggcaaagtgaccatcgctcagggcggcgtcctgcccaacatccangccgtgctgctgccagtttgtgagcactcaggaccaagttctgggaagataccgtcggatcgagctgagctcggggcaggaagtgtctgcggccatatttttcaaaaagtggagtaactttccgtcttggaagggtggctctgatggcacnatgtcaacttgagattcttcctagcctagtagctgctgtgcttncatgctttggatatcagatatctttatatagcacttttatgttcatattttttttttaatgaaggaaacgttcaataagtgagtcatgaggtttggaaattcgttcccctgacagtcatattgcataacattgcaacgccnttantcgtgggntaaatatgcttgagcttttaaagtgatgtttgtcaagtttc

SEQ ID NO: 3842 - DNA, 766 bp, Homo sapiens
  misc_feature (702)..(702): "n" may be a, t, c, g, other or unknown
  misc_feature (758)..(758): "n" may be a, t, c, g, other or unknown
  misc_feature (763)..(763): "n" may be a, t, c, g, other or unknown
gcaatcgccgcagccgcccccgccgtcggccgccgcaccccaagcgactgcccaaactaagcctccgtggctgggtacgggagcgctttggggacaaaaattctccctcaactgtggtctgcattccttcggcccgtgggctgatctggggcgggaagtattagcgtctcagttgcgctgcagccggggaggaaggaggaggccgagcctggggcggagtttgggctgactggggctggaccgggcaagacgccgccgctgcccggatgttgcgatggctgatcgggggaggccgagaaccgcagggactggccgagaaatctcctttacagacaataggtgaagaacaaacccagaatccctacactgaactgctagtactgaaggctcatcatgatattgtacgatttctggtacagttagatgactacagatttgcatctgctggtgatgatggaattgtagttgtgtggaatgcccagacaggggaaaaacttttagaactgaatggacacactcaaaagataacagctattattacatttccttccttggaatcttgtgaagagaaaaatcaactcatcttgacagcctctgctgatagaacagttattgtgtgggatggtgatactaccagacaagttcagagaatatcatgcttccagtctactgtaaagtgtttaactgttcttcagagactanatgtttggctttctggtgggaatgacctgtgtgtgttggaaccgaaaaattagatntcccngtg

SEQ ID NO: 3843 - DNA, 811 bp, Homo sapiens
  misc_feature (561)..(561): "n" may be a, t, c, g, other or unknown
  misc_feature (613)..(613): "n" may be a, t, c, g, other or unknown
  misc_feature (675)..(675): "n" may be a, t, c, g, other or unknown
  misc_feature (692)..(692): "n" may be a, t, c, g, other or unknown
  misc_feature (730)..(730): "n" may be a, t, c, g, other or unknown
  misc_feature (776)..(776): "n" may be a, t, c, g, other or unknown
  misc_feature (805)..(805): "n" may be a, t, c, g, other or unknown
gcaaagattctcaacctgaagctgcgggaagcagagcagcagcgcgtgaagcaagcagaacaggagcggcttcggaaggaagaaggccaggtccgcctgcgggccctctatgctctgcaggaggagatgctgcagctcagccagcagctggatgcctctgagcagcacaaagccctgcttaaggtcgacctggctgccttccagacccgaggcaaccagctgtgcagcctcatctcagggatcatccgggcctcttcagagagcagctatcccacagcagagagtcaagctgaggctgagcgagctctgcgggaaatgcgggacctcctgatgaacttggggcaggagatcaccagagcctgcgaagacaagaggaggcaggatgaagaagaggcccaggtaaagctgcaagaggcacagatgcagcagggaccagaggcccacaaagagcccccagctcccagccagggcccaggagggaaacagaatgaagacctccaggtgaaggtacaagacattacaatgcagtggtaccagcagctgcaggatgcttccatgcantgtgtgttgacctttgagggcctgaccaacagcaaggacagtcaggccaaanagataaagatggacctccagaaggctgctaccatcccagtgagcaaatctctaccattgcangctcaaaactgaagganatcttgacaagattcaaaagcctgctctctgggaaaanctgttcaatctggtgggcgctctgtgtcttcacacttaacccacangggctggctttgtcatacaaactggcagngaaatt

SEQ ID NO: 3844 - DNA, 594 bp, Homo sapiens
  misc_feature (552)..(552): "n" may be a, t, c, g, other or unknown
  misc_feature (581)..(581): "n" may be a, t, c, g, other or unknown
  misc_feature (591)..(591): "n" may be a, t, c, g, other or unknown
gcaggccggccccaccctcctgacggtcaccctggtccctgaagctgcctggatatggtcgccatgcaggaagccgcccagcacctcctcggcacacacgacttcagcgccttccagtccgctggcagcccggtgccgagccccgtgcgaacgctgcgccgggtctccgtttccccaggccaagccagccccttggtcacccccgaggagagcaggtgaggaagggcccctgggctgtggccctgccctcaagtcacgtgctgattttagctccagcacctcccccagttttaaggcaaggcgaggccctcaacacacacctgcggcacccggccatcagggtcctgcgggccttccgagtgcccagcgacttccacgctcgtcacgcagccacgtcccggacctacctgtaccgcctggccactggctgtcaccggcgtgatgagctgccggtgtttgaacgcaacctatgctggactctcccggcagagtgagtgtggccctgacagcggggagggggcgggcaagccggcccaacctcctgacggtcancctggtccctgaagctgcctggatatggncgccatgcangaa

SEQ ID NO: 3845 - DNA, 528 bp, Homo sapiens
  misc_feature (526)..(528): "n" may be a, t, c, g, other or unknown
tttttccggtcggcgtggtcttgcgagtggagtgtccgctgtgcccgggcctgcaccatgagcgtcccggccttcatcgacatcagtgaagaagatcaggttagaaaatggatttctgactggaatctcaccactgaaaaaaagcacacccttttaagactactttatgaggcacttgtggattgtaagaagagtgatgctgcttcaaaagtcatggtggaattgctcggaagttacacagaggacaatgcttcccaggctcgagttgatgcccacaggtaatgttaaacgttactctgatgagggtttgacagcgatgtagaggtaagctacaatattaaattaagtaactgaaatcatgtttgcaactaccagtgatccagagccatttgatagtgtgtatttcctggtgattctaatgtagatactaaaattcaaggtttgatattggaagaactgtggattgaatatgaagtagctgcatggcgtttacctggcgggggggggtattgctggtatggggatnnn

SEQ ID NO: 3846 - DNA, 672 bp, Homo sapiens
  misc_feature (577)..(577): "n" may be a, t, c, g, other or unknown
  misc_feature (644)..(645): "n" may be a, t, c, g, other or unknown
aaaaaaaaaagagctccgtcctgacgcgccgcctcccgtgggctccggccggctaagccgcggcggacaactatgctgaaagccaagatcctcttcgtggggccttgcgagaccttgattccaaccactgcccggaggaggtagtggaggcgagcccggtgttaatgagccccgaaggcccaagagtggaaaaactgttttggccaactttctgacagaatcttctgacatcactgaatacagcccaacccaaggagtgaggatcctagaatttgagaacccgcatgttaccagcaacaacaaaggcacgggctgtgaattcgagctatgggactgtggtggcgatgctaagtttgagtcctgctggccggccctgatgaaggatgctcatggagtggtgatcgtcttcaatgctgacatcccaagccaccggaaggaaatggagatgtggtattcctgctttgtccaacagccgtccttacaggacacacagtgtatgctaattgcacaccacaaaccaagctctggagatgataaaggaagcctgtctttgtcgccacccttgaacaagctgaanctggtgcactcaaacctggaagatgaccctgaggagatccggatggaattcataaagtatttaaaanngcataatcaactccatgtctgagagca

SEQ ID NO: 3847 - DNA, 636 bp, Homo sapiens
  misc_feature (582)..(582): "n" may be a, t, c, g, other or unknown
  misc_feature (594)..(594): "n" may be a, t, c, g, other or unknown
  misc_feature (620)..(620): "n" may be a, t, c, g, other or unknown
aggaatgttggtgctcccagcacctagcaccgggagactggagaggtttccaggagagtgacccgagtaggtcccctcctaattctggagccgtccctcgggctgcgcagtggagcgccgaggtggcgggaggctgcggggagcctgcgcggccaagcaccatctgcagtcaggagctcccgggcagcttgcagggcgcagtttttgaaagcgggtgctgcgtgcggaccgcgggcctgcagggatcttttgccagaaatgagggcatactggcctgacgtaattcactcgtttcccaatcgcagccgcttctggaagcatgagtgggaaaagcatgggacctgcgccgcccaggtggatgcgctcaactcccagaagaagtactttggcagaagcctggaactctacagggagctggacctcaacaggtgggtgcgcccttcccccggctgcacttcccagtggggatctctgctgtcgcccaagcctgacagctggatccaggggagtgggtgtagacctcactgccctccaagcagcttctgcatgtgcactattcgactactggggatcattcctgangaatgttctgancctaccaagcctttccagatcattcnacatcacgatcacaca

SEQ ID NO: 3848 - DNA, 838 bp, Homo sapiens
  misc_feature (667)..(667): "n" may be a, t, c, g, other or unknown
  misc_feature (717)..(717): "n" may be a, t, c, g, other or unknown
  misc_feature (753)..(753): "n" may be a, t, c, g, other or unknown
  misc_feature (781)..(781): "n" may be a, t, c, g, other or unknown
  misc_feature (833)..(833): "n" may be a, t, c, g, other or unknown
tttatattgtgtaataactcacgtactctgaagagagcttggtcaaacaataaaatacattgttactaacttggtttcttttctgtgtactttgcaaaaattctatttttaattttgttcatatgttgaatgtgcccctaattggcatcttaaagagaatagtaagcatctattaaccaaaaaagaactctaatagtaaaggaaagggaaatattggtggtatgtacccacaaaacccccaagtgccaagttaatggaatctctgctttccctttcagatgctagaaagccactgtaatgagttcttgcagtttagcatccagtctaagctactgcattgtttaaagggcagcatcaaggacactttctccaaactggaactctcttctttgtcaaatcttgtactttaaaattctacaattctgttacattgttgtttaaatcacagactgctcagatccattttactgcagtagtttccaagtgtgtaacttggctttagtatttatcagttgccagaaagaaacaggttgtcatttggaagtttttgtgggtattttttcccatttttattcctcaagataaaagcagtaccccaaaatagaaaatgaaaatttcatgaaacaaagagaactcccttgttaaaaccagcttattaactccgtantctgtcaaatgcatttttttccaacaactgaccatggatgttgtgaaggngcattttaatttaaacatgggaaaagattttttcanaattacatactaagaatgtaaaattaanaattttgccaaggacttaaagagcacagttgataatcccaaagggtttgatnccaaa

SEQ ID NO: 3849 - DNA, 716 bp, Homo sapiens
  misc_feature (690)..(690): "n" may be a, t, c, g, other or unknown
  misc_feature (693)..(693): "n" may be a, t, c, g, other or unknown
  misc_feature (699)..(699): "n" may be a, t, c, g, other or unknown
agtcagaggttaacggaaaacggaagctggctggctgagaagaagcttccgttagtcctaccttgaagagaaaagagccagataaagagaaagattaaaagtatgagaaaatacagaagccactggtctcagggagacagagaaggataccaaagaagaagtaactattatgaggggccacacaccagccactcaagccctgcggaccggacacgtgaggaggtagtgacgccgacactgccagaacacactgctacaaggtcccagatggccacgtctctggattttaaaacttatgtagatcaggcatgtagagctgctgaggagtttgtcaatatttactatgagacaatggataaaagaagacgggcactaaccaggctgtatctggacaaggccaccttaatatggaatggaaatgctgtttcagggctggatgccctaaataatttttttgacacattgccttctagtgagttccaggtcaatatgttagattgccaaccagttcatgagcaagcaactcagtcccaaactacagttcttgttgtgaccagtggaactgtgaagtttgatggaaacaaacaacatttcttcaaccagaacttcctgctgactgctcagtccactcccaacaatactgtgtggaagattgcaagtgattgcttccgttttcaagaatgggccaantantttaangggcaaaaagtccaatc

SEQ ID NO: 3850 - DNA, 588 bp, Homo sapiens
  misc_feature (25)..(25): "n" may be a, t, c, g, other or unknown
  misc_feature (178)..(178): "n" may be a, t, c, g, other or unknown
  misc_feature (352)..(352): "n" may be a, t, c, g, other or unknown
  misc_feature (491)..(491): "n" may be a, t, c, g, other or unknown
  misc_feature (537)..(537): "n" may be a, t, c, g, other or unknown
  misc_feature (572)..(572): "n" may be a, t, c, g, other or unknown
ttcttgctcagtataccttcacganttcttgctaagattccaaaatctttagcttggcatttgggattttctacagtacgaaccctgtccatcacataaaccttaacgtcactacatgtgcttatgcaaaaggggctgcctgaatgagttgcttgagtgtatgtactagttggataantacctgtttgccattgcttgctgtttatattacctggaatgccatccttttcttcttgacagctttagcacacatccctcctcagtaaaaatagtggcttaagtttcctgagtgcttacgtctgtgaggcaccatgcctttaatttccactattgcattgaagcagtggatatngttatcagtcaagccttgaacattagaatatacacacccaaatatatatacacaccttgtgacacaggtactgttatcatcatcttgcatttggaggatttgtccaagatcacatacctagtaagtagcacgagtgggnctctgtctcatgtaattccagagcccaggtgcttaagtcatactcnagtgccatagcacttacagctaacacttactagangaccagttacatgtca

SEQ ID NO: 3851 - DNA, 850 bp, Homo sapiens
  misc_feature (618)..(618): "n" may be a, t, c, g, other or unknown
  misc_feature (709)..(709): "n" may be a, t, c, g, other or unknown
  misc_feature (734)..(734): "n" may be a, t, c, g, other or unknown
  misc_feature (807)..(807): "n" may be a, t, c, g, other or unknown
  misc_feature (810)..(810): "n" may be a, t, c, g, other or unknown
  misc_feature (847)..(847): "n" may be a, t, c, g, other or unknown
ttcccttaggccgatgcgtggagaccattgtttctgccatcaaggaaaacttccaattcaagaaggatggacactgcttgaaagaaatctaccttgtggatgtatctgagaagactgttgaggcctttgcagatgctgttggtgaaagagggtgtgcagaatgctaagaccgatgttgttgtcaactccgttcccttggatctcgtgcttagtagagggcctctttctaagtccctcttggaaaaagctggaccagagctccaggaggaattggacacagttggacaaggggtggctgtcagcatgggcacagtgctcaaaaccagcagctggaatctggactgtcgctatgtgcttcacgtggtagctccggagtggagaaatggtagcacatcttcactcaagataatggaagacataatcagagaatgtatggagatcactgagagcttgtccttaaaatcaattgcatttccagcaataggaacaggaaacttgggatttcctaaaaacatattcgctgaattaatcatttcagaggtgttcaaatttagtagcaagaatcagctgaaaactttacaagaggttcactttctgctgcacccgagtgatcatganaatattcaggcattttcagatgaatttgccaaaagggctaatggaaatctccgtcaagtgacaaaattccgaagggctaaagatacacaanggtttttaaggggactgtttccaanccctgattcaaggtgtgtatgaaatggaagattgggtccatcatcttccaagtgggcttccggagaattcacnaanaggggaagggaaatgtgattgtaaattcaacatcaanact

SEQ ID NO: 3852 - DNA, 627 bp, Homo sapiens
  misc_feature (371)..(371): "n" may be a, t, c, g, other or unknown
  misc_feature (414)..(414): "n" may be a, t, c, g, other or unknown
  misc_feature (425)..(425): "n" may be a, t, c, g, other or unknown
  misc_feature (510)..(510): "n" may be a, t, c, g, other or unknown
  misc_feature (540)..(540): "n" may be a, t, c, g, other or unknown
  misc_feature (568)..(568): "n" may be a, t, c, g, other or unknown
  misc_feature (614)..(614): "n" may be a, t, c, g, other or unknown
agacgggctgcaagagggagccggcccgacgcggaccgcttccctgcagtgccccgagtcccgggcccgcgccgccgccgcccggctccgctcgcggcccctctgtctgcaggcgtgccccggcggcggcggagagccgtcctcggccgaggaggctgggaaacgcgagcgcaggcggcagagaggcctcaacgccgtccctttcgccaccgccttttccttgcctcgcgccgctgtgcatttctctccttttcctttgtttttttggcccctcgcgggtgtgggcattgttggttagcaaaagtgcagcctcaagatggctgatggcaacgaggatctgcgggctgacgacttgcctgggccagccttcnagagctatgagtccatggagcttgcctgccccgctgagcgcancggccacgtanccgtcagcgacgggcgccacatgttcgtctggggcggctacaacagtaatcaagtcagaggattatatgacttttatctgcctanagaagaactatggatctacaacatggagantggaagatggaaaaaaatcaacactgantgtgatgttcctccttctatgtcatgaagctgtgctgtgtgtgtanacaggtgctgtac

SEQ ID NO: 3853 - DNA, 772 bp, Homo sapiens
  misc_feature (732)..(732): "n" may be a, t, c, g, other or unknown
  misc_feature (740)..(740): "n" may be a, t, c, g, other or unknown
  misc_feature (763)..(763): "n" may be a, t, c, g, other or unknown
attaatcccaatataaggttataatatttttctttacattctttttttagtaagaaaaatgtagttttgaaccatcatataatactagaactaattaggagaaatttaaatcctctttgctttatataagtatagtatatatttatttagcagaataaatgtttatggttgaaaatggctgggattatagttgtgagccattgtgcctggcctattttcagtatttttgtttaaattttgtaaaaaggtaaaataaatgatttttgaaaatagctggagttgttttcatagagtctgtggttataggactatttaactatatattgagtaaaatctatgctatgtcaagttttattcagttgtccctagtagaatatatttctcttttaattctgtatacagtatgagtaactccagtttaaaacactggtattttaatgagtttaaattgtactgttatatattatgatacatatttttcttctggctgtggtttagtttttaaaatttttgatgtccattttaatttttagaaataaaagcttaaaaatatgggtggaagtagatttcagtttgatgattatcttggcgaaagtatagtacctgtgaaatggtggtaataatttgattctttattctattttgattgtagctccttttgtaagggagcatttgtaaaatttaagttgctttagagttatacaaaatccttttattaccatttattaaccngtttggtngttttagggacctggatcccaancctttgaag

SEQ ID NO: 3854 - DNA, 729 bp, Homo sapiens
  misc_feature (283)..(283): "n" may be a, t, c, g, other or unknown
  misc_feature (367)..(367): "n" may be a, t, c, g, other or unknown
  misc_feature (450)..(450): "n" may be a, t, c, g, other or unknown
  misc_feature (478)..(478): "n" may be a, t, c, g, other or unknown
  misc_feature (555)..(555): "n" may be a, t, c, g, other or unknown
  misc_feature (596)..(596): "n" may be a, t, c, g, other or unknown
  misc_feature (695)..(695): "n" may be a, t, c, g, other or unknown
  misc_feature (703)..(703): "n" may be a, t, c, g, other or unknown
  misc_feature (722)..(722): "n" may be a, t, c, g, other or unknown
ttctttctttcattccttccttcctctgtttctttctttcttcctttcatttttttttcttttttaagagcgagcggctctgcggtggcggtttggggtgggcgccgccgaggtgaggtcgtctcgcctcccgcgcgccggtagattggttgtttcattatggatggaggggatgatggtaaccttattatcaaaaagaggtttgtgtctgaggcagaactagatgaacggcgcaaaaggaggcaagaagaatgggagaaagttcgaaaacctgaagatccanaagaatgtccagaggaggtttatgaccctcgatctctatatgaaaggctacaggaacagaaggacaggaagcagcaggagtacnaggaacagttcaaattcaaaaacatggtaagaggcttagatgaagatgagaccaacttccttgatgaggtttctcgacagcangaactaatagaaaagcaacgaagagaanaagaactgaaagaactgaagggaatacaagaaataacctcaagaaggttggaatttctcaagagaacaagaaggaanttggaaaagaaactgactgtgaagcctatagaaaccaagancaagttctcccaggcgaagctgttggcaggagctgtgaagcataagagctcagagagtggcaacagtgtgaaaagactgaaaccgggaccctgagccangatgacangaatcaggagccctcaacntgcaaag

SEQ ID NO: 3855 - DNA, 277 bp, Homo sapiens
  misc_feature (7)..(7): "n" may be a, t, c, g, other or unknown
  misc_feature (231)..(231): "n" may be a, t, c, g, other or unknown
  misc_feature (241)..(241): "n" may be a, t, c, g, other or unknown
  misc_feature (266)..(266): "n" may be a, t, c, g, other or unknown
acttaancgggatggaacggaacgggaggccccggctggtgggcaggtcgcctgctgctgatacaggaagggacaaagggctcggacgattccggtctttccttagctgctctccttgcaagctctttcatccccatgggtctcttgatgagtccaacaagacgggcatggagcccgatctcacagatggggaagctgatgccagcggcagcttcccccagcacagaaganagctcctggnattccagcaaggggtgactggaacnaaaaccaggga

SEQ ID NO: 3856 - DNA, 712 bp, Homo sapiens
  misc_feature (507)..(507): "n" may be a, t, c, g, other or unknown
  misc_feature (641)..(641): "n" may be a, t, c, g, other or unknown
  misc_feature (643)..(643): "n" may be a, t, c, g, other or unknown
  misc_feature (656)..(656): "n" may be a, t, c, g, other or unknown
gtaagtatgcacggatgaagatggaactaagccgagtaagaagacatacaaaagcctcttctgaaggaaaagacagtgtagtcctgcaaaacattttgaggtacattgttttgtctcagctattttgtagcagactcgtgcccccattagtgtgcctctttggaaattatcgcccacatttgtaatatagtcgccattgaaaagttaattatcctttttttagggattttgatgtcatttcttttttttttttaataaaaaggttgaactgttttttttttttttctttttggtattaagtccatcttgtgttggtacattggcagagacatatgctttaaaaacttaaatatttcggaggcacatgttggactactttgttttaattaaactgctagtatttctttgtcaaggatgtttctagttttttgctttattgccttgcattctaatgcagtttgttctgtaactcgagagccagtagcattggattgatggaaagtgtanggtttatgaattattgcaagctgactaccatacctcacacagcgttggtgttgtgaagcggcccatgaaaagccaaattaaaaatcaaggattcagtcaaactaagcaggtactcaagccaagtactcctttcncnaaccaaatccaangtttggaaatggccaaattggccctggtgaaatcctttaaccgccctttaaaaccc

SEQ ID NO: 3857 - DNA, 721 bp, Homo sapiens
  misc_feature (618)..(618): "n" may be a, t, c, g, other or unknown
  misc_feature (681)..(681): "n" may be a, t, c, g, other or unknown
  misc_feature (691)..(691): "n" may be a, t, c, g, other or unknown
  misc_feature (721)..(721): "n" may be a, t, c, g, other or unknown
ttagtaattgttttataaatttgggaagctccagtcttaggtgcataaatgtttaggattgtgatattttcctgttgccaaggctggagtgcagtggcacgatctcagctcactgcaacctccatctcccaggttcaagcgattctcctgcctcagcctccccgagtagctggaattacaggcgtgggccaccacgcccagctaatttttttttttatttttagtggagatggggtttcaccatggtggccagactgatctcgaactcctgacctcaaatgatccacctgcctcagcctcccaaagtgctgggattacaggcatgggccactgtgtccagccaaataaagtcagttttaatgaacataggttcatggtgtgccataggttaagtttttatacagttggtattaatcaacaggaaattataatgcaaactgcatatactcttaaaaacttttctggaactgagtggatcttgaaaataaaaatgattgttaagatatttcaaaggattattgtaaatttccaaattctgttttttaattctttacttttaatcataaagtataccatctatttgaaaacaggtataccacaatgtacctacttcatagngttgctatataatgcgaagaacaatgcttaacacatcgtaagtatgcgattaaatgtcaccantgcccttganttggttaagcaccttttaaggcacacccan

SEQ ID NO: 3858 - DNA, 746 bp, Homo sapiens
  misc_feature (710)..(710): "n" may be a, t, c, g, other or unknown
  misc_feature (736)..(736): "n" may be a, t, c, g, other or unknown
  misc_feature (742)..(742): "n" may be a, t, c, g, other or unknown
attttacataacccagggaaaactagcatgctttgttctcaggctccctgccatggtcaaaagcaccccaaatctgaaaagattcttggtaatttattccctttcatccctaaagaggagcctttaagatatgtcagggttgatctttttttcagaacctaatgtgtagatattcagaaatgactctggaagacaaaaatttggattgtcagaaggaggctgctcatataattaatgccatgtaagtaattgctttgtttttaaaaagcccatcgagtgtaaatgttaaatgtatttgtctttaaaaatctattagcactaaactgactgcatcgagtatcctagaattcacttaagtcttgccaagaaattaaggagcttcaggaacttggtgttccaaagccctttaccccaggtggtagcaaattgaaatcatgaaagtttaaaccactgcacagcttacagatctgcagggtagctctgcagttgccttgcaaggatatagagaagttaatatctcaaatatttagtaacatttatgctaatgagccttccataataaccataaatggctttcacatgttgtttgtttaatgtgaactggcagagtatctattgacaagaaaacattgtggagtcctgagacaattgaaaataagccgaaattcactttcctgaaatatacattccttcacataagaactaaacantgtattccccaaagaaacataattanttcccngatc

SEQ ID NO: 3859 - DNA, 767 bp, Homo sapiens
  misc_feature (679)..(679): "n" may be a, t, c, g, other or unknown
  misc_feature (729)..(729): "n" may be a, t, c, g, other or unknown
  misc_feature (751)..(751): "n" may be a, t, c, g, other or unknown
attgcaaacttgggacaagcaagccaaattgtcccgggcatatgatggtaccacttacctgccgggtattgtgggactgaataacataaaggccaatgattatgccaacgctgtccttcaggctctatctaatgttcctcctctccggaactactttctggaagaagacaattataagaacatcaaacgtcctccaggggatatcatgttcttgttggtccagcgttttggagagctgatgagaaagctctggaaccctcgaaatttcagggcacatgtgtctccccatgagatgcttcaggcagttgtactttgcagtaagaagacttttcagatcaccaaacaaggagatggcgttgactttctgtcttggtttctgaatgctctgcactcagctctggggggcacaaagaagaaaaagaagactattgtgactgatgttttccaggggtccatgaggatcttcactaaaaagcttccccatcctgatctgccagcagaagaaaaagagcagttgctccataatgacgagtaccaggagacaatggtggagtccacttttatgtacctgacgctggaccttcctactgcccccctctacaaggacgagaaggagcagctcatcattccccaagtgccactcttcaacatcctggctaagttcaatggcatcactganaaggaatataagacttacaaggagaactttctgaagcgcttccagcttancaaagttgcctccatatccaancctttgtatcaagaga

SEQ ID NO: 3860 - DNA, 782 bp, Homo sapiens
  misc_feature (731)..(731): "n" may be a, t, c, g, other or unknown
  misc_feature (737)..(737): "n" may be a, t, c, g, other or unknown
  misc_feature (754)..(754): "n" may be a, t, c, g, other or unknown
ataaatgatgcttaattctttgtctacagattgctgctctctgaacactatagtcgtcgaatctcacaagcgtacggtctgatgaatgaactgttatctgagtcagtacagctaccaactctaccacagaaaccattgcctaacaaacccagccctactcagtcttccagttgtcaacactgcccttctccaagaggagagaatcaacatggtcacagttttctaataaatcgacctggaaaagtcaaatatatgtccaaaccgagttatatccataagaggaagtcttttgggcaacctcaaggctcaccttggccacatggaactgccactttcaccatacagaaaaaagctggtggagccaaagcagcagtaagaaaggctacgcagtctccagttaccttccaaaaaggctctaatgctccgtgtcatagtctgcagcatacaaaaaaacatggaagtgctgggcttgcacctcaaaccaagcaggtgtgtgtagagtatgaaagagaggagactgtggtgagtccctggacgataccttcagaaatccataagattcttcatgagagtcacaattcccttctacaagacttgtctccaactgaagaggaagagccagagcatccttttggggtgggcggtgtggacagcgtgtctgagagcactggcagcatcctcagcaagctggactggaatgccatcgaaggacatggtgggccagcgtggangaccangggcctgtctgtccacnggggccctgggacctgtaagaacctggg

SEQ ID NO: 3861 - DNA, 810 bp, Homo sapiens
  misc_feature (668)..(668): "n" may be a, t, c, g, other or unknown
  misc_feature (702)..(702): "n" may be a, t, c, g, other or unknown
  misc_feature (801)..(801): "n" may be a, t, c, g, other or unknown
  misc_feature (807)..(808): "n" may be a, t, c, g, other or unknown
taaatatggatatgaacagtattaaagagccacagtcaagactaaggaagtggacgacagtggacagcatttctgtgaacacatctttggatcaaaactccagcaaacatggtgctatttcaagtggtttcaggctggaagagtctccatttgttccctatgactttatgaacagcagtacttcaccagccagtcctccaggttcaataggagatggctggccacgtgccaaatcgcctaacggctctagcagtgttaattggccaccagaatttcgtcctggtgagccatggaaaggttatccaaacattgaccctgaaactgacccttacgtcactcctggcagtgtcataaacaatctttcaattaatactgtgcgggaagttgaccacctcagggacaggaacagtgggtcatcctcatccttgaacaccacgctgccttcaactagtgcctggtcatccattcgtgcctccaactacaacgttcccctcagcagtacagcacaaagcacttcagccagaaatagtgattccaaattgacatggtttcctgggttcagttacaaacacctctctggctcatgagctgtggaaggtccctttgccacctaaaaacatcactgctccgtcccgcccacctccgggactgactgggtcagaagccanccttgtctacgtgggataattctccccttcgtanaggtggagggatgggggaaattctgacgccagatataccccaagttccagctggggtgagaagcagctcaaggagaataacaaattgggcttggttccnaaaaannag

SEQ ID NO: 3862 - DNA, 706 bp, Homo sapiens
  misc_feature (571)..(571): "n" may be a, t, c, g, other or unknown
  misc_feature (608)..(608): "n" may be a, t, c, g, other or unknown
  misc_feature (616)..(616): "n" may be a, t, c, g, other or unknown
  misc_feature (690)..(690): "n" may be a, t, c, g, other or unknown
gaagacagatttcctgatataatgacttgtcatcacagatcttgtgtggattgcttacgacaatatttaaggatagaaatctctgaaagcagagttaatattagttgcccagaatgtactgaacggtttaatccccatgatattcgcttgatattaagtgatgatgtcttgatggaaaaatacgaagaatttatgcttagacggtggcttgttgcagatcctgattgtaggtggtgtccagctccggactgtggatatgctgtgatagcatttggatgtgccagctgtccaaaattaacttgtgggcgagagggctgtggaacagagttttgctaccactgtaaacagatttggcaccccaaccagacctgtgatgctgctcgacaagagagagcccagagcttacgtttgagaactatacgctcttcatccattagttatagtcaagagtctggagcagcagctgatgatataaagccatgtccacgatgtgctgcttatataataaagatgaatgatgggagctgcaatcacatgacatgtgctgtttgtggttgtgagttttgttggntgtgtatgaaagaaatctcaaatttgcattaactaantccatcangatgtacttttgggggaagaaaacctggagccgaaagaagaaatattgtggcaactggggaacactgggttggngctcctgtcggaatcc

SEQ ID NO: 3863 - DNA, 719 bp, Homo sapiens
  misc_feature (701)..(701): "n" may be a, t, c, g, other or unknown
  misc_feature (706)..(706): "n" may be a, t, c, g, other or unknown
  misc_feature (711)..(711): "n" may be a, t, c, g, other or unknown
aaaaagccggcttccggaagccgggacgatgtccgcatgacaaccgacgttggagtttggaggtgcttgccttagagcaagggaaacagctctcattcaaaggaactagaagcctctccctcagtggtagggagacagccaggagcggttttctgggaactgtgggatgtgcccttgggggcccgagaaaacagaaggaagatgctcctgctgctgtcctatgacctctttgtcaattccttctcagaactgctccaaaagactcctgtcatccagcttgtgctcttcatcatccaggatattgcagtcctcttcaacatcatcatcattttcctcatgttcttcaacaccttcgtcttccaggctggcctggtcaacctcctattccataagttcaaagggaccatcatcctgacagctgtgtactttgccctcagcatctcccttcatgtctgggtcatggtaagagtggcagtctgaattctttttttaatttttattttaaatagaggtggggtcttactttgttaccaaggctggtctcaaactcctgagctcaagcaattctcctgcttctgcctcccaagctcaagcaattctcctgcttctgcctcccaaagtgctggaatacaggcatgagtcactgtgccccggcctgaactctgaattcctgaatcgctaaagggctaggaataactttnctttnctttnctttcttt

SEQ ID NO: 3864 - DNA, 805 bp, Homo sapiens
  misc_feature (639)..(639): "n" may be a, t, c, g, other or unknown
  misc_feature (647)..(647): "n" may be a, t, c, g, other or unknown
  misc_feature (726)..(726): "n" may be a, t, c, g, other or unknown
  misc_feature (785)..(785): "n" may be a, t, c, g, other or unknown
  misc_feature (795)..(795): "n" may be a, t, c, g, other or unknown
aaagattcaagttttataaaaatttataaaaacattttctgtattattttgctgcatgtgaaactttcccttataatttaacaaaagatttcattcacattggcaattgttcattaataaccaaaacaataagtaacctaatttcgcaagacctaagaaaattggcactaggttcttttatacattttaactgtactggactacagcgtaagtttcagaaattttacttctattttttgaaggtacatagtgtaactgcttaagatcaatttggatttcattttcatcgtaaaaatgtcttgataaattccatacactgtagaataagcctttcactaaggctggcatcaacataaatgcagttattgcatatctggcaaaaagaggtcattaacagaaaaaaatgactagccattcaatgagacaaataaaaatacaaaaagttataatctcatttggtaacacattatttactatgaacagaaatttcttattagccctcaacactgtcatctggtaatggctccagacagtactttcacgtaatatgggcatattaactaatttttccaatcacttgttcaaaacttggtcttaagaaagcaaatcatgcctggaggagaaaaaagaagctaaaangtaaatanggaatgaattaaaaactagactatggtatgctgaatgagaaatatagtaagtatatttaatcataacctgataattacnttaatggggccacgaaaataatggatttactacatttccttgaagaaaatatttcaatncctaaggaancctaaccttt

SEQ ID NO: 3865 - DNA, 781 bp, Homo sapiens
  misc_feature (687)..(687): "n" may be a, t, c, g, other or unknown
  misc_feature (704)..(704): "n" may be a, t, c, g, other or unknown
  misc_feature (773)..(773): "n" may be a, t, c, g, other or unknown
aaagagctttttctttctcaaataagaacctgttaacctctaaatccacttatcttcaatagcgccttagggaggtgatggagagagttctggctggggcaccttccttgctccccctgagtagcactaagtaatctcacaggacaggcaaggcctttctgaagaggtcttagagtgcagggaattgcatgacaggtgctgttagccaccttggaagaactgcaggccttgcgtggtgccaccttgtttgcgggaagcccagccctgtccattcccctggccctagcatctgtttatctaatagcagtaccaatttttattgttaggataagttgtaggagaaattagcaaaggttaactgactgctgtgggtagacagtacaattcttcttcagtttctgacttaggagtgtttccgaaaagttaagtgaaaacaaaagtttgaagtgtttcccttttagttacataacagacactcattacggaattgaacagttttagacccataaataattaagttaaaagcataacaaaatcctgttaggaaactgatgaaaaatttgtttctaaaacactttagattttaaacttgaacacgtagtgaaatgtcttttaaaacaatgaagatgggtgcagtgttcacaggcctctccactaagcagatgtctactgagaacacagtattangggatgtgggtgggaanaaagatgcaatgggcaaagcctcaacctgggcgaactggggcaagctcgctctctcaaggcaacaagtnaaggaaag

SEQ ID NO: 3866 - DNA, 674 bp, Homo sapiens
  misc_feature (120)..(120): "n" may be a, t, c, g, other or unknown
  misc_feature (134)..(134): "n" may be a, t, c, g, other or unknown
  misc_feature (525)..(525): "n" may be a, t, c, g, other or unknown
  misc_feature (584)..(584): "n" may be a, t, c, g, other or unknown
  misc_feature (587)..(587): "n" may be a, t, c, g, other or unknown
  misc_feature (661)..(661): "n" may be a, t, c, g, other or unknown
gagcgcggcccctgggttcgaacacggcacccgcactgcgcgtcatggtgctggcctggtatatggacgacgccccgggcgacccgcggcaaccccaccgccccgaccccggccgcccantgggcctggagcanctgcggcggctcggggtgctctactggaagctggatgctgacaaatatgagaatgatccagaattagaaaagatccgaagagagaggaactactcctggatggacatcataaccatatgcaaagataaactaccaaattatgaagaaaagattaagatgttctacgaggagcatttgcacttggacgatgagatccgctacatcctggatggcagtgggtacttcgacgtgagggacaaggaggaccagtggatccggatcttcatggagaagggagacatggtgacgctccccgcggggatctatcaccgcttcacggtggacgagaagaactacacgaaggccatgcggctgtttgtgggagaaccggtgtggacagcgtacaaccggnccgctgaccattttgaagcccgcgggcagtacgtgaaatttctggcacagaccgcctancantgctgcctgggaactaacacgtgcctcgtaaaggtccccaatgtaatgactgagcagaaaatcaatcactttcnctttgcttttaaa

SEQ ID NO: 3867 - DNA, 670 bp, Homo sapiens
  misc_feature (441)..(441): "n" may be a, t, c, g, other or unknown
  misc_feature (594)..(594): "n" may be a, t, c, g, other or unknown
  misc_feature (622)..(622): "n" may be a, t, c, g, other or unknown
  misc_feature (661)..(661): "n" may be a, t, c, g, other or unknown
agtgcgcctgcgcggagctcgtggccgcgcctgctcccgccgggggctccttgctcggccgggccgcggccatgggagaggccgaggtgggcggcgggggcgccgcaggcgacaagggcccgggggaggcggccaccagcccggcggaggagacagtggtgtggagccccgaggtggaggtgtgcctcttccacgccatgctgggccacaagcccgtcggtgtgaaccgacacttccacatgatttgtattcgggacaagttcagccagaacatcgggcggcaggtcccatccaaggtcatctgggaccatctgagcaccatgtacgacatgcaggcgctgcatgagtctgagattcttccattcccgaatccagagaggaacttcgtccttccagaagagatcattcaggaggtccgagaaggaaaagtgatgatagaanaggagatgaaagaggagatgaaggaagacgtggacccccacaatggggctgacgatgttttttcatcttcagggaagtttggggaaagcatcagaaaattccagcaaagacaaagagaagaactcctcagacttggggtgcaaagaaggccanacaaacggaagcgcaaccggggtcaccnacaaagtcctgaccgcaaacagcaacccttcaattccantgctgccaa

SEQ ID NO: 3868 - DNA, 711 bp, Homo sapiens
  misc_feature (588)..(588): "n" may be a, t, c, g, other or unknown
  misc_feature (618)..(618): "n" may be a, t, c, g, other or unknown
  misc_feature (708)..(708): "n" may be a, t, c, g, other or unknown
  misc_feature (710)..(710): "n" may be a, t, c, g, other or unknown
gaaaatgcttgtgtcgcctttggtgggccatgtcctaattagtttcatctgcttccctgggaacttactaaggggcccagagcactgttggaagtctggttagagtccccagagagttactctaagttaaaatgagccactgaccttggctcaccttagaggaatttcctcgagaacaacagagataagaaaagaaccagcctggccaatccttcaacagctctagagccccttttctctgctggcaggggctttgtttaccagctcactgtttaggctaaatgttagggaccagatcactgcagttgaaaacaggcactccaggcttagtgacagtggcagcagaaacagtgttggctgcctttctgaccaccccactttcctgccctgagacagcaccccagggcaggtgcttcatattcagaccaggtaagcctcatttgcacaacagtcaaattgtttgttcctttaaaaaggacacaattagcctggcacggtgactcatgcttgtaatcccagcactttgggagggcaaggcaagcggatcacctgaggtcaggagtttgagaccagcctcaccaacatggnaaaaccccatctctactaaaaaaatacaanattaaccaggggtgatggcacattcctgtaatcccagctactcgggaagccgaggcaagagaatcgcttgaacccggggaaggaaaaggntna

SEQ ID NO: 3869 - DNA, 711 bp, Homo sapiens
  misc_feature (632)..(632): "n" may be a, t, c, g, other or unknown
  misc_feature (652)..(652): "n" may be a, t, c, g, other or unknown
  misc_feature (707)..(707): "n" may be a, t, c, g, other or unknown
gactggcgagccatggcgctggggctgcagcgcgcaaggtcgaccacggagctgcgcaaggaaaagtcccgggatgcggcccgcagccggcgcagccaggagaccgaggtgctgtaccagctggctcacacgctgcccttcgcccgcggcgtcagcgcccacctggacaaggcctctatcatgcgcctcaccatcagctacctgcgcatgcaccgcctctgcgccgcaggggagtggaaccaggtgggagcagggggagaaccactggatgcctgctacctgaaggccctggagggcttcgtcatggtgctcaccgccgagggagacatggcttacctgtcggagaatgtcagcaaacacctgggcctcagtcagctggagctcattggacacagcatctttgatttcatccacccctgtgaccaagaggagcttcaggacgccctgaccccccagcagaccctgtccaggaggaaggtggaggcccccacggagcggtgcttctccttgcgcatgaagagtacgctcaccaagccgcgggcgcaccctcaacctcaaggcggccacctggaaagtgctgaactgctctggacatatgagggcctacaagccacctgtgcaaacttctccanctgggaaccctgactcaaangcccccgctgcaattgcctggtgctcatcttgcgaaagccatcccccaacccaangcaa

SEQ ID NO: 3870 - DNA, 624 bp, Homo sapiens
  misc_feature (526)..(526): "n" may be a, t, c, g, other or unknown
  misc_feature (619)..(619): "n" may be a, t, c, g, other or unknown
  misc_feature (623)..(623): "n" may be a, t, c, g, other or unknown
aaacatggggcggggcggcgcggccggggaagcgtgatgaaggcctacgagtgcggcgcggcctgaaggggcacgcgggggacctgcaaagctagtgaggggcggggcaggcggcgcggtgggggcgggccgagcccggaggccagatgtgcggacacagccccacgcgcggggccatgcaggtggccatgaacggtaaggcccgcaaagaggcggtgcagactgcggctaaggaactcctcaagttcgtgaaccggagtccctctcctttccatgctgtggctgaatgccgcaaccgccttctccaggctggcttcagtgaactcaaggagactgagaaatggaatattaagcccgagagcaagtacttcatgaccaggaactcctccaccatcatagcttttgctgtagggggccagtacgttcctggcaatggcttcagcctcatcggggcccacacggacagcccctgcctccgggtgaaacgtcggtctcgccgcagccaaggtgggcttccagcaagtcngtgtggagacctatggtggtgggatctggagcacctggtttgaccgtgacctgactctggctggacgcgtcattgtcaagtgccctacctcangtcng

SEQ ID NO: 3871 - DNA, 699 bp, Homo sapiens
  misc_feature (545)..(545): "n" may be a, t, c, g, other or unknown
  misc_feature (667)..(667): "n" may be a, t, c, g, other or unknown
  misc_feature (669)..(669): "n" may be a, t, c, g, other or unknown
  misc_feature (693)..(693): "n" may be a, t, c, g, other or unknown
ttcattgtacctcaaggttgtgatgaaattttaatgaattaagttgaatagctcaaaagtatatacttcgtaacactcagtttcagttacagtcactgactgatgtagttctgctggcacctgacagctctcagttactaagcttctgcgatatgctaggcactgtgctggatgataagacagcacccctgccctctagaagctcgggcagttaaaatggagcagagggaagcaacggagactcagaaaataactatacacactaagggagagcttggtctggggctggtgaataggaatctgttagggaagtgacagatgcaaagctggaaatgttaatcagatggctaaattcaggccaaaatttaaatatcttcaattttcaactcaagaaaggcatttggcagaaaccatgtttggaaaagaaattaaaatttacaagaatttttattaagcactttgcctagcaaaagatttttgttaaaaaaaaaaaaaaaaacttgtcatccctactttcagggagtagaatcctggaatttttgaancatactgtaagatggtgattatatctcaaaaggggttccgtggtgtctgtaccctctctgccacaggcaatactgagcaccataggcttgagtatgccatttaactgtttggttttggttcnanttggcactttatacaatgtttganaatatc

SEQ ID NO: 3872 - DNA, 653 bp, Homo sapiens
  misc_feature (403)..(403): "n" may be a, t, c, g, other or unknown
  misc_feature (562)..(562): "n" may be a, t, c, g, other or unknown
  misc_feature (602)..(602): "n" may be a, t, c, g, other or unknown
  misc_feature (649)..(649): "n" may be a, t, c, g, other or unknown
aggggataggacgaagaaaccgaagggaaagctcagttgcagcggcgactttcagtttcatttccacggaccctcctgcctgggccgcagccgccgccgcgatgcccagtaagttcagctgccggcagctccgggaggcgggccagtgtttcgagagtttcctggtcgttcggggactggacatggagacagatcgcgagcggctgcggaccatttataaccgcgacttcaagatcagctttgggacccccgcccctggcttctcctccatgctgtatggaatgaagattgcaaatctggcctacgtcaccaagactcgggtcaggttcttcagactcgaccgctgggccgacgtgcggttcccagaaaagaggagaatgaagctggggtcagatatcagcanacaccacaagtcactgctagccaagatcttttatgacagggctgagtatcttcatgggaaacatggtgtggatgtggaagtccaagggccccatgaagcccgagatgggcagctccttatccgcctggatttgaaccgcaaagaggtgctgaccctgangcttcggaatggcggaacccaatctgttaccctcactcanctcttcccactctgccggacaccccagtttgctttctacaatgaaanacca

SEQ ID NO: 3873 - DNA, 632 bp, Homo sapiens
  misc_feature (458)..(458): "n" may be a, t, c, g, other or unknown
  misc_feature (520)..(520): "n" may be a, t, c, g, other or unknown
  misc_feature (564)..(564): "n" may be a, t, c, g, other or unknown
  misc_feature (601)..(601): "n" may be a, t, c, g, other or unknown
  misc_feature (625)..(625): "n" may be a, t, c, g, other or unknown
ggttggctctgagctccttccaaaagatgaattaaatgatctgatcgaccgagccttcagcagattccgtcacagagaagtggtccatctgtccaggttgaggaatgggctgaacgtgttggagctgtggcatggcgtcacatatgcatttaaggacctgtccctgtcctgcacaacacagttcctgcagtacttcctggagaagagggagaagcacgtcactgtggttgtaggaacatctggggacacaggaagtgctgccattgagagtgttcaaggggcaaagaacatggacattatcgttctgctgcccaaaggtcactgcacaaagattcaggagctccagatgacaacggtgctgaagcagaacgtacatgtgtttggagtggagggaaacagcgatgagctcgatgagccgatcaagactgtgtttgccgatgtggcttttgtcaagatangcctgcccatccgtctggtcgtggcagtgaaccgcaatgacatcatccacaggactgtccancagggagacttctctctctctgaggctgttaaatcaaccttggnatcagctatgggcattcaagtgccctacaacatgganaaggtgttctggctgctctctggntctgaca

SEQ ID NO: 3874 - DNA, 733 bp, Homo sapiens
  misc_feature (687)..(687): "n" may be a, t, c, g, other or unknown
  misc_feature (692)..(692): "n" may be a, t, c, g, other or unknown
  misc_feature (733)..(733): "n" may be a, t, c, g, other or unknown
gtaagtaagcctgccagacacactgtgacggctgcctgaagctagtgagtcgcggcgccgcgcactggtggttgggtcagtgccgcgcgccgatcggtcgttaccgcgaggcgctggtggccttcaggctggacggcgcgggtcagccctggttcgccggcttctgggtctttgaacagccgcgatgtcgatcttcacccccaccaaccagatccgcctaaccaatgtggccgtggtacggatgaagcgtgccgggaagcgcttcgaaatcgcctgctacaaaaacaaggtcgtcggctggcggagcggcgtggaaaaagacctcgatgaagttctgcagacccactcagtgtttgtaaatgtttctaaaggtcaggttgccaaaaaggaagatctcatcagtgcgtttggaacagatgaccaaactgaaatctgtaagcagattttgactaaaggagaagttcaagtatcagataaagaaagacacacacaactggagcagatgtttagggacattgcaactattgtggcagacaaatgtgtgaatcctgaaacaaagagaccatacaccgtgatccttattgagagagccatgaaggacatccactattcggtgaaaaccaacaaagagtacaaaacagcaagctttggaagtgataaaagcagtttaaaaggagaaaaatgaanattanaaacgttgctcaaaatgaaggcttccggttcaaccttccan

SEQ ID NO: 3875 - DNA, 761 bp, Homo sapiens
  misc_feature (686)..(686): "n" may be a, t, c, g, other or unknown
  misc_feature (743)..(743): "n" may be a, t, c, g, other or unknown
  misc_feature (761)..(761): "n" may be a, t, c, g, other or unknown
gtcgcactccttctccccgagacttggtactgggagataggacgggagtctcctacacgcagtcaacacttgccacgagcggctagacttaggacaggcaagttgccctgccatccttctatcgcccccacccctcctttacttaagggcgatggcagagacgtcctcctcccccttctcctcctctttggtgcctccagccaggaggcgggagcgatccacagcagctgacccagctcaggcactgcctctctcacagccctcaagacacaccatgggcccagaggcaggtttgctacacagcagcgacgacgcgggcggcggccccagcgactcgcaactgcctccctgaccacagcggccaccgcccaacacccccgagaagccatcgccaccaccggcaggagaacctagggtccataaagccatcttcgcgatcgactaaagctacgtcaacaactatggcgggcgacgggcggcgggcagaggcggtgcgggaaggatggggtgtgtacgtcacccccagggcccccatccgagagggaaggggccggctcgcccctcaaaatggcggcagcagcgatgcgcctgcgtacagaactcctccgtcgcgccagggccggcgggaagtgaggttctcggacgaagccgccagaagtgtacggggacttcgagcccctggtggncaaagaaaggtccccggtggggaaaacgaacccggctagaaaaagttccggtccganttctgcgaaaagaggaan

SEQ ID NO: 3876 - DNA, 747 bp, Homo sapiens
  misc_feature (720)..(720): "n" may be a, t, c, g, other or unknown
  misc_feature (723)..(723): "n" may be a, t, c, g, other or unknown
  misc_feature (737)..(737): "n" may be a, t, c, g, other or unknown
ttttatttattgctgtggaaggcttcctctttgaagctgatttgggaaggaagccaccagctatcccaataaggtactatgccataatggtgaccatgttcttcaccgtgagcgtggtgaacaactatgccctgaatctcaacattgccatgcccctgcatatgatatttagatccggttctctaattgccaacatgattctaggaattatcattttgaagaaaagatacagtatattcaaatatacctccattgccctggtgtctgtggggatatttatttgcacttttatgtcagcaaagcaggtgacttcccagtccagcttgagtgagaatgatggattccaggcatttgtgtggtggttactaggtattggggcattgacttttgctcttctgatgtcagcaaggatggggatattccaagagactctctacaaacgatttgggaaacactccaaggaggctttgttttataatcacgcccttccacttccgggtttcgtcttcttggcttctgatatttatgaccatgcagttctattcaataagtctgagttatatgaaattcccgtcatcggagtgaccctgcccatcatgtggttctacctcctcatgaacatcatcactcaagactcctacttaactggggagagaaatgtctattaaatgtctctcctctttctctgggtcaaagaccatgtaattttatgcttcaganatnaagatacggtttgnttacaaagag

SEQ ID NO: 3877 - DNA, 726 bp, Homo sapiens
  misc_feature (645)..(645): "n" may be a, t, c, g, other or unknown
  misc_feature (703)..(703): "n" may be a, t, c, g, other or unknown
  misc_feature (721)..(721): "n" may be a, t, c, g, other or unknown
gataaatgccccatatatataaaagtgaaaacaatactgtaccaatgaggaagagagttttgtaaaagcaagcaggctggctgtcattaaaagttatcttaaataacttgtcgcagcccactcccaccagtcctgaaaatagttcattcaagtggtaaaataagacaaggcagaggacgatgtctctaacttccctgatgtgagatctaaagccccattcctaactcttggttttagaattgaggaaagtggaataaatgcatttggaaaggatctgttttcttcccaggtttcctgcctgggttgaaaataaggtttcaggggatggaagcaactttgaggaacataaagaggtattggggttcatcaattcatctttgtttcaagatggttcccccccaccctccacaatgcaagttaattaggagataatttagctaccttgtgaattagttttaagataagtatctttttaagctttgtcactttaattgccccactgattgataagaagtagttatttctaattgacacttttttgatgtccattggaagcatttatttggaactttttgggggtggaaggaaagttaattaattttatcaagtctacccccaaaaggactctgcctaattttgttgaanaagacaaaggaagtgaaggaaaccaaataaaaaatcaatctcaagggattttaattantaaagggacactttgggnttaaa

SEQ ID NO: 3878 - DNA, 712 bp, Homo sapiens
  misc_feature (620)..(620): "n" may be a, t, c, g, other or unknown
  misc_feature (707)..(707): "n" may be a, t, c, g, other or unknown
  misc_feature (710)..(710): "n" may be a, t, c, g, other or unknown
gttcggtgcgcggccggggccggagttcgctgcaagtcggcggaaagtttggctgcgcgggttcccccgaagttcagagtgaagacatttccacctggacacctgaccatgtgcctgccctgagcagcgaggcccaccaggcatctctgttgtgggcagcagggccaggtcctggtctgtggaccctcggcagttggcaggctccctctgcagtggggtctgggcctcggccccaccatgtcgagcctcggcggtggctcccaggatgccggcggcagtagcagcagcagcaccaatggcagcggtggcagtggcagcagtggcccaaaggcaggagcagcagacaagagtgcagtggtggctgccgccgcaccagcctcagtggcagatgacacaccaccccccgagcgtcggaacaagagcggtatcatcagtgagcccctcaacaagagcctgcgccgctcccgcccgctctcccactactcttcttttggcagcagtggtggtagtggcggtggcagcatgatgggcggagagtctgctgacaaggccactgcggctgcagccgctgcctccctgttggccaatgggcatgacctggcggcgggcatggcggtggncaaaagcaaccctacctcaaagcacaaaagttggtgctgttggccaacctgctgagcaaaggcaaaaccgggccacgggagcttggnaancc

SEQ ID NO: 3879 - DNA, 680 bp, Homo sapiens
  misc_feature (27)..(27): "n" may be a, t, c, g, other or unknown
  misc_feature (236)..(236): "n" may be a, t, c, g, other or unknown
  misc_feature (334)..(334): "n" may be a, t, c, g, other or unknown
  misc_feature (508)..(508): "n" may be a, t, c, g, other or unknown
  misc_feature (513)..(513): "n" may be a, t, c, g, other or unknown
  misc_feature (535)..(535): "n" may be a, t, c, g, other or unknown
  misc_feature (615)..(615): "n" may be a, t, c, g, other or unknown
  misc_feature (655)..(655): "n" may be a, t, c, g, other or unknown
  misc_feature (664)..(664): "n" may be a, t, c, g, other or unknown
cagagagcgttgagctgggaacagtgncaagtgcttatcaagttccttcactctcaacacggttgacaagaactgatggcattatggaacacatcacatgtgatacccaatgaagcagcacacagaggtaccataagaccagtcaaaggccctcagacatccacttcgcctgccagtcctaaaggactacacacaggagggacaaaaagaatggagaccaccaccacagctctgangaccaccaccacagctctgaagaccacttccagagccaccttgaccaccagtgtctatactcccactttgggaacactgactcccctcaatgcatcantgcaaatggccagcacaatccccacagaaatgatgatcacaaccccatatgttttccctgatgttccagaaacgacatcctcattggctaccagcctggggggaggtgggctgggctggctctgggagttctggaagctcccaagctttgtagctcaggccaacagagcccagngacanaggcagagccccacaggggtgncaccccctctgagtcccattcgcttcacctatcttctatggccgccccatagccatactgcccattagcgtggccgccangcattacagctcagaggcatcgccgctacaaagctttggnggcatcagngccgctcagtgtgcgg

SEQ ID NO: 3880 - DNA, 630 bp, Homo sapiens
  misc_feature (564)..(564): "n" may be a, t, c, g, other or unknown
  misc_feature (605)..(605): "n" may be a, t, c, g, other or unknown
  misc_feature (609)..(609): "n" may be a, t, c, g, other or unknown
accaagaatcaatactacaactgcaggagctccttcatcttaaattcggtgtagccacagaaatacttctcaaacaagctagtactttggcagatctggacagtggaaatatggaaaaagtcattaaagatgaaaatgttactctgtatgtgtgggcaaacctcaagaagaatccaaggcacagaagtgttagattctctgaaacacaaattggatttgagattccaaggatattagcaacaagtgacattgctgtacgactcctgcatacccactatgatcatgtttctgcactgcaccctgtttcaacaccatcaaaagaatacacttctgcagtaactgagcttgtcaaagatgatgttaagaatgtagaaaaagcaatcagcaaggaggtcgaagaagagtccaaacaacaagaaagagggtctcacttaattcaggaggaagaaataaaagttgaggaggaacaaggtgatattgaagtgaaaatgagttctgctgaggaagaatctgaagccataaaatgtgaacgagagatgaaagtattaagtgaaactgtttcancaacacaattgttgccgggaaaagaaatcctccggaaaagncaanatttctttgaagacaatgtgg

SEQ ID NO: 3881 - DNA, 737 bp, Homo sapiens
  misc_feature (393)..(393): "n" may be a, t, c, g, other or unknown
  misc_feature (581)..(581): "n" may be a, t, c, g, other or unknown
  misc_feature (700)..(700): "n" may be a, t, c, g, other or unknown
  misc_feature (719)..(719): "n" may be a, t, c, g, other or unknown
  misc_feature (729)..(729): "n" may be a, t, c, g, other or unknown
gatcaataattgcaatcagcctgtcagaatacgtaaagggaatccatgtaattcacaggcgggagttgttatttctgtagtaaagacctgactgcagcatttacacatgataaataggaaatggcaaacctggggaagcaagtttgaactcaatctggaagtaatagcctaagcagcttgctcttcacactgtgtttcccatgtcacccttttcctcttaggtatcttgcttctccctctcatttcaatctcctccttccttctgttcctccatccttccatccctccctcctgtctttctctgacacaatgactcagctagtttaagagaatggtattattttgaagtctgaaaatgtttctgtgatattttgctttttactgatctttaangcaactcacagaagtgtattagccttagatacgtaatcaccccttgagatatatagtcaacagtacacactgacatgttcatagtaaaaactgcctttatgtttcactgcattcaagcaagtagatatttgtttgtttcacgtattgcaaagcctatgttcttaagcatgtaccaaaatcacatttanttcattaatccatttactcattcaccaagaatgtaacaaaatttagtgaatatctgctatgtgtcaggcacttttcttggctcctgatatacaaatgatattcaaataaaactcaaaancctggtaaggggaaggtanggagacaaantatgtacc

SEQ ID NO: 3882 - DNA, 789 bp, Homo sapiens
  misc_feature (589)..(589): "n" may be a, t, c, g, other or unknown
  misc_feature (631)..(631): "n" may be a, t, c, g, other or unknown
  misc_feature (642)..(642): "n" may be a, t, c, g, other or unknown
  misc_feature (702)..(702): "n" may be a, t, c, g, other or unknown
  misc_feature (736)..(736): "n" may be a, t, c, g, other or unknown
  misc_feature (778)..(778): "n" may be a, t, c, g, other or unknown
acatgcgcaggaggctcaatgacagtcgagctttggctaaggctccggggaaagggtctagccatgctgcatgtgacccggggggtctgggggtccagggtccgagtatggccactgttgcccgcgctcctcgggcccccccgggccctctcatcgctggcagccaaaatgggggagtatcgcaagatgtggaaccccagggagccccgcgactgggcccagcagtaccgcgagcgcttcattcccttctccaaggagcagctgctccgcctcctaatacaggtaacaggaattccactcgagtccggcagagaaggcggctttggaggcgttctcagcccacgtggacttctgcaccctgttccactaccaccaaatcctggcccggctgcaggccttatatgaccccatcaaccctgacagggagaccctcgatcagccatcactaacggatccccagcgtctgtctaatgagcaggaggtgcttcgggctctggagcccctgctggcccaggccaacttctccccgctgtctgaggacaccctggcctacgcgctggtggtccaccaccctcaggatgaggtccangtgacagtaaatttggatcagcctggttgggagtcttggctncatggcacggncccctcctgtcattctttcctctacctgactgacactcttcctacaagaagatccttgcncgcttcctgtgtgggcttcaagtggtccccttgnctacaggagccccccacctttccttgcccaagaaccccttanttggtccccaa

SEQ ID NO: 3883 - DNA, 714 bp, Homo sapiens
  misc_feature (512)..(512): "n" may be a, t, c, g, other or unknown
  misc_feature (672)..(672): "n" may be a, t, c, g, other or unknown
  misc_feature (711)..(712): "n" may be a, t, c, g, other or unknown
gtatttgcaaagtcagatatgcatgttttcctttatgagtttatttttatgctgcgaaaggcctttcctacacttggttcagataaatgtgcgcatcttcttattcctttattcattgatttcagtttagttccttagttcagttggaattttatttcaatatgtgggagctaatttttttttttttattccaaactatcaccatcttgtttcaatattggttatggatgtccattctcgtgctatgattttgaaatgctcttttatcatctactaaattctttgacatacttaggttgatctctggtcattctattctgttctggtgctctgtcttctttcattattctttttcaaaatttccttgactagccatgcatttgccatttatttttatagatgtgttttgtaatatttttatcaagttccaagtgcctcagcggtaggggccggggaagtgtctgtagcgtccctccctctcaaccacaataacaggcggagggtcggcgtancatcttcaccagaagtagatttcatctcaacaaaccactttctttggtcatctataagaagcaacttctcatctgttcaagttttaacatgagattgcagcaattcagtcacatcttcaggctctacatccgattgtagttctcttgctatttcctccanatctgcaagcgacttcctccactggaaggtccttttggnngg

SEQ ID NO: 3884 - DNA, 790 bp, Homo sapiens
  misc_feature (638)..(638): "n" may be a, t, c, g, other or unknown
  misc_feature (714)..(714): "n" may be a, t, c, g, other or unknown
  misc_feature (776)..(776): "n" may be a, t, c, g, other or unknown
  misc_feature (778)..(778): "n" may be a, t, c, g, other or unknown
gagaatgtgtaataaccaaataagtatttcgatataggatcaaataacgagataaaaatgtcgttttgggacacttttaaggtttatttaaatgtgaaaatttgagactattgaacctatgttttacagtttggtaagcagttatgtttctaccttggggagagaaatgtaaagcaatcatctttcagacatctatttaaacaaactgaaaagccatttctttatgatttttgtattcatcatctgtgatttgctgaaagcatacaactgacttgtgaatcattcactgtcagatatagattcagtttaacattttttataagccgtctatatatttggcactctacaaggtgctttcatataccttcactcattttatttactttcttagtaaccctcataggtgtcattgtccacatttgacaagtaaagctaagagatgttaaataactaggacacagtcatattaatgagtaataaaaccaggacttgaatacaagtcctagatctctgagcacaatgctattgttaggatcttttccccattgggtattaaatccttttagtggatcttgcttggaagtctttattgagcttttcttccagtcagcatatcaattagatgtatcagaaataantggttaaatgacttcagtcatttaaatgaggaaattcccttttagaatcctaactacctaactgtgtaatcatgtnataacagttatctactacaaagggggggagtttccggtttaactccccaattttttccttangnagtagcaaccta

SEQ ID NO: 3885 - DNA, 683 bp, Homo sapiens
  misc_feature (601)..(601): "n" may be a, t, c, g, other or unknown
  misc_feature (672)..(672): "n" may be a, t, c, g, other or unknown
  misc_feature (679)..(679): "n" may be a, t, c, g, other or unknown
gtctcgccctcttgcagtctgcagcttctcctgtcatcggaaatgccaggccaaggtggctgccccctgcgttcctccatccaaccatgagctggtgcccatcaccactgagaatgcaccaaagaatgtagtggacaagggagaaggaggctcccggggtggaaacacacggaaaagcctcgaggacaacggctccaccagggtcaccccgagtgtccagccccacctccagcccatcagaaacatgagtgtgagccggaccatggaggacagctgtgagctggacctggtgtacgtcacagagaggatcatcgctgtctccttccccagcacagccaatgaggagaacttccggagcaacctctctgagcggagacctgacatcacgaagctccatgccaaggtacaggaatttggctggcccgacctccacaccccagccctggagaagatctgcagcatctgtaaggccatggacacatggctcaatgcagaccctcacaatgtcgttgttctacacaacaagggaaaccgaggcaggataggagttgtcatcgcggcttacatgcactacagcaacatttctgccagtgcggaccangctctggaccggtttgcaatgaagcggttctaatgagggataagattgtgccccaaaatttttgggggggnccccccnaaaa

SEQ ID NO: 3886 - DNA, 683 bp, Homo sapiens
  misc_feature (449)..(449): "n" may be a, t, c, g, other or unknown
  misc_feature (488)..(488): "n" may be a, t, c, g, other or unknown
  misc_feature (673)..(673): "n" may be a, t, c, g, other or unknown
  misc_feature (675)..(675): "n" may be a, t, c, g, other or unknown
  misc_feature (683)..(683): "n" may be a, t, c, g, other or unknown
gattctcatccctgtgctcagagctctcaagcacccacgatggccttctcaggccgagcgcgcccctgcattatcccagagaacggagaaatcccccgagcagcccttaacactgtccacgaggccaatgggaccgaggacgagagggctgtttccaaactgcagcgcaggcacagtgacgtgaaagtctacaaggagttctgtgacttttatgcgaaattcaacatggccaacgccctggccagcgccacttgcgagcgctgcaagggcggctttgcgcccgctgagacgatcgtgaacagtaatggggagctgtaccatgagcagtgtttcgtgttatagaaggtgatgtggtctctgctcttaataaggcctggtgcgtgaactgctttgcctgttctacctgcaacactaaattaacactcaatttctagaaaatttctccacanactgagagctccagaattgatgactcagagtgaaccgangagatcactactgtgcacaagtttgcctccaaacaactgggtgatgcctccaaacagacctggaatcatccatttctccaaggatctctgcttcttcttgtaaaataggctatttaaggactacaatctgagcattaatgggtatcaaactcttgggctttgggaaccaaaaaaattttcccccngntttccccn

SEQ ID NO: 3887 - DNA, 677 bp, Homo sapiens
  misc_feature (610)..(610): "n" may be a, t, c, g, other or unknown
  misc_feature (670)..(670): "n" may be a, t, c, g, other or unknown
  misc_feature (675)..(675): "n" may be a, t, c, g, other or unknown
taacaatgacacagttgactttggggactcggggaaagggtgggaagggagtgagggataaaagactacaaattgtgtgcagtgtgcactgctagagtgcactaaatctcacataccactaaataacttactcatgtaaccaaacaccacctgtttcccaaaaacctatggaaattaaaaaaaaaaagttaatctcatctggaaaataccttttcagcaacatgtcgtctggtatttggccaaatatctggttactgtgacctagtcaaggtgatgtgtaaagttatccatcacaaacagctagattcattccacctacacttcaagggatcgccttgaagaagtcagtatttttgcagagatgcgtctccacccaaaggtcctaggtacctttgagcaattgtgaaagccataacccctcaccccgaaatgacctgtcctcatgcatatagaatcttacaatcacaggggttatggatcctatttagagcctatattgaaatcttgaggacgtcagtagttctctagaatccctgttccaggcgcctctgttcctgagcagtgttatgtgaacagtgtcctctgtctgtggctctgtgtcctggctganaaaggcagcgctgccttcagggaactgggcccattgcctggggggggaaaaagggttttnccaangg

SEQ ID NO: 3888 - DNA, 666 bp, Homo sapiens
  misc_feature (619)..(619): "n" may be a, t, c, g, other or unknown
  misc_feature (655)..(655): "n" may be a, t, c, g, other or unknown
  misc_feature (660)..(660): "n" may be a, t, c, g, other or unknown
aggtgctgaaggagctgttggagacgtggggcagcagcagtgccatccgccacactcccctgccgcagcagcgccacgtcagcaaggctgtcctcatctgcctggcgcaactcggggagccggaactgcgggacagccgggatgaactgctggccagcatgatggcgggcgtgaagtgccgcctggacagtagcctgccccccgtgcgacgcctgggcatgatcgtggcagaggtcgttagtgcccggatccaccccgaggggcctcccctgaaattccagtacgaagaggatgaactgagcctcgagctgctggccttggcctccccccagcctgcgggtgacggcgcctcggaggcgggcacgtccctcgttccagccacggcagagccccctgcagagacccccgcagagatcgtggatggcggcgtcccccaagcacagctggcgggctctgactcggacctggacagcgatgatgagtttgtcccccacgacatgtcgggggacagagagctgaagagcagcaaggctcctgcctacgtccgggactgcgtggaagccctggatgtgctgactctggctgcccaagagctgtctaaggcctgggtgcctcgggnaggactccccaacctgggctccccaaagtcccaagnaaccncccccc

SEQ ID NO: 3889 - DNA, 656 bp, Homo sapiens
  misc_feature (480)..(480): "n" may be a, t, c, g, other or unknown
  misc_feature (507)..(507): "n" may be a, t, c, g, other or unknown
  misc_feature (575)..(575): "n" may be a, t, c, g, other or unknown
  misc_feature (602)..(602): "n" may be a, t, c, g, other or unknown
  misc_feature (642)..(642): "n" may be a, t, c, g, other or unknown
ttacctgtcatgcccgatggctctgtgctgctggtggacaatgtctgtcaccagtctggggaagtctccatgggctccttctgccgcctacccgggacctctggctgcttcccctgcccgctgaatgccctggaggaacacaacttcctgtttcagctgagagggggtgagcagccccctccaggggccaaggagggcctggaagttcccctgattgctgtggttcagtggtctaccccaaagctgcccttcactcagagcatctacacccactaccgcctgcccagtgtccgcttggaccgcccgtgttttgtgatgaccgcttcttgtaagtcccctgttcggacctacgagcgtttcactgtcacctacacgctgcttaacaatctccaagacttccttgctgtgaggctcgtgtggaccccagagcatgcacaggctgagtggctttgagaatcagatgagactgtgctggcgaangccctgtgggaatgaggaacgctgtantgtttgctggtccctgtttctgcccccaaggaaagcagctgtgtgaggaggagcgccgggccatgcangctgccctggactccgtcgtctgccanacgcccctcaacaaccttggcttttcccggaagggcaacncgctcaacttcaag

SEQ ID NO: 3890 - DNA, 658 bp, Homo sapiens
  misc_feature (630)..(630): "n" may be a, t, c, g, other or unknown
  misc_feature (632)..(632): "n" may be a, t, c, g, other or unknown
  misc_feature (656)..(656): "n" may be a, t, c, g, other or unknown
gcagtgaagtgtttgtctgaatttgcgtgcaatgcagctttcccagacacaagtatggaagcaattcgacttattcgccattgtgcaaaatatgtgtctgatagacctcaggctttcaaggaatacacaagcgatgatatgaacgtagcacctgaagacagggtgtgggtgagaggatggttcccaattctctttgagttatcctgtatcatcaatagatgcaaattagatgtaagaaccaggggtttaacagtaatgtttgaaataatgaaaacatatggccacacttatgagaaacactggtggcaggatttatttagaattgttttcagaatctttgacaatatgaaattgccagaacaacagacagagaaagctgaatggatgacaacaacttgcaatcatgcactttatgcaatctgtgatgtattcactcagtatttagaagtactcagtgatgtacttttggatgacatttttgctcagctctactggtgtgtgcagcaagacaatgagcagttagcgcgatctggtacaaactgtttagagaatgttgttattctgaatggtgaaaaatttaccctagaaatctgggataaaacttgcaactgcacactggatatcttcaanancacaatcccacatgcgctggtttngg

SEQ ID NO: 3891 - DNA, 659 bp, Homo sapiens
  misc_feature (504)..(504): "n" may be a, t, c, g, other or unknown
  misc_feature (615)..(615): "n" may be a, t, c, g, other or unknown
  misc_feature (617)..(617): "n" may be a, t, c, g, other or unknown
  misc_feature (643)..(643): "n" may be a, t, c, g, other or unknown
acgggatggggagctggaccaggctggagtgcaatggcgcgatctcagctcactgcagcctccgcctcccgggttcaagcgattcttctgcctcagcctcccgagtgacagcggcatggacatatgccccaggctttcctgctggggtccatccatgagcctgcaggtgccctcatggagccccagccctgccctggaagcttggctgagagcttcctggaggaggagcttcggctcaatgctgagctgagccagctgcagttttcggagcctgtgggcatcatctacaatcccgtggagtatgcatgggagccacatcgcaactacgtgactcgctactgccagggccccaaggaagtactcttcctgggcatgaaccctggaccttttggcatggcccagactggggtaaagggtttggcttccccagtgggtggagtggggggttctaggtggatgcttggctgggtgtgctgtggagaaggagcatgtgcatggctgtanacatgtgtaggtcctcccgccccattctgtctcaacacatatactggctcctgtggtccggggccctctcccagcgtctctgcccgtaattaaccaagcacattaatgggnantttcgttttccctgcgagctggccantaatttgcccttcccc

SEQ ID NO: 3892 - DNA, 571 bp, Homo sapiens
  misc_feature (402)..(402): "n" may be a, t, c, g, other or unknown
  misc_feature (502)..(502): "n" may be a, t, c, g, other or unknown
  misc_feature (534)..(534): "n" may be a, t, c, g, other or unknown
  misc_feature (554)..(554): "n" may be a, t, c, g, other or unknown
tgtcctgcgggtccaggactgtccgcggggttgagggaaggggccgtgcccggtgccagcccaggtgctcgcggcctggctccatggccctggtcacagtgagccgttcgcccccgggcagcggcgcctccacgcccgtggggccctgggaccaggcggtccagcgaaggagtcgactccagcgaaggcagagctttgcggtgctccgtggggctgtcctgggactgcaggatggaggggacaatgatgatgcagcagaggccagttctgagccaacagcaccctagtttcattctcaactctagccctgcacactcacctatggcccgggagattgacaacttctaccctgagcgcttcacctaccacaatgtgcgcctctgggatgaggagtcggcccanctgctgccgcactggaaggagacgcaccgcttcattgaggctgcaagagcacagggcacccacgtgctggtccactgcaagatgggcgtcagccgctcancggccacagtgctggcctatgccatgaagcantacgaatgcagcctgaacangccctgcgccacgtgca

SEQ ID NO: 3893 - DNA, 680 bp, Homo sapiens
  misc_feature (639)..(639): "n" may be a, t, c, g, other or unknown
  misc_feature (664)..(664): "n" may be a, t, c, g, other or unknown
  misc_feature (667)..(667): "n" may be a, t, c, g, other or unknown
aagtatatccctcctccctttcaaagataagtggatccattctcaatgaacttattggacttgtgagatcacccttattgcaggggggagctcttagtgccatgctagactttttccaagctctggttgtcatggaacaaataatttaggatacatggatttgttgcgcatgctgactggtccagtttactctcagagcacagctcttactcataagcagtcttattattccattgccaaatgtgtagctgcccttactcgagcatgccctaaagagggaccagctgtagtaggtcagtttattcaagatgtcaagaactcaaggtctacagattccattcgtctcttagctctactttctcttggagaagttgggcatcatattgacttaagtggacagttggaactaaaatctgtaatactagaagctttctcatctcctagtgaagaagtcaaatcagctgcatcctatgcattaggcagcattagtgtgggcaaccttcctgaatatctgccgtttgtcctgcaagaaataactagtcaacccaaaaggcagtatcttttacttcattccttgaaggaaattattagctctgcatcagtggtgggccttaaaccatatgttgaaaacatctgggncttattactaaaaagggcccaaaanccntttgggggtttgg

SEQ ID NO: 3894 - DNA, 786 bp, Homo sapiens
  misc_feature (706)..(706): "n" may be a, t, c, g, other or unknown
  misc_feature (711)..(711): "n" may be a, t, c, g, other or unknown
  misc_feature (780)..(780): "n" may be a, t, c, g, other or unknown
caatagtatcttaatttttacttgcggtgactattcttgccacaatattggagaataatgatagatgatatactagatttttcaaagtgtgaaaacctttagactttttttagcaattagtttgacattcgctactatagtaaccaagcactcattatatatgcatcctccaaatgtttcatgcttatttataggaaagttatattaatgagattaataatgtgaaatacagttttcctgcaaaattagcattagagaattgattttagataacagatttttaaagttttagagaaaagtacagtaatacagtaaactgaaagagtatatagatagcaataaaataacataagtggacatgtttatagtaaatactctgaagtaaacaaccgtttttattaactgcatctcattagggaaagtttatatgtcttgttattttttattaacattttatttaccattcagagtgaaaattactaatttgagtattaacaaataactgaataaatggatcattacagttaggttttctcaaattgcaaaatttgccttagcaattatctttgaacatcccgaaccagatttttaaatcccatttttgtttaataagggtaaaaataccatcaaaatgacttctcataccaaagaataagccatcatattttttcggtgttggaaacaacattgaaagtcagaattgggntttgnttttaattccttatacgggttacataagcaatatcctggcccctttaattaataaggattaatggtcgnccttca

SEQ ID NO: 3895 - DNA, 709 bp, Homo sapiens
  misc_feature (678)..(678): "n" may be a, t, c, g, other or unknown
  misc_feature (703)..(703): "n" may be a, t, c, g, other or unknown
  misc_feature (708)..(708): "n" may be a, t, c, g, other or unknown
tatgtagattcaaaccccattattaagtaagttttcttctaagtagacaacctcttctttacccagaacttctctttgtaaccgtttcatccatattaggctgtgtattttaaacaaacaaataaaaataagttgatatttatcttccttcttagtcaaaatgcttcttggaggttggggactctttctttgacgtgttctgtagagtatatttcagtttgtctttttagtaaagatggcaacatctcattggattaggaaaaattgaaaaccatatgttccatgtaaagaaatcatttattgtttcgatatttgtgccactcaaacactgaatgctttatttctgcaaaagcatattgattcgttttctgcagtgaatcttatatttttcaaccttcttaaacaatatattctgaacttgatttagtctttacatgatgatttcctgataatcattattgtattaagtttcctagggctgccataatagaatatcataaattgggttgtttaaacaacagagatttattggatcacagttctggaagcaagaagtctgagatcaagctattagaagggatggttccttataagggttgtgggagggaatctgtttcatgcctcttgcttagtttctggagtttatggcaatcgttggaattccttgacctgtaaggnatctccctgatttctgccttcatcnttaana

SEQ ID NO: 3896 - DNA, 539 bp, Homo sapiens
  misc_feature (503)..(503): "n" may be a, t, c, g, other or unknown
  misc_feature (508)..(508): "n" may be a, t, c, g, other or unknown
  misc_feature (538)..(538): "n" may be a, t, c, g, other or unknown
ccgagacgatggggctcaggacctgtgccggtgaatccaaggactatgccctccatgcgggtgacggctcttccgacccggaggtgctgctgaacatagaaaaccaaagacgaggtcaagagctgagtgccacccggcaggcccatgacctgtccccagcagccgagagttcctcgaccttctctttctctgggcgagactcctccttcactgaagtgccacggtcccccaagcacgcccacagctcctccctgcagcaggcagcctcccggagcccctcctttggtgacccacagctatcccctgaggcccgacccaggtgcacttcacattcagaaacgccaactgtcgatgatgaagaaaaggtggatgaacgagccaagctgagcgtcgccgccaagaggttgcttttcagggagatggaaaaatcttttgatgaacaaaatgttccaaagcgacgctcaagaaacacagctgtggagcagaggctacgccgtctgcangacangtccctcacccaagcccatcaccactgaana

SEQ ID NO: 3897 - DNA, 717 bp, Homo sapiens
  misc_feature (625)..(625): "n" may be a, t, c, g, other or unknown
  misc_feature (641)..(641): "n" may be a, t, c, g, other or unknown
  misc_feature (708)..(708): "n" may be a, t, c, g, other or unknown
aattatttcacagtatatcaagctatgatccaattccacagttcatactcaggcaaaactgccttctcaaataacaggagtttggtacagaagctacaaaaccagggcaaaggatgttaaattgatacttccaatgtgccttattttgagcctgatactatggaattttgcctgctattacagtacccaattattgcttggaacaattttgcatttcctcgcattttacagagcatggcttgactgacaatttgacaatcagatagcctaggctgatgccattgtatctatttaataactttgttaaccaattaacacaagcagacaattcccataataattgagtattaaaaagcacaacaacaaataaacaatggacacttagaacaaacatctgaacactgttttagcccagttgccttcttttcctgaaagctccaaagacatacacacacacatacacatacacatacatacacacatgcacacacacacacgaagaagcacaaagaaggcaaagtacatttcattttgggattgaatttttactctggaacccagtataaagctctaacaggtaggctgatcttcaaggaaaggctctttttctgtgtaaatggtaggntacttcccttcaaganccctatgtgaatctagaatctaaaccatggatggcggggatggcgacacctggtgctaaaggtttgngaaaaagtt

SEQ ID NO: 3898 - DNA, 681 bp, Homo sapiens
  misc_feature (484)..(484): "n" may be a, t, c, g, other or unknown
  misc_feature (593)..(593): "n" may be a, t, c, g, other or unknown
  misc_feature (631)..(631): "n" may be a, t, c, g, other or unknown
  misc_feature (657)..(657): "n" may be a, t, c, g, other or unknown
actccagcctctctcgctaccctccaatctccctgtccagtctttttcttctctagtagagacaaaggagacacattttatccgtggacccaaaactctggcgctggtcacagactcaggaagacagtcttcccttggtgtctaatcactgcggggacgcctgcctaattattcacccacattccactggtgtctgatcaccttggggatgcctgccttggtcattcacccacattcccatggtggcaagtcatttgcggggacgcctgctttggctgctcacccccgcccttctccgtgtctctacttttctctttaaacttacctccttcactttgggcaatcttccgccctccattcctccctcttcccccttagcctgtgtacttaaaaacttctcttaaactaacacctgatataaaactcaaacgtcttattttcttctgcaattactgcttggccgcaatataaacttgacaatggntccaaatggccagaaaacggcacttatgatttctccatcctacaacccatttcaattttatatggatgcaccttcttactcagccacaatcttgttccagacaccaagncccctgggcaactatcttccagtcctctaacaagctanacaggaaatttgcaaactgctaatcntctcttgcctaatccagattccca

SEQ ID NO: 3899 - DNA, 726 bp, Homo sapiens
  misc_feature (650)..(650): "n" may be a, t, c, g, other or unknown
  misc_feature (713)..(713): "n" may be a, t, c, g, other or unknown
  misc_feature (719)..(719): "n" may be a, t, c, g, other or unknown
ctccgcccatttatgttgggtcttctccaactctgaagaattatgttagagttgtggaggtttggtgggatgaatataaagactacttctatgctagtcgtcctgaatcgcaggcattaccatatggggatatatcggagctgaaaaaatttcgagaagatcacaactgcaaaagttttaagtggttcatggaagaaatagcttatgatatcacctcacactaccctttgccacccaaaaatgttgactggggagaaatcagaggcttcgaaactgcttactgcattgatagcatgggaaaaacaaatggaggctttgttgaactaggaccctgccacaggatgggagggaatcagcttttcagaatcaatgaagcaaatcaactcatgcagtatgaccagtgtttgacaaagggagctgatggatcaaaagttatgattacacactgtaatctaaatgaatttaaggaatggcagtacttcaagaacctgcacagatttactcatattccttcaggaaagtgtttagatcgctcagaggtcctgcatcaagtattcatctccaattgtgactccagtaaaacgactcaaaaatgggaaatgaataacatccatagtgtttagagagaaaaaaataaaccaataacctanctactgacaagtaaatttatacaggactgaaaaccgcctgaaacctgctgcaactaatggtantaaccnctgtata

SEQ ID NO: 3900 - DNA, 675 bp, Homo sapiens
  misc_feature (517)..(517): "n" may be a, t, c, g, other or unknown
  misc_feature (562)..(562): "n" may be a, t, c, g, other or unknown
  misc_feature (631)..(631): "n" may be a, t, c, g, other or unknown
  misc_feature (666)..(666): "n" may be a, t, c, g, other or unknown
  misc_feature (672)..(672): "n" may be a, t, c, g, other or unknown
agaaaaaatgtgctgcgttctgaaaaataactccttagcttggtctgattgttttcagaccttaaaatataaacttgtttcacaagctttaatccatgtggatttttttttcttagagaaccacaaaacataaaaggagcaagtcggactgaatacctgtttccatagtgcccacagggtattcctcacattttctccatagaagatgctttttcccaaggctagaacgacctccaccatgatgaatttgctttttaggtcttaattatttcacttctttttagaaacttaggaagaagtggataatcctgaggtcacacaatctgtcctcccagaaatgaacaaaagtcatcaccttttctgcttgctacacaggcaacgattcccccatcagctgcccggaccctttggcctggcttggtgtgcaagcctgtctgtttgcttaaagtcagtgggttctggtgcagggagtgagaagtgggggaagtgaaagggaaagcatccgtgagaaagcggncacggttttccctccttgtgtgcccatggggcaccagctcatggnctttttcaagtcatcccagtttgtacaagacttaagcttctgaactctaagaatgccaaaggggaccgnacgaagactccccatcacaagcgaagctctgtccntaaaangta

SEQ ID NO: 3901 - DNA, 650 bp, Homo sapiens
  misc_feature (470)..(470): "n" may be a, t, c, g, other or unknown
  misc_feature (475)..(475): "n" may be a, t, c, g, other or unknown
  misc_feature (578)..(578): "n" may be a, t, c, g, other or unknown
  misc_feature (589)..(589): "n" may be a, t, c, g, other or unknown
  misc_feature (601)..(601): "n" may be a, t, c, g, other or unknown
gacatgtctgctagccaaggagcaccacgagtggccagcagccaccagagctgggagagaggcctgggacggccttgccctccagcctccagctggagccagccctgccgccaccttgacttcagacttacggcctccagagctgtgaggaacgaatccctgttgtccttaactgcccgggctgtggtgctttgccacagcagctccaggacattgagacaggtgacctcccagggccactgtttctcccaccctgcacttacttcaccagctggagtgaaggcagggaaccctgggtcccccaggagcagcagctgctgtgagcatcacagaaaagcagccccggagagcaggcggtccaggcaggggcttgtggtccgttcatctggctgcacagccgcgacctcattggcaggacgccccggggacaaggagcatccattagtaattggttttggttttgattttgntttcntgagatacggtcttgctctgtcgttcagcctggcatgcagtggcacaatcttggcttactgcagccttgatctcccaagctcaggtgatcatcccacctcggnctcccgaatanctgggactgcangcacgcatcaacatgcctggctaagtttggatattttttagagatgggg

SEQ ID NO: 3902 - DNA, 643 bp, Homo sapiens
  misc_feature (508)..(508): "n" may be a, t, c, g, other or unknown
  misc_feature (598)..(598): "n" may be a, t, c, g, other or unknown
  misc_feature (628)..(628): "n" may be a, t, c, g, other or unknown
  misc_feature (638)..(638): "n" may be a, t, c, g, other or unknown
gagaggcgcccaggcggcggcggcggcggcccagcttcttctttcctcgcacagccaggcggcccctgctcgagtcccgcgtcgccatggccgcggttcccgagttgctgcagcagcaggaggaggaccgcagcaagctgagatctgtatctgtggacctgaatgttgatccctcgcttcagattgacatacctgatgcgctcagtgagagagacaaagtcaaatttacagtgcacacaaagaccacactgcccacgtttcagagcccagagttttctgttacaaggcaacatgaagactttgtgtggctacatgacactcttattgaaacaacagactatgctgggcttattattccacctgctcctacgaagcccgactttgatggtcctcgagagaagatgcagaaactgggagaaggtgaagggtctatgaccaaagaagaatttgccaagatgaaacaagaactggaagctgagtatctcgctgtgtttaagaagactgtgtnctcccatgaagtctttcttcagcggctttcttctcaccctgttctcagtaaagatcgcaactttcatgttatcctggaaatatgatcacngatctaagtgttaggcggaaaaaatactanagagatgttntgcgg

SEQ ID NO: 3903 - DNA, 779 bp, Homo sapiens
  misc_feature (544)..(544): "n" may be a, t, c, g, other or unknown
  misc_feature (754)..(754): "n" may be a, t, c, g, other or unknown
  misc_feature (757)..(757): "n" may be a, t, c, g, other or unknown
  misc_feature (774)..(774): "n" may be a, t, c, g, other or unknown
tttagtacttaagtgagcatgttaccaaggcactgttctaggtattggttatgatgaaagagctgtccttagcaaagagtctggcagaaaattctgtttccttctaattacagaaagaacagataagaggatttgtaaaaatttttaaggctgagagaatattcgaattcaagcaagatgtattgtctattatgtgcccaaacatttttatttatattttttatttatctcttaagaatgaggatacattctgagaaatgcatcatttggtgatcttgtcattatccaaacattatcaagtgtacttacacagccctatatggtacagcctactatagcctattgctcctaggctataacatatatagcatgtcactgtactgaatactgtaggcagttgtaacacagtgataaatatttgtgtatctaaacatttctaaatacagaaaaggtacaataaaaatatggtattacagtatatgggacaatagtcatctatgtgatccaacattgattgaaatgtcattatgtggtgcatgactgnatattatctcatttaaggacatgacattttaaaaatatttttttactcagagttcttcagaacactcactaagtggggaattctagtcatacaagggctcttaggggggggtgtttgtgctattttcatagattagcctaattctaccaaacagtatttctagtaattcatacatccttaatcccaagggccgtggacttcactgcttgnccntgtcaccccaacaaccntggga

SEQ ID NO: 3904 - DNA, 694 bp, Homo sapiens
  misc_feature (545)..(545): "n" may be a, t, c, g, other or unknown
  misc_feature (600)..(600): "n" may be a, t, c, g, other or unknown
  misc_feature (665)..(665): "n" may be a, t, c, g, other or unknown
  misc_feature (686)..(686): "n" may be a, t, c, g, other or unknown
gtgcttcctgtggctgacgtcatctggaggagatttgctttctttttctccaaaaggggaggaaattgaaactgagtggcccacgatgggaagaggggaaagcccaggggtacaggaggcctctgggtgaaggcagaggctaacatggggttcggagcgaccttggccgttggcctgaccatctttgtgctgtgtgtgtccaggcacggttccttacgccccatgtgtgctgtgtgtgtcctgcctgtatatgtggcttcctctgatgctgacaaggtggggaacaatccttgccagagtgggctgggaccagactttgttctcttcctcacctgaaattatgcttcctaaaatctcaagccaaactcaaagaatggggtggtggggggcaccctgtgaggtggcccctgagaggtgggggcctctccagggcacatctggagttcttctccagcttaccctagggtgaccaagtagggcctgtcacaccaagggtggcgcagctttctgtgtgatgcagatgtgtcctggtttcggcagcgtanccagctgctgcttgaggccatggctcgtccccggagttgggggtacccgttgcanagccagggacatgatgcaagcgaagcttgggatctgggcaagttggactttgatcctttgggcanatgtcccattgctccctggancctgtcaa

SEQ ID NO: 3905 - DNA, 472 bp, Homo sapiens
  misc_feature (449)..(449): "n" may be a, t, c, g, other or unknown
  misc_feature (456)..(456): "n" may be a, t, c, g, other or unknown
  misc_feature (460)..(460): "n" may be a, t, c, g, other or unknown
acgcagcgcggttgctgggcacctcgactatcacctgaccgtagtaatatctcccgctacgcgcgttgtgaccaatgctgcatacaggagatgagggaggacggccagacacctggaagccggaaaatggtgaaaggcaggattgggaaccccacagaccgcagctcctcccaggagaaccccacacatgagtctggatcctcgccatgatcctcccgtggcccccacacaatctggggagacgcggggccgcgggcactgcgctgccgagagggctccggactgaggctgcagttgctgcgcagggacggctcaggatgcccggggtcccggctgctggcccagccccaccctgtggccgaggggacccagggacgagctgcgccagggagactcgggtccgcagaccccggaatcgctgctgacaggcccgggtcccaccacagcangtcccanccancccctcctccca

SEQ ID NO: 3906 - DNA, 575 bp, Homo sapiens
  misc_feature (504)..(504): "n" may be a, t, c, g, other or unknown
  misc_feature (535)..(535): "n" may be a, t, c, g, other or unknown
  misc_feature (540)..(540): "n" may be a, t, c, g, other or unknown
ctttctccatttgccaagcccatggcattgctgccaccctgatggagcgccctctcatctggcaccttcctggcctctttcccaggccccagttctgtccatgcagctgtgggtgcttcctgcattgcgggtctcacggggaggagacgagagtgcccctggttgagtcaggaaagaattctatcttcacgtcgctgccagcaaatgaccacagcagcttcacgacctctgcaggaacctatcttggtaaagaaacggggcctatgtggtggccgagcctcaggtgtggccgagcttcaggtgtggcccttatgcacagcacagcccaagcctgtgggcaccactcgccctgggctgcctggcacctggactccttcccatccttggccgaggtctgcgtggcccttcagggccgaatctgacactgtcttcctcctgagtctgccccccgggcttcctgcccacccccaggctgtttcatggcctctgcagggagcttcgtanaggtgaggctggtgccatctgtctgcttcanaccanctcaggctctgcgtgcctcaaagtcccctctgcac

SEQ ID NO: 3907 - DNA, 788 bp, Homo sapiens
  misc_feature (761)..(761): "n" may be a, t, c, g, other or unknown
  misc_feature (763)..(763): "n" may be a, t, c, g, other or unknown
  misc_feature (786)..(786): "n" may be a, t, c, g, other or unknown
gttagccaagattacaatgaaggactactccaaattaggagtccatgacatgaacgaccgcaaacgtctcttccaacttatcaaaattattaagattatgcaagaagaagataaagcagtcagtatcccagagcgtcatcttcagacaagcagcctgcgcatcaaatctcaggaattaagatctggccctcgcagacagctgaattttgattctcctgctgacaataaagacagaaatgccagcaatgatgggtttgaaatgtgcagtttatcagatttctctgcaaatgaacagaagtccacttacctaaaagtgctagaacacatgctaccagatgattcccagtaccatacaaaaacaggaattctgaatgccacagctggtgattcctatgtgcaaacagaaatcagcacttcactcttttcaccaaattacctttctgcaatactgggggattgtgatattcccattattcaaagaatctctcatgtttcagggtataactatggaatcccccattcttgtatcaggtaataaattttatctttctttcttttgagggaaagtagcctcaggcaagggcaggcctctccttcatgtccagcagacagcatctactccttatttatagtaaatgaatataacagaaattatcatgaacagcatttgcatcaataataaggatacctggatgtgggaaaattaatgagaaattgggacttccaaggggggagaaagatggtatggtcatgtcatcagnanaggtggtacttgcaagatttgtnca

SEQ ID NO: 3908 - DNA, 475 bp, Homo sapiens
  misc_feature (405)..(405): "n" may be a, t, c, g, other or unknown
  misc_feature (467)..(467): "n" may be a, t, c, g, other or unknown
  misc_feature (472)..(472): "n" may be a, t, c, g, other or unknown
taaaattatgaaactcatagaagaaaacagggacaaatcttcatgacaaatatgtacaaatgaccaataagcacatgaagagtctcagcatccttagtcattgggaaaatgcaaatcaaaaacacagtgagctgtgacttcatgcttactacgatggctgtaattaaaaaacaggaaagggccgggcgcggtggcttaagcctgtaatcccagcactctgggaggccgaggcgggcggatcacgaggtcaggagatggagaccctcctggctaacacggtgaaaccccgtctctactaaaaatacaagaaaaattggctgggcgttgtggcgggtgcctgtggtcccagctacttgggaggctcaggcaggagaatggcgtgaacccgggaggtggagcttgcantgagctgagattgtgccactgcactccagcctgggtgacacagtgagactccatctcataancaaanaca

SEQ ID NO: 3909 - DNA, 722 bp, Homo sapiens
  misc_feature (586)..(586): "n" may be a, t, c, g, other or unknown
  misc_feature (668)..(668): "n" may be a, t, c, g, other or unknown
  misc_feature (696)..(696): "n" may be a, t, c, g, other or unknown
  misc_feature (700)..(700): "n" may be a, t, c, g, other or unknown
gaaaaataaataaatggcatagactgggaaagattcatagttggcacaattatgtatatataaaatcctcgggaatgtacactttacatactagaatttaaaagtaagtttagcaactgtgttagttcgttttcatgctgctgataaagacatacctgagactggacaatttacaaaagaaaggtttattggacctatagttccacatgtctggggaggcctcacaatcatggcagcaggcaaggaggggcaagtcacatcttatgtggatggcaacaggcaaagagagagcttgtgcagggaaactcctgtttttaaaaccaccagatctcatgacacccattcactgtcaggagaacagcatgggaaagacccacccccatgattcaattgtctcccacaaggcccctcccataccacatgggaattatgggagctacaagatgagatttgggtgaggacacagagccaaaccacatcagcaacatgtcagaacacagaaaaaatgtaaaatatcactgtatttctatgtactagtagtgaactgtctcctagcttgtttgtttaaaaaaaaaaatcccatggncttcaatttggtcatttaaaaataatctacaaggtatactgtttttctgttcttgttatttccctaacttttaagggttccnattttttccaccctggttagaatcttgntccncacctaagagaaataaatttcc

SEQ ID NO: 3910 - DNA, 602 bp, Homo sapiens
  misc_feature (519)..(519): "n" may be a, t, c, g, other or unknown
  misc_feature (576)..(576): "n" may be a, t, c, g, other or unknown
  misc_feature (584)..(584): "n" may be a, t, c, g, other or unknown
acacacagggctcccccccgcctctgacttctctgtccgaagtcgggacaccctcctaccacctgtagagaagcgggagtggatctgaaataaaatccaggaatctgggggttcctagacggagccagacttcggaacgggtgtcctgctactcctgctggggctcctccaggacaagggcacacaactggttccgttaagcccctctctcgctcagacgccatggagctggatctgtctccacctcatcttagcagctctccggaagacctttgcccagcccctgggacccctcctgggactccccggccccctgatacccctctgcctgaggaggtaaagaggtcccagcctctcctcatcccaattctcgggggcccctccagtgcaagggggctgctcccccgcgatgccagccgcccccatgtagtaaaggtgtacagtgaggatggggcctgcaggtctgtggaggtggcagcaggtgccacagctcgccacgtgtgtgaaatgctggtgcancgagctcacgccttgagcgacgagacctgggggctggtggggtgcacccccaactancactggancggggtttggaggaccac

SEQ ID NO: 3911 - DNA, 742 bp, Homo sapiens
  misc_feature (530)..(530): "n" may be a, t, c, g, other or unknown
  misc_feature (593)..(593): "n" may be a, t, c, g, other or unknown
  misc_feature (690)..(690): "n" may be a, t, c, g, other or unknown
  misc_feature (708)..(708): "n" may be a, t, c, g, other or unknown
  misc_feature (730)..(730): "n" may be a, t, c, g, other or unknown
aagggcgtgcagatggacagggcggtcatgctgtaccacaaggctggccacttctccaaggccctggagctggcctttgccacccagcagtttgtggccctacagctcatagcagaggacctggatgagacgtcagaccctgcgctcctggcccgctgctccgacttcttcatcgagcacagtcagtacgagagggcggtagagctgctgctggctgtccacgggggtcgcacacagcctgcgcaccgacatgcacatcagtggagtgtttgccaccaaggatgctgtcgcagtctggaacggaaggcaggtggcgatcttcgagctttctggagccgcgatacggagtgcagggaccttcttgtgtgagacgcctgtgttagcaatgcatgaagaaaacgtttacacggtggagtcaaaccgagttcaagttcgaacctggcaggggactgtcaaacaactcctccttttctcggagactgaggggaatccctgcttcttggacatctgtgggaatttcctggttgtanggacagacttggctcactttaaaagctttgatctttcccgaagagaggcaaagcacactgtanctgcaagagcctggcggagctggtccctggggtggggggcatcgcttctctgcggtgcaacaacaaccgggaagcaccatcaagcatcctccccaancaaagggtgacaaacaancccctgaattccaaaaatctgnctttctaacgaa

SEQ ID NO: 3912 - DNA, 742 bp, Homo sapiens
  misc_feature (437)..(437): "n" may be a, t, c, g, other or unknown
  misc_feature (535)..(535): "n" may be a, t, c, g, other or unknown
  misc_feature (599)..(599): "n" may be a, t, c, g, other or unknown
  misc_feature (709)..(709): "n" may be a, t, c, g, other or unknown
  misc_feature (719)..(719): "n" may be a, t, c, g, other or unknown
  misc_feature (722)..(722): "n" may be a, t, c, g, other or unknown
caaacagaggtttccactcttgaacaagatcatccaggttcttaaagtcctccccacttccaccgcttgctgcgagaaaggccgcaatgccctccagcgagttcgcaaaaaccaccgctcccgcctgaccctggagcagcttagcgacctgttgacaatcgctgtaaacggaccgccaatcaccaactttgatgccaagcgagccctggacagctggtttgaggagaagtctgggaacagttacgcgctgtctgcagaagtcctcagtaggatgtctgcgctggagcagaagccagcactacagaccatggaccacgggacggagttttaccccgacatttagggagctggcgctgcagagttcactaagctgttgaatatttttttaatctatactcataagctttgatatattatataaatatatattatattanattatattatattatatatatatatatatataaactcacactgaaaatttttaaaaaccaaggtgacgcgtccaccagaagccactgggagatttcanaaaggaaaaatgttggaaactgactcttgtctacaaaatttggcagctgcaacatacatggcanctcattttcactcacagaagcacgtgctggggcctcctgtgttcccaacttactgtccaccaacagcataagctaaaatgacaggtctctgtcatcacctttaggtagcncattttggtnaangttttcaatttgcggggtgg

SEQ ID NO: 3913 - DNA, 667 bp, Homo sapiens
  misc_feature (575)..(575): "n" may be a, t, c, g, other or unknown
  misc_feature (632)..(632): "n" may be a, t, c, g, other or unknown
  misc_feature (638)..(638): "n" may be a, t, c, g, other or unknown
ttggatatcaacagggaaactagaaggtatcactgctcaggaaaagatcagattgttccttctttgaatacagagtcttctaatcctgtgcttaagaagttagaaaagctaaacactgagaaggaagaaaggcaaaaacagttgcagcaacagaatgaaaaagagatgatggaacagattcgccagcaaacagatattttagagaaggagcgcaaagccttcaagacaattgaaaagccaagaattggagagtgtttggtggcaccatcttcctatcagtcaaagcaaagagtagagaggccatcctctctcctcagcttaaatacctcaaataagggagaacttaatgtactggggtccctatcattaaaagatgcagctcttgcccaaaaagacagttcccctgctcacttacccccaaaggaccgacctgtcaccgtgttctttgaaagaaaaggaagtccatgccaatctagtactgtcaaggaattatccaagacagacagaatgggcacccagctgaatgtagcctgtaaactctcaaataatcgcatttcaaaaagagaacactttangccaactcagtcttacagccacaattctgatgacctttccagagagggaaatgctanggccantttcttcactccaaaggacaatatgagta

SEQ ID NO: 3914 - DNA, 783 bp, Homo sapiens
  misc_feature (630)..(630): "n" may be a, t, c, g, other or unknown
  misc_feature (649)..(649): "n" may be a, t, c, g, other or unknown
  misc_feature (757)..(757): "n" may be a, t, c, g, other or unknown
  misc_feature (768)..(768): "n" may be a, t, c, g, other or unknown
  misc_feature (776)..(776): "n" may be a, t, c, g, other or unknown
aaaagttatgcatactcataaaaattcaaacaatgctgaattgaaaaaggaaaagttagtggctctttatccactttatgtcccactgcccagagatcatcaccatgagcagtttggtgtatgacattccagatacgcacacatatcttcatacatacacacatacaaatatgtatacatataacaaaagactgtaaaatataataatatgatcatggacaacttgccatttggacttactccattctttttttttaattttattttcttggactcaggtcacaaatttattcttttaaaacactgcatagtactctacagaatgggagcactttgatttatttaaccaattccttattggattgtgttcaatgcttcaaatcaaaactttcaaaataaaatttacagggtgtcttggttgtgtttctatgtcaatacatagattgacgttatcttttatctttttttaaacagatgcagtgtacttcataatatgaatggaacacaatttctttaaacatgtgtctatcaaaaatcttccaatttttttttactcttatcagtaatgaacatcggttgcacataatctgtgtacaaaagtacgactgtttctcaagggtaaattcctanaaggaggataactgggatnaaagggtatttacatgtaaaattgggaaacatgttgccaaatgccccaagagggtaaaccgggttaatccttcaccaaggggatatgttcccaacaacctcaacaagntttaccccccntttcaagncctggcc

SEQ ID NO: 3915 - DNA, 729 bp, Homo sapiens
  misc_feature (621)..(621): "n" may be a, t, c, g, other or unknown
  misc_feature (670)..(670): "n" may be a, t, c, g, other or unknown
  misc_feature (699)..(699): "n" may be a, t, c, g, other or unknown
  misc_feature (724)..(724): "n" may be a, t, c, g, other or unknown
cagatgttgaagaggatatcgcaggacctaaacttgtgatcgtttgggggaggtcacacacgtttctgagtgggaatggatgggcgtgaatgacgtgccctcttaaaaagcacaacagtcctttaagaggagcaaaattgagttttcccattttggccaagattttgaagacagttcaatgtattctacatttgacataagatgagaactttctaaagtattctctccaagagcgtaaacgatgactaccccagccctgctgcccctctctggacgtaggataccacctctgaacctggggccgccttccttcccacatcacagggctaccttgagactttctgagaagtttattcttctccttattcttagtgccttcatcactctgtgttttggggcattctttttccttccagactcttcaaaacacaaacgctttgatttgggtttagaagatgtgttaattccacatgtagatgccggtaaaggggctaaaaaccccggagtcttcctgatccatggacccgatgaacatagacacaggaagttcacaaatgggtgctaccatagtagatgctttggataccctttatatcatgggacttcatgatgaattcctanatgggcaaagatggattgaagacaaccttgatttcaagtgtgaattcanaggtgtctgtgtttgaaagtcaacattcnagtttaattggagggctacttgcancaata

SEQ ID NO: 3916 - DNA, 676 bp, Homo sapiens
  misc_feature (464)..(464): "n" may be a, t, c, g, other or unknown
  misc_feature (543)..(543): "n" may be a, t, c, g, other or unknown
  misc_feature (627)..(627): "n" may be a, t, c, g, other or unknown
  misc_feature (631)..(631): "n" may be a, t, c, g, other or unknown
  misc_feature (648)..(648): "n" may be a, t, c, g, other or unknown
ttggtctactgggttattcttaaacaaggctttgtccaaggacatttggctcgcaggcacagagctgattaactcgttatgtatcttttgataataaggcagcgatcattaagaaaaacgtgtagccaatgaaataacatgttctgggccccaccactggactgggaggtgcagcgcatccaagcagaggctgcctcctgccctccacgcctgctgctctcgcaggcaggggctctgctgcttacagcagtgcggccatctcggcttctctccacatcgtctgtcacgcgctggtccccaccatacctctcgccaccccgtgcctctgtccccgtgcggcctgaggagctccagctttccctgccagcggtgctctgggagtggggacgtgatgcagggcgagcatgatgcaacggggcaccccagacccttccctcccgtggggggaggggtgtggcacgcanaggggcagagggcggggacactggccccgtgggggaagaaggtgctgtcacagccgttactgtcccccgtgggacccancctggagccccccatcctttggctcctgcctgtggccactcagctctcaagtgggcacatgcacatcccctgctccttccctgngcanctgccctgcccaatggnctttctggtcccagctactgaaaccggt

SEQ ID NO: 3917 - DNA, 762 bp, Homo sapiens
  misc_feature (485)..(485): "n" may be a, t, c, g, other or unknown
  misc_feature (619)..(619): "n" may be a, t, c, g, other or unknown
  misc_feature (632)..(632): "n" may be a, t, c, g, other or unknown
  misc_feature (675)..(675): "n" may be a, t, c, g, other or unknown
  misc_feature (729)..(729): "n" may be a, t, c, g, other or unknown
  misc_feature (746)..(746): "n" may be a, t, c, g, other or unknown
aaacaagggaagcaagccgtccaaaatccagggttcctagagccgtatctcagaattttatgcacacaggttgcagttaagtcttgctcaaagttttctgggagaactaagaactttcattgttaatggaagtgtggcaattggagcaggtgacaaagaacaagccctttcgagtccccccttcattcactccacacatgggttgcctttggcgtctgggccacttggtctccaatggtagcagaacacagcaagaatccatgtgttctgcctggtggctgtgtgtggttggcctcctgggggcctgcgggctgggcatggacgccgtggaggacactccctgtgctagactggctggagcgagggcagatagagtggacagggcttggacattctggatgaagagccagtggcctcagggcagaaatgacaccagggtaactcatcaaaatgtgcctcccaaggctctagaaaatccctggtanggtctgtgtggcctttgcaggagcatctggcccatctggaggtgggtttgaggggacggggccacaaggaaatggaaacagtagtggggttcacatgtgcgaacattcacaagatgccaaagtaggcactcggnacaatccgcttantagctctcatccaagaccacgtgcaaccaatgatgaaggctangatgggggatgcggtcaagggcactagccttgaaaaggggggacaagggagaancttcaaaaacaagtggnggaaaggcatcaacaa

SEQ ID NO: 3918 - DNA, 698 bp, Homo sapiens
  misc_feature (535)..(535): "n" may be a, t, c, g, other or unknown
  misc_feature (646)..(646): "n" may be a, t, c, g, other or unknown
  misc_feature (687)..(687): "n" may be a, t, c, g, other or unknown
  misc_feature (697)..(697): "n" may be a, t, c, g, other or unknown
ttggcgggggccgtgccgggcgccatcatggacgaggactactacgggagcgcggccgagtggggcgacgaggctgacggcggccagcaggaggatgattctggagaaggagaggatgatgcggaggttcagcaagaatgcctgcataaattttccacccgggattatatcatggaaccctccatcttcaacactctgaagaggtattttcaggcaggagggtctccagagaatgttatccagctcttatctgaaaactacaccgctgtggcccagactgtgaacctgctggccgagtggctcattcagacaggtgttgagccagtgcaggttcaggaaactgtggaaaatcacttgaagagtttgctgatcaaacattttgacccccgcaaagcagattctatttttactgaagaaggagagaccccagcgtggctggaacagatgattgcacataccacgtggcgggaccttttttataaactggctgaagcccatccagactgtttgatgctgaacttcaccgttaaggtangaagagttctagagttaaggagaaaagtgtttatgaatgtttatttttggttgttggtctgtttcctttgacagttcatatttgctttttttccataaaggtctttattgntttaatttcataaagccttacactgaagaaagaaaagtggnaaaaatttgna

SEQ ID NO: 3919 - DNA, 775 bp, Homo sapiens
  misc_feature (677)..(677): "n" may be a, t, c, g, other or unknown
  misc_feature (736)..(736): "n" may be a, t, c, g, other or unknown
  misc_feature (769)..(769): "n" may be a, t, c, g, other or unknown
atgacgcgagaccccgcccccgcagcgcccgcttccaagatggcggcagcgatgcctgcccggctgttggggtggcggtgacgacaggcagcaaaagaccagctggtcccagattcgctgctggagtgctggatggagcctttctctgccctctgtgacatttccaattttagataatgcctcacatctctgtccccccgggaccccctggagcccccatgatccctaagaagacagcttgaacctagatctcacccccaggatgttgcggaggctgctggagcggccttgcacgctggccctgcttgtgggctcccagctggctgtcatgatgtacctgtcactggggggcttccgaagtctcagtgccctatttggccgagatcagggaccgacatttgactattctcaccctcgtgatgtctacagtaacctcagtcacctgcctggggccccagggggtcctccagctcctcaaggtctgccctactgtccagaacgatctcctctcttagtgggtcctgtgtcggtgtcctttagcccagtgccatcactggcagagattgtggagcggaatccccgggtagaaccagggggccggtaccgccctgctgctctaccacctgcaccccttcttgcagcgccagcagcttgcttatggcatctatgtcatccancaagctggaaatggaacatttaacaaggcaaaactgttgaacgttggggtgcgaaaagncctgcgtgattaaaaagtgggactgcctgttcntgcaac

SEQ ID NO: 3920 - DNA, 910 bp, Homo sapiens
  misc_feature (672)..(672): "n" may be a, t, c, g, other or unknown
  misc_feature (753)..(753): "n" may be a, t, c, g, other or unknown
  misc_feature (781)..(782): "n" may be a, t, c, g, other or unknown
  misc_feature (885)..(885): "n" may be a, t, c, g, other or unknown
  misc_feature (892)..(892): "n" may be a, t, c, g, other or unknown
  misc_feature (905)..(905): "n" may be a, t, c, g, other or unknown
agggggtggcgctctccgttcggcggcgctcccatggcgcacattaccattaaccagtacctgcagcaggtgtacgaagccatcgacagcagagatggagcatcttgtgcagagttggtgtcttttaaacatcctcatgttgcaaacccacgacttcaaatggcctctccagaggagaagtgtcaacaagtcttggaacccccttatgatgaaatgtttgcagctcatttaaggtgcacttatgcagtggggaatcatgacttcatagaggcatacaagtgccagaccgtgatagtccaatcattcttgcgagcattccaggcccacaaagaagaaaactgggctctgcctgtcatgtatgcagtagcgcttgaccttcgagtgtttgccaataatgcagatcaacagttggtaaagaaaggaaaaagcaaagttggggacatgttggaaaaagcagcagagttactgatgagctgtttccgggtctgtgccagcgacacccgtgctggtatagaggactctaagaagtggggcatgctgtttctggtgaaccagctgtttaaaatctacttcaagatcaacaaactccatttatgtaaacccctaattagagcaattgacagctcaaacctgaaagacgattacagcactgcacagagagtaacatacaantactacgttggacgcaagggctatgtttgacagcgattttaagcaagctgagggagtacctgtcaatttgcctttgagcantgtcaccgttctagtcagaagaacaaannggatgattctgatcaattgcttccagttaaaaatgctattggggtcaaatgccactgtgggagcccccgaaaaagtttcacccggatgcaattttgcggaagntaaccanaactttttaaccnaaggg

SEQ ID NO: 3921 - DNA, 666 bp, Homo sapiens
  misc_feature (643)..(643): "n" may be a, t, c, g, other or unknown
  misc_feature (661)..(661): "n" may be a, t, c, g, other or unknown
  misc_feature (663)..(663): "n" may be a, t, c, g, other or unknown
aaaggccggaccagaatatggccaagggatgaaccctattagccgcctggcgcaaattcaacaggccaaaaaggaaaaggagccggattatgttttgctttcagaaagaggaatgcctcgacgtcgagaatttgtgatgcaggtgaaggtaggcaatgaagttgctacaggaacaggacctaataaaaagatagccaaaaaaaatgctgcagaagcaatgctgttacaacttggttataaagcatccactaatcttcaggatcaacttgagaagacaggggaaaacaaaggatggagtggtccaaagcctgggtttcctgaaccaacaaataatactccaaaaggaattcttcatttgtctcctgatgtttatcaagagatggaagccagccgccacaaagtaatctctggcactactctaggctatttgtcacccaaagatatgaaccaaccttcaagctctttcttcagtatatctcccacatcgaatagttcagctacaattgccagggaactccttatgaatggaacatcttctacagctgaagccataggtttaaaaggaagttctcctactcccccttgttctccagtacaaccttcaaaacaactggaatatttagcaaggattcaaggctttcangtatgaattaaaagcaanancaa

SEQ ID NO: 3922 - DNA, 786 bp, Homo sapiens
  misc_feature (632)..(632): "n" may be a, t, c, g, other or unknown
  misc_feature (639)..(639): "n" may be a, t, c, g, other or unknown
  misc_feature (701)..(701): "n" may be a, t, c, g, other or unknown
  misc_feature (741)..(741): "n" may be a, t, c, g, other or unknown
  misc_feature (763)..(763): "n" may be a, t, c, g, other or unknown
aagctggacttaaagagttcaaattggagctggaattgctctaagcaattccagggccttgcaattttacaattaaggaagacttaaatatatacatagtcagggtggcaaggtaaaaggaggtctgatttcctctgcgatgttcttcagctaagacctaaattctgaaaccgttaaaacctgaagtgcctttaaatatattatttcatcagagccccaggttcattgtgtcacttatcaaggtctgatttagggtcctcaaggactaatcttgttagtgtttaaaagcaactaggttttgtttttggcattttagttccatcttctagattctgttgtcttgcagatagagatcagggagcccagctacacattcattcttctagtcccttgtactcattgtatttccttctgccttagggccttagtttgtgctgttccctgtaccaggaactctctttgctgtttctcggtttcttgctcaaatgtcacttcaaggaaggctttcctgactgacttcttattttttaagttgttacaacattgtgtacctttgttttatagcacttacatttatttctatgaatatttccttaatgcctatattccttcctaaatcgtaaagctgcacnagagcangatcatttgtgtctgccttactaaccttttcatcctgagtgcctggcaaaagtgcttggtanctggattgatacttaataaatatttgctaagcaaatgtanggtaacctcaaatccaagggcnaagtcaagctccaaggaattcca

SEQ ID NO: 3923 - DNA, 656 bp, Homo sapiens
  misc_feature (569)..(569): "n" may be a, t, c, g, other or unknown
  misc_feature (576)..(576): "n" may be a, t, c, g, other or unknown
  misc_feature (597)..(597): "n" may be a, t, c, g, other or unknown
gcgacaccatggacttatgcttatctcttcaagtatatcatcatcggagacacaggtgtggggaagtcatgtctcctcctgcagtttacagataagcggttccagcctgtccacgacctcacaataggtgtggagtttggagctcgtatggtcaacattgatggaaaacaaatcaaactgcaaatctgggatacggggagcagctggagcactgctggtgtacgacattacaaggcgtgaaaccttcaaccacctgacctcatggttagaggatgcccggcagcactctagttccaacatggttatcatgctcattgggaataagagtgacctagagtcccgcagggatgtgaagagagaagaaggagaggcctttgctagggagcatggacttatattcatggaaacttcagccaaaacagcctgcaatgttgaagaggccttcattaacacagccaaagaaatatataggaagatccagcagggtttatttgatgtccacttcccactaagaattagggtcaaagacattctatttgaacacttgcaattacctagatctaattggnctttggntgatagattctctgcctcggnatttcattgagtttttttcctccttgcctttgggtgtctgcttgccacttcctaaagaa

SEQ ID NO: 3924 - DNA, 821 bp, Homo sapiens
  misc_feature (697)..(697): "n" may be a, t, c, g, other or unknown
  misc_feature (739)..(739): "n" may be a, t, c, g, other or unknown
  misc_feature (783)..(783): "n" may be a, t, c, g, other or unknown
  misc_feature (812)..(812): "n" may be a, t, c, g, other or unknown
gcttcctcgttgcccccgccgcgggcgcgagatggattccgggtgctggttgttcggcggcgagttcgaggactcggtgttcgaggagaggccggagcggcggtcaggaccgcccgcgtcctactgcgccaagctctgcgagccgcagtggttttatgaagaaacagaaagcagtgatgatgttgaagtgctgactctcaagaaattcaaaggagacctggcctacagacgacaagagtatcagaaagcactgcaggagtattccagtatctctgaaaaattgtcatcaaccaattttgccatgaaaagggatgtccaggaaggtcaggctcggtgtctggctcacctgggtaggcatatggaggcgctggagattgctgcaaacttggaaaataaagcaaccaacacagaccatttaaccacggtactctacctccagcttgctatttgttcaagtttgcagaacttggagaaaacaattttctgcctgcagaaactgatttctttgcatccttttaatccttggaactggggcaaattggcagaggcttacctgaatctggggccagctctttcagcagcacttgcgtcatctcagaaacagcacagtttcacctcaagtgacaaaactatcaaatccttctttccacactcaggaaaagactgtcttttgtgttttcctgaaaccttgcctganagctctttaatttctgtggaagcgaatagcaataatagccanaaaaatgagaaagctctgacaaatatccaaaaactgtttggcanaaaaagagaagaaacaagtggttgataanagaactcaa

SEQ ID NO: 3925 - DNA, 635 bp, Homo sapiens
  misc_feature (499)..(499): "n" may be a, t, c, g, other or unknown
  misc_feature (562)..(562): "n" may be a, t, c, g, other or unknown
  misc_feature (578)..(578): "n" may be a, t, c, g, other or unknown
  misc_feature (633)..(633): "n" may be a, t, c, g, other or unknown
tattatagaccataatatgcctgtcataagcagactgtttttgttgactttcttgaccttctggggtaggtagtgccacctccttggaagaaagatccttttcgtgatgccagggcaatgattaacacatggaaaattggagcaaatgaaactgcaattaatactgctcaaacagattgcagagtatgatgaagaacttggatgtcattttattgcagcctctcctggggacaccattattttatcacctttgacttttggatgtatagctccatttgacatctcttgtcttttcctgctttctttctttattcttcccagtgggagttagatgaagaatgtctggcttgcagaagccagacttggccattctgggagatgtgcagactttcagattggctttgacagtcttacagagctgttcccaggatatgaagcacagctgcaaagcaggcagttcggctttgccttctcttactttcaagatgtgtgatgggangcggggaacatacaacccccagctgcttaaactcttctttatccagaattccccttcctttanctttgggaggcttcanatatcactcagttgactgattaaatatcaagggataggaatctatccccaagggngg

SEQ ID NO: 3926 - DNA, 756 bp, Homo sapiens
  misc_feature (553)..(553): "n" may be a, t, c, g, other or unknown
  misc_feature (621)..(621): "n" may be a, t, c, g, other or unknown
  misc_feature (638)..(638): "n" may be a, t, c, g, other or unknown
  misc_feature (693)..(693): "n" may be a, t, c, g, other or unknown
  misc_feature (724)..(724): "n" may be a, t, c, g, other or unknown
  misc_feature (741)..(741): "n" may be a, t, c, g, other or unknown
aaaactaatgactgagcacaaacctgttgaagatgcagttcttcttggtagcctaaataggattatcttggacctaagatagtgaccttgtttttttttcttaatttttccattgaaatacatggccttaaggaaatatgcaaaaaaaaaaaaaaatgaacctggaaaaaaaaggtcctggaccaggtggatgcctcatatattaagaaatccccgaggccgggtacagtggcttacgcctgtaatcccagcactttgggaggccaaggcgggcggatcacgaggtcaagagatcgagaccatcctggctaacacggtgaaaccctgtctctactaaaaatataaaaaatttggtgggcgcctgtagtcccagctacttgggaggctgaggtaggagaatggcgtgaacgcaggaggtggagcttgcggtgagtggagattgcgccaccgcactccagcctgagcgacacagcgagactccgtctcaaaaaaaaaaaaagaagaagaaaaagtatccccggtactattcaaatggaactttatcactaataancacaagggaagaccatgccccatgttagcaatgcaaattattgctacagctgcctaagataatttggnccttagttgataatatncaagagaatgtggacttctaagtccctttgccttgcatcctctgtttcaaatganttaaaggggttgtgtagggaaagcaagttantaaaacttaggagaaanccttcccaagattta

SEQ ID NO: 3927 - DNA, 669 bp, Homo sapiens
  misc_feature (538)..(538): "n" may be a, t, c, g, other or unknown
  misc_feature (609)..(609): "n" may be a, t, c, g, other or unknown
  misc_feature (624)..(624): "n" may be a, t, c, g, other or unknown
  misc_feature (658)..(658): "n" may be a, t, c, g, other or unknown
tggtgagggaagagagagaccctctcatattgttttatactcagaaaagaaaagagaagcaaaactaaaggcaggtagcctggcacctaggaacagacccaaaaccaaggaaccagacccgaaaccaggcctgggcctgcctgacctaagcctagtagttaaaattctacccctgacctagcaactgatgttatctctagattatagaaagacattgtaaaacttcccggtctgttctatttcactctgaccaccgttgcatgcagcccctgtcacgtaccccctgcttgctcaatcgatcatgaccctctcacgcggaccccccttagagttgtgagcccttaaaagggacaggaattgctcactcggggagctcggattttaagacactagcctgctgatgctcccagctgattaaagccactcccttcactatcttggtgtctgaggggttttgtctgcggcttgtcctgctacatttcttggttccctgaccaggaagcgaggtgattaacggatggttgaggcagctccttangcgactttagcctgccctgtggaacatccctgcgggggactccaaccagccaaagcaacgcggatcctganagtgctcctgggtangcacttgccctgatgggacgccttgccaaagcantgtgtggaagg

SEQ ID NO: 3928 - DNA, 755 bp, Homo sapiens
  misc_feature (740)..(740): "n" may be a, t, c, g, other or unknown
  misc_feature (743)..(743): "n" may be a, t, c, g, other or unknown
  misc_feature (749)..(749): "n" may be a, t, c, g, other or unknown
aaaaaaaaaaaaaaaaaggtttgtctccgctgtttcatctctatggctgtcagaggtgggcggctttgaccgagaggctgctggagctcgtgtttggacgcgatgtttcgtctgaactcactttctgctttggcagaactggctgtgggttctcgatggtaccatggaggatcacagcccatccagatccggcgaagactaatgatggtggctttcctgggagcatctgcagtaactgcaagtactggtcttttgtggaagagggcccatgcagaatctccaccatgtgtagacaacctaaaaagtgacatcggtgataaagggaagaataaagatgaaggggatgtttgtaaccatgagaaaaagactgcagatcttgcccctcacccagaagagaaaaagaagaaacgttctggattcagagacagaaaagtgatggaatatgagaataggattcgagcctactccacgccagacaaaatcttccgatattttgccaccttgaaagtcatcagtgagcctggtgaagcagaagtgtttatgacaccagaagattttgtgcgatccataacacccaatgaaaaacaaccagaacacttgggtctggatcaatatataataaaacgctttgatggaaagaaaatttcccaggaacgaggaaaatttgctgatgaaggcagtatattttacacccttggagaatgtgggctcatatccttttcagactacattttcctcanaantggtcnttccaa

SEQ ID NO: 3929 - DNA, 714 bp, Homo sapiens
  misc_feature (644)..(644): "n" may be a, t, c, g, other or unknown
  misc_feature (661)..(661): "n" may be a, t, c, g, other or unknown
  misc_feature (685)..(685): "n" may be a, t, c, g, other or unknown
aattagaactggaaagaaatcggaagcgactagagactctgcagagtgtcaggccatgttttatggatgagtatgagaagactgaggaagaattacaaaagcagtatgacacttatctggagaaatttcaaaatctgacttatctggaacaacagcttgaagaccatcataggatggagcaagaaaggtttgaggaagctaaaaacactctctgcctgatacagaacaagctcaaggaggaagagaagcgcctgctcaagagtggaagtaacgatgactcggacatagacatccaggaggacgatgaatccgacagtgagttggaagaaaggcggctgcccaagccacagacagccatggagatgctcatgcaaggaagacctggcaaacgcattgtgggcacgatgcaaggtggagactccgatgacaatgaggactcggaggagagtgaaattgacatggaagatgatgatgacgaggatgacgatttggaagacgagagcatttctctctcaccaaccaagcccaatcgaagggtccggaaatctgaacccctggatgagagtgacaatgacttctgacccttttgccaagggaccctggcagattaaaaccctcagacttgtaggtaaatgggaacttanaaggttaggaaggtaanccctgttttgtttactaagctggntggactcatgatcactgaagcaatactta

SEQ ID NO: 3930 - DNA, 632 bp, Homo sapiens
  misc_feature (573)..(573): "n" may be a, t, c, g, other or unknown
  misc_feature (586)..(586): "n" may be a, t, c, g, other or unknown
  misc_feature (621)..(621): "n" may be a, t, c, g, other or unknown
gtgcccagctgagagcagcaccaacaccacccaggatgagcagcgcaggtggccaggctgtgaccagcaggacgagatgctcaacctgggcttcaccattggttccttcgtgctcagcgccaccaccctgccactggggatcctcatggaccgctttggcccccgacccgtgcggctggttggcagtgcctgcttcactgcgtcctgcaccctcatggccctggcctcccgggacgtggaagctctgtctccgttgatattcctggcgctgtccctgaatggctttggtggcatctgcctaacgttcacttcactcacgctgcccaacatgtttgggaacctgcgctccacgttaatggccctcatgattggctcttacgcctcttctgccattacgttcccaggaatcaagctgatctacgatgccggtgtggccttcgtggtcatcatgttcacctggtctggcctggcctgccttatctttctgaactgcaccctcaactggcccatcgaagcctttcctgcccctgaggaagtcaattacacgaagaagatcaagctgagtgggctggncctggaccacaangtgacaggtgacctcttctacacccatgtgaccancatgggccaaa

SEQ ID NO: 3931 - DNA, 776 bp, Homo sapiens
  misc_feature (671)..(671): "n" may be a, t, c, g, other or unknown
  misc_feature (750)..(750): "n" may be a, t, c, g, other or unknown
  misc_feature (774)..(774): "n" may be a, t, c, g, other or unknown
  misc_feature (776)..(776): "n" may be a, t, c, g, other or unknown
atcaagcaggggcagggctggcgctgcggcgggagatgctgtcgggccgcggcggcgcttggcagccaggagctctgcattgaaggcactggggtaaagtgaatgccgaagacagaagatttggatgatacaccactgactttctttgtttggaatacacgttatgaaccctttctggagcatgtctacaagctctgtacgcaaacgatctgaaggtgaagagaagacattaacaggggacgtgaaaaccagtcctccacgaactgcaccaaagaaacagctgccttctattcccaaaaatgctttgcccataactaagcctacatctcctgccccagcagcacagtcaacaaatggcacgcatgcgtcctatggacccttctacctggaatactctcttcttgcagaatttaccttggttgtgaagcagaagctaccaggcgtctatgtgcagccatcttatcgctctgcattaatgtggtttggagtaatattcatacggcatggactttaccaagatggcgtatttaagtttacagtttacatccctgataactatccagatggtgactgtccacgcttggtgttcgatattcctgtctttcaaccgctagttgatcccacctcaagtgagctggatgtgaagagagcatttgcaaaatggaggcggnaccataatcatatttggcaagtattaatgtatgcaaggagagttttctacaagattgatacaagcaaagccccctgaanccaaaaggcttgcaagtactggtntn

SEQ ID NO: 3932 - DNA, 733 bp, Homo sapiens
  misc_feature (680)..(680): "n" may be a, t, c, g, other or unknown
  misc_feature (683)..(683): "n" may be a, t, c, g, other or unknown
  misc_feature (702)..(702): "n" may be a, t, c, g, other or unknown
aagggctcgcagcggccagaaacccggctccgagcggcggcggcccggcttccgctgcccgtgagctaaggacggtccgctccctctcgccagctccgaatcctgatccaggcgggggccaggggcccctcgcctcccctctgaggaccgaagatgagcttcctcctcagcagccgctcttctaaaacattcaaaccaaagaagaatatccctgaaggatctcatcagtatgaactcttaaaacatgcagaagcaactctaggaagtgggaatctgagacaagctgttatgttgcctgagggagaggatctcaatgaatggattgctgtgaacactgtggatttctttaaccagatcaacatgttatatggaactattacagaattctgcactgaagcaagctgtccagtcatgtctgcaggtccgagatatgaatatcactgggcagatggtactaatattaaaaagccaatcaaatgttctgcaccaaaatacattgactatttgatgacttgggttcaagatcagcttgatgatgaaactctttttccttctaagattggtgtcccatttcccaaaaactttatgtctgtggcaaagactattctaaagcgtctgttcagggtttatgcccatatttatcaccaagcactttgattctgtgatgcagctgcaaaganganggccaactcaacacctccnttaagcactttaattttccttggtcaaggag

SEQ ID NO: 3933 - DNA, 762 bp, Homo sapiens
  misc_feature (674)..(674): "n" may be a, t, c, g, other or unknown
  misc_feature (700)..(700): "n" may be a, t, c, g, other or unknown
  misc_feature (743)..(743): "n" may be a, t, c, g, other or unknown
tatgaaatgtttcatattgaaaacacaagatgacctttctaatgagctgtatgagaggtgaatctcctcactgtcactgccatagccaagcatcctcatgagagtgagcacatcggcacagcatgcatccagctctggaggccacggtgcaggcatagctgcctgctgctctggcagaggccagtaaatacagttcctagaagcagcctttgctgtctttttacactgtatgcggtttggaaatgaatgtagaaacttactgtgggcatttacctttctgtgccagtttggcttttattgcctgaaccttatgctgacctggagaggagatgggggacagtgctgttgtggggccagcagtgaatctgtatgcggagagttgtgttgtgctgatgtggccgttggtggtcaggtaagaggctcggcaccttcttggaagaaatcatgtctgagggtgtacgtttgatatgatcatgccagattggagaagatccaagccaggaagatgggcttgaagcaaactgcattatcaggagtaccttggtgagaggatcagtgtaaatcctaataggtacaaagacttttgtgttttggctttgtcacagatttattgaaaaacttttttgcttctgcttccatttttagcattttagtttctggttttcatttttggngaatccttgccttttaaactcgtggnttttctctcattttcttccctctctccctccatctctgaccanccccaacctaaccccccaa

SEQ ID NO: 3934 - DNA, 749 bp, Homo sapiens
  misc_feature (709)..(709): "n" may be a, t, c, g, other or unknown
  misc_feature (723)..(723): "n" may be a, t, c, g, other or unknown
  misc_feature (729)..(729): "n" may be a, t, c, g, other or unknown
aaaccgagttctggagaacgccatcaagctcgctgcttaaaattaaaccacaggttccattatgggtcgacttgatgggaaagtcatcatcctgacggccgctgctcaggggattggccaagcagctgccttagcttttgcaagagaaggtgccaaagtcatagccacagacattaatgagtccaaacttcaggaactggaaaagtacccgggtattcaaactcgtgtccttgatgtcacaaagaagaaacaaattgatcagtttgccaatgaagttgagagacttgatgttctctttaatgttgctggttttgtccatcatggaactgtcctggattgtgaggagaaagactgggacttctcgatgaatctcaatgtgcgcagcatgtacctgatgatcaaggcattccttcctaaaatgcttgctcagaaatctggcaatattatcaacatgtcttctgtggcttccagcgtcaaaggtgggtctgtctccttccgaggactgcgatgctcatacacgcacatcattaagagctctgcgtttgggaacaggcatagcagagattataatttcaagtattgaaatgatttcaaaactgcttttttcaaaattggtattaagttccttaaccacagatcttttgctctcgatgtgagccagtggtaaaattaaattaaaatgtgggggtatttttgccctcccttttantctttctaatgggncatggnaaatgaacatcaaactggga

SEQ ID NO: 3935 - DNA, 784 bp, Homo sapiens
  misc_feature (599)..(599): "n" may be a, t, c, g, other or unknown
  misc_feature (676)..(676): "n" may be a, t, c, g, other or unknown
  misc_feature (743)..(744): "n" may be a, t, c, g, other or unknown
  misc_feature (777)..(777): "n" may be a, t, c, g, other or unknown
gtgcaaagtgctgggttctgggtttctggattcgcgggccgttcacacgtagcctgtgccggctcctcgggtgagtccgtccgcgcgcggtgccccgggacggcctaggctgccgggggtccggggccccaggcattccgggctgcagattgacggggatcccggatgcaccgcgcgcccccgcgccctcaccgacgggtccagacctggtgggaagaaggtgcggggacgggtccctgaggatcccgatgcctacgagccaagatgctcagctttataggtgtgacctacacatgtgacttcacctcagttttgtgatccgtaaaatggacaaattcgaagctacttcacagtgctgttgagaggattaaatgaaacaatgcttgtaaagctctttgcaggagggagcctcggaagcagggcctggccggcagagcacacctgctgtcaccagggaccacaggcagcatgaagacccccgtggagctggccgtcagtgggatgcagaccctcggccttcagcaccgctgccgaggtggctaccgggtcaaggccaggacgtcatatgtggatgaagactctgtttggcagcccaacangcacccggcctaccccaccggacttcgattcgccctgggtggagaaggctaacagaaccagaggcgtgggcaagganggcatccaagggccttggggggcaaaaggggaagcttgtgagaaccaaccccctcaaagggggcaannaacccccaaccctcaaaaccaaagggaaagaangaaacaa

SEQ ID NO: 3936 - DNA, 99 bp, Homo sapiens
  misc_feature (13)..(13): "n" may be a, t, c, g, other or unknown
  misc_feature (26)..(26): "n" may be a, t, c, g, other or unknown
  misc_feature (64)..(64): "n" may be a, t, c, g, other or unknown
  misc_feature (68)..(68): "n" may be a, t, c, g, other or unknown
acctgatgtgttnaaagcacttcatnaggccccggttttcctttggcttctgcttttcagtgantggnatgactgcctatgtgggtggcaatgccaccc

SEQ ID NO: 3937 - DNA, 688 bp, Homo sapiens
  misc_feature (477)..(477): "n" may be a, t, c, g, other or unknown
  misc_feature (620)..(620): "n" may be a, t, c, g, other or unknown
  misc_feature (669)..(669): "n" may be a, t, c, g, other or unknown
  misc_feature (681)..(681): "n" may be a, t, c, g, other or unknown
tggtcttgcacaagacttcagatagggccacaattatgggagctggaaagaatctggctcccttaccaccagtgggtcctttcccctgcctcacaggcatgcacatgctctctctgtaggtaaaaagtacagcatctggcttagcttcagatacttccagttttctaaagaccagtgctttgaatgctttttgttacttaggtaagctccatcaactgtaaaataagtattggtggatttatggatttcaaaaggcagaacaactaacatactgaattcctgattccagtctatgttctactggagttgtcagaatgccaaatgctaacgcaaacagtgcttttttcttctaaaaggaggaaagagggtgggaatgagaggatgaattcctatcagtttaggaggatgttgccattgggagttcttgcgtaatttgagattgtaaaacctagaaggtttcttgtctttgttatgtangaggaaacaggaattcttggtttaacttaggctgggcctgggaagagtttgctgtttacaatgagatctaaccccttattggagatgattttaaaaatctctggccacctctatgggcatctttggcaagatctgcatttggnatttaatagcaaccacatttattaaagcaaagaaatttccctcaattgntgtcccaagtantccaata

SEQ ID NO: 3938 - DNA, 796 bp, Homo sapiens
  misc_feature (685)..(685): "n" may be a, t, c, g, other or unknown
  misc_feature (768)..(768): "n" may be a, t, c, g, other or unknown
  misc_feature (784)..(784): "n" may be a, t, c, g, other or unknown
  misc_feature (786)..(786): "n" may be a, t, c, g, other or unknown
gctccacctccgccccatggacagtagatgaccgttaatggcttttaaggaaagatgcaacctggaaaaaaataaaaaaaacttgttttagaatggtaaccactggcaatatgaagaataattagactaaagaagagaggtaggataatcatgggcattggcagtggaattgaaagagtaatttcagaagcagaatggtcagatgttggaggtgattggttatagagtttaagaattgtactgattttctattgtgtaacaaactaccccaaaacttaatggcttaaagcaactattatttctcctgattctgtggttgactggatggtcgtctgctgctcttgcttagacttaggcatctgcatttagctgagggttcagccagggctggacatcctttaatggcctcattcccatgtctggggcctcaggtcagatagctgggactaccgggtctcactccagaagaggcttcttcagagcatggtagtcttggggttctaagagaatgagagtagaagctgcaaaacctcttgaaactggggcttgggagtcacacatgactttctccacattctgttcgtcaaaagcgaatcataaggacagcacagactcaagggataagaaaggagattccatctcttgatgaagaagagctgcaaagggcatatttaatcagtcacangagtctaatgctacaaagtagttttttaaaaagatgactagattggcaagttcaagggtaatccttttaattggtttaattanatatcacttagctggnantcagtaaagc

SEQ ID NO: 3939 - DNA, 486 bp, Homo sapiens
  misc_feature (484)..(486): "n" may be a, t, c, g, other or unknown
gaataaattagaggggatctcggtgcgaactttccttgacctcgaccccaaagaggcttgctggggccgagaagaaaacccgtgcgggatgtggaggggcccggggcgccggggtcccccgcccgcgagacccgctccaccaggcgccttggagagcagcgccagcggtcgtcctccagctcccgcaggggtcgccccgccggcgcgagggacacaatgggtccgcgggccacgcgaacgggcctcggcccggcggcagcacgggagagatgtgaggagcgcgcggaaggggagcgcggccggggagatcccagcgcggtcaggcccgggagccgaggctcgggggcccgggaactgggcttcccacagcagaagacccaacaaagacaccaggggagcccggcgggctgggcgcgagaagacgtggtagcaggttcgctcctccgagcagacgggaggcgccatcatgggggggggggggtcnnn

SEQ ID NO: 3940 - DNA, 607 bp, Homo sapiens
  misc_feature (581)..(581): "n" may be a, t, c, g, other or unknown
  misc_feature (586)..(586): "n" may be a, t, c, g, other or unknown
  misc_feature (603)..(603): "n" may be a, t, c, g, other or unknown
gaccctgtttcaaagagaaaaaaaaaaaagctggagaggagagggggcaggtttgtggcagggtggctgcagtggccatggggaggtgtttggacctgggggttggagacagctccatgagccctgctgaggatcatggtagccaggctgggatcctgggcccagagcagtgctggctgacacataggtctgtggcccaggtgtggtctacgacacgttcatgctaaagcaccagtgcatgtgcgggaacacacacgtgcaccctgagcatgctggccggatccagagcatctggtcccggctgcaggagacaggcctgcttagcaagtgcgagcggatccgaggtcgcaaagccacgctagatgagatccagacagtgcactctgaataccacaccctgctctatgggaccagtcccctcaaccggcagaagctagacagcaagaagttgctcggccccatcagccagaagatgtatgctgtgctgccttgtgggggcatcggggtggacagtgacaccgtgtggaatgagatgcactcctccaagtgctgtgcccatggcaatgggctgcctgctgganctggncttcaaggtggctgcangaga

SEQ ID NO: 3941 - DNA, 646 bp, Homo sapiens
  misc_feature (464)..(464): "n" may be a, t, c, g, other or unknown
  misc_feature (584)..(584): "n" may be a, t, c, g, other or unknown
  misc_feature (612)..(613): "n" may be a, t, c, g, other or unknown
gaagcgcgctcccggggaggtgttgcagccatggctacggcagccggcgcgacctactttcagcgaggcagtctgttctggttcacagtcatcaccctcagctttggctactacacatgggttgtcttctggcctcagagtatcccttatcagaaccttgggcccctgggccccttcactcagtacttggtggaccaccatcacaccctcctttgcaatgggtattggcttgcctggctgattcatgtgggagagtccttgtatgccatagcattgtgcaagcataaaggcatcacaagtggtcgggctcagctactctggttcctacagactttcttctttgggatagcgtctctcaccatcttgattgcttacaaacggaagcgccaaaaacaaacttgaagttgtctgaaagcttgctctacacttttacattcatcctcacccttttttttgtggggtanaggaggtgcagtaatttactcagtgatctttctactttctagaaactgtccttcaaagctctttaagaccccctcgttagtcagtttcttctcttatatgctctggttgagcttgaatanaccagttgttacttaagaaagaaacagnnaaagattttagcttttcaatcctatttggcaaa

SEQ ID NO: 3942 - DNA, 654 bp, Homo sapiens
  misc_feature (566)..(566): "n" may be a, t, c, g, other or unknown
  misc_feature (578)..(578): "n" may be a, t, c, g, other or unknown
  misc_feature (627)..(627): "n" may be a, t, c, g, other or unknown
gaagaaaaaggggtgcccaaacaagtcaccttaaaatttgatgcctgtgctgtcattaatagtaataagttaggaataaagtgtggttctcttaattagaaaagaggctatatggcagaaaataagtacatctgtcataaattaggactgtgtggaaataaatgtaaatactggtcttgtgtcatttaggccacttggattaaaaaaaatgaaaaggatccagtccaccttcagaaaggaaaaaaatggcccttcctgtgctaagggacaatgtaaccccttagagctagtaataaccaatccccttgatcctcgctggaaaaaagagtagcgtgtgaccttaggaatcaatggggctggactgaatccccgagtaaatatcttggttcgaggagaagtttacaaatgctctcttgagccagtgtttcaaactttctatgatgaactaaatgtgccaataacagaatttccaggaaaaacaagaaatttgtttttgcaattagccgagcatgtagcccagtctctcactgtcacttcatgttatgtatgtggaggaactgtaatancagatcaatggncatgggaagcccgagaattagtacctacagacccagttccctgatgaantccagctcaaaagaatcaccctgaaaa

SEQ ID NO: 3943 - DNA, 682 bp, Homo sapiens
  misc_feature (535)..(535): "n" may be a, t, c, g, other or unknown
  misc_feature (558)..(558): "n" may be a, t, c, g, other or unknown
  misc_feature (598)..(598): "n" may be a, t, c, g, other or unknown
  misc_feature (638)..(638): "n" may be a, t, c, g, other or unknown
  misc_feature (676)..(676): "n" may be a, t, c, g, other or unknown
aacaccctcctggaggatgctggtgagaggcagggaccaggggtccggctcccggctcgggcctatcgttaggcgctgggcccccaggccctctcctttgcagagtctcgctgcctccctcgacgcagagccttcaagcgccgcagtccccgacggcttccccgcgggccccactgtctccccaagacgcctggcgaggccgccggggctggaggaggcgctgagcgcgctggggctgcagggagaacgcgagtacgccggggacatcttcgccgaagtcatggagtacctgggtctggctggtgacacactttatctggcggttcacctgcttgattcctacctgagcgctggccgcgtgcgtctacatcgcctgcagctgctgggcgtggcttgcctgtttgtggcgtgcaaaatggaagagtgcgtgcttcccgaggaaactgaggtccggaacttggggcctttccagggcaaggagtaaagagcccggattcaagactccttcaactccccccgcatcccccatctgcancccgccttcctctgcctcctgancgcggactccttctcacgggcggagctgctgcgcgccgancgtcgcatcctgagccgcctggatttccggctgcaacaancccgggcccgctgctgttgcctccgggctgctgggccnccctgg

SEQ ID NO: 3944 - DNA, 556 bp, Homo sapiens
  misc_feature (510)..(510): "n" may be a, t, c, g, other or unknown
  misc_feature (517)..(517): "n" may be a, t, c, g, other or unknown
  misc_feature (547)..(547): "n" may be a, t, c, g, other or unknown
ttgaggtcacaccttcagtccttcgagcaaatatgcctcttcatgttcgacgcagtagtgacccagctctaattggcctctccacttctgtcagtgatagtaatttttcctctgaagagccttcaaggaaaaatcccacacgctggtcaacaacagctggcttcctcaagcagaacactgctgggagtcctaaagcctgcgacaggaagaaagatgaaaactacagaagcctcccgcgggatactagtaactggtctaaccaatttcagagagacaatgctcgctcgtctctgagtgccagtcacccaatggtgggcaagtggcaggagaaacaagaacaggatgaggatgggacagaagaggataacagtcgtgttgaacctgttggacatgctgacacgggtttggagcatatacccaacttttctctggatgatatggtaaagctcgtagaagtccccaacgatggagggcctctgggaatccatgtagtgcctttcagtgctcgangcggcanaaccctggggttattagtaaaacgattggngaaaggtgg

SEQ ID NO: 3945 - DNA, 689 bp, Homo sapiens
  misc_feature (627)..(627): "n" may be a, t, c, g, other or unknown
  misc_feature (636)..(636): "n" may be a, t, c, g, other or unknown
  misc_feature (686)..(686): "n" may be a, t, c, g, other or unknown
gtcatttttgtatatctttcctttcttacttcaggggtgtgtcttcaagatttctaccccctatttgcaatgaatttcatacctcatctaaaatacattcatataccagaaatatgaagagtggcccttctaaaagtttccctaatgatggaagctgtcagttgtcctatctgtgcagaatgtgagtaatagtggcagaaataagtgtgacaacaatgctttgcctgttgttctttttacttgctaggtaatttgtaaagtggggataaagatgtagggaaagtaaacctctctctcactgttacggaaagcctggacttgagttaggtagactgccttaaagaagaagaaatatgtccttttctttggcatcatggttttgttgagtggcagactgttgaagtgagttgagacttaagaacgccagaaaagttgtctagcctggccccagtagacagaatttgttcttctctcaagtaaaaaattacctttttatagcctttatattatttagatgaaaaaataccattatgaacataattccatggccctttgtgtacaaagcatattttgaattaaatacctcaaggtccacctagacctctatggataaaatcataagtttangatttttanctcctgtgagtgttgggggcaaactacacagagaagacatgggggtgggntca

SEQ ID NO: 3946 - DNA, 606 bp, Homo sapiens
  misc_feature (351)..(351): "n" may be a, t, c, g, other or unknown
  misc_feature (559)..(559): "n" may be a, t, c, g, other or unknown
  misc_feature (567)..(567): "n" may be a, t, c, g, other or unknown
  misc_feature (577)..(577): "n" may be a, t, c, g, other or unknown
agctctccgccagtaggagtttccggaaggagtttgaatttttgtgatttttatgcttgtttggtcggtggaatatgttgggatttatgtttgcctctgaacaagtgtcttgctcacatcgtaaatgactttctctccgaaacgctaaatattctttcccgcaggagctcatatccttattttccatgacggatcttaacgacaatatatgcaaaagatatataaagatgataactaatatagttatactgagcctgatcatttgcatttcgttagctttctggattatatcaatgactgcaagcacctattatggtaacttacgacctatttctccgtggcgttggctgntttctgctgttgttcctgttctgatcgtctctaatggccttaaaaagaaaagtctagatcacagtggggctctaggagggctagtcgttggatttatcctaaccattgcaaatttcagcttttttacctctttgctgatgttcttcttgtcttcttcgaaactcactaaatggaagggagaagtgaagaagcgtctagattcagaatntaaggaangtgggcaaangaattgggttcaaggtgttctgtaatgga

SEQ ID NO: 3947 - DNA, 665 bp, Homo sapiens
  misc_feature (626)..(626): "n" may be a, t, c, g, other or unknown
  misc_feature (661)..(661): "n" may be a, t, c, g, other or unknown
  misc_feature (664)..(664): "n" may be a, t, c, g, other or unknown
gtaccaacttaatatatgttatagactaaatgtttatgtcctcccaaacttcatattttggaagccagacatggtgactcacacctgtaaacctaacactttgggaggcctagttgggaggattgcttgagtccgggagttcggaaccggcctggacaacatggtgagaccccgtctctacaaaaaaaaaaaaaaaatttttaattagccaggtgtggtggcatgcacctgtagtcccagctactcaggaggcttgcctgagcccagaggtttgagactgcagtgagccatgatattgccagcctgggtgacagagcaagaccttgtctcaagaaaaaaaaaaaaaaattgccaattgcgatggctcacgcctgtaatcccagcactaggaggccgaggtgggtgaatcacctgaggtcaggagttttgagaccagcctggccaacgtggcaaaaccccgtctctactaaaaatgcaaaaattaccgggacgtgttggtgagcacctgtaatccctgctactcgggaggctgaggcaagagaatctcttgaacccagggggtggaggttgcactgagccgagatcatgccattggacttcacctgggcaacaagagggaaactgtntccaaaaaaaaaaaatttggagggctgggcaccgnggnt

SEQ ID NO: 3948 - DNA, 861 bp, Homo sapiens
  misc_feature (621)..(621): "n" may be a, t, c, g, other or unknown
  misc_feature (761)..(761): "n" may be a, t, c, g, other or unknown
  misc_feature (790)..(790): "n" may be a, t, c, g, other or unknown
  misc_feature (793)..(793): "n" may be a, t, c, g, other or unknown
  misc_feature (861)..(861): "n" may be a, t, c, g, other or unknown
gttgaaagatgtgagacagtattcaagaataatgaagataataataatgattattataataatgatgatgattccaaggaaaaaacctacagcgaatgttccatttctaccccgcacgcagacactctccctaacactgataacctgagcccccagcactggacggaagaatgctggcgtctccgtgtgtactggttcagggttctggccccagccttgtcaggaccccctggtgtccagagcccccacccctcccgcaacaagcagctgatgccccagtgattctctatacatttttcacctcggccaatatgtccaggaaaactgcttacttctcttttcttgcctggagcttcattgttcacccttacgttgcaatataggaattaatgctacaaaataaaagtaaagcttacctgaaaagtgcatagtttggggcaatggtatctacatctcccactgtgggaaaaccagcaaagcatcaaaactctcaattctcctgttaccgaatgcagatctgaattataagatgtttatgtttgaccattgtttcaacaatgggattttgttacgaattatccctttaactgaaaccctcagttttactgtttacattattangaaaacagggatatcttttgaatctaaaaatttgatgtacagcatgtgatttttgaagtttacatgtaaagtcacagtataggtgaaataacgtttgtcatattttgagacgtatcctggaaaccaatgtttttacgttnagtggttttaagtcaaaagttcaatgggnaanacaagtccttttcacaaattaaaaaggggaaaaaggggattttttttttccctcccaaaaatggtttn

SEQ ID NO: 3949 - DNA, 878 bp, Homo sapiens
  misc_feature (735)..(735): "n" may be a, t, c, g, other or unknown
  misc_feature (768)..(768): "n" may be a, t, c, g, other or unknown
  misc_feature (833)..(833): "n" may be a, t, c, g, other or unknown
  misc_feature (844)..(844): "n" may be a, t, c, g, other or unknown
tggaaaacctaaaaagaagggaaatactttctgggtagtgtcagatacattatcctaggggaatgtcagtgaggccctccaacagctattccacttgattgttgcatgagctaatggccataaaactccttagaaaagcacaaagcaaaactaaagaagagtatttactagtgttggatatatttgtaaaagtgagattacaaatcatgtatctggctatttttttcttaaacatgttccttcaagaatttttctgttcgttcattttaaatatttattaaatgttctgatttcttatgttcactgctagctaattaacaaggatggaatttttcttgccttggttatatctaaaagattgtaaaaactttgagaaagcaatgttgccctctttccacaggagtattttggtagctgtaagagaatgcacattgcaaatgactcaaatgtggtaaaatgttggtttcataattctgaaatggcctcttccccaaaagtgacagtaacaccctagctccaggctcaaccacatccagcacatagccaacatttaacagatgttgacaaaatagttaataataatattattaaggaaccagccagagtttcatgcttattaaatactttttcaaccagaaggtctgcaaaggttgatttctgaatatgacgttagctctctctagacctattaatttacgacatttcaaatcagaggtaaaccagcagacctattanttttcaatgataaactataaacagtttttgaantcaactaattcctttcctttaaattgggcagaattcatcaggaagtcagacaaccaattataaangctcctcatangcaattctcacctcaccactgagtaaattaaatg

SEQ ID NO: 3950 - DNA, 452 bp, Homo sapiens
  misc_feature (410)..(410): "n" may be a, t, c, g, other or unknown
  misc_feature (418)..(418): "n" may be a, t, c, g, other or unknown
  misc_feature (448)..(448): "n" may be a, t, c, g, other or unknown
gtatgcaaatgtagcggcgcggcgggagcgcgcggctgatacccgggactgggctgcggcggttagtcctctcccggccgccgtcgcctccgacatattgcccgcaggagctgcggcggcgaagcggagagcaccggggggaggagatgggaggacgaagaggtcccaacaggacatcttactgtcgaaatccgctctgtgagccgggatcctcggggggctctagtggaagccacacttccagtgcatcggtgaccagtgttcgttcccgcaccacgagcagttctggtacaggcctctccagccctcctctggccacccaaactgttgtgcctctacagcactgcaagatccccgagctgccagtccaggccagcattctgtttgagttgcagctcttcttctgccanctcatagnactcttcgtccactacatcaacatctacangaca

SEQ ID NO: 3951 - DNA, 615 bp, Homo sapiens
  misc_feature (187)..(187): "n" may be a, t, c, g, other or unknown
  misc_feature (382)..(382): "n" may be a, t, c, g, other or unknown
  misc_feature (425)..(425): "n" may be a, t, c, g, other or unknown
  misc_feature (521)..(521): "n" may be a, t, c, g, other or unknown
  misc_feature (582)..(582): "n" may be a, t, c, g, other or unknown
  misc_feature (597)..(597): "n" may be a, t, c, g, other or unknown
aaagccgggctcgggccgcaagcggggcgaggggttcggggagcggcggcagccgcgggagcccctgggcagccgtccgcccgcgcagccgccgccgccgcgggagcccgtcgccgggagcaggagcgggcggaagacaacggaggggccgagcgtccgagccactccgcggggaccgaacgagcancccgaagcggcggcggccgaggacggggacagcgacgacgcggaggcagagaagggaacgcccggcccagccccgtagcacaggcggagtgcagcggaggcccctgccgctgccgtcatgccgttcccgtttgggaagtctcacaaatctccagcagacattgtgaagaatctgaaggagagcatggctgttctngaaaagcaagacatttctgataaaaaagcagaaaatgctacanaagaagtttccaaaaatctggttgccatgaaagaaattctgtatggcacaaatgaaaaagagcctcatacagaagcagtagctcaacttgctcaanaactctataatagtgggctccttacaccctgtagctgatttacagctcattgacttttganggcaaaaaagacgtngctcaaattttcaacaat

SEQ ID NO: 3952 - DNA, 300 bp, Homo sapiens
  misc_feature (264)..(264): "n" may be a, t, c, g, other or unknown
  misc_feature (275)..(275): "n" may be a, t, c, g, other or unknown
  misc_feature (287)..(287): "n" may be a, t, c, g, other or unknown
gagacaatgtgcccagtgcccgctgcagctaccagcaacgtccatatggtgaagaagattagcatcacagagcgaagctgcgatggagcagcaggcctcccagaagttcctgccgaatcgtcttcgtcacccccggggtccgaggtagcctcccttacacagcctgagaagagcacaggccgagtgcccacccaggagcccacccacagggagcccaccaggcaagcagcctcccaagagtccgaggaggccgggggcaccggngggcccccggnaggcgtgcgatntatcatgaaacgg

SEQ ID NO: 3953 - DNA, 539 bp, Homo sapiens
  misc_feature (294)..(294): "n" may be a, t, c, g, other or unknown
  misc_feature (495)..(496): "n" may be a, t, c, g, other or unknown
  misc_feature (507)..(507): "n" may be a, t, c, g, other or unknown
attgatcggcagaaagctaacttccccccaaggctagaaaccagagttgttaaattcttgttttccttatacacatacggtcttaactgctggtgattaatcttgattacatcatgcagtctcttttctgaaagaccaaagcatatcgccaccttaaagttctcagtttattttttgcaagcttatttagttcttcctcctttgtgtcattgcatcatccgcggaacaagctctcagtccttacgcagtctcggtgcagtctaggtggaggtagctgtggtgtgggcaggcggnggatcagggtcttgtctcccatgttcagctgcatggctttcttcatatgaggctttctctttccatttttttcattttgttttgtttgtttgtttgttttgagacagagtctcgctctgttgcccaggctggagtgcagtggcacgatctcggctcactgcaacctgcgcctcctgggttcaaacgattctcctgcctcannctcccaagtanctgggattacaggtgtgtggcactaaccctgg

SEQ ID NO: 3954 - DNA, 597 bp, Homo sapiens
  misc_feature (414)..(414): "n" may be a, t, c, g, other or unknown
  misc_feature (444)..(444): "n" may be a, t, c, g, other or unknown
  misc_feature (476)..(476): "n" may be a, t, c, g, other or unknown
  misc_feature (546)..(546): "n" may be a, t, c, g, other or unknown
  misc_feature (588)..(588): "n" may be a, t, c, g, other or unknown
  misc_feature (594)..(594): "n" may be a, t, c, g, other or unknown
cacagttcatggtaaagcccaagactgtacctgcccatccactgccttttccatgtatcctggaactgagcatagacctcttcccaggcagagctgacagcaagtaaaggagatcataatcaggggaccaaacaactttgtctaaagtgtgaatgtcacctaaggagaagctgtgagatcagaagggtggggcagaggagcagacaccatgagggagagtccttgggggtacatctgccagactgacactgtctggcctgggcagtggaggggctagcaggaaccacaggtactggtggtgtggctactaccgttacaactgcctgtgcttggacatggaccctctgcaatatgcggcagtttcattcattgccccctacattctacaccaagtagaaatggaaggcaattggntacttcacagacaagatctaagtggagaangaatgcgtcctgtggctgcagagatccttggngcttggaggggagagcttgagccccactgatgatgacctcccacagctcgccaactcaggcctccctaantccccatcgggggccaattctcactctgggggttggggggantccacnaat

SEQ ID NO: 3955 - DNA, 726 bp, Homo sapiens
  misc_feature (634)..(634): "n" may be a, t, c, g, other or unknown
  misc_feature (686)..(686): "n" may be a, t, c, g, other or unknown
  misc_feature (711)..(711): "n" may be a, t, c, g, other or unknown
acttccctttttccggtccgccggattatgaatgacggccggcgcgagtattttccacataagctggctgtcgtttttctcctggcctctgtggaggcgagtggtctgcgggcagcagctcccagaggcagccttggaattccagctcggactgggcgggaaggcgcaggcggcccaggtcgccgacacgctcacgcaccctccctgcctggccgcgcctctgcgaccaggtgacccaatgaaagaagaaaatgaaagccataaagaaaagtcttacagaagaagaatacctgtacctggacttttctcaccaaacagaaggatgcatctttcctcttcatacatctgtaactttatttctgttatcttactgtgactgtaaaatctttaaaatttgcttagttgtcaccaaagaggtgagtagagatagttcactactaagagatgacctgatccaggatgttgaaatacggattatttcaaggcaggagctcccaccaatagtccaaaattgctgtttgcctgcagtagtagaacgatcagacaatttttgtagagcaggacttgctgttgtattgagacacataatccagaaatcctatgaagcagaccccttaaagaaggaacttttggnacttctgggctttaaaaagacttgcttgaaagcctgtgctgaagttagtcantggaccaagctatgtgaactcacanccctttggctaattg

SEQ ID NO: 3956 - DNA, 703 bp, Homo sapiens
  misc_feature (591)..(591): "n" may be a, t, c, g, other or unknown
  misc_feature (671)..(671): "n" may be a, t, c, g, other or unknown
  misc_feature (678)..(678): "n" may be a, t, c, g, other or unknown
  misc_feature (697)..(697): "n" may be a, t, c, g, other or unknown
actaagacaaggcagttgaggaggagggagcgcttgagggggactggcctggcgtgcactccgcacctcggggacattattgcgcgtggaacggctgcttttggaaggcacaacttcctgaatggaccatgactcccaccaaagatccctgtctctgattcaccaaacagcttcaaccctgaaaccaggacgagaagttgacaacatctgagtggacagctaattgacctaagacttcagaccaggcctgtatgatctcctgtctaaacattcttagagtattatatttactttggggactattggccttgtctgctttgactcagattataggatatataacctggttaatgtttctgtacacatgatggccacctatgtatatacacttgacttttcagggtctctgctggggatggaaaaatagttcattagccaaactctcctaaagtgtggcagatggaggcagtctctcagattgctggatttgtcaccaagcttccaagggccattcaagatcattacatgctacttgttgcaccagagattgatttttctgacactccaaatgttaccatatacttacatcanttccctccaaatgtcactttccaaattcaaattcaacttctaaagccaggccatattttcaatctgtgcttagtaataanccctaantctcaaccttccccaacgnccccaa

SEQ ID NO: 3957 - DNA, 849 bp, Homo sapiens
  misc_feature (784)..(784): "n" may be a, t, c, g, other or unknown
  misc_feature (808)..(808): "n" may be a, t, c, g, other or unknown
ttcacaaaaaaagaaattccaaagcagaagtcctggtatgttactattccagacaaatctgatatgagaaagcactaaagataattgaaacattaatttaataattaattaattaaaatagtacagtcctggatgtcttttttgtgctttctttaatttctttccagctatatataaatgtgtcttggtatgaatttaagtgcctgggaatgaatagtactgtcccccaggataataagttattagcaaattaataccttgcttctgttagttgtcaacatgttgcaagtaaacattgttgataggcactgtggatctactaagggtaagatatcatcctttcacaaaaggatagctattaaacctgactgtaggtaaagttaaattgcaactaaacatatgtagacatatactaagattttaaacattacacaatatttctgaccaataaaatataaactagagtctaaactgtttggttaagaatttcattgctagagtacccttacaagttctaactgaatttccaaaaatctaacattttgttctcaataaaataaaatgtgtttaataaatatgaagcaaaaaacaaaatcctaaacaaaagcaaacactgttgatcagtcaatttaacatggaatattattgctattatttttattgaccaatagtttattcctgactttcctccagatatggacactattgatgggacggtggccatctgagtggaattgcatcatgcagtaccgctggcccatggcatgttgcaggacacacagancacatggcgtggagacccgtcctngcccaggacgctggcgcccctatgtggagacagcagtgaac

SEQ ID NO: 3958 - DNA, 737 bp, Homo sapiens
  misc_feature (666)..(666): "n" may be a, t, c, g, other or unknown
  misc_feature (680)..(680): "n" may be a, t, c, g, other or unknown
  misc_feature (687)..(687): "n" may be a, t, c, g, other or unknown
gtcacctggaatgccgggagcccctgctcatcccgatcctctccttgtacatgggcgcacttgtgcgctgcaccaccctgtgcctgggctactacaagaacattcacgacatcatccctgacagaagtggcccggagctggggggagatgcaacaataagaaagatgctgagcttctggtggcctttggctctaattctggccacacagagaatcagtcggcctattgtcaacctctttgtttcccgggaccttggtggcagttctgcagccacagaggcagtggcgattttgacagccacataccctgtgggtcacatgccatacggctggttgacggaaatccgtgctgtgtatcctgctttcgacaagaataaccccagcaacaaactggtgagcacgagcaacacagtcacggcggcccacatcaagaagttcaccttcgtctgcatggctctgtcactcacgctctgtttcgtgatgttttggacacccaacgtgtctgagaaaatcttgatagacatcatcggagtggactttgcctttgcagaactctgtgttgttcctttgcggatcttctccttcttcccaagttccagtcacagtgagggcgcatctcaacggggtggctgatgacactgaagaaaaccttcgtccttgcccccanctctgtgctgcggntcatcgncctcatcgccagcctcgtggggcctaacctaaccttggggggtgcaacgg

SEQ ID NO: 3959 - DNA, 762 bp, Homo sapiens
  misc_feature (582)..(582): "n" may be a, t, c, g, other or unknown
  misc_feature (702)..(702): "n" may be a, t, c, g, other or unknown
  misc_feature (746)..(746): "n" may be a, t, c, g, other or unknown
  misc_feature (754)..(754): "n" may be a, t, c, g, other or unknown
gcgatgaaagcagcagctgctgcccctgcctcagaggatgaggacgatgaggatgacgaagatgatgaggactatgacccaaattgtgaggaagaggaagaagaagaagaagacgaccctggggacatagaggactattacgtgggagtagccagcgatgtggagcagcagggggctgatgcctttgatcccgaggagtaccagttcacttgcttgacctacaaggaatctgagggtgccctcaatgagcacatgaccagcttagcttctgtcctaaaggtatctcattcagttgctaaacttatattagttaatttccactggcaagtttcagagatattggacagatacaagtccaattctgctcaactgcttgttgaggctcgagttcagcctaatccatcaaaacatgttcccacatcccatccccctcaccactgtgcagtgtgtatgcagtttgtgcgaaaggaaaacctactctctctggcctgtcagcaccagttttgccgcagctgctgggagcagcactgctcagttctcgtcaaggacggcgtgggcgtgggagtctcttgcatggctcangactgtccactccgtacaccagaggactttgtgtttccattgcttcccaatgaagaattgagagagaaatacaggcgctacctcttcagggactatgtggagagtcattaccagctccanctgtgccctggtgcaaactgccccatgggttattcggggtacangagcctanagctcgcc

SEQ ID NO: 3960 - DNA, 553 bp, Homo sapiens
  misc_feature (546)..(547): "n" may be a, t, c, g, other or unknown
  misc_feature (553)..(553): "n" may be a, t, c, g, other or unknown
gaaaaacatgggtagtagaaatgtatagaaaatgtatgaggtctcttaaccattgtgttaaacttgcattaagcttcttttttagcaatatcgatgtcagtgttacctcttctttcctttttatttattctttttgagacagagtctcattctgtcgcccagactggttggagtgcgatgatgcgatcgcggctaactgcaaccgctgcctcccgggtacaagtgattctcgtgccttgggctcccgagtagctgggatttttagtggagaacaggtttcaccatattggccaggctggtcttgaactcgcaacctcaggtgatccacccacctcagcctccccaaggtgttgggattacaggcatgagccaccgtacctggccccttttgttgttttgaggggcaggcagtaagaagcagggatttcttcaaatgctagtaagcacaaagagagggagaagtttttgtaagtaacgaacagggccgggcatggtggcgtgagaggccgaggtgggcggatcacgaggtcaggagttcgagaacanncctggn

SEQ ID NO: 3961 - DNA, 737 bp, Homo sapiens
  misc_feature (504)..(504): "n" may be a, t, c, g, other or unknown
  misc_feature (680)..(680): "n" may be a, t, c, g, other or unknown
  misc_feature (711)..(711): "n" may be a, t, c, g, other or unknown
  misc_feature (720)..(720): "n" may be a, t, c, g, other or unknown
gtaaacttttttcacttaaaaaagtccctccccccacctcacagcatatgaatgcgttctctactgagtaaatcaagcctgagctttctcatgtgggctcctctgtgctccatccacttctctcttggaagacagggtgtctttctgccttccaaggctgatgcctctcgtccccctcccaggggctgcaccctcagccacccccagctggtgttttcagtttgcttctctgataggtggcctcttttatcttctggtttgttgctgctgccttctgaatttacaggcagcctgtggatccttctgttggtatttttctctcctaggtgaactcttggaaggaggtggtcggcattcactgttacctcgggccctttccaccttggcactgctcatcatgctatgatttggctcctatcctgcccactctaataaacaatcacgagtttggcagttctccttattgccaaatttaatggtcatttacaactcgttttcctgaantcttcttctttttttgacaccatagacgtctctctctgtgtcactttctgatttttcttccattgattctctgacttggctcctgaactggttcctgatttctcctgcctggcactttagttgttccctaagagttggttcttcacctcttaacttttccaggacttttgtttggnatttgacactgttgactaaacacctctttcntgaaattgnctggcattcaactccaa

SEQ ID NO: 3962 - DNA, 680 bp, Homo sapiens
  misc_feature (11)..(11): "n" may be a, t, c, g, other or unknown
  misc_feature (620)..(620): "n" may be a, t, c, g, other or unknown
  misc_feature (672)..(672): "n" may be a, t, c, g, other or unknown
  misc_feature (677)..(677): "n" may be a, t, c, g, other or unknown
agccgctgtgngatggggaagtggaggcggaggggagcggagcccggagcgtcgtggaaagcattggacacatttccaccatgctaatggcattttaaatatatttggcaattttcccaattttttactgaagaaaactgtaagtttatacttgaggactgaagtgtgactctgccgattatcaggctttcaagatgaatctggaaaaactcagcaagcctgaactcctgacactatttagtattcttgaaggagagcttgaagcaagggaccttgttatagtggcctacagagccctccatccagggatttatcccccaccctcatagacaactctgccgccaagcagctggcccgaaacacagtcactcaggtgctctccagattcactagccaacaagggccaatcaagccagtctctcccaacagctctccctttggcacagactatcgaaatctagccaacactgccaatccaagaggtgacacaagccattcacctactccagggaaagtgtccagtcccctgagccccctgtctccaggaatcaagtccccaaccatgccagagctgagagaggaaaccctccacccatcccacccaagaaacctggcctcancccttctccatctgctgagagcaggcaccgaaaggtgatcctagaccttganggaanaaa

SEQ ID NO: 3963 - DNA, 600 bp, Homo sapiens
  misc_feature (275)..(275): "n" may be a, t, c, g, other or unknown
  misc_feature (502)..(502): "n" may be a, t, c, g, other or unknown
  misc_feature (587)..(587): "n" may be a, t, c, g, other or unknown
  misc_feature (595)..(595): "n" may be a, t, c, g, other or unknown
gaaaatatggggtgaagatctaagacatttaatagtatcgagaagtacacaggcaccactaataatcagacctgattctggaaaccctcttgacactgtgattaaaggttttggagattttaggtaagaagtttcctgttactgagaactcaaagggttacaagttgctgccaccttatcttagagttattcaaggggatggagtagatattaataccttacaagaggtatgtgttttacattaaagtttcaatacggcatttcttataattaantttgtttatgtttgataaagaacacaatataaatacaattttaagtctttgtaagtgtttatgttggtataaatctctgtgcattgcttaaggtttagaaataatactagtttaagatacagaggtgccagccaagccatacttactcttccagttgtcattggacaccctgaatgatgagtctaaagaagtatcattgtgaaacaaggaaatgtcactcacagaantattccttggcatataaaacaaagccttgactctgctggcataagtctgagttttcataaactggagcttcacaaatctgtaaanctcataanattaa

SEQ ID NO: 3964 - DNA, 728 bp, Homo sapiens
  misc_feature (597)..(597): "n" may be a, t, c, g, other or unknown
  misc_feature (648)..(648): "n" may be a, t, c, g, other or unknown
  misc_feature (694)..(694): "n" may be a, t, c, g, other or unknown
  misc_feature (728)..(728): "n" may be a, t, c, g, other or unknown
aatttagtaagagttctctgtatagtctctaatcttagaaaaatgttggaagggtaatttttaagtgtagtggtttgaagaacaaaccagaagcgcacaaacctttgtgtattttagaatatatttgtcttcattctgcggagctcttgtgttgtaaaggtgcagaactacgtaaaaatagtgttgggcagacttacatagtacatctgaaatcagatactggtttattcgaccatatttctaagggcatttttccagtaaaattgttttattttttgagtagccttcctatagtggtacatgttacatcagttgcgcatatcttgattttacagaatctgtcttaagtaccaattttggtttttcaaatcaatgtttctgaaatttttgaacactgaaagtggttttaaatgaatattctgaatctagttctttagaatcctctttgaattgtgaaatgcaaaataattgttagcagtttaacctgaaagatctttttacatgataaatgggggaggagaaagactgaaatgaaaatgttgaagaccctgatttgaaattgagtgtaaaggctagatactgtaagttttagagtanctttagagacaaagctagtatcccacttggggagatcaagtaacttgtggnttaaaatttaaagtaaccagtgggccattttacttcactaatttcncttgggggggctaatttttattgcccaagattgn

SEQ ID NO: 3965 - DNA, 817 bp, Homo sapiens
  misc_feature (736)..(736): "n" may be a, t, c, g, other or unknown
  misc_feature (762)..(762): "n" may be a, t, c, g, other or unknown
  misc_feature (776)..(776): "n" may be a, t, c, g, other or unknown
cttacctcttaaaaggtgaaaaattagggacttggatgtttaattctaaaatgatcccaagatttaaccactgaaagaagcaaacaagggaagagctggtctttgcagaaatagttttaagtgtgcatattagagcactaatttgtttctctctttcaaagaactggatgaattgcctccattgtctccaatgcagccaatttcagaggaagaggctattcagattattgcagaccctccattgccaccagcttcattcacacttcgagactatgtggatcatcctgagactctgcagaagttggttcttctaggcgtggatttgtccaagatagaaaaacatccagaagcagcaaacctccttctgagactggattttgaaaaagacattaagcaaatgcttctgtttcttaaagatgtgggtatagaggataaccaactgggagcattcctgacaaaaaatcatgcaattttctctgaagaccttgaaaatctgaagaccagggtggcttatctgcattcaaaaaatttcagtaaagcagatgttgcacagatggtcagaaaagcaccatttttgctgaacttttcagtggaaagactggataacagattgggattttttcagaaagaacttgaacttagtgtgaagaagactagagatctggtagttcgtctcccaaggctgctaactggaagtctgggaacccgtgaaagaaaatatgaagggttatcgtcntgaacttgggtttaaacataacgaanttcaacatatgatnaccagaatccaaagatgttaactgcaaataaaatggaaact

SEQ ID NO: 3966 - DNA, 640 bp, Homo sapiens
  misc_feature (253)..(253): "n" may be a, t, c, g, other or unknown
  misc_feature (259)..(259): "n" may be a, t, c, g, other or unknown
  misc_feature (412)..(412): "n" may be a, t, c, g, other or unknown
  misc_feature (473)..(473): "n" may be a, t, c, g, other or unknown
  misc_feature (550)..(550): "n" may be a, t, c, g, other or unknown
  misc_feature (553)..(553): "n" may be a, t, c, g, other or unknown
  misc_feature (611)..(611): "n" may be a, t, c, g, other or unknown
gcagtgccttgcggctgtaatggctgcccccagctggcgcggggctaggcttgttcaatcggtgttaagagtctggcaggtgggccctcatgtcgcgagggagcgggtgatccctttttcctcactcttaggcttccaacggaggtgcgtgtcctgcgtcgcggggtccgctttctctggtccccgcttggcctcggcttctcgcagtaatggccagggctctgccctggaccacttcctcggattctctcancccganagttcggtgactccttgcgtccccgcggtgtccatgaacagagatgagcaggatgtcctcttggtccatcaccctgatatgcctgagaattcccgggtcctacgagtggtcctcctgggagcccccaatgcacggaagtcaacactctccaancagctactgggccgaaaggtgttccctgtttccaggaaggtgcatactactcgctgccaanctctgggggtcatcacagagaaggagacccaggtgattctacttgacacacctggcattatcagtcctggtaaacanaanaggcatcacctgaagctctctttgttggaagatccatggaagagcatggaatctgctnatcttgttgtggttcttgtggatgtctca

SEQ ID NO: 3967 - DNA, 631 bp, Homo sapiens
  misc_feature (134)..(134): "n" may be a, t, c, g, other or unknown
  misc_feature (310)..(310): "n" may be a, t, c, g, other or unknown
  misc_feature (550)..(550): "n" may be a, t, c, g, other or unknown
  misc_feature (580)..(580): "n" may be a, t, c, g, other or unknown
  misc_feature (623)..(623): "n" may be a, t, c, g, other or unknown
tgttgagcttcctctgaggtgctgcacaaggagtgggtgtgggatgcactgttgcgtgctcgtcgtctctgagggcgcccgggtgggtttccgctgtctgaagagttgggcctatttttgtgcacgtgtttggngggcttgtgttgtttctcttgggaacgtgcccggggggaaggctgcatcccaggagttcaagatggcggtgagctatgattgcaccactgcactccagcctgggcaacagagcaaacccatctctaaaagaaagaaagaaattttaaaaaggaggaaaggaaagaaaggagaaaanaggaaaggaaaaaggaaaggaaactgttcccattaaacactaactccccattcctccctgccccccagcccctggcaaccaccgttgtcttttctgtctctatgaattcgacaaccctgggaacctcatgagtagaatcatacagtatttgtcctgttgtgatgagctgctttcacttagcatagtgttttcaaggttcattcctgttgtaacatgcgtccaaaatttcttttcaggacngtataagattccacggtctgtatacaccancttttgtttatccattcatctgtggataacaatgctgcttcanacatggtg

SEQ ID NO: 3968 - DNA, 709 bp, Homo sapiens
  misc_feature (626)..(626): "n" may be a, t, c, g, other or unknown
  misc_feature (652)..(652): "n" may be a, t, c, g, other or unknown
  misc_feature (668)..(668): "n" may be a, t, c, g, other or unknown
cgttcaatgagctttcacataggaaacatatccagaccaagaatagaatatttccaggtcctcagaaggctcccccatgccccttcacagttatacttccccaaggctacaactattctgacctgtatcaccacaggttacttcagaactttctagttatttaatgctatttaggtcaacttttaatgctatattaggtcaagtttcaagaaaaagttttagttggaaattcttcttattttgggaggatgcattgaaggcataattttagccactttaaattttgtgaggagaatgtctctaaaaccatattatccataagaaagatcatcaataaagaagatagagttgtgaaaaaagaataaaatgaagagaaaaatcggctgccccaagtatcttgcttttctgtgcaccacaagtgaaaatcatctctttaggatggtaaatgtagtatactgaccacaagagttcaaaacaaattcagattttggataaacttcagatttattcaagaatcccagaagtccattcgatgatggcaatgttctgttttcaggtaacagttgtttttacacccagtcgtttggctgttgtgaccaactcatccacttattggccctcattcngttagaactgtttaatgatctgctcncctttcctttaatcancctttccttactttctctcctcatcatctcagacaacctgg

SEQ ID NO: 3969 - DNA, 666 bp, Homo sapiens
  misc_feature (612)..(612): "n" may be a, t, c, g, other or unknown
  misc_feature (654)..(654): "n" may be a, t, c, g, other or unknown
  misc_feature (659)..(659): "n" may be a, t, c, g, other or unknown
aagagtagcagcgagcagccgcgctggtggcggcggcgcgtcgttgcagttgcgccatctgtcggaaggcccgcctcggccgcgccggaggagggcggggagaggaccatgtgagtgggctccggagcctcagcgccgcgcagtttttttgaagaagcaggatgctgatctaaacgtggaaaaagaccagtcctgcctctgttgtagaagacatgtggtgtatataaagtttgtgatcgttggcggaaattttggtaagtgttgctgcatttacttctaatgcctcttgctgtaaaatggtgctcacgaagggaagctgttgccttgttctgtccatcttttacttctgcactaaactcaggcagaatggagttctataattaaatgtgacattgaattgatgttttctgacagtgtgatactttttcttgttattgctgatagtattaagcaatatggggttttctaaaacgtaataagtgtatatttagaaaagtttccggatgccggttaaagaatacccttggcaagtttatgtgctaagccagccatataatataagagtaataaacttgcagacccaaagaataaaataaattctccaaagcaganagattcgtgtgacccatatattaaaagaaagagaacaagcancttangaaatgg

SEQ ID NO: 3970 - DNA, 555 bp, Homo sapiens
  misc_feature (476)..(476): "n" may be a, t, c, g, other or unknown
  misc_feature (507)..(507): "n" may be a, t, c, g, other or unknown
  misc_feature (550)..(550): "n" may be a, t, c, g, other or unknown
agtagggcctgatgtaaacacccgagccgggctccaaggcccgggaggtcagaaaaccgggccgcgggcggcaccgacagctggggcccgggtcagggacacgcggaggtcaggccggtgaaggcggcaggaagctggagcacgatcccaggaggaacaatcctgcaccatgactcaacagccacttcgaggagtgaccagcctgcgtttcaaccaagaccaaagctgcttttgctgcgccatggagacaggtgtgcgcatctacaacgtggagcccttgatggagaaggggcatctgggtgagctgttggcaggggaggggcaatgggcagaacagctgggctgggcattggctcccacctccactgacaccctggtccctgtccagaccacgagcaggtgggcagcatgggcttggtggagatgctgcaccgctccaaccttctggccttgatgggcggtggtagtagtcccangttctcagagatctcaggtaagtgccctcancctgccctttggcccaagatttctcggattcctggcctcccanaggca

SEQ ID NO: 3971 - DNA, 762 bp, Homo sapiens
  misc_feature (493)..(493): "n" may be a, t, c, g, other or unknown
  misc_feature (717)..(717): "n" may be a, t, c, g, other or unknown
  misc_feature (722)..(722): "n" may be a, t, c, g, other or unknown
  misc_feature (759)..(759): "n" may be a, t, c, g, other or unknown
agcgcgaggagaaagatggcggcgatggcggtcgggggtgctggtgggagccgcgtgtccagcgggagggacctgaattgcgtccccgaaatagctgacacactaggggctgtggccaagcaggggtgagggccggacctccacgagcggaatgcgaggtccgagcctgtagggagaaggaccgtgaccctgaggcccagtttgagatgccttatgtggtacggctgcacaacttccaccagctctctgcaccccagccctgtttcaccttcagccatcccaacagagatcctatgattgacaacaaccgctattgcaccttggaatttcctgtggaggtgaacacagtactacatggctttgccggctactttgagactgtgctttatcagcacttcctaaaagatgatggtgtgagcatccccggggagtacacttcctttctggctcccatctcttcctccaagctgtacaatgaggtccgagcctgtanggagaaggaccgtgaccctgaggcaccaaccaccactcagagaaggagttctgctcctacctccaatacctggaatacttaagccagaaccgtcctccacctaatgcctatgaactctttgccaagggctatgaagactatctgcagtccccgcttcagccactgatggacaatctggaatctcagacatatgaagtgtttgaaaaggacccatcaaatactcncagtnccaacagggcatccataaatgtctgctagaccgagtncca

SEQ ID NO: 3972 - DNA, 711 bp, Homo sapiens
  misc_feature (455)..(455): "n" may be a, t, c, g, other or unknown
  misc_feature (509)..(509): "n" may be a, t, c, g, other or unknown
  misc_feature (543)..(543): "n" may be a, t, c, g, other or unknown
  misc_feature (651)..(651): "n" may be a, t, c, g, other or unknown
  misc_feature (685)..(685): "n" may be a, t, c, g, other or unknown
  misc_feature (692)..(692): "n" may be a, t, c, g, other or unknown
acaacaagtttggaatcaagaccatgttggagacagaagaaggaatcctactgctggtcagagccatggatcctgctgttcccaacatgatgattgatgcagctaagctgctttctgctctttgtattctaccgcagccagaggacatgaatgaaagggttttggaggcaatgacagaaagagctgagatggatgaagtggaacgtttccagccgctgctggatggattaaaaagtggaaccactattgcactgaaggttggatgcctacagctgatcaatgctctcatcacaccagcggaggaacttgacttccgagttcacatcagaagtgaactgatgcgtttggggctacatcaggtgttgcaggaccttcgagagattgaaaatgaagatatgagagtgcaactaaatgtgtttgatgaacaaggggaagaggattcctatgacctgaanggacggctggatgacattcgcatggagatggatgactttaatgaagtctttcanattctcttaaacacagtgaaggattcaaaggcanagccacacttcctttccatcctgcagcacttactcttggtccgaaatgactatgagggcagacctcagtactataaagttgatttgaagaatgtatttcccaaatagntctgcacaagaacggggctgatcctgacttcaantgccggnacctccaagattgagaatt

SEQ ID NO: 3973 - DNA, 694 bp, Homo sapiens
  misc_feature (636)..(636): "n" may be a, t, c, g, other or unknown
  misc_feature (662)..(662): "n" may be a, t, c, g, other or unknown
  misc_feature (678)..(678): "n" may be a, t, c, g, other or unknown
tttaagttctcttgcacacccagttcccaggcatggctctccaatctcagctccctcctttctctccggattttaggtggttatgatggatgaccaacctctgacctttgactttcgtactgaggtctcagcctttgcagcttctccctccaaagcagcttttcttctgattcctgatctcagttcagtgctcaaaatagcctctccttattttctcctggtgtcagtgttaggcctgaataacatctcatgctgttcgttaaacagatgtctgctgccaaaaagttgttctgatagaaaatccaaaatcatcgaccccaaaagccaagtctgtcattgggctaaagtgccattcctactaatcctttgcctcacctgattcatttggaataaagggccaggagcttgagtcacccccatgccaggacctctgttgctatttgctggctgctggagaggtggggtcttgcgggccctggagaggtggggtcttgtggggcagagctggagcagatgctgcatccagcagtaagcatgagaatgagcactcacagttttgggtcctgtgctgggacactgtgcaagtcctgtgcatatatcacctgttgcatttcccacagtgacccaatgaagtanatactgttatctttaccaatttatanatgagcaacctgaggnttcacaaaattgcaca

SEQ ID NO: 3974 - DNA, 526 bp, Homo sapiens
  misc_feature (387)..(387): "n" may be a, t, c, g, other or unknown
  misc_feature (434)..(434): "n" may be a, t, c, g, other or unknown
  misc_feature (490)..(490): "n" may be a, t, c, g, other or unknown
  misc_feature (512)..(512): "n" may be a, t, c, g, other or unknown
atgtatttgggtaaaaattgcttcttttagaaaatgcaaaggtttatttgtcttaataaattgaatactaggtgttgtaaggaagtgagaccagaaggacaagctaaattatgcattcttacttgagggatcggaatggatggggcggagttctcttcaggctagccttctgggaaaagtggatgtctttttcagagattcatcataccttgacctgtacctcttctctgccctccacttccctgccctggagtccgtttctggagactagaaatgtatctaaattgggggaacagaatgaatgaattaatgaatgagagttcctttgctttaaccattcctggatgcctgcaaagtaaggaataatgcagtttttatgtatctgantttataaggggttactctttcaagagtaacaaaaaaatgcaaactgnaatgaaactacattgtgtttctaagtgtgaaaacgacaggctgccccgtttttacnaattgcatttgcattttaaggnactactgaaggtca

SEQ ID NO: 3975 - DNA, 743 bp, Homo sapiens
  misc_feature (615)..(615): "n" may be a, t, c, g, other or unknown
  misc_feature (672)..(672): "n" may be a, t, c, g, other or unknown
  misc_feature (692)..(692): "n" may be a, t, c, g, other or unknown
  misc_feature (730)..(730): "n" may be a, t, c, g, other or unknown
gctgatgttcgttgttctgtctttaagtgtctgccaatgattttggacaacaaactgagccacccattgttagagcagctccttccagctctcagatacagtctccacgacaattcggagaaagtgagggtagcttttgtggacatgctgttgaagatcaaagctgtgagggctgctaagttttggaaaatatgtcccatggagcacattctggttcgtctggaaactgattctcgacctgtgtctcggcgcctggtgagcctcatctttaattctttcctgcctgtgaatcagccggaggaggtctggtgcgagcgctgtgtcaccctggtgcagatgaaccacgccgctgccaggaggttctatcagtacgcccacgaacacaccgcctgcaccaacatagcaaagctgattcacgttattcgtcattgcttaaatgcctgtatccagagggcagtgagagagcctccagaggacgaggaggaagaggacggaagggagaaggagaatgtgactgttctggacaaaacactgtcagtaaacgatgttgcatgcatggcaagtttactaagaaatcattgtgattctctggaaaagtattgacagaagtatggnaaataataaagagggcaaactttacacgattaacaagtttgcctctgtgcttccaanagtatctgaaagtatttaanggatgatcgctgcaaagattcctttaatcaagccaaangtccctttaagcc

SEQ ID NO: 3976 - DNA, 757 bp, Homo sapiens
  misc_feature (595)..(595): "n" may be a, t, c, g, other or unknown
  misc_feature (729)..(729): "n" may be a, t, c, g, other or unknown
  misc_feature (738)..(738): "n" may be a, t, c, g, other or unknown
  misc_feature (751)..(751): "n" may be a, t, c, g, other or unknown
actgctctgccggccactcctgcatctttaccgtcccagggacttccagttgctgccccttcccagaggccgtggcatgcggggatggccatcactgctgcccacggggcttccactgcagtgcagacgggcgatcctgcttccaaagatcaggtaacaactccgtgggtgccatccagtgccctgatagtcagttcgaatgcccggacttctccacgtgctgtgttatggtcgatggctcctgggggtgctgccccatgccccaggcttcctgctgtgaagacagggtgcactgctgtgtgtgacctgatccagagtaagtgcctctccaaggagaacgctaccacggacctcctcactaagctgcctgcgcacacagtgggggatgtgaaatgtgacatggaggtgagctgcccagatggctatacctgctgccgtctacagtcgggggcctggggctgctgcccttttacccaggctgtgtgctgtgaggaccacatacactgctgtcccgcggggtttacgtgtgacacgcagaagggtacctgtgaacaggggccccaccaggtgccctggatggagaaggccccagctnacctcacctgccagacccacaagccttgaagagagatgtcccctgtgataatgtcagcagctgtcccttctccgatacctgctgccaactcacgtctggggagtggggcttgctgtccaatccaaaaggcttgncttgcttgnttggaccaccaancacttg

SEQ ID NO: 3977 - DNA, 640 bp, Homo sapiens
  misc_feature (559)..(559): "n" may be a, t, c, g, other or unknown
  misc_feature (572)..(572): "n" may be a, t, c, g, other or unknown
  misc_feature (596)..(596): "n" may be a, t, c, g, other or unknown
atgctagacaaggtactatgcctgtatctctgctgaaggctcatgaagctgaaatgtgggaagttcactttcacccatccaacccagaacatctttttacctgctctgaagatggatccctctggcactgggatgcttccacagatgtacctgaaaagtcgtcactctttcaccaaggaggaagaagcagtacttttttgtctcatagcattagtaaccaagctaatgttcaccagtctgtcattagctcctggctcagcactgatcctgcaaaagaccgaattgaaatcacaagcttacttcccagtaggtctctgtctgtgaacactttggatgttttaggtccttgtcttgtttgtggaaccgatgcagaagcaatttatgttactagacatcttttttcgtagaagtactataattataagatttcagatagaacatgcaattagccttttgaaatccagcttctgtgcaaaattttagtatcagaaaatacgagatttgcaggggaaacatcagtaaactaccattaatgtcaatgcccagttttgacttttgntagcctgacactnccaaacagttgtagaatccgatanatgactgatggcaaaagattgtgaacatgtggaagaaaatcagt

SEQ ID NO: 3978 - DNA, 510 bp, Homo sapiens
  misc_feature (4)..(4): "n" may be a, t, c, g, other or unknown
  misc_feature (79)..(80): "n" may be a, t, c, g, other or unknown
  misc_feature (455)..(455): "n" may be a, t, c, g, other or unknown
  misc_feature (469)..(469): "n" may be a, t, c, g, other or unknown
  misc_feature (485)..(485): "n" may be a, t, c, g, other or unknown
aatnaatgttcagtgagaaccataatgtgaatagtataacccagcatgattttggtgtgaggataattgataatcattnncttccagcagacctacccatctcggtgggatttgcttcaagtgatgtatatgcaaattaatttgcatctcctggtcatatactaattggttggtgagtggttagtagccaagaaacactgcttatggcaagagaaagtcaagtgaaagattaaagaaaatcatgattaataatctgccagctgataaataagatagttataacaccactttggtgaggtgtacgcttttggccatgtgtacactggtgcattttcaagacagtggctatcttttcacttctgtttggctaatcatgttatgttgttctgaagttactgctgccctatacccacttcacacagcctgagctctgtctccttccaatgaacatgaanatcttttgattccntagttcctggttctgntctgattccgacaggatgctggcat

SEQ ID NO: 3979 - DNA, 739 bp, Homo sapiens
  misc_feature (701)..(701): "n" may be a, t, c, g, other or unknown
  misc_feature (720)..(720): "n" may be a, t, c, g, other or unknown
  misc_feature (738)..(738): "n" may be a, t, c, g, other or unknown
aatggcaaaagtggaactcaggacatccagcctggccctctttttaataataatgctgatggagtggccacagatataacttctaccagatccttaaattacaaaagcactagcagcggtcacagagaaatatcatcacctaggattcaggatgctggacctgcttcccgagatgtccaggccactggcagaatcgcagatgatgctgacccaaaagtagcacttgttaacgattctttatctgatgtcacaagtaccacatcttctagggtggatgatcatgactcagaggaaatttgtcttgaccatctgtgtaagggttgtccgcttaatggtagctgcagcaaagtccacttccatctgccttaccggtggcagatgcttattggtaaaacctggacggactttgagcacatggagacgatcgagaaaggctactgtaaccccggaatccagctctgttctgtaggaagttatacaatcaattttcgggtaatgagttgtgattcctttcccatccgacgcctctccactccttcttctgtcaccaagccagccaattctgtcttcaccaccaaatggatttggtattggaagaatgaatctggcacatggattcagtatggagaagagaaagacaaacggaaaaattcaaacgtcgactcttcatacctggagtctctctatcaatcctgtcccanggggagttgtgccatttangcggctcacggaactatna

SEQ ID NO: 3980 - DNA, 736 bp, Homo sapiens
  misc_feature (647)..(647): "n" may be a, t, c, g, other or unknown
  misc_feature (708)..(708): "n" may be a, t, c, g, other or unknown
  misc_feature (736)..(736): "n" may be a, t, c, g, other or unknown
agattaacggccgtcccgaatatgcagcagaggcacaggtctcccctactcatttcaaaatatattagccttgctctaattagatattaaattttaattccgttaaacttttttcttaagtgcacaaagcatcgtactccctggaggcaaacacatcgggctgcttcagcgttagcgggatgcttagcattttgaatattgtggcaaaaaaattaaaagttcacttattaatatttatcagcagtatcataatttccatcctcttatttcagaatttcacttgaggcaaaaataccacaagtgtaattactctagcacagctattaatgtgctggatgataggccactgcgtcacatgaccttctattgttcatgggtttaaagagaaagcagggctttgtatttctttttcttcttttaaagtcgactgtagcatcttggcttttgtctggggtggggaggatctggggtctggttcactttgtaaaagtaaaccatgtctgtttaaacaatagaggtgtttaagaagactctttagttttcctgcagattgttcaagattacatgataatcacacggagtatttatttcctactgacaaaccaagtacttgttacatcaccaatggtaccaggagatgaagaccnggttttgagcaggagcgagattaccacccaaaaaggagctcctgaggcagcccacttctancaaactttttacatgttgcacatttcan

SEQ ID NO: 3981 - DNA, 742 bp, Homo sapiens
  misc_feature (140)..(140): "n" may be a, t, c, g, other or unknown
  misc_feature (257)..(257): "n" may be a, t, c, g, other or unknown
  misc_feature (311)..(311): "n" may be a, t, c, g, other or unknown
  misc_feature (584)..(584): "n" may be a, t, c, g, other or unknown
  misc_feature (667)..(667): "n" may be a, t, c, g, other or unknown
  misc_feature (693)..(693): "n" may be a, t, c, g, other or unknown
  misc_feature (732)..(732): "n" may be a, t, c, g, other or unknown
agaaacggcagtggcagcagcgtccggagcagccgcagccttctggaagctccaggcggtctttctgccgagcctcggtcccggcccccatcctccccgccccatcggttgttgtctgggcggatttaaacagtcaagtnaaatcaagctgggtaatcatggcagaaggtggatttgatccctgtgaatgtgtttgctctcatgaacatgcaatgagaagactgatcaatctgttacggcagtcccagtcctactgnacagacacagagtgtcttcaggaattaccgggaccctctggtgataatggcatnagtgttacaatgatcttggtagcctggatggttattgcattgatcttgttcttactgagacctcctaatctaagaggatccagcctacctggaaagccaaccagtcctcataatggacaagatccaccagctcctcctgtggactaactttgtgatatgggaagtgaaaatagttaacaccttgcacgaccaaacgaacgaagatgaccagagtactcttaaccccattagaactgtttttcctttagtatctgcaatatgggatggtattgntttcatgagcttctagaaatttcacttgcaagtttatttttgcttcctggtgttacttgccattcctatttacagtatatttnagtgaatgattatattttttaaaaangttacctggggctttttttgggttgtcctaaaactttcnaaacaatttc

SEQ ID NO: 3982 - DNA, 799 bp, Homo sapiens
  misc_feature (594)..(594): "n" may be a, t, c, g, other or unknown
  misc_feature (679)..(679): "n" may be a, t, c, g, other or unknown
  misc_feature (729)..(729): "n" may be a, t, c, g, other or unknown
  misc_feature (754)..(754): "n" may be a, t, c, g, other or unknown
  misc_feature (780)..(780): "n" may be a, t, c, g, other or unknown
ataaaaaagtttctccaaatgagctcatcctgggctggtaagttggggaggtgggggctggggttaatggaaggtctcttcgtgattgccggtgtcttttgctactggactggatcttatactcttccttttggaggcaagagtattgcaagtgtattactgactgtgagcagtggctcaatgcctgtaatcccagctgggaggctgaggcaggaggatcacttgagcccagtagttcaagatcagcctgaacaaaatagtgagaccctgtctctacaaaaacattttttaaaaacttagccaggaatttgaagttgcagtgagctatgatcatgccttgccactgcattccagcctgagtgacagagtgcgaccctgtctctaaaaaacaaaaggaaagtgtgttacctgtaggaactgtgaattcagtgggttttgctggtggttctgatcctgtggggccaggatatttcgaattaccttgtaagtgacttggaatttttcatcagcactaagtcagcctttgattttatttgacatagttttcggtgtgtgtattgctcttggcagttggtgtcactaggtgtcctaccngtagaagtgtccggtaccctgaagacacccatgccactgttgtgtttgatattgacgccacatatagacaggagtccaccactgngtccatttcacaggtaccgctacgggccatgacatcacagagcactctgngctgatccatgagttcctacagccnagaaggcccccaaccccattcacctnacctgtggacacaagtctt

SEQ ID NO: 3983 - DNA, 613 bp, Homo sapiens
  misc_feature (532)..(532): "n" may be a, t, c, g, other or unknown
  misc_feature (586)..(586): "n" may be a, t, c, g, other or unknown
  misc_feature (606)..(606): "n" may be a, t, c, g, other or unknown
attaagatatgacccacctgaataacctcacatactcttcctatctcaaaactcttaacttaatcctatctgcaaagtccgttttgtcatatacagtagcatgttcataggtttcaagcatttggacatggtcctctttgggaggcattacgctgcctgtgacagtgctcttctgatacattttcagtgatcttctagacataacaatcctggtcctgggaacatgcatggcggggacctaaataagtctattttttaagaggccctaccctttgcatagatcctaatcttggggtaaaggaaagtttgagatttcactccacctttttttttggtgctggtatttccactgtgggaaagatcattcggatttaacaaccacatgaagctcctggattatctggggcatgtttgctgattcccaaggaagcttgatctttttgatggagcacttgagctggtaagttattagaagctgagctataattttccttggcattggtcatttttgtctaatcttttatttttttgntttttttgttttgttttgttttgttttgagatggagtctcactgtgtcccccangctggagtgcagtgggtgcnatctcgg

SEQ ID NO: 3984 - DNA, 662 bp, Homo sapiens
  misc_feature (373)..(373): "n" may be a, t, c, g, other or unknown
  misc_feature (458)..(458): "n" may be a, t, c, g, other or unknown
  misc_feature (579)..(579): "n" may be a, t, c, g, other or unknown
  misc_feature (608)..(608): "n" may be a, t, c, g, other or unknown
  misc_feature (660)..(660): "n" may be a, t, c, g, other or unknown
gtgctcagcggcagccactatggaggccgccaggaccgctgtactccgggtgaagcggaagcgcagtgcggagccggcggaggctcttgtgctcgcttgtaaacgcctccggagcgacgcggtcgagtcagcggcacagaagacgtcggaggatttggagagagcggcggagaataatgtcttccacttggtggccactgtgtgctcccaggaggaaccagtccagcctctcctgcgggaagttctgcgcctgtcacgggacagccagcagcgtgtccgccgtaatctccgcgcctcggctcgggaggtccggcaggagggccgctaccgggtgctttccagccgccgatccttggggaccacctcgagcggncaggagtccgagtacacgccggggaacccagaagccgccgggaactcgggctttcagttgttagaccttgtccacgaggaggganaacctgaagccgcctctgcaggctcctgcaaaacatctgacccagatgtgatcctctgcaattctgtagagttgatccgtgagcgattgactgtgtctgaggatggaccaggagtcaagcnccaggaagaacaaaaacacgatgactatntgtatgacattactacttggagacgccactccaggctggattgagaacattnct

SEQ ID NO: 3985 - DNA, 708 bp, Homo sapiens
  misc_feature (588)..(588): "n" may be a, t, c, g, other or unknown
  misc_feature (652)..(652): "n" may be a, t, c, g, other or unknown
  misc_feature (677)..(677): "n" may be a, t, c, g, other or unknown
  misc_feature (706)..(706): "n" may be a, t, c, g, other or unknown
gctggcgggcggccgggtggcggcggcggcatggcggagccgagcggggccgagacgaggccccccattcgggtcaccgtcaagacccccaaggacaaggaggaaattgtgatctgcgatcgagcctcggtcaaggagttcaaagaggaaatctcccggaggtttaaggctcagcaggatcagctggtcctgatcttcgcaggcaagatcctcaaggatggggacacactgaaccagcacggaatcaaggacgggctcactgtccatctggtcatcaagacccctcagaaggctcaagatccagctgctgccactgcttcttccccctccacacctgaccctgcctcagcaccctccaccacgcctgcttcacccgccacccctgcccagccctccacctctggcagtgcctcttcagatgctggcagtggaagccggaggagcagtggtggggggccctctccgggggctggggagggatcccccagtgctactgcgtccatactctctggctttgggggcatcctggggctgggcagcctaggcctgggctctgctaacttcatggagctgcagcagcagatgcancggcagctgatgtccaatcctgagatgctgtcacagatcatggagaaccccctggtccaggatntgatgtctaaccctgatctgatgcntacatgattatggccaacccccaaatcanca

SEQ ID NO: 3986 - DNA, 618 bp, Homo sapiens
  misc_feature (577)..(577): "n" may be a, t, c, g, other or unknown
  misc_feature (579)..(579): "n" may be a, t, c, g, other or unknown
  misc_feature (615)..(615): "n" may be a, t, c, g, other or unknown
agcggaaaaccaattggtttaaaagaagagccagtaagttcatgactcacgtggcctcccagtttgcctccagctatgtgttttattggcgggattactttgaggaccagccccttctgtatcccccaggctttgacggaagagtcgtggtgtatcccagcaaccagactttaaaggactacctcagctggcgacaagcagattgtcacatcaataatctttataatacagttttctgggcacttatacaacaatctggactaacaccagtacaagcccaagggagattacagggaactcttgcagcagacaagaatgagattttgttttctgaattcaacatcaactataataatgagctgccgatgtataggaaagggactgtgttgatatggcagaaggtggatgaagtgatgacaaaagaaattaagctgccaacagaaatggaaggaaaaaagatggcagtgacccggaccaggacaaagccagtgcccttgcactgcgatatcatcggggatgctttctggaaggaacatccagagattctagatgaagacagctgacccttttgcgcttnanttctggtgtgcttaaccatgcaagcccttccacctncca

SEQ ID NO: 3987 - DNA, 711 bp, Homo sapiens
  misc_feature (413)..(413): "n" may be a, t, c, g, other or unknown
  misc_feature (455)..(455): "n" may be a, t, c, g, other or unknown
  misc_feature (506)..(506): "n" may be a, t, c, g, other or unknown
  misc_feature (527)..(527): "n" may be a, t, c, g, other or unknown
  misc_feature (566)..(566): "n" may be a, t, c, g, other or unknown
  misc_feature (625)..(625): "n" may be a, t, c, g, other or unknown
  misc_feature (674)..(674): "n" may be a, t, c, g, other or unknown
  misc_feature (696)..(696): "n" may be a, t, c, g, other or unknown
actgcgcgccccgcccggagtccccgccgccgtcatgcagtccccggcggtgctcgtcacctccaggcgacttcagaatgcccacactggcctcgacctgactgtgccccagcaccaggaggtacggggcaagatgatgtctggacacgtggagtaccagatcctggtggtgacccgtctggctgcgttcaagtcggccaagcacaggcccgaggatgtcgtccagttcttggtctccaaaaagtacagcgagattgaggagttttaccagaaactgagcagtcgttatgcagcagccagcctccccccactacccaggaaggtcctgtttgttggggagtctgacatccgggagaggagagccgtgttcaatgagatcctgcgctgtgtctccaaggatgccgagttggcangcagcccagagctgctagagttcttaggtaccagatccccangggctgcagggctcaccagcagagattcctctgtcctggatggcacagacngtcagacagggaatgatgaanaggctttcgacttttttgaggagcaagaccaagtggcanaagagggtccgcccgtccagagcctgaagggcgaggatgctgaagaatccttggaggangaggaagcgctggaccctctgggcattatgcgcttcaagaagcccaaanaaacatcggtgtgaaagggaanggactgggccctgca

SEQ ID NO: 3988 - DNA, 741 bp, Homo sapiens
  misc_feature (712)..(712): "n" may be a, t, c, g, other or unknown
  misc_feature (729)..(729): "n" may be a, t, c, g, other or unknown
  misc_feature (735)..(735): "n" may be a, t, c, g, other or unknown
ttgcgcctgcgcagtgcatcaccgcaggcgggcctcgcgggtccgggagcgcggcggagacgatgcctgagatcagagtcacgcccttgggggccggccaggacgtgggccgaagctgcatcctggtctccattgcgggcaagaatgtcatgctggactgtggaatgcacatgggcttcaatgacgaccgacgcttccctgacttctcctacatcacccagaacggccgcctaacagacttcctggactgtgtgatcattagccacttccacctggaccactgcggggcactcccctacttcagcgagatggtgggctacgacggccccatctacatgactcaccccacccaggccatctgccccatcttgctggaggactaccgcaagatcgccgtagacaagaagggcgaggccaacttcttcacctcccagatgatcaaagactgcatgaagaaggtggtggctgtccacctccaccagacggtccagattaaagtgggctcagagtctgtggtctacacgggtgattataacatgaccccagaccgacacttaggagctgcctggattgacaagtgccgcccaacctgctcatcacagagtccacgtacgccacgaccatccgtgactccaagcgctgccgggagcgagacttcctgaagaaagtccacgaaaaccgtggagcgtggtgggaaggtgctgatacctgngttcgcgctgggcccgngcccangaacat

SEQ ID NO: 3989 - DNA, 846 bp, Homo sapiens
  misc_feature (703)..(703): "n" may be a, t, c, g, other or unknown
  misc_feature (723)..(723): "n" may be a, t, c, g, other or unknown
  misc_feature (818)..(818): "n" may be a, t, c, g, other or unknown
  misc_feature (830)..(830): "n" may be a, t, c, g, other or unknown
  misc_feature (845)..(845): "n" may be a, t, c, g, other or unknown
aggattttcattttcatttatggcacccgttgtgtttgagaacatggaccaatttatggattagttttaaacccccagtctgtcacactcaatgaacaattctaagttggagagaatccatatgaaaggattagaatgtgccacagtggagcttacacatgactgtttcaactaaatattgcccagctgcctctcctgcagtattatttttttttttttgctacttagttaaattgctagtgtctctaatttcacacattgtcagagctttttttattttgtaaatatactgccacaataaatgtatgtgatgtttcatttattcaagatggggtctgataaactgtaggactaggagactaagaagagaagtcaattttgagtagaatgtgcatctttcaaataatattgctgggcccttctttggataccttgtttgactgtactcataaaatagccagagagtgactgttaagaccgtacacacttaatgggttttcaagaagatgggattgttttttcttggccatataatataaatgtataataaatttgctctctttgtaattaaaattaagagacagtagctcagctaggccttttaaatgtctatataacccaacaccaccataagtccagctcaattttttgtgacctgtttttctcatgggctactcaaagattttttttttttaaggcacancaagatgaggttttaaaaangctttgttagggcaattagacattttcatttttcaagctgattatagcatttatccttacattggaaatttagtatttgcattttgccttttccncttaaaatgttnccccaccaatttggnc

SEQ ID NO: 3990 - DNA, 715 bp, Homo sapiens
  misc_feature (659)..(659): "n" may be a, t, c, g, other or unknown
  misc_feature (663)..(663): "n" may be a, t, c, g, other or unknown
  misc_feature (684)..(684): "n" may be a, t, c, g, other or unknown
caaacttcatgtctttcagaatatcatcacccttgcagaaactggctctctggacttcagaacattttgtacatcatgtcttgtgagttttttcatataatttttttccgtagtgaaagcaaagtcttggtaacgttgctgatgtaagcatttgtcagatcttcatggtatatttatacacctttgtttttacccatttctaattttacattcctgtctgaacagctttctgtcttgaacatatggcagaatgatgtttataatctcttgaagttgtctctggttacatctctccgtgaattatccattgtgtgttttatttgcttttctctgtcatgaagcatatattagaactaacgtcaaatcagaggctcataatgaccttagaaaccacttagtgaaacctctcattttgcaattgaggaatcaagggaggaagtaaattctcccaaattattggtggtgataaaaatggaacttgggtttccttcccttggttgagtgcttattttgctctgtggtactgcctcatttctgcttagccagtatgaacaggctctggaattcagatcccacttagtgatgtcctaatcaaagtagacatatggaagtaaatactaataaggcattccacagcctctgtgtgaattgatggctgnttangatttgtgccaatgcctctgngacctaaagttaaaattttgcttgggatttg

SEQ ID NO: 3991 - DNA, 535 bp, Homo sapiens
  misc_feature (160)..(160): "n" may be a, t, c, g, other or unknown
  misc_feature (259)..(259): "n" may be a, t, c, g, other or unknown
  misc_feature (516)..(516): "n" may be a, t, c, g, other or unknown
  misc_feature (519)..(519): "n" may be a, t, c, g, other or unknown
  misc_feature (525)..(525): "n" may be a, t, c, g, other or unknown
agatcgctccgcccccatccgcaggttctaactttggcctgggactctgcccctctacctcagcacagaatcgccccgggtcctactacagaatcaatccttgaacactgcctccacgtcgccggctcaatctgggcgagaacccagacttccaccgcanccccgcaatctgcagacctcagcggcagcgcaggtggcagacctgcctcctttgcctgtgagtcatggcagctcccatgaatggccaagtgtgtgtggngactggtgcctccaggggtattggccgtggcattgccttgcagctctgcaaagcaggcgccacagtttacatcactggccgccatctggacacccttcgcgttgttgctcaggaggcacaatccctcgggggccaatgtgtgcctgtggtgtgcgattcaaacccggaggtgtccaatcccaaaaagccaggacgagttaccaaccagctgcaatacctacacaaggtagtgatgaaggctctgtggaaacatcagntcncatggncattccggca

SEQ ID NO: 3992 - DNA, 774 bp, Homo sapiens
  misc_feature (643)..(643): "n" may be a, t, c, g, other or unknown
  misc_feature (692)..(692): "n" may be a, t, c, g, other or unknown
  misc_feature (723)..(723): "n" may be a, t, c, g, other or unknown
  misc_feature (764)..(764): "n" may be a, t, c, g, other or unknown
agacgagacgtctctccggagcgggggcgagagcggtcacccacccgcaggagagacggctcccccagccggcggagacggtctctggagagactcctggagcagaggaggtcccccgagcgcaggagagggggctcgcccgagcgcagggccaagtccaccgaccggaggcgcgcacgctcccccgagcgcaggagagagcggtccctggacaaaaggaacagagaggacagagccagccaccgagaaagggaagaggcgaatctgaaacaggatgccggcagaagttccagacatcccccggagcagagaaggcgaccttacaaagaatgtagcaccgacctcagtatctgagacgctgagtcacattccaacctttaccgtgtcaaaggttctaagaggaaagtcacaaacctgaaattatttagtttcttacctaatgaagcatctgacacctgatgatcctatgaataacaacaaacattttatgcatttgaaatcttataagaaaaaatatatatgaaaagtattgtgcctgatgtatcatattaaagaaagtatttttaaatgcatacttttttggaaattatttgccaaatgctggcccaaagggatataaattttgtttctacgtaacctgtanaatcgtcaagaattgttcccgttttggggcaatctttttctctcctggntaaatggggcttgttgatcattttctctacntaaggggaatttattggttaagtttaattaatttgatatanactgtcatgt

SEQ ID NO: 3993 - DNA, 416 bp, Homo sapiens
  misc_feature (368)..(368): "n" may be a, t, c, g, other or unknown
  misc_feature (392)..(392): "n" may be a, t, c, g, other or unknown
  misc_feature (403)..(403): "n" may be a, t, c, g, other or unknown
gaattggtgggggccgcggtctccgccttctagaggtggcggcctactgcccttcgggtgttgtgtgcaaagccccgtttcctgctccctgcgcttgtatcctgctgccttccctcctgctggtgaagctcgtgctgccctttgctggcctgtgctgccactgccgacccgtgtcccgtggtggagctgtcgtggggctcacgtgacttcccttcctacaggcgtccgagctgggccacagcctgaacgagaacgtcctcaagcctgcgcaggagaaggtaacgggcagctccgggtggttgtgcctggagcccttcactccaggggacgtgggtgtgtcaggggtgttagggggattgtttgtccancagctgggactcaatgaggccaancctcacacccnacctctcagcaca

SEQ ID NO: 3994 - DNA, 786 bp, Homo sapiens
  misc_feature (751)..(751): "n" may be a, t, c, g, other or unknown
  misc_feature (764)..(764): "n" may be a, t, c, g, other or unknown
  misc_feature (786)..(786): "n" may be a, t, c, g, other or unknown
cacttaacacactcttgatgacatatggcaggttcttggtattgacacccgtgtggctgcaggtggcatgaatcatgcatggcttgtctggatctgtcttctgcagagcccattctctctgtcttttgctagtctggactggagagcaacttccctgagtcaggactcttgctgctaattgcagaaaaccagcagtctctgtgaagttgtggtgttctcagagttcagctgtaaaatatagaatcctcattaattgtatttacaactatattgagcaaaccaatgttgttctttattaatgtacagaccaaaaaagacacctcaaaagaaaggacgtacgcgtttcttgtaaacacgaggcaccccaagataagaagacagatagagcaagggatggacatggtcatctcctcagtgattggagaaagttaccggcttcagtttgattttcaagaggcagtgaagaatttcttccccccaggaaatgaagtggttaatggagaaaatttaagctttgcatatgaattcaaagctgatgcattatttgatttcttctattggtttgggctcagtaattccgttgtaaaagtaaatggaaaagttcttttaggttcaatagatgatgtttttaactgcaatctgtcacccagatcatctctgacagagcctcttttggcagaattaccatttccaagtgttctggaatctgaagagacacccaccaatttatctgattgaactgacattgtancagttgctcccgnacttcaagcctgtgctagactn

SEQ ID NO: 3995 - DNA, 752 bp, Homo sapiens
  misc_feature (701)..(701): "n" may be a, t, c, g, other or unknown
  misc_feature (729)..(729): "n" may be a, t, c, g, other or unknown
  misc_feature (751)..(751): "n" may be a, t, c, g, other or unknown
cttggctcgctgcgcctctgcctcccaggttcaagagattcttctgcctcagcctcctaagtagctgggattacaggaaatgagaacagaagccattgccagacctctggaaataaacgagactgaaaaagtgatgagaattgcaataaaagagattttgacacaggttcagaagactaaagacctgctcaataatgtggcctctgatgaagctaatttagaagccaaaatcgaaaagagaaaattagaactggaaagaaatcggaagcgactagagactctgcagagtgtcaggccatgttttatggatgagtatgagaagactgaggaagaattacaaaagcagtatgacacttatctggagaaatttcaaaatctgacttatctggaacaacagcttgaagaccatcataggatggagcaagaaaggtttgaggaagctaaaaacactctctgcctgatacagaacaagctcaaggaggaagagaagcgcctgctcaagagtggaagtaacgatgactcggacatagacatccaggaggacgatgaatccgacagtgagttggaagaaaggcggctgcccaagccacagacagccatggagatgctcatgcaaggaagacctggcaaacgcattgtgggcacgatgcaaggtggagactccgatgacaatgaggactcggaggagaatgaaattgacntgggaagatgatgatgaccaggatgacnatttggaagaccagagcctttnt

SEQ ID NO: 3996 - DNA, 786 bp, Homo sapiens
  misc_feature (659)..(659): "n" may be a, t, c, g, other or unknown
  misc_feature (694)..(695): "n" may be a, t, c, g, other or unknown
  misc_feature (769)..(769): "n" may be a, t, c, g, other or unknown
gatctgtacctttacttgtgaaaggtatgctatataattcagcaagtaccaacttgtgtagctgcagaataaccaagtggctatccagtcaagtaaatacagtttgcttacatacttcaacagtttcataaaacgattcccctgagtgacacaagaacataaaatgttaatatcactaatatagcctgttaaatcttttgtggagacaggtgcaaatcagaagattgacaaggaagaacttgagcttgctaaataagacttcctaaatttaaaagctctagttttgcttagtgtgaattctggcactttaaaaagattaagcaagtgaaattctgctgccctccaccatttatttttacagtgctttgtaatttttttcatcagttccttaaatgttatttggaggaaactaagttcttgacctcagtaattttatttttgtttttccctaaatgtttccctactagtctttttggaaaacatgtttgttttaatttcatcttccctcactttatttaggtagaatttttcccccttcatttctgaaattttttgctcaccgccatgtttaaatggggttgaatcatagcgagccatttgctcttgccaaagtgagatagatgtctgaggagataattgaaaagtcagactctgtctgnggggctttaatcggagcactgctggaaatgatgcnnagaatgtagtgcttcatatatccatgaccaagattgacatgttgctcacacatgtccaatttaatgaggagctnctgttttccaaaattcc

SEQ ID NO: 3997 - DNA, 739 bp, Homo sapiens
  misc_feature (444)..(444): "n" may be a, t, c, g, other or unknown
  misc_feature (694)..(694): "n" may be a, t, c, g, other or unknown
  misc_feature (722)..(722): "n" may be a, t, c, g, other or unknown
  misc_feature (731)..(731): "n" may be a, t, c, g, other or unknown
atcgagtcggccttgttgggtgctaggatttcaagtatttggtgtctggccagaaggatctgatgggacagatatcaatgcactggtgcgatcccacaatagaaaggtgatagctgttgccgatgacttttgtaaagtccatctgtttcagtatccctgctccaaagcaaaggctcccagtcacaagtacagtgcccacagcagccatgtcaccaatgtcagttttactcacaatgacagtcacctgatatcaactggtggaaaagacatgagcatcattcagtggaaacttgtggaaaagttatctttgcctcagaatgagactgtagcggatactactctaaccaaagcccccgtctcttccactgaaagtgtcatccaatctaatactcccacaccgcctccttctcagcccttaaatgagacagctgaagaggaaagtanaataagcagttctcccacacttctggagaacagcctggaacaaactgtggagccaagtgaagaccacagcgaggaggagagtgaagagggcagcggagaccttggtgagcctctttatgaagagccatgcaacgagataagcaaggagcaggccaaagccacccttctggaggaccagcaagacccttcgcctcgtcctaacaccctggcttcagtgcaactcttttccttcagctgcatgtgattttgngataaagttcaggtaacaggatgggcantgattgganaatcactg

SEQ ID NO: 3998 - DNA, 739 bp, Homo sapiens
  misc_feature (719)..(719): "n" may be a, t, c, g, other or unknown
  misc_feature (723)..(723): "n" may be a, t, c, g, other or unknown
  misc_feature (731)..(731): "n" may be a, t, c, g, other or unknown
ttattcaggcaccctaatgggcagattgtccagcttctacctttgcatcagcttcgaggctctaatacccagcccaacttacagcctgtcatgtttcggaacccagggtctgtgatgggaatccggttacctgctccttccaaaccctctgagactccgccatcttccacttcgtcctctgctttctctgtcatgaatcctgtaattcaagctgttgggtcttcttcagcagtgaatgttatcactcaggcaccatcattgctttcctctggagctagttttgtgtctcaggctggtacattgaccctgaggatttctcctcctgaaccacaaagctttgcaagtaaaacaggctctgaaaccaaaataacttatagctcaggaggacagcctgttggtacagccagtcttattcctctccagtctggtagttttgccttgttacagctcccaggacaaaagcctgttcctagctccattcttcagcatgttgcttcccttcagatgaaaagagaatctcagaatccagaccagaaagatgaaacaaactcaataaaaagagagcaagaaacgaagaaggttctacagtcagaaggagaggctgtagaccctgaggctaatgtaataaaacaaaactcaggagctgctacctcagaagaaactctgaatgattccttggaagataggggtgatcatttggatgaaaaaatgcctttcanaaanaaggttgngcaactgt

SEQ ID NO: 3999 - DNA, 585 bp, Homo sapiens
  misc_feature (504)..(504): "n" may be a, t, c, g, other or unknown
  misc_feature (535)..(535): "n" may be a, t, c, g, other or unknown
  misc_feature (577)..(577): "n" may be a, t, c, g, other or unknown
gagcgccttcccgttcccggtgaccgtgtcgctgtgccacatcctggctctgtgcgctgggctcccgccgctgctgcgcgcctggcgcgtgccccccgcgccgcccgtctcgggccccggacccagtccgcatccgtcgtccggcccgctgctgccgccgcgcttctacccgcgctacgtgctaccgctcgccttcggcaagtacttcgcgtccgtgtcagcgcacgtcagcatctggaaggtgcccgtgtcctatgcacacaccgtcaaggccaccatgcccatctgggtggtcctcctgtcccggatcattatgaaggagaagcagagcaccaaggtatacttgtcactcatccccatcatcagcggtgtcctgctggccaccgtcaccgagttgtcttttgacatgtggggactcgtcagcgccctcgccgcacgctgtgcttctcgcttcagaacattttctccaaaaaggtcttgcgagattcacggatccaccatctncggctgctcaacatcctgggctgcacgccgncttctttatgatccccacctgggttctggtggacctctcggntttcctgg

SEQ ID NO: 4000 - DNA, 683 bp, Homo sapiens
  misc_feature (662)..(662): "n" may be a, t, c, g, other or unknown
  misc_feature (676)..(676): "n" may be a, t, c, g, other or unknown
  misc_feature (678)..(678): "n" may be a, t, c, g, other or unknown
atttccatttcctagcagatttcatatactacatacagagcttaatggtttttgttttactaattagatgatgtaaaacagagatttggattatcaatgtgaatgaattcagggtgggaaagacccacagacaaggtctctactgccttctctttgtattgcttttgtgggaggttggagatacgaagttcaattggtagaatattctagatcactggtggacagcaggccccaagtctgtctgtccttgcacagtattcttaattctgtatatctggaacctgaatggtcaatttttttttttttcccccagagtggttatcaagtcctgggaaatcctgactcatagggctcaaactcagacatatttatgtcagagaagcaatttaagaaccattttacatgtaaaataaaagtttttcactggggaaagcataaacttttaaatctaaaccaactatacagggctcttatgaggataaattaatcaatttaccatgccaggcacatagtaggttgctttaaaagtatgtcatcttcgttttttcttaagagatggtaggaatataattggttgagcaggaaaggaacacatgtattgaggcacgaagttttgctgttcaaaggtttctgggttagtaatgcttgggtttcaaagctgncatcatcttatagncnctttg

SEQ ID NO: 4001 - DNA, 262 bp, Homo sapiens
  misc_feature (238)..(238): "n" may be a, t, c, g, other or unknown
  misc_feature (244)..(244): "n" may be a, t, c, g, other or unknown
  misc_feature (262)..(262): "n" may be a, t, c, g, other or unknown
cacacagctgggacgtgaccccgcctcttgggggtggtcgcgtgttgctcagtgctgaagtggggttctcattccggcccccctggagatgaccccggaggaggccacagccaaccatgacagtgctggggctctggctgccttctccacccaccccacccctcactcaggtcgtgttttcaggagctcaaggctggagtgtcttgacagtaaggggaggggagcggaggcggaggcncctcangcagcctctccatctacn

SEQ ID NO: 4002 - DNA, 615 bp, Homo sapiens
  misc_feature (590)..(590): "n" may be a, t, c, g, other or unknown
  misc_feature (607)..(607): "n" may be a, t, c, g, other or unknown
  misc_feature (610)..(610): "n" may be a, t, c, g, other or unknown
taaaattgacctggaatcaaccattgacatgtcctgtgctaaatatgaattcactgatgccctgctgtgccatgatgatgagctggaagggcgccggattgccttcatcctgtacctggttcctccctgggacaggagcatgggtggtaccctggacctgtacagcattgatgaacactttcagccgaagcagattgtcaagtctcttatcccttcgtggaacaaactggttttctttgaagtatctcctgtgtcctttcaccaggtgtctgaagtgctgtctgaagaaaagtcacgtttgtctataagtggctggtttcatggtccatcattgactcggcctcccaactactttgaaccccccatacctcggagccctcacatcccacaagatcatgagattttgtatgattggatcaaccctacttatctggacatggattaccaagttcaaattcaagaagagtttgaagaaagttctgaaattctcctgaaggagtttcttaagcctgagaaattcacgaaagtctgtgaggccttggagcatggacatgtggaatggagcagccgaggtccccctaacaaaaggntttatgagaaagctganganagtaa

SEQ ID NO: 4003 - DNA, 697 bp, Homo sapiens
  misc_feature (581)..(581): "n" may be a, t, c, g, other or unknown
  misc_feature (671)..(671): "n" may be a, t, c, g, other or unknown
  misc_feature (680)..(680): "n" may be a, t, c, g, other or unknown
  misc_feature (690)..(690): "n" may be a, t, c, g, other or unknown
ttttaaaaaaataattgcgcccccccgccccgtgccttggagatagtaagaattggagcagagcactgggacttcaattcacgcatggaaagagatctttgttagttggaggaaggagaacttgcctgagcttcgggcctttgttttgtttttgtgagagggacgtgtctcctaaatgaatgtttgctccagcgttgcacctcaaataagtcacctaaatatccacgccctctttatccaccccctctttactcgtgtgactagaatagttttcatttttcttctcaagggaatggctaaacagctcctatctgggcgtttgatggactgtcattcaagaatgagtgaagttgaggtgcctataagcaactcagaaattgttgtggccacgcttgggggaaatagagccctacactcaggtgatgagaggagacctcagaggtgaccgatccagggccttgctccctgcgccaccccagctcgtacctccagtggaacttggctgggcttatcaagagctcctttcattcattgcaacttcatttgttagaaagcttctctgtgtatttagtaggcattgncttcaacatgtaccactggtctggcttttggtaggcccattaatagtgtcatgtgacagcctttcaagtataggtgcttcccggcttacnggggggtcncattccagtnaacacat

SEQ ID NO: 4004 - DNA, 651 bp, Homo sapiens
  misc_feature (615)..(615): "n" may be a, t, c, g, other or unknown
  misc_feature (640)..(640): "n" may be a, t, c, g, other or unknown
  misc_feature (649)..(649): "n" may be a, t, c, g, other or unknown
atgctataatgtctgaacagccactgcacttgggcaacatagcaagaccctgtctcttaaaaaaacagtctccatttatatagcattcaggaataggaaaaactacagggaaggcaaacacatcaatggcctcctgagctgggaatgggagttaattacaaagggacatgagggaatttttaggggtggtgtgacttcaatatcttgactgctgatgattgattgattacatgtttgacagaactcacagaactctacacttacgaaggaaaaaaagttttgtttttctagcttaaccaaagtggtaccaaacctttaaaatatcaagcttagaagaagggctagaacatgtccatattttacctcattagaaataaagaataggatgttgaaaatggtttgtgctttaagaagactgaaccaagctagtagctcggatttgggtgtccaccacctcaccttccaggcttataactggtaattctgctcaagaatctgtcctcagtgttttcaacatcgagaattaatttgagacaaactacatctagttcataaacaaagcttgaattaaaaaggattcctgtcacaggccaaaactagtctacaaacccttanggtggccaatcttgcttttacaccnccaaagatntt

SEQ ID NO: 4005 - DNA, 813 bp, Homo sapiens
  misc_feature (575)..(575): "n" may be a, t, c, g, other or unknown
  misc_feature (768)..(769): "n" may be a, t, c, g, other or unknown
  misc_feature (809)..(809): "n" may be a, t, c, g, other or unknown
ttagctgtcagtaacaagcttcctcgagtctcacagtcacaggattgtcttagttctttgcagttggctctatgtacacaagaacatgctgcccatagacacagcgctcccttcaggatctaattcactgcctctgctctcgctgcagagacagaaaaaaaagtgatgtctgctctttgtttgctgttatattcccaactagtatacataagtaatagccaaccattcaatgcatcaggcactatgctaaacccatatgactcaaatattaagcaataggcttaagatcacctactcaggaaataacaggcttcaaaccttgagtcgctctgtgcaaaagctcctacttttaacctgtattccacacttgctgtttggttggattttctgcaattccttcctaataaggagtcataaaaatgcctaagcagtaagtatggagaatcactagcaatctttgaacagcagctcatgaaaagcctttcgttgtgaaagaaaaccaggaagcacttgtttcctggggatatgatttaggagaaaaaaatgcatttgtttgtagcagtgaaagttcttgnttctatatcctcctaaaatatatatattattgaattaatgaaagtccagctttgatcctatctttgagagggttatttatgtcttatatttttcaaaccatttactcctctggtgccagatctggtaactttcttttaaaaataagacaaaacctaatgaaaactgaaagcccattgttccatgaaaaacttnntgaaaataaagggaactttctggaattttgggggaaggtnaaaa

SEQ ID NO: 4006 - DNA, 745 bp, Homo sapiens
  misc_feature (164)..(164): "n" may be a, t, c, g, other or unknown
  misc_feature (491)..(491): "n" may be a, t, c, g, other or unknown
  misc_feature (669)..(669): "n" may be a, t, c, g, other or unknown
  misc_feature (672)..(672): "n" may be a, t, c, g, other or unknown
  misc_feature (705)..(705): "n" may be a, t, c, g, other or unknown
aaaaacatgaaggacagatatgttgaagtccttcagtgttcagctgaggagatgaactttgtgttaatggggggcactttaaatcgaaatggcttatccccaccgccatgtaagttaccatgcctgtctcctccctcctacacatttccagctcctgctgcagntattcctacagaagctgccatttaccagccctctgtgattttgaatccacgagcactgcagccctccacagcgtactacccagcaggcactcagctcttcatgaattacacagcgtactatcccagtgtttgaaagatgtatggtgatcttgaaacctccagacacaagaaaacttctagcaaattcaggggaagtttgtctacactcaggctgcagtattttcagcaaacttgattggacaaacgggcctgtgccttatcttttggtggagtgaaaaaatttgagccagtgaagccaaatcgtaacttacagcaagcagcatgcancatacctggctctttgctgattgcaaataggcatttaaaatgtgaatttggaatcagatgtctccattacttccagttaaagtggcatcataggcgtttcctaagttttaagtcttggataaaaactcaccagtggctaccatctccaccatgaactcttgttaaggaagcttcattncgnatattcccgctctttttctcttcatttccctgncttctgcttaatcatgccttcttgcttaagtaattcaagc

SEQ ID NO: 4007 - DNA, 597 bp, Homo sapiens
  misc_feature (274)..(274): "n" may be a, t, c, g, other or unknown
  misc_feature (391)..(391): "n" may be a, t, c, g, other or unknown
  misc_feature (414)..(414): "n" may be a, t, c, g, other or unknown
  misc_feature (505)..(505): "n" may be a, t, c, g, other or unknown
  misc_feature (552)..(552): "n" may be a, t, c, g, other or unknown
  misc_feature (568)..(568): "n" may be a, t, c, g, other or unknown
agtacacacgcacctgagtgagtggcaccagaggaccctctccatgtttagggacctcctgggcctcaggagcgtggcgcccgcccctgggcggactccccccatccgcgggcgcggatggtccgggccgcgtccgcagtgctgctggctgctccctggttgctgggtgcaaagtgctgggttctgggtttctggattcgcgggccgttcacacgtagcctgtgccggctcctcgggtgagtccgtccgcgcgcggtgccccgggacggcctangctgccgggggtccggggccccaggcattccgggctgcagattgacggggatcccggatgcaccgcgcgcccccgcgccctcaccgacgggtccagacctggtgggaagaaggtgcngggacgggtccctgaggatcccnatgcctacgagccaagatgctcagctttataggtgtgacctacacatgtgacttcacctcagttttgtgatccgtaaaatggacaaattcnaagctacttcacaagtgctgttgataggattaaatgaaacaatgctngtaaagctctttgcangaaggagccttggaagcaagggcctggcc

SEQ ID NO: 4008 - DNA, 681 bp, Homo sapiens
  misc_feature (542)..(542): "n" may be a, t, c, g, other or unknown
  misc_feature (628)..(628): "n" may be a, t, c, g, other or unknown
  misc_feature (656)..(656): "n" may be a, t, c, g, other or unknown
  misc_feature (660)..(660): "n" may be a, t, c, g, other or unknown
ctgcacaagggcgccaagcgcaagggcatcaagtcgtccattggccgcctgtttgggaagaaggagaagggcaggctgatccagctgagtcgggatggagccacaggccatgttctgctaacagactccgaattcagtatgcaggagcctatggtgcctgccaagctggggacccaggcagagaaggaccggcggctaaagaagaaacaccagctgcttgaagatgcccgcaggaaaggaatgccctttgcccagtgggatggtcctactgtggtctcctggttggagctctgggtggggatgcctgcctggtatgtggcagcctgccgggccaacgtcaagagtggtgccatcatgtccgctctgtcggacacagagatccagcgggagatcggcatcagcaatgccctgcaccggctcaagctccgcctggccattcaggagatggtgtcattgaccagcccctctgcccacccaccttcaggacttcttctgggaatgtctgggtcacccatgaagagatggaaactcttggaaacatntactaaaacaaccctgcctatggggacatgaaccatgagtggattgggaatgaatggctcccagcctggggctccgcagtacccgnagctacttcatggaatgcctggtggacncccncatgctggaccaccttaccaa

SEQ ID NO: 4009 - DNA, 652 bp, Homo sapiens
  misc_feature (591)..(591): "n" may be a, t, c, g, other or unknown
  misc_feature (601)..(601): "n" may be a, t, c, g, other or unknown
  misc_feature (632)..(632): "n" may be a, t, c, g, other or unknown
taaaaaatgtcatcacttgccaagcctggtggctcatgcctgtaatcccagcactttgtgaggctgaggcaggaggattacttgagtccaaaagattgaagctgcagtgagctgtgattgggccactgccctctagcctgggcaacagagcaagaccctattcaacaataacaaaaaaaggaattaggtgatgggaaatgcctaccatttgaatctataaagataagcaaggcagggtgcagtggctcacgcctataatgccaacattttgggaggctgagacaggaggatcgcttgagctccagagttcaagaccagcctgggcaacatagtgagatctagtctctacaaaaataaacaaatttagctgggtgtggtggtgcgtgcctgtagtctcagctacatgggaggctgaggtgggaggattgagtgagctcaggaggttgagactgcaatgagccatgattacgccactgcactgcggcctaggtgacagcaaaacctgtctcaaaaaagagagagagagagataagcaagagttactcatgatgcttggacttgggggaagatgccaactctggcacatgtcanttactacatnaaaagtcaagtgcaatgtcaaatccagagcntcaagaggaaaaaaagttca

SEQ ID NO: 4010 - DNA, 730 bp, Homo sapiens
  misc_feature (667)..(667): "n" may be a, t, c, g, other or unknown
  misc_feature (728)..(729): "n" may be a, t, c, g, other or unknown
aaggaattttttgagaagttacaacacacactggatcaaaagaagaatgaaattctgtctgactttgagaccatgaaacttgctgttatgcaagcatatgacccagagatcaacaaactcaacaccatcttgcaggagcaacggatggcctttaacattgctgaggctttcaaagatgtgtcagaacccattgtatttctgcaacagatgcaggagtttagagagaaaatcaaagtaatcaaggaaactcctttacctccctctaatttgcctgcaagccctttaatgaagaactttgataccagtcagtgggaagacataaaactagtcgatgtggataaactttctttgcctcaagacactggcacattcattagcaagattccctggagcttttataagttatttttgctaatccttctgcttggccttgtcattgtctttggtcctaccatgttcctagaatggtcattatttgatgacctggcaacttggaaaggctgtctttcaaacttcagttcctatctgactaaaacagccgatttcatagaacaatcagttttttactgggaacaggtgacagatgggtttttcattttcaatgaaagattcaagaattttactttggtggtactgaacaatgtggcagaatttgtgtgcaaatatnaactattataaaatctgtttcaagtatgcagttttcttttggtagaaattggtagagaatnna

SEQ ID NO: 4011 - DNA, 671 bp, Homo sapiens
  misc_feature (631)..(631): "n" may be a, t, c, g, other or unknown
  misc_feature (662)..(662): "n" may be a, t, c, g, other or unknown
  misc_feature (670)..(670): "n" may be a, t, c, g, other or unknown
agcaagaacgccagggacggggtctccgcgcctgcgcagtgaagctgggcgccttcggggcttgagcttctgagggtcgggtccagcgcgtgggctgctggatggcggaaccccaggcggagtcggagcccctgctgggcggggcccgcggcggtggcggcgactggccggcggggctgaccacttaccgcagcatccaagtcggccctggtgccgcggccaggtgggacctctgcattgatcaggctgtggtcttcatcgaagatgctattcagtaccgctccatcaaccaccgggtggatgccagctcgatgtggctttaccgacggtattactcgaacgtatgccaacggactttgagcttcaccatcttcttgatcctgtttttggcttttatcgagaccccatcctcactcaccagcacggcggacgtgcgctaccgcgctgccccctgggagccgccctgcggcctgaccgagagtgtcgaggtgctctgcctgctggtctttgcggccgacctctctgtgaagggttacctgttcgggtgggcccatttccagaaaaacctttggctgctgggctacctcgtggtgctggtggtgtctctggtggactggaccgtgtccctgantctcgtgtgtcatgaccccttgcggatccgncggctttnt

SEQ ID NO: 4012 - DNA, 737 bp, Homo sapiens
  misc_feature (703)..(703): "n" may be a, t, c, g, other or unknown
  misc_feature (708)..(708): "n" may be a, t, c, g, other or unknown
  misc_feature (715)..(715): "n" may be a, t, c, g, other or unknown
gctcaggcctcggaggcggggcgatggccacctcccaccgagtggcgaagctggtggcctccagtctccagaccccggtaaatcccatcactggagcgcgggtcgcccagtacgaacgcgaagaccccttaaaggccctggcggcagcggaggcgatcttggaggacgaagaggaggagaaagtggcgcagcccgctggggcatcgagatggggtttcaccatgttggccagattggtcttggattcctgacctcaagtgacccaaagtgctgggattacaggcatgaaccactgtgcctggccaattctgttgatttttcgagtgaaaactgcatactggattcagacactgctactaaaacgaactgctgctgcccagatgaataaccgttgctagactgacacaagccgacaggaagcagtcagagggctaacagaaaggagctgatttgaacaccagcttttctggggtggatgaacatgcaccgataagctatgaggactttgtgaactttcctgatattcaccactctaatgaggagtatttcaagaaagtagaagagttgaaggctgcccacatagaaactatggcaaaattagagaaaatgtaccaggataaattacatttaaaggaagttcaaccagtggtcatcagagaagactctcttagtgactcttccagatctgtatcagaaaagactnctatnaccctgnctcattaatgacatcattttca

SEQ ID NO: 4013 - DNA, 705 bp, Homo sapiens
  misc_feature (618)..(618): "n" may be a, t, c, g, other or unknown
  misc_feature (691)..(691): "n" may be a, t, c, g, other or unknown
  misc_feature (693)..(693): "n" may be a, t, c, g, other or unknown
tcaataaagttttagcccacttcgtcgctatgtgtgatacaaatatgccatttgtaggacttcggttggagttgtccaatctggagattccacatcaaggagtgcaagtggaaggtgatggcttcagccatgcaattcgcttattaaaaattcctccctgtaagggtataactgaggaaacccaaaaggctctggaccgctctcttcttgattgcactttccgattacaaggtagaaataaccgcacttgggtagcagagttagtgtttgcaaattgtccacttaatggcacttctactagggagcaaggaccatcccggcacgtttacctgacatatgaaaatctgttgtctgagcctgttggtggtagaaaggtggttgaaatgtttcttaatgactggaatagcattgcacgattatatgagtgtgtgttgaaatttgcacgttctctaccagacatacctgctcatctaaatattttctcagaagttcgtgtttataattaccgagaacttatcttgtgttatggaaccaccaagggaagctcaattagtatccaatggaattcgatccatcaaaaattccacatttctttgggaactgttggcccaaactcangttgcagtaactgcacaataccattctccatcagcttcaagaaatgttcaacaaacaccaaatgtgggtcaantnttacaggtactg

SEQ ID NO: 4014 - DNA, 797 bp, Homo sapiens
  misc_feature (656)..(656): "n" may be a, t, c, g, other or unknown
  misc_feature (730)..(730): "n" may be a, t, c, g, other or unknown
  misc_feature (761)..(761): "n" may be a, t, c, g, other or unknown
  misc_feature (777)..(777): "n" may be a, t, c, g, other or unknown
gaaatcaattatgcaaaggaggaggcttgtcggctgagagagctaagggagggagctgaatgtgaattgagtagacgtcagtatgcagaacaggaattggaacaggttcgcatggctctgaaaaaggccgaaaaagaatttgaactgagaagcagttggtctgttccagatgcacttcagaaatggcttcagttaacacatgaagtagaagtgcaatactacaatattaaaagacaaaacgctgaaatgcagctagctattgctaaagatgaggcagaaaaaattaaaaagaagagaagcacagtctttgggactctgcacgttgcacacagctcctccctagatgaggtagaccacaaaattctggaagcaaagaaagctctctctgagttgacaacttgtttacgagaacgactttttcgctggcaacaaattgagaagatctgtggctttcagatagcccataactcaggactccccagcctgacctcttccctttattctgatcacagctgggtggtgatgcccagagtctccattccaccctatccaattgctggaggagttgatgacttagatgaagacacacccccaatagtgtcacaatttcccgggaccatggctaaacctcctggatcattagccagaagcagcancctgtgccgttcacgccgcacattgtgccgcctcgcctcacctcagcgagctcacttgctccacacgcccccanccgtcacacccttgggacccttaccacccgnaacacacaccacactncttgccttcccctgatccaa

SEQ ID NO: 4015 - DNA, 662 bp, Homo sapiens
  misc_feature (582)..(582): "n" may be a, t, c, g, other or unknown
  misc_feature (600)..(600): "n" may be a, t, c, g, other or unknown
  misc_feature (614)..(614): "n" may be a, t, c, g, other or unknown
acacgcgtcctcccctcggcggggaggccggctaggggcaggcgggcagcgatgcctgcgtcggccacagctgcctggcactgccctcctttgtgcctgcctcctctgccagcctccgctccaacctccccccccaaccccgcaacgaggcctgctcctgggcccggccgcagggcccgttgcccacagagcgcccaccctgcgcccacccggggtgccctcaccttctgggcccctggctcctggcctcgggtcctgctggtgcccaggtcgcccggccccgtcctccgtgctccgcgtttgccccaccctgctgcccgagctcggcggcgagcctggcacggtgccaggctgcctgggagcccagcccgggcagggcgaactttccagcgagggttggtctcaaactcctgggctcatgcaatcttcctgcctcggcctcccaatgtgctggaattacaggtatgagctaccgcgctcagcccaaacccagggctcttaaccaccctactatgtactgtgctggcccccggtcaagggagagaactcacgtcaggcaaaaatgttttacaagagaggcanctaagtcttttccacagnggatgacacaagtnccccttacaaaaccacccacagatccaaccccaaggaaactcttgctt

SEQ ID NO: 4016 - DNA, 824 bp, Homo sapiens
  misc_feature (669)..(669): "n" may be a, t, c, g, other or unknown
  misc_feature (727)..(727): "n" may be a, t, c, g, other or unknown
  misc_feature (765)..(765): "n" may be a, t, c, g, other or unknown
  misc_feature (805)..(805): "n" may be a, t, c, g, other or unknown
gtctggaatcaagcgaaccatcaaagaaaccgaccctgattacgaggatgtatctgtggcccttccaaataagcggcataaagcaattgagaattcagctcgagatgctgctgtgcagaagattgagactattatcaaagaacagtttgctcttgaaatgaagaataaggaacatgaaattgaagtcattgaccagcgactgattgaagcaagaaggatgatggataaactgcgtgcctgcattgtagcaaactactatgcttctgcaggtcttctaaaagtttctgagggatcaaagacatgtgatacgatggtttttaatcatcctgctatcaagaaatttttggaatcaccatctaggtcatcatctcctgccaatcagagagcagaaacaccatcagccaatcattcagaaagtgattctttatctcagcacaatgacttcttatctgacaaagataataacagcaatatggatatagaggaaagactctcaaacaacatggagcagagaccaagccgaaatactggaagggatacttctagaattactggctcccataaaacagaacagcggaatgctgatctcacagatgagacttcacgactttttgtaaagaaaacaatagtagtgggcaatgtgtccaagtatatacctccggataaganggaagaaaatgaccagtcaactcataaagtggatggtatatgtccgagggtcccgtanagaacccagcattaatcattttgtcaagaaggtttggntcttccttcatcctactttaaccaaatgaccttgtggaanttagagagcctcctttacc

SEQ ID NO: 4017 - DNA, 613 bp, Homo sapiens
  misc_feature (587)..(587): "n" may be a, t, c, g, other or unknown
  misc_feature (601)..(602): "n" may be a, t, c, g, other or unknown
tgtttgcaaataaaccattctgataaattatttttgttgcttaaaataagaggaggaaccgctgtgtgttagcaagaatgtccatacctgatatgaaagagtcatgttggcttcagttcctactgccctgtggacttcccattccctccttacttgagtcaaccatccactcagtactttccacaaatctaataatgaggtgctctctgtaggtaaatcctttcactatggcttgtcctcaaacctcccaagaaaaggttcaactgctcaatctcttaacctttttaattccattcccttgcaggtatcccggccctgcataacaagatgatcccaactcaaggaaaggggtttagcagtgttggatcttggcgtatgtgggatttaaccaggcagaaaggcagacaagagtaagattctaggcagagagagcaaatgcgtcgagcatgggtatgaacatgtgagggatagagaataattctgcaggaagtttgctggatggaagggccttatagggttagaaaagctggtgtcagattgtcaaggactttgaatgtcatggggcttctcttccaggaacacccaanttttgggggggggnnaaaatttcccc

SEQ ID NO: 4018 - DNA, 587 bp, Homo sapiens
  misc_feature (354)..(354): "n" may be a, t, c, g, other or unknown
  misc_feature (380)..(380): "n" may be a, t, c, g, other or unknown
  misc_feature (585)..(587): "n" may be a, t, c, g, other or unknown
gaggtgcccatttaagctagatgtgcatgtcaccacagatgagtttcagttagggcttatagcagcacatggagtgcctgagcatgccaataggcttttggtcccaactatggaagggagctgagctccagtatttcttggtagagaagcagttagtaacagcaggatgggtgtgttcatgggtaaccaccccctcaactgggaaaacagtaactgcatatgctgccctttaggctcacaaaagtgtgtcaggatgggttacagtcatcgtatgggccacttacctagtagcgggaggggtgtgttcatggggaacaaccccccagacagggaaggcacagacatccactttancaaagtggggtgcctacttggagcancaaagtatgccaagtcccttagcagcaaagttgcaaaaagtcttgggacctgtagtcctaatgcaaaataagactgtggggcctaaggcatccctagaccctatgctttcaccattaggaagagcgtccccccattcctaatagggcatggtatacagatgggtctagccaaggtgctactgctgcctcgactgttgttgcaaannn

SEQ ID NO: 4019 - DNA, 598 bp, Homo sapiens
  misc_feature (581)..(581): "n" may be a, t, c, g, other or unknown
  misc_feature (589)..(589): "n" may be a, t, c, g, other or unknown
  misc_feature (596)..(596): "n" may be a, t, c, g, other or unknown
agcaaaatctacattgcaacagacagttcccctgtggatatgcaatcttatgaactttgctgtgacatgatcgatgttgtaattgatgtgtcttgtatatatgggttaaaggaagatggaagtggaagtgcttatgacaaagaatctatggcaattatcaagctgaataatacaactgtcctttatttaaaggaggtgactaaatttttggcactggtctgcattctaagggaagaaagctttgaaagaaaaggtttaatagactacaacttccactgtttccgaaaagctattcatgaggtttttgaggtgggtgtgacttctcacaggagctgtggtcaccagactagtgcctccagtctgaaagcgctgacacacaatggcacgccacgaaacgccatctagtctgaatcccagcgtcggggctctgtgccagcttactcttcactccagggtcggatgccacgtgctacaggacatgggagctgctgcttgtgggaatctggtgcctgttccactagagacaaggggtagagtttctcatttggatgaaaaccccttcaactggtggtgtcaacccntttggggnaaaaaangg

SEQ ID NO: 4020 - DNA, 568 bp, Homo sapiens
  misc_feature (430)..(430): "n" may be a, t, c, g, other or unknown
  misc_feature (490)..(490): "n" may be a, t, c, g, other or unknown
  misc_feature (495)..(495): "n" may be a, t, c, g, other or unknown
  misc_feature (562)..(562): "n" may be a, t, c, g, other or unknown
agccgtagccagatccgttgaaaggagtgcagagaggtctcattgcgctcccgaacagacctgacgtagatccgaagtggcccgcgccatctcaactatgaggggacacccgtaggcggcgggagagggacgccgcgaggagccaataaagctccgcaaccggaagtgtcttctgggaggggtcgtacccggaagtgtggcacctcccgggccgcacccggaagtgtgatgccaccgccgctacggggaagtaatggtatccggccaattgagattcggagttaaaacagggatgtgcagatggaggtcggaggagacactgctgccccggcccccgggggcgcggaggacttggaggacacgcagttccccagtgaggaagctagagaaggtggaggggttcacgcggtcccgccggatcccgaagacnagggcctggaggaaacaggatccaaggacaaggaccagccacccagcccatcaccaccgncccantcagaggccctgtcaagcacctctcggctctggagtcctgcacccctgagaatagtcccacatgtanccctga

SEQ ID NO: 4021 - DNA, 603 bp, Homo sapiens
  misc_feature (588)..(589): "n" may be a, t, c, g, other or unknown
  misc_feature (601)..(601): "n" may be a, t, c, g, other or unknown
aaaaggtaatgtatggaaaggaaccaaccatctgaaataatagtcctaaatccaactagataatcttttaaagctgtaagagtcagagatggagatttctaaactttcaaagaaaacttgattgcaaatgagaaacctgtgcatttttgaatgcttattgaatttgaatgtctgtgtgggccaaaaagaatcagagggacaaatggaaggcaggaaagaaaaggtgtaaattttagatgtgttttaaattaatgtatttaatgacatattagactcattacaattttattgactttccctttacatttgaatgtaattttttactagccgatgcaagctgcaaaatggcgagtcttctaaggtgcctttccttccctgggatcctcatcttagaatgagcagaggcacatcgataagaactggaccttgatttcacaacctcatacaaagccaggcaattcttgagccaaacaaagggggtgtaagctatttcatttattttgataatcctcctcttgcacgggagcattttgctgtctttgtcaaagtgaatgacaacaatttggccaactctctcttgggaaaagnnccccttttgggncc

SEQ ID NO: 4022 - DNA, 598 bp, Homo sapiens
  misc_feature (159)..(159): "n" may be a, t, c, g, other or unknown
  misc_feature (586)..(587): "n" may be a, t, c, g, other or unknown
  misc_feature (598)..(598): "n" may be a, t, c, g, other or unknown
tccttgcacaccatggcagcctctccttgcaccttctcctgcctctccacactccaggttccctcaggcttgtgtccccactgctgcatcgtggcggggtgtcacagaccctctgcagcccctggctgccctggactgtgcagagatgcctgactccanggaaacctgaaagcaagaagttaatggactgtggccttctgtgacgcgcagtcgacgcaggaaatccacgagaaggttctaaacgaagccgtgggcgccatgatgtaccacaccatcaccctcaccagggaggacctggagaagttcaaggccctgagagtgatcgtgcggataggcagtggctatgacaacgtggacatcaaggctgccggcgagctcggaattgccgtgtgcaacatcccgtctgcagccgtggaagagacagcggactctaccatctgccacatcctcaacctgtaccggaggaacacgtggctgtaccaggcactgcgggaaggcacgcgggttcagagcgtggagcagatccgcgaggtggcctcgggagcggcccgcatccgtggggagacgctgggcctcattggggggnnccctttttttn

SEQ ID NO: 4023 - DNA, 650 bp, Homo sapiens
  misc_feature (570)..(570): "n" may be a, t, c, g, other or unknown
  misc_feature (603)..(603): "n" may be a, t, c, g, other or unknown
  misc_feature (624)..(624): "n" may be a, t, c, g, other or unknown
caggagggcccatgtgcttaccctgttttgcccacgaagaaacagctcagtgttgcgggtcaatgcccacatcacacagcatctagcacgtaactgcaccccgggagtcgtgggcatctgctggcctcctgccggtctcctgccctgctgacagcttgctgtgccgcctgcctgccccagtacgagcgggccctggacgtggcggcagagcccaagcacgagcggcagcgccgagcccagatacgcaagaacatcacggagactctggtgtccctgagggtccacactgtggatgacatccagcagatcgctgctgcgctggcccagtgcatggggcccagcagggagctcgtatgccgctcgtgcctgaagcagacgctgcacaagctggaggccatgatgcgcatcctgcaggcagagaccaccgcgggcaccgtgacgcccaccgccatcggagacagcatcctcaacatcacaggagacctcatccacctggccagctcagacgtgcgggcaccacagcgctcagagctgggagccgagtcaccatcgcggatggtggcgtcccangcctacaacctgaccactgccctcatgcgcatnctcacgcgctcccgcgtgctnaacgaggagcccctgacactggcggc

SEQ ID NO: 4024 - DNA, 775 bp, Homo sapiens
  misc_feature (685)..(685): "n" may be a, t, c, g, other or unknown
  misc_feature (720)..(720): "n" may be a, t, c, g, other or unknown
  misc_feature (767)..(767): "n" may be a, t, c, g, other or unknown
tttgtgatgcagctcgccaggcctacggggaggtaaaggacttgccaggctgaagtaacttcagaagcagaaaaacggaggattaaaaccacaagtcgttgtgatgtgaaatttcgtggggcaagaaagggccggaagtaggtagtctgcacggctctgctagagagaggatcacaagatcacacaaatgtgatctacttatgactggaaaaaatgtgtactttcagagccagcttgaggcattccattgcctccaatatgagctcttcccttcaagattgactataaatctcttagttacaactcacatcccctttccccagacaaaaccccacatagcccggtgtgtatttactgaaagcagtaagatactgctggggctttgggtgcaagatggagagtgctcagagataatgacaggggcctggtcctgcagggccttacgtagaaagtcaaggaatttattctctgagcaattgaaaatcatcccgaaagatctgcattttagaaataccatgttgagtagttgcataagaaaccagttaggaggcccctttttattggaggtagagaataatgagagactgaactacagaagtggggaaggaagacagctgtagatccaagaaatagtatccggaagagaggcttgagaagtgatcaaggagaattccacagttatcanagaccctgtcttccttgttcaccactatattaccngaacataatacaaataatgctattggtattgggtggcattatttggntagtaggt

SEQ ID NO: 4025 - DNA, 623 bp, Homo sapiens
  misc_feature (503)..(503): "n" may be a, t, c, g, other or unknown
  misc_feature (529)..(529): "n" may be a, t, c, g, other or unknown
  misc_feature (614)..(614): "n" may be a, t, c, g, other or unknown
  misc_feature (621)..(621): "n" may be a, t, c, g, other or unknown
ctggttcttccagctggactctagtgcagctgagctcctcccccagccccggctctgtccctgcaccaggtgtccagcaggccctggaatccgcaaaggcagaaggggaagttggggtgctgggtgctgggcagggggtgctgaggcctcacagcccggcggcttggcccccacccaccccacggtggtcccgcgccccacacttcctctcctctcctgtggtttctccttccactcagtgcctccccctcgggtagatcctactaacagcatcaaagaaataatgaaataatctctccttggtgtgttcttaccgtcctaataggcacaaggggactcttcagtgcattttccaaaacctgtacaaactctcttgacataaatgcagtgagtttacaataaaatcgcagtgggaggtaacgtcaggcttcagaggcagacatggtcctggagcctttgggaggggaggagaggagaggcagcgggcgcggggcggcgtccanggggctgaacgaggtctgggcaggangacagagctgaccttgggctgccctggcccctgcgcaggacacacagtgaccggggctggggtgggcaccccggttctaccgtcnggagtcngc

SEQ ID NO: 4026 - DNA, 622 bp, Homo sapiens
  misc_feature (582)..(582): "n" may be a, t, c, g, other or unknown
  misc_feature (590)..(590): "n" may be a, t, c, g, other or unknown
  misc_feature (622)..(622): "n" may be a, t, c, g, other or unknown
tactgtgtccggagaaactgtgattatacaccgcttctcgttccccttcctgtgccctcagtgttaattcactttataaaaatataaatatataatatatttttctttttacaaataagccaatggagataatttagtattactaacatagtatttataggcttaagacaaatgtacttgtgggcgatcaaatgtaattactgttacagactttacaaaaccgtacgtggttctcaggcaacacaaagtagagagggaattctgttttttaaaaactgtcaaaaaggaaattgagagtcatcctagacttaacatgcttgcgtcctcaactcctgcttttcgttcccaccccaactccccttttttgtctccttaataaatggctttatttttttaatttttaaaattctatattaatcaagaggagacattaactttactgctgacgcaaaactgtattcagctagatccacaatatgaaaatgtataagctcaacatcaaattatttacatcttctcttttttaacttaattagagttttagctcctgtgcctcattttttacaatgtatgagaatctanatgtttanctaacatcttttctttttggggggaaagggtn

SEQ ID NO: 4027 - DNA, 796 bp, Homo sapiens
  misc_feature (743)..(743): "n" may be a, t, c, g, other or unknown
  misc_feature (760)..(760): "n" may be a, t, c, g, other or unknown
  misc_feature (795)..(795): "n" may be a, t, c, g, other or unknown
gcggtaggtgccggttggggccggctgtgattgttatcttggtgctgcagaggacagcagaagaggagattgggtcagaaaactgccctgccgcaccagagcacagcgcactagtgggacaggggtcctgactcagacttaactggctgtgtctcgtggtttttcactgtcctggaaaaggcctgaagtggcactgaaatgaggcatagatgagtccccacgacagtccggtttgtagattccctgatctgcaattcttcccgttccttcatggatttgaaggctctcctttcttccttgaatgactttgcatccctctcgtttgctgagagttgggacaatgttggattactggtggaaccaagcccaccacatactgtaaatacactcttcctgaccaatgacctgactgaggaagtgatggaggaggtgctgcaaaagaaggcagacctcattctctcctaccatccgcctatcttccgacccatgaagcgcataacctggaacacatggaaggagcgcctggtgatccgggctctggagaacagagtcggtatctactctcctcatacagcctatgatgctgcgccccaaggcgtcaacaactggttggctaaagggcttggagcttgtaccttcaggcccatacatccttccaaagctccaactaccctacagagggaaaccaccgatagaattcaacgttaactacacccaagacctggacaaagtcatgtctgcantgaaaggaattgacggngtttctgtccttcttttctgctaggactggtaatna

SEQ ID NO: 4028 - DNA, 541 bp, Homo sapiens
  misc_feature (486)..(486): "n" may be a, t, c, g, other or unknown
  misc_feature (535)..(535): "n" may be a, t, c, g, other or unknown
  misc_feature (539)..(539): "n" may be a, t, c, g, other or unknown
attggagttcagctaccaaaaggaaaccttcctctgggtcctggagtatttggcctgaaattgggaactcggaagttgctgctccagggcgctccctgcggagctccgccgcccgcctctccgcccggcctttcccggcgtccccacgcggggcgcaaccgcgagaaagaaacgcaggtcgcaccgtcagcgcccagagcagcgccagtttccgggcccgggctgctctcggagccatgagctgcggccgcccccctcccgacgtggacggcatgatcaccctcaaggtggacaacctgacctaccgcacctctcccgacagcttgaggcgcgtgttcgagaagtacgggcgcgtgggcgacgtgtacatcccgcgggagccccacaccaaggcgccccggggcttcgctttcgtccgctttcacgaccggcgcgacgcccaagacgccgaggccgccatggacggggcggagctggacggacgcnagctgcgggtgcaggtggcgcgctatggccgccgggacctgccccgcanccgnca

SEQ ID NO: 4029 - DNA, 762 bp, Homo sapiens
  misc_feature (666)..(666): "n" may be a, t, c, g, other or unknown
  misc_feature (756)..(757): "n" may be a, t, c, g, other or unknown
gagtgtccagtacaatggataaaaataaatccattatcaacacatcactaacatttcaaaatcttcatggagaagattctgtaagtttctggggagagagagaaaaaatacatcacatacagaggatcacttaccaggactgctttgaacttaatagcaatggtaaaagcaaacagacaagcaactacttcaaaatgttgaaaagaaaattatttccagctttcaattctatactcagacaagctatcaaacaaatagagggagccagccatttttagacatccagggtctcatttaccttccatgtacccttttcaagaagttaggatgtgctccacagaaacaaaaataaaaccaggaaatggaacactttggaatgtagaaaatgggataatcaacatagaggataggcaagaggaatttctgggagcatggtcaagtaggattccagcaccacagttgtgcttcttgatgtagagagcagtcagtccagaatcaagcagcatgactcacattgatggctattatcactaagatccctgctgccattgtatcatctttttaatctgaggacattatgcccaggcaagcctggctcagattcttaccggtatttgccttgtcttgaccatgtggtgatgaaattcctgctctcttctgtgctgngctgctggccaactgaggacactcatttttacccttctttttcaacctattcctgaaagctgatgttgggccgttggtgagcttaaagcnnaaaat

SEQ ID NO: 4030 - DNA, 704 bp, Homo sapiens
  misc_feature (667)..(667): "n" may be a, t, c, g, other or unknown
  misc_feature (674)..(674): "n" may be a, t, c, g, other or unknown
  misc_feature (679)..(679): "n" may be a, t, c, g, other or unknown
gtgtgaacgtgctgccgccgatcagtcacccagtcggctggagtcggaggcgatatttctaggggtgtacttgttggggtcagggtaagcaccagccacaaaaacctacaaaagaagggaaattactgtctttaaatattaaaaaaaaacaagatccatgagtgggcatcgatcaacaaggaaaagatgtggagattctcacccggagtccccagtgggcttcgggcatatgagtactacaggatgtgtattaaataaattgtttcagttaccaacaccaccattgtcaagacaccaactaaagcggctagaagaacacagatatcaaagtgctggacggtccctgcttgagcccttaatgcaagggtattgggaatggctcgttagaagagttccctcctggattgccccaaatctcatcaccatcattggactgtcaataaacatctgtacaactattttattagtcttctactgccctacagctacagagcaggcacctctgtgggcatatattgcttgtgcctgtggccttttcatttaccagtctttggatgctattgatgggaaacaggcaagaagaaccaatagtagttctcctctgggagaactttttgatcatggctgtgattcactatcaacagtttttgtggttcttggaacttgnattgcantgcanctggggacaaaccctgattggatgt

SEQ ID NO: 4031 - DNA, 546 bp, Homo sapiens
  misc_feature (466)..(466): "n" may be a, t, c, g, other or unknown
  misc_feature (506)..(506): "n" may be a, t, c, g, other or unknown
  misc_feature (530)..(530): "n" may be a, t, c, g, other or unknown
gtgtgctccacttaaatgagaaaagcaacgagcaataagcccagggtgaagatttggttacataccctgcttctcaggttttgcttaagtttagcgcccaccaggaagaaagaaaacgattatctgcctccttgacttttgcatcatttgtctttcttctgatgaaagtgggactaatcactgagttagggtttccttatttttagtctacaccatgttgctttatcctaaaaggataaatatgggctgtgtgatggttgaccacctttcttcttccttctatgaaggtctgaaagggcacaagacaggtaaaaaggaaacagcttttctttagtaactaagttgctagatttttgatctcatggccctgagctacacgtgaatgactttgacctgtaatctgaaataagatagacttcagagttcacctctcccaccatttcactccaaaggtgagataaggtanagttgctaaaggtcagtatgaagggcatgtggcattttantgttgacagtatgccagctctaanacctgcttcttcatct

SEQ ID NO: 4032 - DNA, 653 bp, Homo sapiens
  misc_feature (590)..(590): "n" may be a, t, c, g, other or unknown
  misc_feature (602)..(602): "n" may be a, t, c, g, other or unknown
  misc_feature (643)..(643): "n" may be a, t, c, g, other or unknown
tgacctaagaggtgagaaggaaccaccctccctagagtcttaggtactgtgaagcatggcatccactctgcaaaccattaaattcgaatccccatttgttgggtgatttatgtggcactcctggggccccatgaagcaattatatacaatcataccgttcaccacttgtgaattcggtagcagtatgatgtattgactgaggacaaagtcacaggtttgatctcggtgctctgctttgttcctgaccagattaaactggggaaaaagttggaaatggttctgcaaaaatctgtcaccatggtgggaaaaacctaggctcatttccttctgctgatgggtctgtgttgcatctagttttactttcaaacagctgcagatatcctggaaatgggaagtggaagtgtctgaactatagaggaaacaaggcccaggaaaggatttctccagccacgtggagctccctgagcttcctaaagataggagtcccacccttccaacctccatccatgaatagcaccaacatccacccagttgttcaagccagaaacccatccttcacttcttcctcccttccctttaccttccacatncaaatccatcancgagttcacttatagccgctgcaatcatcctgaatctctgnatctcatcct

SEQ ID NO: 4033 - DNA, 690 bp, Homo sapiens
  misc_feature (660)..(660): "n" may be a, t, c, g, other or unknown
  misc_feature (673)..(673): "n" may be a, t, c, g, other or unknown
  misc_feature (689)..(689): "n" may be a, t, c, g, other or unknown
gcgtcccgggagcccggcctcgtgcgccgcgctttgagcagcagactgctcgacaaacactgcgccaagagctcctcagcagaagctcctcgcatcagatcctctgtgctgggaatcctcccctcttgagcacactctgtgctcctcttccagttacggtgcatgtgaagcaatggtatgggaaaattgtttgcagaaggatgaaaaggctttattgccaaactgaacacaggactcaccgctgtagatacttgcagaagcactgaagctcctggagggtctcctttgcagtctggaagattccctccacgagaaacaagtccactaagtgggcacagacatcctcacagcaacgggccacacggaccctctggtctgtctctactgcattcctagaaacagggcaatcagcatggaagacactgcacttggggcccacagacactgagggcttgcttgaaaagtgcaagagtcagtcaggcgcggtggctcacgcctgtaatcccagcactttggaaggccgaagcgggtggatcatgaggtcaagagatccagaccatcctggctaacatggtgaaaccctgtctctactaaaaatacaaaaaaattagcctggtgtggtggcggcgcctgtagtcccagctactcgggaggctgaancaggagaatgacntgaagcccggaggcana

SEQ ID NO: 4034 - DNA, 605 bp, Homo sapiens
  misc_feature (563)..(563): "n" may be a, t, c, g, other or unknown
  misc_feature (577)..(577): "n" may be a, t, c, g, other or unknown
  misc_feature (580)..(580): "n" may be a, t, c, g, other or unknown
agctagctttgcaatatggcggccgaggcggacggaccgcttaaacggctgctcgtgccgattcttttacctgagaaatgctacgaccaacttttcgttcagtgggacttgcttcacgtcccctgcctcaagattctcctcagcaaaggcctggggctgggcattgtggctggctcacttctagtaaagctgccccaggtgtttaaaatcctgggagccaagagtgctgctggattaaaaaaggaggatgaggcccgtcccgtgaggtctgcgtccatgagggttagaggtgggttaggggcatgggggcaccagcaaggggagggttgtatggagtgggagagccagggggcaggtagtgggtataggtgggcagcagttccccctggagcctagggtcactctgagggagggagcacggtgagggggcttccagtttgcagtgggaagagctgcagagagaaacaagaggttagagggcacttccctgggttggaggtgagtctggccagttctgggcagacagggtagagcgtgccacccacccagccctggctacccancccgctgggcgcancangcatggaagccgaccccgggatgga

SEQ ID NO: 4035 - DNA, 637 bp, Homo sapiens
  misc_feature (528)..(528): "n" may be a, t, c, g, other or unknown
  misc_feature (615)..(615): "n" may be a, t, c, g, other or unknown
  misc_feature (628)..(628): "n" may be a, t, c, g, other or unknown
  misc_feature (635)..(635): "n" may be a, t, c, g, other or unknown
atgttgtcccctcagcgagtggcagcagctgcctcaagaggagcagatgatgccatggagagcagcaagcctggtccagtgcaggttgttttggttcagaaagatcaacattcctttgagctagatgagaaagccttggccagcaccctcttgcaggaccacatccgagatcttgatgtggtggtggtttcagtggctggtgccttccgaaagggcaagtccttcattctggattttatgctacgatacttatattctcagaaggaaagtggccattcaaattggttgggtgacccagaagaaccgttaacaggattttcctggagagggggatctgatccagaaaccactgggattcaaatctggagtgaagttttcactgtggagaagccaggtgggaagaaggttgcagttgttctgatggatacccagggggcatttgacagccagtcaactgtgaaagactgtgctaccatctttgctctaagcactatgactagttctgttcagatttataatttatctcanaacattcaagaagatgatcttcaacagctgcagctcttcacagaatacggtcgtctggcaatggatgaaattttccaaaagcctttncagacactgatgnttttggnta

SEQ ID NO: 4036 - DNA, 659 bp, Homo sapiens
  misc_feature (514)..(514): "n" may be a, t, c, g, other or unknown
  misc_feature (635)..(635): "n" may be a, t, c, g, other or unknown
  misc_feature (647)..(647): "n" may be a, t, c, g, other or unknown
  misc_feature (655)..(655): "n" may be a, t, c, g, other or unknown
aggaagtgcgcgcggccccgcccccgccggttcgcgtctctctgctgcggcgcggggaccgctgtgctctcggaagccatcttcgacaagagcacagggaaggttgttttgaagacgttcagcctctacaagaagctgctgactcttttcagagctggccacgaccaggtggtggtcctgctccatgatgtccgtgatgtgagcgtggaggaggagaaggtccggtacttcgggaaaggctacatggtggtgctccggcttgcgacgggcttctcccaccccctcacgcagagtgcagtcatgggccaccgcagtgatgtggaagccatcgccaagctcatcaccagcttcctggagctgcactgccttgagagccccacagagctgtctcagagcagcgacagtgaggccggtgaccctgcaagccagagctgacagccccactgtgcctgagcccgtgcaccgcccacaggacccatggcacattcccggtgtgcctgagcccgtgcaccgnccacaggacccgtggcacattcccggtgtgcctgagcccgtgcaccgccacaggacccgtggcacattcccggtgtgcctgaacccgtgcaccgccacaggacccgtggcacattcccggngtgcctgacccntgcaccgncaca

SEQ ID NO: 4037 - DNA, 695 bp, Homo sapiens
  misc_feature (530)..(530): "n" may be a, t, c, g, other or unknown
  misc_feature (569)..(569): "n" may be a, t, c, g, other or unknown
  misc_feature (657)..(657): "n" may be a, t, c, g, other or unknown
  misc_feature (671)..(671): "n" may be a, t, c, g, other or unknown
  misc_feature (691)..(691): "n" may be a, t, c, g, other or unknown
agtaggaagccgcggggtggtggcgagagaggacccaggtgtcctagcagtgggcgccgcggggcacacgctgggccaaggtgcaggcggccagggtgggagactgttcgccccgccctgagtactcctatcttgtttctccacctgttcgggagttggagatgtgcacctaaaggaggcgcatctggggacggacacatctggcactgaggccctcgccacctgcctcgccacctggcgaccctgaccccaccacactgccttgaggtaggaaaaggaggctcctcaaccacaacttctgacctcccagggtgtctgaggcctctaaagagcttagtttgcccctctgggaagtgaatccttggcttatggtgccggggggaccctggaggccccctcacacgaaggctgcttcttgcagagtcgctcaaaagtagggccccagggctcgcagcagcatgggcaccgagaaagaaagcccagagcccgactgccagaaacagttccaggctgcagtgagcgtcatccanaacctgcccaagaacggttcttaccgccctcctatgaanagatgctgcgattctacagttactacaagcaggccaccatggggccctgcctggtcccccggcccgggttctgggaccccattggacnatataagtgggacncctggaacagtcttggcaanatga

SEQ ID NO: 4038 - DNA, 483 bp, Homo sapiens
  misc_feature (72)..(72): "n" may be a, t, c, g, other or unknown
  misc_feature (156)..(156): "n" may be a, t, c, g, other or unknown
  misc_feature (443)..(443): "n" may be a, t, c, g, other or unknown
  misc_feature (449)..(449): "n" may be a, t, c, g, other or unknown
  misc_feature (468)..(468): "n" may be a, t, c, g, other or unknown
accctcggcgcgccgcgcgggatcagcgtcctccagccgcgctgccccggcccaccgtgcagctgtagccgnggcgcggtggcgcggtggcgcagggcgctgctgggccgtccattgttgagcgcgttgggccccgccggcgatgccgagcgccgncttctcggagcggcggcgaagtttgaacttggcgtcggcctggagccccgagcagcccgggggcggctgccgtgaggcgagcggcgatgagatgtgtgcacagacccatgccatgcagatactggtgcctctaacttcgtcagcccttagaacatgacttgctgtccccagtggagaagaaaccagaagctacagccaagtatgtcccctccaaagtccatttctgttcagtgcctgaaaatgaggaggatgcctccctgaagagacatctcacacctccccaaggnaacagnccacattccaatgagaganagagcacccccacct

SEQ ID NO: 4039 - DNA, 617 bp, Homo sapiens
  misc_feature (558)..(558): "n" may be a, t, c, g, other or unknown
  misc_feature (574)..(574): "n" may be a, t, c, g, other or unknown
  misc_feature (606)..(606): "n" may be a, t, c, g, other or unknown
actctgccccacagccacagcccctgactgccgcagcccccacagagcccgccgcgcaccccacgtcccccacgccagcgcccagccatggaggccatcaagaagaaaatgcagatgctgaagttggacaaggagaatgccatcgaccgcgcggagcaggcggaggcggataagaaagccgctgaggacaagtgcaagcaggtggaggaggagctgacgcacctccagaagaaactaaaagggacagaggacgagctggataaatattccgaggacctgaaggacgcgcaggagaagctggagctcacggagaagaaggcctccgacgctgaaggtgatgtggccgccctcaaccgacgcatccagctcgttgaggaggagttggacagggctcaggaacgactggccacggccctgcagaagctggaggaggcagaaaaagctgcagatgagagtgagagaggaatgaaggtgatagaaaaccgggccatgaaggatgaggagaagatggagattcaggagatgcagctcaaagaggccaagcacattgcggaagangctgaccgcaaatacnaggaggtagctcgtaagctggtcatcctgganggtgagctgga

SEQ ID NO: 4040 - DNA, 670 bp, Homo sapiens
  misc_feature (622)..(622): "n" may be a, t, c, g, other or unknown
  misc_feature (624)..(624): "n" may be a, t, c, g, other or unknown
  misc_feature (663)..(663): "n" may be a, t, c, g, other or unknown
tcatgtgctctgacgccctcccattaggtgcatccaagctgcaatgcccacttcctcctggcaggggggacccgcaggcaccttctgctcagaggtgcacttgtctggtggccctgctccttcctggtactgttgacctttctgtgtgtttgttttaaatctcttgcatggtaaatagctgcattttgttactgataagagtgagtttaaatccactgtcatatcttttgcgtctttgttacacattttgttttttaaaaatcttctttcttgtccttttttagattgacagtgtccctcttacctcactttctccactcagtttgtaatcctgcagtctgttgcttttcttttagcgtttgccctaaaggtggctgcatgtgtcctcactgaagtccagcatgggccccaaatgcaggctgaggtctgggtctggctgggctgctgggcgcccgagtcatcatgaccattgttcctgggcacagccggcgttgacttgtatttcctccgtgattaccgcctggctcatcaatcactgttttcgttttccgtggaggcgtggctcacacaaagggcaagcacggagtcactgggtcctgcaggactttccaggtcaaggcanangaggtgtccggccccaacaggctcctgtgtgcccctcantccccta

SEQ ID NO: 4041 - DNA, 653 bp, Homo sapiens
  misc_feature (619)..(619): "n" may be a, t, c, g, other or unknown
  misc_feature (633)..(633): "n" may be a, t, c, g, other or unknown
  misc_feature (639)..(639): "n" may be a, t, c, g, other or unknown
caaggagaatgcgctcttcaagcggatcttgaggtgttatgaacataaacagtatagaaatggattgaaattctgtaaacaaatactttctaatcccaaatttgcagagcatggagaaaccttggctatgaaaggattaacattgaactgtttggggaaaaaggaagaagcttatgaattggttcgtagaggtttgagaaatgacttgaagagtcatgtgtgttggcacgtttatggccttcttcagaggtcagacaagaagtatgatgaagccattaagtgttacagaaatgcactaaaatgggataaagacaatcttcaaatcttaagggacctttccttactacagattcaaatgcgagatcttgagggttacagggaaacgaggtatcagttacttcagcttcgacctgcgcagagagcatcatggattggttatgctattgcttaccatttattagaagattatgaaatggcagcaaagattttagaagaatttaggaaaacacaacagacatcccctgacaaggtggattatgaatatagtgaactactcttatatcagaatcaagttcttcgggaagcaggtctctatagagaagctttggaacatctttgncctatgaaaagcanatttgngataaacttgctgt

SEQ ID NO: 4042 - DNA, 721 bp, Homo sapiens
  misc_feature (697)..(697): "n" may be a, t, c, g, other or unknown
  misc_feature (707)..(707): "n" may be a, t, c, g, other or unknown
  misc_feature (721)..(721): "n" may be a, t, c, g, other or unknown
aaaacccagtgactcacctccgccgtgctaactcctcgctagctctccctctcacacacgctcacacccggctcgagatggcggcggcggcggcggcggcgggggactcggactcctgggacgccgacgccttctccgtggaagacccagtgcggaaggtggggggcggcggcactgccggcggggaccgctgggaaggcgaggacgaggacgaggacgtcaaggataactgggatgacgatgatgatgaaaaaaaagaggaagcagaagtaaaaccagaggtaaaaatttcagaaaagaaaaaaatagcagagaagataaaagagaaagaacggcaacagaagaaaaggcaagaagaaattaaaaagaggttagaagaacccgaagaacctaaagtgctaacaccagaagaacaattagcagataaactgcgactaaagaaattacaggaagagtcagacctcgaattagcaaaggaaacttttggtgttaataatacagtttatggaatagatgctatgaacccatcttcaagagatgactttcagagtttggaaagttactaaaagataaaattacacaatatgaaaagtcactatattatgccagttttttggaagtcttagttcgagatgtgtgtatttcattggaaattgatgacttgaaaaaaattccaattcactgctgtgctttgcantgaaaaacanaagccagaaaagcn

SEQ ID NO: 4043 - DNA, 699 bp, Homo sapiens
  misc_feature (647)..(647): "n" may be a, t, c, g, other or unknown
  misc_feature (663)..(663): "n" may be a, t, c, g, other or unknown
  misc_feature (676)..(676): "n" may be a, t, c, g, other or unknown
attctcgggagaggaatcggttaggagaagggggattcctcactcagctgtgcgctctgatttcgtgcgcttcctcgtccttcatgttggatggccagtttttcgtttgtgcgtcatcctctacctgagaaatggtcgcttgcccctagtctagacacgcattaaagggcagtatttaaagtcagttggcaagcagtggaataagatttttgtaaagaaaccttgtgcagcatggattctctaccagatgaattttttgtgaggcatcctgctgtggaggatcagaggaaggaagaaactgagaataagctagaaaaatcatctggtcaactgaacaaacaggaaaatgacatacctactgatcttgtccctgttaacctactattagaagtgaagaagttattaaatgcaattaatactctaccaaaaggtgtggttcctcacattaagaagttcttacaagaagatttttccttccaaactatgcagagagaagttgcagctaacagccagaatggtgaggaaattgttcctgctttgactttacgtttcttgattacacagctagaagcagcacttaggaacattcaagctggcaattataccgcacaccagattaatattggttattatttgacattactggntttatatggagtagcnctcactgaaagangaaagaaagaggattattcagaa

SEQ ID NO: 4044 - DNA, 647 bp, Homo sapiens
  misc_feature (575)..(575): "n" may be a, t, c, g, other or unknown
  misc_feature (628)..(628): "n" may be a, t, c, g, other or unknown
  misc_feature (638)..(638): "n" may be a, t, c, g, other or unknown
attgagattacttcagtggatcttgctctgggcaatgagacgggaagatgtgtggttttaaattggcagggaggaggaggagatgctgcttcctcccaagaagccttacaggcagctcggtccacaatgatcatatccagagtcccaaacatttctgtacatctgctacatgaaccccctgcactgactaatgaaatgtattgtttggttgtgactgttcagtcccatgaaaagacccaaatcagagatgtgaagctcactgctggcttaaaaccaggacaggatgccaatttaactcagaagactcacgtgactcttcatggaacagaactgtgtgatgaatcctacccggctttactcactgacattcctgttggagacttacatccaggggaacagctggaaaaaatgttgtatgttcgctgtggaacagtgggttccagaatgtttcttgtatatgtttcttacctgataaatacaaccgttgaagaaaaaggaattgtttgcaagtgtcacaaggatgaaactgtaacaattgaaacagtctttccatttgatgttgcggttaaatttgnttctaccaagtttgagcacctggaaagggtttatgctgacatcccctttctgntgatgaccgnccctcttaa

SEQ ID NO: 4045 - DNA, 758 bp, Homo sapiens
  misc_feature (701)..(701): "n" may be a, t, c, g, other or unknown
  misc_feature (715)..(715): "n" may be a, t, c, g, other or unknown
  misc_feature (753)..(753): "n" may be a, t, c, g, other or unknown
gctccaactcctgcagagctgagccggaggggaatccggaagggacacgctgaacaggcacagaaatgaataaaagtcgctggcagagtagaagacgacatgggagaagaagccaccagcagaacccttggttcagactccgtgattctgaagacaggtctgactcccaggcagcacagcccgctcacgattccggctacggtgatgacgagtctccgtcaacctcgtctggcacagctgggacctcctctgtgccagggctacctgggttttactttgaccctgaaaagaaacgctacttccgcttgctccctggacataacaactgcaaccccctgacgaaagagagcatccggcagaaggagatggagagcaagagactgcggctgctccaggaagaagacagacggaaaaagattgccaggatgggatttaatgcatcttccatgctacgaaaaagccagctgggttttctcaacgtcaccaattactgccatttagcccacgagctgcgtctcagctgcatggagaggaaaaaggtccagattcgaagcatggatccctccgccttggcaagcgaccgatttaacctcatactggcagataccaacagtgaccggctcttcacagtgaacgatgttaaagttggaggctccaagtatgggatcatcaacctgcaaagtctgaagacccctacgctnaaggtgttcatgcncgaaaaccttactttaccaaccggaaggtgaattcggngtgct

SEQ ID NO: 4046 - DNA, 492 bp, Homo sapiens
  misc_feature (476)..(476): "n" may be a, t, c, g, other or unknown
  misc_feature (483)..(483): "n" may be a, t, c, g, other or unknown
  misc_feature (492)..(492): "n" may be a, t, c, g, other or unknown
gttgtatatgctttttttttttccaaataaacttgtcaccctgcatgcccttggcaaataagtgaagcagaaataggaacacagtccacattcaagttgaggaacagtgtatctttaagagctgacctttgggtgacctggaaagggggaaagatggctaagcatggagagaaacgaggcaagagacaagctatgatacaacaccgcttcagcccctgccctcaatagcacacaacccacatatcagctttctctagagaaggaacctactgtttagtgctcctcactttgcaatgtttgtgctacgccagaatttctccagtttttttcattatcatccccctgagaaaaaaattacattgaatttaaattttccctaataagagaaattaaatatgaaagaataggattttgttgggtaagattgagctttggaaggtcacgaaccattattctatctaaggtgtgtgttttgntttggtnttttttggn

SEQ ID NO: 4047 - DNA, 386 bp, Homo sapiens
  misc_feature (250)..(250): "n" may be a, t, c, g, other or unknown
  misc_feature (340)..(340): "n" may be a, t, c, g, other or unknown
  misc_feature (347)..(347): "n" may be a, t, c, g, other or unknown
  misc_feature (374)..(374): "n" may be a, t, c, g, other or unknown
gagtctggcctgcctgggctcggggtggggggtgtttacagacgcaccaaggcaggagagatggaagccgcccagagaactgccactccataacctgtgggcatccaggggtgagcggcagcgatggcgtcccatggaggaaacacactggaaatcgtgcagaaaatgggaagatgcaggctggagtgcggagaaagactgagaccctgcctggtagacggcaccgtcacagcagccgtctgcctgctangaggagcgtctccaccagcaacaggccggcccctgagggagacagcagagagctggagtcctggccagccaggcggggatccttcagcangacacangggacacagcaggcaacaggagctcanaacgctctcagc

SEQ ID NO: 4048 - DNA, 712 bp, Homo sapiens
  misc_feature (639)..(639): "n" may be a, t, c, g, other or unknown
  misc_feature (693)..(693): "n" may be a, t, c, g, other or unknown
  misc_feature (700)..(700): "n" may be a, t, c, g, other or unknown
tgttataggtgagacagttgtagtaacatctttctaagtagacacaaccttaaacaagatgaatatgtttttataatgtgctagagcagcttgtgtgtaggacttaagtatgtatcactaaaacctgaaacttaaatttttctgaaacagaagcagtgaagattctccctggtaacaacttaagtaaatcaagccaacaaatacgagtccaaataaacatttaatgagaaaatactgcctactttttaattttattgttaatatccttttgtattctgtaataattactgcatgtggagtgatttatccttcacctttggtgatctggtaacttagcagaatgcttgtctgcagaacaggtatgtgctaaatgctgaaaagcaaaggacattcagtctcactaaaaatgtctcccaacaagcaggctgctggggggtttgtagcgcttgtagggtggctgagttatttctttctgcaaacactcctgtcagcattatagagacttgcactatctgttaagtaaatgtgacttaggagaaggaatgacaccacccattcatggggtcatggctgcaagttactgccctactggttttctctttacctgataactctcaataattctaaagtttatcttanagaaaagtctttgagtcacctattttggaatttgagcccatgaaatgataagcncctgcantttggatcacgt

SEQ ID NO: 4049 - DNA, 675 bp, Homo sapiens
  misc_feature (619)..(619): "n" may be a, t, c, g, other or unknown
  misc_feature (631)..(631): "n" may be a, t, c, g, other or unknown
  misc_feature (658)..(658): "n" may be a, t, c, g, other or unknown
acacggcgggggcgccctcggaggcaccggacctcagctctctggacttcccgggaacctggctccccgcgcgtggtcccgggatttagtcgggcgctccccacctctggcagctgcggccccggactccgccagcgctgtcttctctccctcaggtccagccgccgcagggaatgacgccggtgctcctacagccacggctccgggcggggaaggcgagccccacagccggccctgcgacgcccgcctgggcagcaccgataaggagctgaaggcaggagccgccgccacgggcagcgcccccacagcgccagggaccccctggcagcgggagccgcgggtcgaggttatggatccagcgggcggcccccggggcgtgctcccgcggccctgccgcgtgctggtgctgctgaacccgcgcggcggcaagggcaaggccttgcagctcttccggagtcacgtgcagccccttttggctgaggctgaaatctccttcacgctgatgctcactgagcggcggaaccacgcgcgggagctggtgcggtcggaggagctgggccgctgggacgctcttggtggtcatgtcttggagacgggctgatgcacgaagtggtgaacnggcttatggganccggcctgaactgggaagaccgccatncaaaaagcccctgggta

SEQ ID NO: 4050 - DNA, 633 bp, Homo sapiens
  misc_feature (562)..(562): "n" may be a, t, c, g, other or unknown
  misc_feature (572)..(572): "n" may be a, t, c, g, other or unknown
  misc_feature (600)..(600): "n" may be a, t, c, g, other or unknown
gtctcttcatttgtgatacgtaaagtccgttgttacctagataaatgtaggtttgatttcttggaagcaatcacttaagactttccattttcttcaaagcatcttacttaacctgcatgtgggatctgtactgagcaattagagattcaaaacaactgtcacacacgacagaggtggtaaccgcccaacaggttcacctcttccgccgcctacacagagccgatttatcaagacaggaattgcaatagaggaagagtacacagagctgcttgtgcaggagactggagtcttattagtactcaaatcgatctccctgagcattcggggatcagagtttttaaggataatttggtgggagggggaaggccagtgagtcaagggtgttgattggttgggtcggagatgaaatcataaggaattgaggtgtccttttgtgctaagtcagttccagggtgggggccacgagatcagatgagccagttaatcgatctgggtggtgccagctgatccgtcgagtgcaggtctgcaaaatatctcgagcaccgacataggagcagtttanggagggtcanaatcttgtagcttccagctacatgactnctgaaccataattctaatcttgaggctaatttg

SEQ ID NO: 4051 - DNA, 721 bp, Homo sapiens
  misc_feature (630)..(630): "n" may be a, t, c, g, other or unknown
  misc_feature (641)..(641): "n" may be a, t, c, g, other or unknown
  misc_feature (679)..(679): "n" may be a, t, c, g, other or unknown
atttttattttacagacgggaaagactgagtaaatgtgagaaaattagctgaatagccactactttttttctggcataacctacccctgcttaagaacttccacgggcctttgattggggtttttaaccactttaacaaaccatgtaaccctgagagctatgcttgttggacaacatggtgtaatgtaccacaggctgtagagccagatactggggtttgaatccttattcaacatgggaacataggagctatatgacattaaacaactgtcttgtcttcactaaatttctatcaactcatttgtattgtggggataatagagcctgcttttacagggtaagtgagataaaatgaataaagtgtctagacaatatcatagcatagtaggtattcaatcctggtgagatcctgtttataaggcccactactttgtcttatcaggcagaataacaaaggaacaatatttaaaaagcaactagctcaaatctgtccccagaaggaaaaacatatcttggccttggtccttaaaaaatttcctctggcactgtctagaatcagcacctaagaacacaggcgtttagtgttgactggaataaaatggaatcgggtgctggtgcagggagattgancagggatgaanagagaaaatcacagagtggaaagggatcaggtttgganaagttcaatggggggcttgccaggacataagcctaatatgtg

SEQ ID NO: 4052 - DNA, 648 bp, Homo sapiens
  misc_feature (572)..(572): "n" may be a, t, c, g, other or unknown
  misc_feature (602)..(602): "n" may be a, t, c, g, other or unknown
  misc_feature (639)..(639): "n" may be a, t, c, g, other or unknown
aagaaacaatggctgaaaacataatgaaagacattaatctacacatacaaaaagctcaatgaattgtaagtagggtcaactcaaagagacactcagtgtgacattgaaacacattataatcatactgtccaaaagcaaagcaaatcctgaaagcagaaagagccactggacacgtacaagaaatcttcgataagattaatagccaatttctcatccaacatcatggaagtgagaaggcaatgagatgacatattcagtgtgctgaaaggaaaatcttgggtggtcttgatacttgtagatgttcttctgtgtctgagcattgaagagttaggtatttatcatagtcttcacagtctgtgcttgtttgtacctatccttcttgggaaggctttccagatatttgaatggcttgggtgttgtgctctaagctgtatatgcttaaggattcaccccaagcccaataacactttggtttttttttagcctcatagagttactgccttgatggtcttggacaagattcaggattctctggattaccatacagagactcttgttcattccgttactgnctcccaaacaaagggagtccctttctctgntctaagcccctgaactgggggtgaaaggacacaagcncccctgtgg

SEQ ID NO: 4053 - DNA, 573 bp, Homo sapiens
  misc_feature (555)..(557): "n" may be a, t, c, g, other or unknown
aatactatgtaagtgatgatgtactcttctcagtgtattggcttggagatacaggatgtcagtttgtcatgttattttattagaaatgataattctaatgccttagttgtgatggtgtcctttgggtttctgcactgcaaagttgctattttttcctttgtatttaataagtaatttgtggaaaggctaaatatcctgttcctcttcaaactttttagggattttagtgccagtgataattttttctttagtcagttattactgtaatggctgcaaaatagtgattatgtaactcttatttctcttaacatttattagttggcattctactttaaaaatgagctttcccactccgccacttatcacttagactcataaattcttattttatgtgtgagaaagtgtgtatgtgtgacttacaaatgtagcttatttgtatacatggtgtttaaaccgtatgtatgatttatatatactgtaattcattttgatgtgaacatcagattgttcctcttcaaacttgctctgtgacctttgatatgtctccatcatgtnnntttttttagggtgttt

SEQ ID NO: 4054 - DNA, 773 bp, Homo sapiens
  misc_feature (596)..(596): "n" may be a, t, c, g, other or unknown
  misc_feature (754)..(754): "n" may be a, t, c, g, other or unknown
  misc_feature (759)..(759): "n" may be a, t, c, g, other or unknown
  misc_feature (768)..(768): "n" may be a, t, c, g, other or unknown
ggtaatgatgagggataggtagaaaagatgggaagggggtcagcttgtagataacctagactagcaggtgtatgacttctagtctctgaactggagccatctgagatcagtttgagatatggtgtcttataaatgtattgagagaggttgaggagttgtctatagaatggaatggagtgaggtcagagatcagtggcaaggaagaccacataaaggtttttgcacaaacttgccttgatggcaagtcctcaaaagtacaattatcaagctttctgtttaaacatgcataagtcagtaaatataaacattaaaatttgcccaagactcttaactcagttgtatttcataattaaagtgtacattaaaaagccaaactagtcatgaaagtattacatacagcaagggcagtttagataagttaatgttgctatgggaaccccagcagatctccttgtgtctccgtttaaaaatcatggcccaaggtggtttcaaaaacaacagaaggtaaaattattctcacattctcacacatgtaaattgtactgtctctctcagttctaaatagcggattcaagccagcctcttgactggcacantaaaattcggcttcgtgtctttctataatgtattacagcatgtgagtttaacctttagaagcttcaaaaatacatcaaccaaatttgggactgtgagacacaaactggtctcttttgggctctgtccagcatagccttcctattccacatggcttgcncacanggccatttncacca

SEQ ID NO: 4055 - DNA, 584 bp, Homo sapiens
  misc_feature (121)..(121): "n" may be a, t, c, g, other or unknown
  misc_feature (128)..(128): "n" may be a, t, c, g, other or unknown
  misc_feature (319)..(319): "n" may be a, t, c, g, other or unknown
  misc_feature (321)..(321): "n" may be a, t, c, g, other or unknown
  misc_feature (360)..(360): "n" may be a, t, c, g, other or unknown
  misc_feature (503)..(503): "n" may be a, t, c, g, other or unknown
  misc_feature (514)..(514): "n" may be a, t, c, g, other or unknown
  misc_feature (558)..(558): "n" may be a, t, c, g, other or unknown
gatcagaaagagaaggccaccctcctgggcaacatgaaggactactgggattacttctgtgcctgcctggccaaggtgaaaggagccaatgatgggatccgatttgtcaagtctgtctcanagctccnaacatccttggggaaaggaagagcatttattcgctactccttggcgcaccagaggttggcagacaccttacagcagtgcttcatgaacaccaaagtgaccagtgactggtactatgcaagaagcccctttctgcagccaaagctgagctcggacattgtgggccaactctatgagctgactgaggttcagncngacctggcgtcgaggggctttgacttggatgctgcctgnccaacatttgccaggaggacgctgaccactggctcttctgcttacctgtggaaaccccctagccgcagctccagcatgagcagcttggtgagcagttacctgcagactcaagagatggtgtccaactatgacctgaacagccncctaaacaacnaggcattggagggctttgatgagatgcgactagagctggaccanttggaggtgcgggagaagcagctaca

SEQ ID NO: 4056 - DNA, 664 bp, Homo sapiens
  misc_feature (604)..(604): "n" may be a, t, c, g, other or unknown
  misc_feature (608)..(608): "n" may be a, t, c, g, other or unknown
  misc_feature (642)..(642): "n" may be a, t, c, g, other or unknown
aaaaaaaaaaaaaaaaaaccctgctctattgcaattccctattatattctgcatcagaaaaacaaacaaaacaaaaacaactttaaatgcttgtagcagaaccccgggtcatctcatgtcagaaacctttaatccaggcctaaatttgcatagacctgacattcagctgccttgcagttgcttcctcccatgagccaaggtggtgtcagagggcaactggatgactcgcagtaccacagcactgggacagacagaagccacacctttcttttgggtttttgccaagcctcctccatctcccatcagtgctgtgggctggctgcaagcctcgaaacagttctcctggaagggaggtttttgctttacccccgccagcacttccgcacacaatcatagagaacctctctgctctctgctggcctacagcttgtctgtttctcaagcagaggcaggaagagctagtcttagcatttatattttaataggaagttgactcccagcatgtaaaagtgatccacgcagccggagtgtatgccgggagctaagtggtctatgggtgaacatatcccaccttgcttcctgagtccttggtcccaatcttctnattnggtcctctcgttttaaattttttccccccaactnttttgatgtaagagtcagtttg

SEQ ID NO: 4057 - DNA, 547 bp, Homo sapiens
  misc_feature (521)..(521): "n" may be a, t, c, g, other or unknown
  misc_feature (539)..(540): "n" may be a, t, c, g, other or unknown
agagcggggtcccggcaccgcggcgctcgggtgtttttgggggcccgggtggagggcccgggtgccggggcccaaggtgcggcctcgctagcgggagagggagcgggatcaccggcccggagagagctctcagggccagagcggggcaggaggatgctttcccagccccaccatggagctgcgctgtgggggattgctgttcagttctcgctttgattcagggaatctagcccacgtggagaaggtggaatctttgtccagtgatggggaaggggtaggaggtggggcgtcagccctgaccagtggcattgcctcttcccctgactatgaattcaacgtgtggacccgaccagactgtgctgaaacggaatttgagaatgggaacaggtcatggttctacttcagcgtccggggaggaatgccaggaaaactcatcaagatcaacattatgaacatgaacaagcagagcaagctgtattcccagggcatggccccctttgtgcgcacactgcccacccggncacgctgggaacgcattnnagaccgg

SEQ ID NO: 4058 - DNA, 632 bp, Homo sapiens
  misc_feature (64)..(64): "n" may be a, t, c, g, other or unknown
  misc_feature (535)..(535): "n" may be a, t, c, g, other or unknown
  misc_feature (600)..(600): "n" may be a, t, c, g, other or unknown
  misc_feature (623)..(623): "n" may be a, t, c, g, other or unknown
tttgatgctgtcttggaggccctgagccggggtgagcccgtggacctctcctgcctgccccctncacccgaccagctgcccccagacccaccgtcaccaccgtcgcagcctccgacccccgctacggcgccctccacaacagaggtgcccccacccccgaggaccctgctggaggcgctggagcagcggatggagcggtaccaggtggccgcagcccaggccaagagcaagggggaccagcggaaagctcgaatgcacgagcgcatcgtcaagcaataccaagatgccatccgagcccacaaggctggccgagccgtggatgtcgctgaattgcccgtgcccccaggcttccccccaatccagggcctggaggccaccaagcccacccagcagagtctggtgggtgtcctggagactgccatgaagctggccaaccaggatgaaggcccagaggatgaagaggatgaggtgcctaagaagcagaacagccctgtggcccccacagcccagcccaaagccccaccctcaagaactncccagtcgggatcagccccaacagccaaagcgccccccaaagccacatccaccagagcccagcancagctggccttcctagagggccncaagaacag

SEQ ID NO: 4059 - DNA, 778 bp, Homo sapiens
  misc_feature (601)..(601): "n" may be a, t, c, g, other or unknown
  misc_feature (687)..(687): "n" may be a, t, c, g, other or unknown
  misc_feature (737)..(737): "n" may be a, t, c, g, other or unknown
  misc_feature (775)..(775): "n" may be a, t, c, g, other or unknown
aaagaaagaatacatgtgaagaacttggaacagtgcctagaacatagtataggggttcaggtgttactaattataattatttataattgttatttttatttataattataattgttaacttttactgttaccattatttcctggctttacattggtttaagataatatctgtagggtatagtataatgttatccaaatattaaattacatatagtatgtttagttttatttagcattgttaagattactcagtgtcaaagggagcattttaaaattatttagtttttgagacggggtctcacactcacccaggttggagtatagtagcacaatctcagctcactgaagcctctgcctcctgggctcaagcagtcctcccacctcagcctcctgagtagcttgagaatacaggtgtgcacaccacactgcactgctttttaaattttttgtagatgtgaagtctcactgtattgaccaggctggtctcgaacttaggagatcaagcagtcttcctgcctcaccctccaaaggtgctgggattacaggcatgagctactgcacctggccagaggcaacattaaaaaaaaaaaaaaaagattgntgaggctttttaactcacaactcttggagacctaaaacttctggtatctcaggcccttggtaaatctgaagcttcagagaaaaganggtcagggggtaggacatggaccatttcagttatggtatagaccttaatntgggaaccccttatattagggccttgacatttttattngaa

SEQ ID NO: 4060 - DNA, 719 bp, Homo sapiens
  misc_feature (5)..(5): "n" may be a, t, c, g, other or unknown
  misc_feature (38)..(38): "n" may be a, t, c, g, other or unknown
  misc_feature (642)..(642): "n" may be a, t, c, g, other or unknown
  misc_feature (692)..(692): "n" may be a, t, c, g, other or unknown
  misc_feature (694)..(694): "n" may be a, t, c, g, other or unknown
gctgntacttctgttactccggttgttctggcttgcanaaaacctttcgatgaaggtaagggtaggaagcataaattctctacgaggtaatgtcccctgaggagagaggtgaagtgtgaatctgtgaagaatccagggtgcctgtgaggtcaagcgaggatcaacacaaacattttcccagcatgcgcgacggcgggagagttcgtgagacttttggaagcacttcacgccctacacttagcattcagtttggtcatctcatccctcttctaggtgctagtcacaggcccaccccaacctcataggatgtgtttgcacacagggccacttaataaatgttatggctgccttatttgctgtgaactcttgtctgtattcctgggccttggtagacctgggatgcccagtggctctgcctttcactgtaggttttgagtgatgaggtgaagaggaagcagtacgatgcctacggctctgcaggcttcgatcctggggccagcggctcccagcatagctactggaagggaggccccactgtggaccccgaggagctgttcaggaagatctttggcgagttctcatcctcttcatttggagatttccagacccgtgtttgatcagcctcaggaatacttcatgganttgacattcaatcaactgcaaagggggtcaacaaggagtcaccgtgaacntnatggacacctgtgaaccctgaacgg

SEQ ID NO: 4061 - DNA, 638 bp, Homo sapiens
  misc_feature (564)..(564): "n" may be a, t, c, g, other or unknown
  misc_feature (582)..(582): "n" may be a, t, c, g, other or unknown
  misc_feature (599)..(599): "n" may be a, t, c, g, other or unknown
ttatcgagctgtttggttgatagtttattgtatagcaatttaagcaaatctcatttgaattatgatacagtttgaacattccaaatctgaaaaatatctgaaatctgaaactcttctggtcccaggcatttcagatgagagatacttaagcctgtactaatttaattatgttaaaggacccaatatctttacaaagaaagctgctttttccctggggacaactaaacatatgtgactattttttcttagtttttcttcctctaaacttcaaggatctgtgtgtatgggtattgccaccaccattgtcttcacactgacagtgaacatagtggagggagaagtaggggctctctttcttaagatgtgactgatgtaaccccataagtcccttgggagtgtgtgttcattttaggaacccagtggcagtgtagtggaataagaagggctttggacccaggaaggcatggcttggtgaactggctctgctacttattagctgatgcagtcatgagaaactttcttaggctccaagggccttcagtttctcattggtaaaattaaagnaagaaaattttcccttancattggtgtaaggagtnaatgggaatttatatagaacatctagcaaagtaaatttg

SEQ ID NO: 4062 - DNA, 628 bp, Homo sapiens
  misc_feature (609)..(609): "n" may be a, t, c, g, other or unknown
  misc_feature (621)..(621): "n" may be a, t, c, g, other or unknown
  misc_feature (627)..(627): "n" may be a, t, c, g, other or unknown
gaaaaaaataaatgatcaaaatgagttcatacaaagaggaatcaaagttcagagaaggaagggggaattcataccagtagaaagtaaaaggtcactgaggatggagtggtgtaacttgacccaagccttgaaggacagggagaatttgggcaagccagacaacaaatcagacttcccagatggtgacattatttttttaggtggtcttgtgggacattctctgcctatctgaaggttaaagaagcatctgacaattcctcatcatgctgacattttcaaaggctaatgagttctcatttcaaaacatagagccttgggagccctagacccttttttttaaattttagtccacttacagcttaaatctgctgtggctacctgctctgcttacagacacttcccaaagctttcagtatccagggtccctaagaagtggagggttgctcgaagtgaggagcccacagttcccgaatctcactagaaaatcccaatgtgctaaatcgtgctattgatcctgactggggagccagccagctcaatattggaggtggcttttctagtaagggtacagtacaggttagaattgaattaaattttgctgtgccccanggtagactattngggtgng

SEQ ID NO: 4063 - DNA, 545 bp, Homo sapiens
  misc_feature (66)..(66): "n" may be a, t, c, g, other or unknown
  misc_feature (148)..(148): "n" may be a, t, c, g, other or unknown
  misc_feature (461)..(461): "n" may be a, t, c, g, other or unknown
  misc_feature (498)..(498): "n" may be a, t, c, g, other or unknown
  misc_feature (501)..(501): "n" may be a, t, c, g, other or unknown
aggagagcgtccggattccctgctctaggtcgcggcgggacagtgccagtgggcgtgtggggcggngcagggcagggaagggaagggcggagctggggtgagggtccaaggggcccaggacttggccggcgtgatctcagctctgcanaccctgcggtgctgggagccaccatggagagtaggtgctacggctgcgctgtcaagttcaccctcttcaagaaggagtacggctgtaagaattgtggcagggccttctgttcaggctgcctaagcttcagtgcagcagtgcctcggactgggaacacccaacagaaagtctgcaagcaatgccatgaggtcctgaccagagggtcttctgccaatgcctccaagtggtcaccacctcagaactataagaagcgtgtggcagccttggaagccaagcaaaagcccagcacttcccagagccagggactgacacnacaagaccagatgattgctgagcgcctagcacgactncgncaggagaacaagcccaagttagtcccctcacaggcagagataga

SEQ ID NO: 4064 - DNA, 672 bp, Homo sapiens
  misc_feature (590)..(590): "n" may be a, t, c, g, other or unknown
  misc_feature (628)..(628): "n" may be a, t, c, g, other or unknown
  misc_feature (662)..(662): "n" may be a, t, c, g, other or unknown
aaccaaaagagtcttcagaaactttgctagacctgaagtacttgaacctgtgtcccctgaatctttcttacagcatctgggacaaatccctggccctgtgacatccgaagcagaactgtgccctgctctctccttctgtgatgaccaaggatggtgaactcaagttgttctctacaagccaggccagcaacctaaatacttggagaggaacttttagaaactataatcctgacaaaatagaaaagtttcccataggggcataccataatactataataacctcccaggaactattgtttgccaaaatgtagttaatatattttaagatatatgcttttttgcataggactagaaccagaaaagacaccaaatgcccccttgacatcaatgtcctttctagtgggacaatttggtctccattaatgccaaacctttctgaacaggatacatggcttttaaagggcagatgtttctcctgctgctagaagttcctcagtttactagagcacaatgaggagagtattcaacctccctactgccaaggaattccctgcttctcccccaccgccatcatcttgccaagctatcanaagcaaccttctagagataatctaacaatcctgattanaattgctcccatatccctggtgaccacaggcttnattcaaattg

SEQ ID NO: 4065 - DNA, 560 bp, Homo sapiens
  misc_feature (491)..(491): "n" may be a, t, c, g, other or unknown
  misc_feature (549)..(549): "n" may be a, t, c, g, other or unknown
  misc_feature (556)..(556): "n" may be a, t, c, g, other or unknown
atttttggctgcctctgtcggtctgttcagttaccacgtgaaccgccgacggagacccgtagtgggggaggcggcggcagcgttaagtgagaaaggaaaaaagacaacgaggaaaaaggaggtgtccgggtagggcaacgcggcgacacccgaggcctggtggtggcggcggatcgagatattcaaggctgaagcagctacggaacggcagcggcggcggtcggacaaactgactgaccgagccgggtggtggcgggagcagcgggagcagccggaacgatgccggccgtgagcctcccgcccaaggagaatgcgctcttcaagcggatcttgaggtgttatgaacataaacagtatagaaatggattgaaattctgtaaacaaatactttctaatcccaaatttgcagagcatggagaaaccttggctatgaaaggattaacattgaactgtttggggaaaaaggaagaagcttatgaattggttcgtanaggtttgagaaatgacttgaagagtcatgtgtgttggcacgtttatggccttcttcanaggtcanacaa

SEQ ID NO: 4066 - DNA, 690 bp, Homo sapiens
  misc_feature (640)..(640): "n" may be a, t, c, g, other or unknown
  misc_feature (651)..(651): "n" may be a, t, c, g, other or unknown
  misc_feature (654)..(654): "n" may be a, t, c, g, other or unknown
gcgccgccaccgtctgaactaggatgtcccgacatgaaggtgtcagctgtgatgcatgtttaaaaggaaattttcgaggtcgcagatataagtgtttaatttgctacgattacgatctttgtgcatcttgttatgaaagtggtgcaacaacaacaaggcatacaactgaccacccaatgcagtgcatattaacaagggtagattttgatttatactatggtggggaagctttctctgtagagcagccacagtcttttacttgtccctattgtggaaaaatgggctatacggagacatctcttcaaggacatgttacttctgaacatgcagaaacatcaacagaagtgatttgtccaatatgtgcagcgttacctggaggcgatcctaatcatgtcacggatgactttgcagctcatcttacacttgaacacagagcccctagagatttagatgaatcgagtggtgttcgacatgtacgtagaatgtttcaccctggccggggattaggaggtcctcgtgctcgtagatcaaacatgcactttactagcagttctactggtggactttcttcttctcagagttcatattctccaagcaatagggaaccatggatcctatagctgagcttttatctcaattntcaggagtganacnttctgcaggaggacagcttaattcctctgcccttcc

SEQ ID NO: 4067 - DNA, 605 bp, Homo sapiens
  misc_feature (514)..(514): "n" may be a, t, c, g, other or unknown
  misc_feature (533)..(533): "n" may be a, t, c, g, other or unknown
  misc_feature (595)..(595): "n" may be a, t, c, g, other or unknown
atcttaacagcgcgttcccgttggcgtctgaggaacagcatctctgccttcctgttcacggtgaccttcgcttggtgtcctcctggcctcagcaacctgacaattctgtcgtgtcccgatcatctttctcaagatgttttctgtcttcatgagtcaaaatttgaagaggaaaggatggtggctgggtggttgacaaattactctcaggactcagtgacctttgaggatgtggctgtggacttcacccaggaggagtggactttgctggatcaaactcagagaaacttatacagagatgtgatgctggagaactataagaatctagttgcagtagattgggagagtcatattaataccaaatggtcagcacctcagcagaattttttgcaggggaaaacatccagtgtggtggaaatgaattcagagtaaaagggagaatctcaatgaaataaatttggaaaacttctatgaaccatcattaattttcaccaacaggagagaaaccattttgganaggaactgtttgactttanccaatgtgaaaaaccttgagtgaacactcatgccttaagactcacaggagaacttactttanaaagaaaacc

SEQ ID NO: 4068 - DNA, 648 bp, Homo sapiens
  misc_feature (525)..(525): "n" may be a, t, c, g, other or unknown
  misc_feature (641)..(641): "n" may be a, t, c, g, other or unknown
  misc_feature (643)..(644): "n" may be a, t, c, g, other or unknown
acaagcatgtgccaccacattcggctaattatttgtacagatggggtctccctgtgttgcccagctggtctcaaagctctgggctcaagcagtcttcccgcctcagcctccaaaactgctgaaactacaggtgtgagccactgtgcccagtctacacaatttaatcctaaaatactttgaagggaagaaagaggaaacgagtaaaaactgaaataatgcacaatttctagccttttgaaataaattctcagaaaactgggagagcgaagcacatttaagagtaaggtgactaaaaatgagccattggtaccaggtaccagtgacatttttgcctcaaatgttttatttatttcaaaaaattccaaatctacagaaaaactgaaagaatgatcctctatatatccttcatgtagactgatcaatcatgaacatgtgccacgtttccctcctctccctctctgtgtatactcacacacaatttttgctatgccatttgaaagcgatttgcagatatcacagcacttncctgctaaatgtttcagaagcatattctaaaaagtcgttttcgtacctatccataacaccattctcacataagaaacactgcaccagtgactttttttttttaagctaaaagaccntnnagac

SEQ ID NO: 4069 - DNA, 612 bp, Homo sapiens
  misc_feature (228)..(228): "n" may be a, t, c, g, other or unknown
  misc_feature (282)..(282): "n" may be a, t, c, g, other or unknown
  misc_feature (554)..(554): "n" may be a, t, c, g, other or unknown
  misc_feature (573)..(573): "n" may be a, t, c, g, other or unknown
  misc_feature (585)..(585): "n" may be a, t, c, g, other or unknown
aggtgcgcatgcgcagtgcgcgtctgcgagaccgacttggacggagccgagctgaggctcggcttcctgctgatggtcagggttttggcaactccccggtgtgagaggggtagggagtgctcccggcggcgacgggaccttaaggcctctgtgtggcagaaggatcagctggtgacacagccgcactggcaagaaaatggacccaccttttccagcacaccttaccgntaccaggcctgcaggtttgggcaggttccagaccagcctgctggcctgcgactnttcacagtgcaaattccccacaagcgccgggcgccagagctgtaccgggctccgttcccgttgtacgcgcttcaggtcgaccccagcactgggctgctcatcgctgcgggcggaggaggcgccgcaagacaggcataaagaatggcgtgcactttctgcagctagagctgattaatgggcgcttgagtgcctccttgctgcactcccatgacacagagacacgggccaccatgaacttggcactggctggtgacatccttgctgcagggcangatgcccactgtcaagctnctgcgcttccangcacatcaacagcagggcaacaaggca

SEQ ID NO: 4070 - DNA, 550 bp, Homo sapiens
  misc_feature (495)..(495): "n" may be a, t, c, g, other or unknown
  misc_feature (542)..(542): "n" may be a, t, c, g, other or unknown
  misc_feature (550)..(550): "n" may be a, t, c, g, other or unknown
tcccactggaattaaaaacagatgagtcgtttctaagaaaataactttttcttttacataggtttgttctatactttgtcataattcttcagtctttcctcagtctttacatggagttcattttttcagtttatataaatccaaagagaaattgatggcttcataatttttttagactgacaaaaaatgacatgttttctccagccttttacgtcccagaagaatgtaaattaaaatgatttgttccagaggaagaaaacattttttaacctaagagatgctactgctgaagcatattgtgctttctgtagtctctgataaatctagctttttaaggaccttaggtttggggtttctttgttttgttttgtttttttcatttattttctagagacagggtctggctctgtcgcccaggctggagtgcaggggtgcaatcatagattactgcagcctcaaactcctggactcaagtgatcatcctgcctcagcctnccaagtagctaggactacaggcatgcaccaccatgtccagctaattnttttattn

SEQ ID NO: 4071 - DNA, 605 bp, Homo sapiens
  misc_feature (569)..(569): "n" may be a, t, c, g, other or unknown
  misc_feature (590)..(590): "n" may be a, t, c, g, other or unknown
  misc_feature (602)..(602): "n" may be a, t, c, g, other or unknown
gtatttaatttctgtgccttaaatcaatgaacaaattggtaaatttgttaaaatcaggaaatttagtgaattttcatggtattttgattgcatcatgctaagaatatttcatcatgtaattactaatagtctatattcaaagcaacattattggctcttattttactgagacccttcctaaaacacatagttggaggttttgtttttaatattcactagtaataaataacatactgtaagtgaatagtaaagagggaaatgatggcagcattccacatatgtagcagttgttcacacacatttctcccgatgtggtaatactctgtccaccaagtaataccagcgaggcatggcaagccaaggaagaatacagtagcattgaacactttggccatttattctgcattcttctaggaatgcttatttcacttctaatctttatggatttcacactaatttcgatagctcagttgccctaaccttccttcagtctcgcaaagctgtcttcatttaccttccataagagggtgggagtcgtgtgtgtgtgtgtgtatggaattgatttaatnggaaaatatccttttaattgngttaagtgttgntaa

SEQ ID NO: 4072 - DNA, 739 bp, Homo sapiens
  misc_feature (668)..(668): "n" may be a, t, c, g, other or unknown
  misc_feature (684)..(684): "n" may be a, t, c, g, other or unknown
  misc_feature (707)..(707): "n" may be a, t, c, g, other or unknown
ggttatacaaggtggagccacagctggctgaggaccagcccgtgcacggggaccttgacctcgtcatgaacctcatggatgcacacaaggttttccagaaggaactgggaaagcgaacaggaaccgttcaggtcctgaagcggtcaggccgagagctgattgagaatagtcgagatgacaccacttgggtaaaaggacagctccaggaactgagcactcgctgggacactgtctgtaaactctctgtttccaaacaaagccggcttgagcaggccttaaaacaagcggaagtgtttcgagacacagtccacatgctgttggagtggctttctgaagcagagcaaacgcttcgctttcggggagcacttcctgatgacacagaggccctgcagtctctcattgacacccataaggaattcatgaagaaagtagaagaaaagcgagtggacgttaactcagcagtagccatgggagaagtcatcctggctgtctgccaccccgattgcatcacaaccatcaaacactggatcaccatcatccgagctcgcttcgaggaggtcctgacatgggctaagcagcaccagcagcgtcttgaaacggccttgtcagaactggtggctaatgctgagctcctggaagaacttttggcatggatccagtgggctganaccacccttattcacngggatcaggagccaatcccgcanaacattgccgagttaaaacccttatcgctgac

SEQ ID NO: 4073 - DNA, 805 bp, Homo sapiens
  misc_feature (762)..(762): "n" may be a, t, c, g, other or unknown
  misc_feature (773)..(773): "n" may be a, t, c, g, other or unknown
  misc_feature (792)..(792): "n" may be a, t, c, g, other or unknown
aattcttttcactcttgtgactatctcagtcctctgctgttttgtaactggtttatctctatagtttatttatttttaaattataaacacttttcagctgctagtatcagaaccacatgaagttatagcctctaaagcctgtggtattttatataatatttttataactttaagagactgtagtaattgacctaaaaacttatgttagcttcagtaaaagtacttttattgtaaataaacaatcatgaactcaacactctgcctgaatatatgccagttgtctttcataatcaatgtttagataaatgattgccactttttatatggttgtttagtttcaagcaatatgatgtacattacttttgagaaacagtattttgactaggacctctcttatttgtcagcacagaactgattaatatgtaatgctacctgctaattaaaatgtaaaatcaagtaaagaaaacattttaaaattacaattagcagagcagttcatgtttaagggcatcacttttattagtattggcaatattatttgtgtaaatgaagcatttgaatgtcatatctttttaaagtattttattgtatactgtatcatagaagttggaggtatataaatagaacattttgctaaagtgaaaaatttccaagttctctagcataacttttacatttaatttttcatatgaaatagcaattagttacctgctgggttacattgggatgtttatgtatggcaatggttttggctttacagcntaatttatatngctttttcaaatgatgganctgcataaatggg

SEQ ID NO: 4074 - DNA, 757 bp, Homo sapiens
  misc_feature (668)..(668): "n" may be a, t, c, g, other or unknown
  misc_feature (683)..(683): "n" may be a, t, c, g, other or unknown
  misc_feature (706)..(706): "n" may be a, t, c, g, other or unknown
cccagaagatggaagccaatgccagctcagcaaaacaacagatgagtggtccagcctgagtagaggatctcaggccaggaagacttagttttttccatcatattagtcactcatttatcatccaaattctgaaagtgctgttaataaggcagaagttggccttagattcggatttcctagcacatgctgtccccctgtactgggaggtgctggctgtgttctaggcctgcctcatgggtatcattctggattcttgggccttccctgtccctcatcctgggaaccgcttttgttgcgttgcatgtttttctcttttttggttcagttccttgttttaagcagtggatctttcagtagctttctgaggaagagtctgtgggagttaaatttctcacatccttgtatgtttgtaatcgcttcattctaccctgattttttagagatagctgagctgggtacccttattctttagagatagttgagctgggtataaattcacgactggaaatagttcccctcaccatttcaaagacatttttctatttttatcttgcttcccatgttgaagacattcaacattgtgattccaaaatcattgtaggagacctgcttttttatctctggaaacttttaggatcttctcattatccctagatctggaattccgngtgtgtgtgtgtgtnctcatcatgctgggtatctgcanagggaggctttgattttgaacaaatttcttcattcttggaagctctacttg

SEQ ID NO: 4075 - DNA, 731 bp, Homo sapiens
  misc_feature (642)..(642): "n" may be a, t, c, g, other or unknown
  misc_feature (673)..(673): "n" may be a, t, c, g, other or unknown
  misc_feature (720)..(720): "n" may be a, t, c, g, other or unknown
agagtttcggaggcggtgaccgtgacgtagaaggtggagaccgcttcaccctgatcagggagtatcggctgcgggtgcgcaaggcgtccaggagtgacctggggctgtggagagcgacccgtggccttgtgtttcagagtttaccacctaggatgacttcagtgactagatcagagatcatagatgaaaaaggaccagtgatgtctaagactcatgatcatcaattggaatcaagtctcagtcctgtggaagtgtttgctaaaacaatctgccagttatcaagacaggaggcaatcctggcggcgagcaagtatgaaagaaacgaaccggcggaagtcgctgcatcccattcaccagggcatcacagagctcagccggtctatcagtgtcgatttagcagaaagcaaacggcttggctgtctcctgctttccagtttccagttctctattcagaaacttgaacctttcctaagggacactaagggcttcagtcttgaaagttttagagccaaagcatcttctctttctgaagaattgaaacattttgcagacggactggaaactgatggaactctacaaaaatgttttgaagattcaaatggaaaagcatcagatttttctttggaagcatctgtggctganatgaaggaatacataacaaagttttctttanaacgtcagacttgggatcagctctgcttcactaccagcaggaggctnaagagatattg

SEQ ID NO: 4076 - DNA, 647 bp, Homo sapiens
  misc_feature (565)..(565): "n" may be a, t, c, g, other or unknown
  misc_feature (621)..(621): "n" may be a, t, c, g, other or unknown
  misc_feature (645)..(645): "n" may be a, t, c, g, other or unknown
agttcactcggcagcggcgccgggcggagggggagagcgcgggccgcgcgggcgggaagcgaagaggcgggcgggccagcgaggagcgcggagagaaaaggcgcgagcggccaggagggctcaggccgagacaccttgcagctgccgccgccgccaccgagccgccgctgtgctcactgatccgcctccagggccaccgccatgtcgagccgcggtgggaagaagaagtccaccaagacgtccaggtctgccaaagcaggagtcatctttcccgtggggcggatgctgcggtacatcaagaaaggccaccccaagtacaggattggagtgggggcacccgtgtacatggccgccgtcctggaatacctgacagcggagattctggagctggctggcaatgcagcgagagacaacaagaagggacgggtcacaccccggcacatcctgctggctgtggccaatgatgaagagctgaatcagctgctaaaaggagtcaccatagccagtgggggtgtgttacccaacatccaccccgagttgctagcgaagaagcggggatccaaangaaagttggaagccatcatcacaccacccccaccaaaaagccaagtcttcatccanaagaacctgtatctaaaaaagcanga

SEQ ID NO: 4077 - DNA, 711 bp, Homo sapiens
  misc_feature (589)..(589): "n" may be a, t, c, g, other or unknown
  misc_feature (651)..(651): "n" may be a, t, c, g, other or unknown
  misc_feature (707)..(707): "n" may be a, t, c, g, other or unknown
  misc_feature (710)..(710): "n" may be a, t, c, g, other or unknown
agagcgtggagcgctgcgcggcgcggcggccgggccctcgagacggggacggacacaccagcccctcagataccacttggccactcccgctgaggccactcccactgcgtggctgaagcctcgaggtcaccaggcggaggcgcggagatgcccctgcatcagctgggggacaagccgctcaccttccccagccccaactcagccatggaaaacgggcttgaccacaccccacccagcaggagggcatccccgggcacacccctgagccccggctccctccgctccgctgcccatagccccctggacaccagcaagcagcccctctgccagctctgggccgagaagcatggcgcccgggggacccatgaggtgcggtacatctcggccgggcagagcgtggcgtgcggctggtgggccttcgcaccgccgtgcctgcaggtcctcaacacgcccaagggcatcctgttcttcctgtgtgcggccgcattcctgcaggggatgactgtgaatggcttcatcaacacagtcatcacctccctggagcgccgctatgacctgcacagctaccagagcgggctcatcgcagctnctacgacattgccgctgctctgctaccttcgtcagctacttcgggggctcaggcacaaccgnctggctggctggggcgtctgttatggcacggttcctgtgttccctgccacttacgntgnc

SEQ ID NO: 4078 - DNA, 596 bp, Homo sapiens
  misc_feature (534)..(534): "n" may be a, t, c, g, other or unknown
  misc_feature (545)..(545): "n" may be a, t, c, g, other or unknown
  misc_feature (569)..(569): "n" may be a, t, c, g, other or unknown
tttgctaaagccaccataaaggaaatagttgtgtggcccatgttgaggccagacatctttactggtttaaggggaccccctaaaggaattttgctctttggtcctcctgggactggtaaaactctaattggcaagtgcattgctagtcagtctggggcaacattctttagcatctctgcttcatccttaacttctaaatgggtaggtgagggggagaaaatggtccgtgcattgtttgctgttgcaaggtgtcagcaaccagctgtgatatttattgacgaaattgattccttgttatctcaacggggagatggtgagcatgaatcttctagaaggataaaaacagaatttttagttcaattagatggagcaacaacatcttctgaagatcgtatcctagtggtgggagcaacaaatcggccacaagaaattgatgaggctgcccggagaagattggtgaaaaggctttatattcccctcccagaagcttcagccaggaaacagatagtaattaatctaatgtccaaagagcantgttgcctcantgaagaagaaattgaacagattgncagcagtctgatgccttttcaggagca

SEQ ID NO: 4079 - DNA, 694 bp, Homo sapiens
  misc_feature (637)..(637): "n" may be a, t, c, g, other or unknown
  misc_feature (675)..(675): "n" may be a, t, c, g, other or unknown
  misc_feature (682)..(682): "n" may be a, t, c, g, other or unknown
aagtttatagaaaatgcttgttttatagttggttgttattgagatgagagtccctcaaggaactccctatgctttagggagctttttgttttaaacctactggttagacttgtgggttttaatgttttcagctgtggttgtaagaaacacattttaaattgcacctagtatagacatacatgtaaaacaaacaaaatttttacgaagtagtacttgtattaagagtgatgtactctgctatcttctatttcatttttttaaagttgatattgctgccttaaattgattttttcaaccactaatgagtcaggacccactatttaaaaaatactggtgtgttctcttgctgttacgaattaacccaaaacttagtggtttaaagcaataaacttgtgtttatctcatgtaggttctgtgggtcaggaatctgggagtagcttacttaggtggttctgggtcagggtttttcatgtggctccgcgctctgctccagccaaacttctgcagaccatgtgcagccgaggcgaggaaacttctctccacctattggggctggaggcctgagtcacaagccccttgtttacataaagtgtttaaggtagcacaagtccttgagatgctcggggtagagatgganaaccactgcttcgtatccttctgccgcttctgcttganatctctngccttacccttg

SEQ ID NO: 4080 - DNA, 758 bp, Homo sapiens
  misc_feature (704)..(704): "n" may be a, t, c, g, other or unknown
  misc_feature (755)..(755): "n" may be a, t, c, g, other or unknown
  misc_feature (758)..(758): "n" may be a, t, c, g, other or unknown
gctggaacccggcgccgagagtagagaaaaggggcctctggtgaccgcccctacctggcatccctctaacccaggaggagcgtggggaaaggggctgtgggcctctcggggagcgagctgcgggtagcggcgcactgggtacaggcgcgcgcttggctgtcgcctctgccgctgtgtttgggaggactcgaactggcgccaggaaatattaggaagctgtgattttcaaagctaattatgaaaacatttatcattggaatcagtggtgtgacaaacagtggcaaaacaacactggctaagaatttgcagaaacacctcccaaattgcagtgtcatatctcaggatgatttcttcaagccagagtctgagatagagacagataaaaatggatttttgcagtacgatgtgcttgaagcacttaacatggaaaaaatgatgtcagccatttcctgctggatggaaagcgcaagacactctgtggtatcaacagaccaggaaagtgctgaggaaattcccattttaatcatcgaaggttttcttctttttaattataagtaagcatctccaccctaatattgtctctgagtgaatggggggataaaaacccttgtgaactaagtatgctgtattttagccccttgacactatatggaatagaactatttcctgactattccatatgaagaatgtaaaaggaggaagangtaagtttttgaaccatctttgggagttgtaattcaaaacaaaaaatgtanaan

SEQ ID NO: 4081 - DNA, 734 bp, Homo sapiens
  misc_feature (675)..(675): "n" may be a, t, c, g, other or unknown
  misc_feature (715)..(715): "n" may be a, t, c, g, other or unknown
  misc_feature (726)..(726): "n" may be a, t, c, g, other or unknown
ctcggatgtccggaggctcctgggctgagccggcgacagagcccgggaaggcagcgagacgtgggcgccggcccagccccctcccgcgtccttcagccccaagccccgagcccctctgacccttccgcagccctccctccagccgcgcccggcctccggcagctccctgtacgcctccctccccctgcccgcccctccctcccacagccgcccatgacgccctctcggcacctcttcccactctgccacgcgtccttttcctgcaccttcgccccgcgtacctactcctgccccgccctgccattcctctcccctcccttctctctgcgacccctccctgttaggccccagcctcttctcccctcacaggtcttctctgtcctggcctcaccgccttatcctattcctctcccttgccctgtgtcttgtctcagagccccctcggggtgggagtaggttgtggagcagcacaactgggctcaccccaaagcagaacttctcaatccatgaggacaatggggaggcctttaggccggcccacatgtgacaatggagggctgcggcttccttgcggagagcacaagtgagctcactgccctggactccagggaatcagagttctggccgcggggtgacccagctcctctgctaccatgaatagggcccctctgaaancggtccaggatcctgcacatggcgcttgaccgggggcctnagaaccccttnttgcaaaa

SEQ ID NO: 4082 - DNA, 652 bp, Homo sapiens
  misc_feature (614)..(614): "n" may be a, t, c, g, other or unknown
  misc_feature (632)..(632): "n" may be a, t, c, g, other or unknown
  misc_feature (637)..(637): "n" may be a, t, c, g, other or unknown
gaggctgagaccggtgcgccgcgcgctagtggccgctcttccgcgggctagcgggcggtgggggcgccagcagcgcggaaggcgggcacgcgggccatggctccctgggcggaggccgagcactcggcgctgaacccgctgcgcgcggtgtggctcacgctgaccgccgccttcctgctgaccctactgctgcagctcctgccgcccggcctgctcccgggctgcgcgatcttccaggacctgatccgctatgggaaaaccaagtgtggggagccgtcgcgccccgccgcctgccgagcctttgatgtccccaagagatatttttcccacttttatatcatctcagtgctgtggaatggcttcctgctttggtgccttactcaatctctgttcctgggagcaccttttccaagctggcttcatggtttgctcagaattctcggggcggcacagttccagggaggggagctggcactgtctgcattcttagtgctagtatttctgtggctgcacagcttacgaagactcttcgagtgcctctacgtcagtgtcttctccaatgtcatgattcacgtcgtgcagtactgttttggacttgtctattatgtccttgntggcctaactgtgctganccaantgccaatggatggca

SEQ ID NO: 4083 - DNA, 700 bp, Homo sapiens
  misc_feature (553)..(553): "n" may be a, t, c, g, other or unknown
  misc_feature (657)..(657): "n" may be a, t, c, g, other or unknown
  misc_feature (684)..(684): "n" may be a, t, c, g, other or unknown
  misc_feature (689)..(689): "n" may be a, t, c, g, other or unknown
gaggccgcagcagtcgccgcgcgaacatggcggccgaaatccactccaggccgcagagcagccgcccggtgctgctgagcaagatcgaggggcaccaggacgccgtcacggccgcgctgctcatccccaaggaggacggcgtgatcacggccagccaggataatggagctgtaatggaatttcacgtttctgaagattttaataaaatgaactttatcaagacctacccagctcatcagaaccgggtgtctgcgattatcttcagcttggccacagagtgggtgatcagtaccggccacgacaagtgtgtgagctggatgtgcacgcggagcgggaacatgctcgggaggcacttcttcacgtcctgggcttcgtgtctgcaatatgactttgacactcagtatgctttcgttggtgattattctgggcagatcaccctgctgaagcttgaacagaacacgtgttcagtcatcacaaccctcaaaggacatgaaggtagtgtcgcctgcctctggtgggaccctattcagcggttactcttctcaggagcatntgacaacagcatcatcatgtgggacatcggaggaaggaaaggccggacgctgttacttcagggccatcatgacaaggtgcagtcccttgtgctaccttcagctnaccaggcagcttgtcttcctgttcctnggacngcggaattgca

SEQ ID NO: 4084 - DNA, 639 bp, Homo sapiens
  misc_feature (558)..(558): "n" may be a, t, c, g, other or unknown
  misc_feature (562)..(562): "n" may be a, t, c, g, other or unknown
  misc_feature (603)..(603): "n" may be a, t, c, g, other or unknown
  misc_feature (613)..(613): "n" may be a, t, c, g, other or unknown
  misc_feature (638)..(638): "n" may be a, t, c, g, other or unknown
gttcaaaacttgttgaagtccgaagaggattcctcatataaacctgtgaagaaagcttgtactcaacttgttgataacctagttgagcacattcttaaatatgaggaatctctagctgactctgacaataaaggtgtgaattctggaagattggtggcttgcataaccactttgttcttattcagcaaaataagaccccagctcatggttaaacatgcaatgactatgcaaccataccttaccactaaatgtagtacgcaaaatgatttcatggttatctgcaatgttgcaaaaatcctagagctagttgtaccactgatggagcatccaagtgaaacttttcttgccactattgaggaagatctaatgaagctcatcatcaaatatggcatgactgtagtgcaacattgtgtgagctgtcttggagctgttgtaaataaagtgacacaaaattttaaatttgtgtgggcttgtttcaatagatactatggtgccatttcaaaattaaaaagtcaacaccaagaggacccaaataacacttcacttctaacaaacaanccancacttcttagatcccttttcaccgttggagcactatgtccngcattttgantttggatctggaagattttaaaggna

SEQ ID NO: 4085 - DNA, 583 bp, Homo sapiens
  misc_feature (474)..(474): "n" may be a, t, c, g, other or unknown
  misc_feature (512)..(512): "n" may be a, t, c, g, other or unknown
  misc_feature (537)..(537): "n" may be a, t, c, g, other or unknown
  misc_feature (573)..(573): "n" may be a, t, c, g, other or unknown
  misc_feature (576)..(576): "n" may be a, t, c, g, other or unknown
  misc_feature (583)..(583): "n" may be a, t, c, g, other or unknown
cagagtatttgaaatatcccattagcttactgttagtagttgtcttaggaacttcttactaacggtgaatagtaaccgctatttgttgagcatttactaagcactgtgtgtgtgtgtgtgtgtgtgtgtgtgtgagagagagagagagagagagagagagagagagagagagaaagagagagagagtctgtgggttattcccatttgacagattggaatattaaggcaaaaagatactaagtattttgtccaatacctcatagccattgacagagatgggaataaaaattggcctatgtaacatcaccaaagcccacgcagtgcctgtgggaaaaatgaatttcagatttagcttaatgtcacacacacacagcccacaaggaaatgcctgacaattacgctccatgttctgaaactgacgtgtcatcatcaccacagaattgccactttatgcctcagtttacccaacttcanagtagagaaacatttcaacatttaattttacttgccangataatgtatgaattaggtaatgcntataaagaagtggtttgatgaggggaaaagctctanccnaaaagcn

SEQ ID NO: 4086 - DNA, 561 bp, Homo sapiens
  misc_feature (443)..(443): "n" may be a, t, c, g, other or unknown
  misc_feature (464)..(464): "n" may be a, t, c, g, other or unknown
  misc_feature (484)..(484): "n" may be a, t, c, g, other or unknown
  misc_feature (508)..(508): "n" may be a, t, c, g, other or unknown
  misc_feature (534)..(534): "n" may be a, t, c, g, other or unknown
  misc_feature (555)..(555): "n" may be a, t, c, g, other or unknown
gaaaactgaaagccggaccccaggccgccgcgctgccgcccggcctccccgccagcgcgccaccatgggcagtcccggtttccccttgtaaagatggcggtgagggatcgctgcaacctttagactaatgactgtccgaaacatcgcctccatctgtaatatgggcaccaatgcctctgctctggaaaaagacattggtccagagcagtttccaatcaatgaacactatttcggattggtcaattttggaaacacatgctactgtaactccgtgcttcaggcattgtacttctgccgtccattccgggagaatgtgttggcatacaaggcccagcaaaagaagaaggaaaacttgctgacgtgcctggcggaccttttccacagcattgccacacagaagaagaaggttggcgtcatcccaccaaagaagttcatttcaaggntgagaaaagagaatgatctcnttgataactacatgcagcangatgctcatgaatttttaaattanttgctaaacactattgcggacatccntcaggaggagaagaaacaggnaaaaca

SEQ ID NO: 4087 - DNA, 674 bp, Homo sapiens
  misc_feature (367)..(367): "n" may be a, t, c, g, other or unknown
  misc_feature (598)..(598): "n" may be a, t, c, g, other or unknown
  misc_feature (642)..(643): "n" may be a, t, c, g, other or unknown
  misc_feature (660)..(660): "n" may be a, t, c, g, other or unknown
  misc_feature (673)..(673): "n" may be a, t, c, g, other or unknown
gcggaagctcggcagtgcgcgtgcgcccgcacccgcactccaaattagaaaggggacgtctagtgggttgcccgggaggggtggcgggagcggtcctggaaataatctgtcctctgtcgccgggaactggcgaggtagttccttcgcggtggagagacctggaatggccaaatatcaaggtgaagttcatagtttgaaactggatgatgattcagttatagaaggagtaagcgaccaagtacttgtggcagttgtggtcagtttcgctttgattgctaccctggtatatgcacttttcagaaatgtacatcaaaacattcacccagaaaaccaggagctagtaagggtacttcgagaacagcttcanacagaacaggatgcacctgctgccactcgacagcagttctacactgacatgtactgtcccatctgcctgcaccaagcctccttcccggtggagaccaactgtggacatcttttttgtggtgcctgcattattgcttactggcgatatggttcatggcttggggcaatcagttgtccaatctgtagacaaacggtaaccttactcctaacagtatttggtgaagatgatcangtctcaaggatttctgagattgcatcagggatattaatgattannaaccgggagattcccangggcaaacccagnt

SEQ ID NO: 4088 - DNA, 666 bp, Homo sapiens
  misc_feature (534)..(534): "n" may be a, t, c, g, other or unknown
  misc_feature (588)..(588): "n" may be a, t, c, g, other or unknown
  misc_feature (627)..(628): "n" may be a, t, c, g, other or unknown
  misc_feature (651)..(651): "n" may be a, t, c, g, other or unknown
  misc_feature (658)..(658): "n" may be a, t, c, g, other or unknown
attgtcacttgggttctcaagtttccttcatactcttatcagttcttttggagtcggtccagcgcgtcatgtgcccatgcctgttgctgtaaattatcactgcaccgtgaacatgtgtacattactagggcaagagctagcctgggaaacctaagtctgcacattttccgccgtgttgcatgttttctgttctctgcctctgtgtgtgtgcaagacagagagataggctatttgtcaagtcagctagttgcctaggtatctttgtctcacatctggctgtttcctcctagagaaccatccagttggctttccaggcctggaggtgagctaatggatgagtgaatattagcagtgggtgttcctcatctctttgaggatttgcctcagagttcactaccaagggatttctggaactaggagccattctttacatcagttcttgaggcttctttgatatcaggggcaaaatgatcccttctcttttctttcttaaatcctgtgctttgtctcctgggtgatttctcttcaagtcanttgtgggaggtgcctaagaacaacgctaacacggggctcaaataagtttggcanatatagttgattttgggcaaaggttgttgaacagtccannaaaatttcttgagaagagaaaangaaggtngaaagggg

SEQ ID NO: 4089 - DNA, 559 bp, Homo sapiens
  misc_feature (295)..(295): "n" may be a, t, c, g, other or unknown
  misc_feature (405)..(405): "n" may be a, t, c, g, other or unknown
  misc_feature (461)..(461): "n" may be a, t, c, g, other or unknown
  misc_feature (481)..(481): "n" may be a, t, c, g, other or unknown
  misc_feature (523)..(523): "n" may be a, t, c, g, other or unknown
  misc_feature (550)..(550): "n" may be a, t, c, g, other or unknown
  misc_feature (552)..(552): "n" may be a, t, c, g, other or unknown
agtttttaagactgtgtgtgtatgagacaggtcgcgtcctagagcaaacggttttttttgtaaacagacggcatcctaacaggggcggtgctacccagtctgcggggagtcgctcgggatcgaagcacctcagagctccttcgagcgtatcccttcgggaaagccccacgccttccccgaggcgcctcctccggcctgcagcacgccctcgtcctgcacttcctcctcggaatctgcaagacagagtctagctctttcacccaggctggagtgaagtggtgcaatctcagctcantgcaacctccgccccctgggttcaagtgattctcctgcctcagcctccccagtagctgggattacagtgatatcctgagagaagatgggaaagggctgcaaggttgtggnttgtggattgttatctgtggggaaaactgcaattttggagcagctcctttatgggnaatcatactattggaatggnaagattgcgaaacaatggaagatgtatacatgggttcagttngaaacagaccggaggagtaaaaggaananttacatc

SEQ ID NO: 4090 - DNA, 791 bp, Homo sapiens
  misc_feature (729)..(729): "n" may be a, t, c, g, other or unknown
  misc_feature (737)..(737): "n" may be a, t, c, g, other or unknown
  misc_feature (748)..(748): "n" may be a, t, c, g, other or unknown
  misc_feature (760)..(760): "n" may be a, t, c, g, other or unknown
  misc_feature (787)..(787): "n" may be a, t, c, g, other or unknown
aataatattcttcaagagatttacagagttccttgagtgaattgttggtttgttcttaatactgaatttcctattcaaatttatttagaagttcatttcttacagtgatctcatctcctattaagatattcttcaagatctggaggccatcctttaagcttcttgcaacagtctgggagcaaagagtttactcgccactgggtagtgggccatggacaccccagtctccaccagaagttcgggattgcaaaatgggactctggcagcaaatttcaaactgtatgccagacctggccctttgcaggtgtctggaaagatggctgaataggaacagctctgctctgcagctcccagcgagatcaacgcagaaggagataatttctgcatttccaactaaagtacccagctcatctcattgggactggttagacagtgggtgcagcccacagaaggcaagcagaagcagggtggggtgtcgcctcacccgggaagcgcaaggggtcagggaactccctcccctagccaagggaagctgtgagggactgtgccgtgaggaacggggcattccggcacagatactatgctttccccaagggctttgcaacccacagaccaagagattcccttggggtgcctgcaccaccaagggccctggggtttcaagcagaaaactggggcaaccattttggggcagacactgggcctagcaacaaggagttttttttcaanacccctangtagcccctanaaaggccaagcnaagacagaaactggttcaatcccctgnaaaa

SEQ ID NO: 4091 - DNA, 647 bp, Homo sapiens
  misc_feature (468)..(468): "n" may be a, t, c, g, other or unknown
  misc_feature (510)..(510): "n" may be a, t, c, g, other or unknown
  misc_feature (529)..(529): "n" may be a, t, c, g, other or unknown
  misc_feature (532)..(532): "n" may be a, t, c, g, other or unknown
  misc_feature (610)..(610): "n" may be a, t, c, g, other or unknown
  misc_feature (615)..(615): "n" may be a, t, c, g, other or unknown
  misc_feature (626)..(626): "n" may be a, t, c, g, other or unknown
  misc_feature (631)..(631): "n" may be a, t, c, g, other or unknown
  misc_feature (639)..(639): "n" may be a, t, c, g, other or unknown
aagtgcgcatgtgcgcgaggagtcgctcgggcacttattgagcgccgactgtctacgggcggccgggggtgatgggcagaggcttcagtgtccccttcgcctccgcaggagaggagaggcagcagcatggcgagtgtcctgtcccgacgccttggaaagcggtccctcctgggagcccgggtgttgggacccagtgcctcggaggggccctcggctgccccaccctcggagccactgctagaaggggccgctccccagcctttcaccacctctgatgacaccccctgccaggagcagcccaaggaagtccttaaggctcccagcacctcgggccttcagcaggtggcctttcagcctgggcagaaggtttatgtgtggtacgggggtcaagagtgcacaggactggtggagcagcacagctggatggagggtcaggtgaccgtctggctgctggagcataagctgcangtctgctgcaaggtggaggaggtgtggctggcagagctgcanggcccctgtccccaagcancanccctggagcccggagcccaagccctggcctacaggcccgtctccaagaacatcgatgtcccaaagagggaaatccggncgcantgggaaatggntgaanatgatggngggcatgg

SEQ ID NO: 4092 - DNA, 658 bp, Homo sapiens
  misc_feature (539)..(539): "n" may be a, t, c, g, other or unknown
  misc_feature (604)..(604): "n" may be a, t, c, g, other or unknown
  misc_feature (616)..(616): "n" may be a, t, c, g, other or unknown
  misc_feature (635)..(635): "n" may be a, t, c, g, other or unknown
  misc_feature (650)..(650): "n" may be a, t, c, g, other or unknown
  misc_feature (653)..(653): "n" may be a, t, c, g, other or unknown
ttttctgggctcggacctaggtcgcggcgacatggccaaacgtaccaagaaagtcgggatcgtcggtaaatacgggacccgctatggggcctccctccggaaaatggtgaagaaaattgaaatcagccagcacgccaagtacacttgctctttctgtggcaaagtaagtaaggcaaagtctctggtgagaggagagggagggcaggtttcttacccaagtgaggcctgacttcaaggtattttataagccgtgtgctggtgggcagttggaattactcataccgttgattatgagttttaagataaaagtgttgatggtaacttcagattttgtgagacgtttttcatttaaagaaaaccgcttaaacgttaatgggtaaaataatcatttgacagagtgcccccagcctaagccaaacctgctttgtgggaaatgattccatcagttttgtctactgatgtttctgcaccaactcccaaaatgtctgtgcatctaataccattctacttgttctgcgagggatttttgtttgataaangtttgaacgtttatgtgcaaaatactgcattacagcaatccttggtttgtttttgagggagaaanggaggctttcanaatccctgacaataaaggngaatccaaaatttanacntctgg

SEQ ID NO: 4093 - DNA, 680 bp, Homo sapiens
  misc_feature (469)..(469): "n" may be a, t, c, g, other or unknown
  misc_feature (595)..(595): "n" may be a, t, c, g, other or unknown
  misc_feature (611)..(611): "n" may be a, t, c, g, other or unknown
  misc_feature (639)..(639): "n" may be a, t, c, g, other or unknown
  misc_feature (664)..(664): "n" may be a, t, c, g, other or unknown
  misc_feature (677)..(677): "n" may be a, t, c, g, other or unknown
ttttgttcgcgcggaagcgccgcggtagggtgggaacccaagcgggagagccgcgggatttgcggccgccgccatgccgtcgtccccgctgcgggtggcggtggtgtgctcgagcaaccagaaccggagcatggaggcgcacaacatcctcagcaaacggggattcagcgtccgatcctttggaacagggactcacgtgaagcttccaggaccagctcccgacaagcccaatgtttatgatttcaaaaccacatatgaccagatgtacaatgatcttcttaggaaagacaaagaactctatacacagaatgggattttacatatgctggacagaaataagagaatcaagccccggccagaaagattccagaactgcaaagacctgtttgatctgatcctcacttgcgaagagagagtgtatgaccaggtggtggaagatctgaattccagagaacaggagacctgccancccgtgcacgtggtcaatgtggacatccaggacaaccacgaggaggccaccctgggggcgtttctcatctgtgagctctgccagtgtatccagcacacggaagacatggagaacgagatcgacganctgctgcaggagttcnaggagaatatggccgcacctttctgcanaccgtctgcttctactgagccaagngcccgcatggganccg

SEQ ID NO: 4094 - DNA, 525 bp, Homo sapiens
  misc_feature (336)..(336): "n" may be a, t, c, g, other or unknown
  misc_feature (343)..(343): "n" may be a, t, c, g, other or unknown
  misc_feature (388)..(388): "n" may be a, t, c, g, other or unknown
  misc_feature (417)..(417): "n" may be a, t, c, g, other or unknown
  misc_feature (446)..(447): "n" may be a, t, c, g, other or unknown
  misc_feature (506)..(506): "n" may be a, t, c, g, other or unknown
  misc_feature (513)..(513): "n" may be a, t, c, g, other or unknown
  misc_feature (524)..(524): "n" may be a, t, c, g, other or unknown
cagctggagctttgccgcatctgcgttgctgtgcccgcgctcttcgggcgaggaagtcccttctggtggagggagaaaagggttacatgagttagattaccatggcagctcgagccaggctctccacttccgtgagccttcctctaagtgagatcgggggggagataatgaaggccacaactcccaggaggctccacgccgggcggtcagggacgctcgcgaggacgcatgggcccccaggaatgggaactggttagatcccaggaactccgtgccggagacgggaagagaggatgcctagggccctaaatggaaaggccagagctggagacctancacccanaatatgagaccgcaattcgagaatcaaagggccgggagcgatggngagcgcctgtaatcccagcactttgggangttgaagcgggaggatcctttgaggccannagttccaagctgcagtgagcccgtgatcgcaccactgcactccagcctgggcgacagancgcacangtgccagcaang

SEQ ID NO: 4095 - DNA, 703 bp, Homo sapiens
  misc_feature (470)..(470): "n" may be a, t, c, g, other or unknown
  misc_feature (505)..(505): "n" may be a, t, c, g, other or unknown
  misc_feature (529)..(529): "n" may be a, t, c, g, other or unknown
  misc_feature (619)..(619): "n" may be a, t, c, g, other or unknown
  misc_feature (622)..(622): "n" may be a, t, c, g, other or unknown
  misc_feature (624)..(624): "n" may be a, t, c, g, other or unknown
  misc_feature (683)..(683): "n" may be a, t, c, g, other or unknown
  misc_feature (685)..(685): "n" may be a, t, c, g, other or unknown
ggccctgctgcacatcctgtgcaaccttgggcctctctcagccctgagggctggcagagaggaggtcctttttggccccaggtgactcttaactcccaggacagagcaaaggtcctgagcccttagttgcctggaggcttgagtcctgggagcccgctgtctgctgcctctgcaagtgggagaggtcactgcccgagggaggacagggcatgctgccaggctccaggggaggagccccagggagggagcctctggaggtggtgcccaggccgttctcctgcctcctgccctgtgcccgcctcacttcatgttcttcctcagatgagagggagggtgggcacccccaggaatctcttccctgcaccttggccccctgcccctggaggagcccagcttcttctccagagcctagcagcccagaatctgagagcagaggccctggtcccaggcccagccctgcatcgtcccangagggcagcccgcaagcttcaacaccacagctcangcattttgcccaagtggacactanatgcttcacagtcttcactcttgggagacggatggggaacaagccaagttccttgaaagaaaaaggaggcaagggaaggcccaaaaccangcnanggaagtaaagagtgaaaggaacaaccaagcctgcagagaatggagacgtccaacctganantcaccttgacttctgcaa

SEQ ID NO: 4096 - DNA, 578 bp, Homo sapiens
  misc_feature (426)..(426): "n" may be a, t, c, g, other or unknown
  misc_feature (484)..(484): "n" may be a, t, c, g, other or unknown
  misc_feature (505)..(505): "n" may be a, t, c, g, other or unknown
  misc_feature (508)..(508): "n" may be a, t, c, g, other or unknown
  misc_feature (567)..(567): "n" may be a, t, c, g, other or unknown
  misc_feature (570)..(570): "n" may be a, t, c, g, other or unknown
caaaatgtgctttgaggtaggaagggacctcctgtagagcggctttggcatgaggtcgacccgccctggggtggctccttttccctgtgttggcttggggccactgccccttcatgtttggctcacatggtccagaagcatcagggctcttttaacccagaatagtcaagccttggtttccttacccctgcagttttccagagcagctaaaaaacatccaagctggcaaaccattcttcctactccaaacattaggagcttttaccagtaagcaaggggtgggaagcttttcctttcttgaagatgctgccagcgtagtttcccttgtagctgccatcctgggtgcatgacttgcaaaactgatatgtgagtgacaataagccagatggcctttgcaaaagctctgcttattttgatttttgtggntccttacaaaaggcgaagtgagcattgatctttgttggggctgttgtagctcaacggnaacatcactgggttgtttccncantttaattttcccaaaacctttacccattatctgcagattttcacatctaagcaaaatanggntcatatga

SEQ ID NO: 4097 - DNA, 823 bp, Homo sapiens
  misc_feature (715)..(715): "n" may be a, t, c, g, other or unknown
  misc_feature (773)..(773): "n" may be a, t, c, g, other or unknown
  misc_feature (796)..(796): "n" may be a, t, c, g, other or unknown
  misc_feature (801)..(801): "n" may be a, t, c, g, other or unknown
  misc_feature (809)..(809): "n" may be a, t, c, g, other or unknown
  misc_feature (820)..(820): "n" may be a, t, c, g, other or unknown
gtcgtctttctgtctcggctgaggcagccatctttctcttgccgcgtgctggtgttggaggaccctccctgcttcagatttaccaacagcatgaatcaagaaaagttagccaaacttcaggctcaggtccggatagggggcaagggtacagctcgcagaaagaagaaggtggtacatagaacagccacagctgatgacaaaaagcttcagagttctctaaaaaaactggctgtgaataatatagctggtattgaagaggtgaacatgattaaagatgatgggacagttattcatttcaacaatcccaaagtccaagcttccctttctgctaatacctttgcaattactggtcatgcagaagccaaaccaatcacagaaatgcttcctggaatattaagtcagcttggtgctgacagtttaacaagccttaggaagttagctgaacagttcccacggcaagtcttggacagtaaagcaccaaaaccagaggacattgatgaggaagatgatgatgttccagatcttgtagaaaattttgatgaggcatcaaagaatgaagctaactaaaagtttggtttttgggaagctggcatggactagatttaacaaatcagctatgtggttccaaagttttacagacatggagaacatcacctggttactaagttcaagtaatataaataattttgtatattaataaatgctgtttggttcnagcaattttttcggtcattttgatttttgcatttttggcacttccctcccaaaggaanattttttttgggccaaaaattangaaantattgggngcaattttganggg

SEQ ID NO: 4098 - DNA, 758 bp, Homo sapiens
  misc_feature (469)..(469): "n" may be a, t, c, g, other or unknown
  misc_feature (511)..(511): "n" may be a, t, c, g, other or unknown
  misc_feature (601)..(601): "n" may be a, t, c, g, other or unknown
  misc_feature (638)..(638): "n" may be a, t, c, g, other or unknown
  misc_feature (657)..(657): "n" may be a, t, c, g, other or unknown
  misc_feature (689)..(689): "n" may be a, t, c, g, other or unknown
  misc_feature (721)..(721): "n" may be a, t, c, g, other or unknown
  misc_feature (739)..(739): "n" may be a, t, c, g, other or unknown
  misc_feature (752)..(752): "n" may be a, t, c, g, other or unknown
  misc_feature (757)..(757): "n" may be a, t, c, g, other or unknown
agccgagacggtgcagggccggagaagcaccttcactcccagcctgcgccccgatgctgcgcgttctgtgcctcctgcgcccctggaggccccttcgggcccgcggctgcgcttccgacggggcggccgggggctcagagatccaagtgcgcgccctggcgggtccggaccaagggatcactgagattctgatgaacagaccttctgcccgcaatgccttggggaatgtcttcgtcagtgagctgctggaaactctggcccagctgcgggaggaccggcaagtgcgtgtcctgctcttcagaagtggagtgaagggcgcgttctgtgcaggtgcagacctgaaggagcgggaacagatgagtgaagcagaggtgggggtgtttgtccagcgactccggggcctgatgaatgacatcgcttcctcggcagtcatgggactgattgagaccacgcgagggctcctcccggnggcaggagggactcagaggctgccccgttgtctgggggtggncctggcgaaggagctcatcttcacgggccgacgactgagtggaactgaggcccacgtactgggggctggtgaaatcacgctgtggcccanaacgaaggagggggaacgccgcctaccaacgggcacnaacactgggcccaaggagnttcctgccccaaggcccccaattgcccgttcnggctggggcaaaagttagccaatttaacccgnagggaaccggaggttggnaaattgcaatctngggant

SEQ ID NO: 4099 - DNA, 881 bp, Homo sapiens
  misc_feature (692)..(692): "n" may be a, t, c, g, other or unknown
  misc_feature (723)..(723): "n" may be a, t, c, g, other or unknown
  misc_feature (804)..(804): "n" may be a, t, c, g, other or unknown
  misc_feature (813)..(813): "n" may be a, t, c, g, other or unknown
  misc_feature (820)..(820): "n" may be a, t, c, g, other or unknown
  misc_feature (831)..(831): "n" may be a, t, c, g, other or unknown
  misc_feature (876)..(876): "n" may be a, t, c, g, other or unknown
tctctcagatgttgttattaactcgctctgtgttgttgcaaaactttttggtgcagattcgtttccaaaactattgctactttgtgtgctttaaacaaaataccttgggttgatgaaacatcaacccagtgctaggaatactgtgtatctatcattagctatatgggactatattgtagattgtggtttctcagtagagaagtgactgtagtgtgattctagataaatcatcattagcaattcattcagatggtcaataacttgaaatttatagctgtgataggagttcagaaattggcacatccctttaaaaataacaacagaaaatacaactcctgggaaaaaaggtgctgattctataagattatttatatatgtaagtgtttaaaaagattattttccagaaagtttgtgcagggtttaagttgctactattcaactacactatatataaataaaatatatacaatatatacattgttttcactgtatcacattaaagtacttgggcttcagaagtaagagccaaccaactgaaaacctgagatggagatatgttcaaagaatgagatacaattttttagttttcagtttaagtaactctcagcattacaaaaggagtaagtatctcacaaataggaaataaaaactaaaaaccgtagatttaaaaaagaacctgcacggggctttanggtaaatgctcaatcttaaacccccactaanaggggaaagtcctccccaagtttcaagcaaaggaccaatttacttaaaggtgaagttttgggaaagttataaagggggtanggtttttangcccatnaggattttaanttttaaatttttgccttcctttaaggttcggttcctaatttaaangcaat

SEQ ID NO: 4100 - DNA, 624 bp, Homo sapiens
  misc_feature (395)..(395): "n" may be a, t, c, g, other or unknown
  misc_feature (455)..(455): "n" may be a, t, c, g, other or unknown
  misc_feature (482)..(482): "n" may be a, t, c, g, other or unknown
  misc_feature (529)..(529): "n" may be a, t, c, g, other or unknown
  misc_feature (593)..(593): "n" may be a, t, c, g, other or unknown
  misc_feature (600)..(600): "n" may be a, t, c, g, other or unknown
  misc_feature (613)..(613): "n" may be a, t, c, g, other or unknown
  misc_feature (621)..(621): "n" may be a, t, c, g, other or unknown
aaaacggcgggaccagcagcgacggtagcagcagcatggccgcgatctatgggggtgtagaggggggaggcacacgatccgaggtccttttagtctcagaggatgggaagatcctggcagaagcagatggactgagcacaaaccactggctgatcgggacagacaagtgtgtggagaggatcaatgagatggtgaacagggccaaacggaaagcaggggtggatcctctggtaccgctgcgaagcttgggcctatctctgagcggtggggaccaggaggacgcggggaggatcctgatcgaggagctgagggaccgatttccctacctgagtgaaagctacttaatcaccaccgatgccgccggctccatcgccacagctacaccggatggtggngttgtgctcatatctggaacaggctccaactgcaggctcatcaaccctgatggctccganagtggctgcggcggctggggccatatnatgggtgatgagggttcagcctactggatcgcacaccaagcagtganaatagtgtttgactccattgacaacctaaaagcggctcctcatgatatcggctacgtcatacangccatgntccactatttccntgtgccanatc

SEQ ID NO: 4101 - DNA, 732 bp, Homo sapiens
  misc_feature (456)..(456): "n" may be a, t, c, g, other or unknown
  misc_feature (616)..(616): "n" may be a, t, c, g, other or unknown
  misc_feature (640)..(641): "n" may be a, t, c, g, other or unknown
  misc_feature (647)..(647): "n" may be a, t, c, g, other or unknown
  misc_feature (649)..(649): "n" may be a, t, c, g, other or unknown
  misc_feature (725)..(725): "n" may be a, t, c, g, other or unknown
attttttgcagatgcaagaagagagtatcgggtcactatgtgacatctgcagctgccaagagtgtccatgctgcccctaatcctgctccaaaagaactgacaaataaagaggcagaaagggatatgctgccttctccggagcagactctttctcccttaagtaaaatgcctcactctgttccacaaccccttgttgaaaaaactgatgatgatgtcatcggtcaggctcctgctgaagcctcccctcctcccatagctccaaaacctgtgacaattcctgctagtcaggtatccacacaaaatctgaagactttgaaaacttttggtgccccacgaccatactcaagttctggtccttcaccgtttgctcttgctgtagtgaaaaggtcacagtctttcagtaaagagcgcaccgagtcacctagtgccagtgcattggtccaacctccagccaanacagaggaagggaagactcattctgtaaataaatttgtggacatcccacagcttggtgtgtctgataaggaaaataactctgcacataatgaacagaattcccaaataccaactccaactgatggcccatcattcactgttatgagacaaagttctttancattccaaaaagctctgacccagnncaagtncnacagagttttgctgactgcaatccgttcgggagaaggtgctgccaaatttggaaaaggggttaccattccatcaanattcaaa

SEQ ID NO: 4102 - DNA, 801 bp, Homo sapiens
  misc_feature (645)..(645): "n" may be a, t, c, g, other or unknown
  misc_feature (707)..(707): "n" may be a, t, c, g, other or unknown
  misc_feature (764)..(764): "n" may be a, t, c, g, other or unknown
  misc_feature (789)..(789): "n" may be a, t, c, g, other or unknown
  misc_feature (793)..(794): "n" may be a, t, c, g, other or unknown
tattgacaaacaatacagcaacaaataatttactatcactcaggattataaggctggtgttaagcagaacagccattaaatcagcatcaaaagaacaaatagtaaaatccaaagtattaattacagataacttttcaaaaattcatcattcacccttgatttaattatttctctggcaattatttaatagacttctcggagtctgttaagtacttaaaccaagaactaccattattcctactgggaaaacataaacatttctcaagtggaaagtaaacagtgttggcactatttttatatatggttaaagagacctgtcattgcaataaaagccagcattcacaaaatgaggaagataaggaaagtagcataaatattttctattaacatggctttacaactgctaaaacttatagtataaaaatgtactaacaagagactaattcaagaagttgcaggatacacaatttttaaaaatctcatttctacatcttagcagtgacaaactgcaatttaaaaagtgtgtttggttattaatatatatgagacttttaaagaaagttatataactacatagagataaattaagaaagatgcctaaatagaagcaagtttaaagagctatatttttaaacatggaacaanctcccatgggagccatgccagtggtagtgggaaaagtagtacatgggggagatggggggagnttttttggaaaaaccaggatttcaggttcccaatttcactactttccaagttggtanaccccttggggaaaggtcactcccnaagnnaatctaa

SEQ ID NO: 4103 - DNA, 598 bp, Homo sapiens
  misc_feature (267)..(267): "n" may be a, t, c, g, other or unknown
  misc_feature (361)..(361): "n" may be a, t, c, g, other or unknown
  misc_feature (507)..(507): "n" may be a, t, c, g, other or unknown
  misc_feature (550)..(550): "n" may be a, t, c, g, other or unknown
  misc_feature (580)..(580): "n" may be a, t, c, g, other or unknown
  misc_feature (597)..(598): "n" may be a, t, c, g, other or unknown
ttttctttcaactcgatgagaggaggactcctcctgggcctggtgcttcgaggtccagacgagcagacactggcgcctgtgaccctgcagcggacgcccttcaaagtccgcgtggccgcatttggaagcctgggcggcgtggagacggcgccttcagcttgagataaatgtggccccgtcccagagcaccacccgagacatcaggagcccatcgtgggctagggaagatcctccgggacctaacggcccaggtcttccacccttggncacctccccaggtgatgcctgaagctcaagggactgtgtccaccctcaggccctgcccgtggctctggatcggcggtccccatcagaggcctgngctgagtcctcaggtcaagaagtggcgctgacctggagcccctgcctggggctggccttcctcacagtgagctgggcctcctgccatcctggctctggagggcgtctgagtggaaagaggctcagcctcacctccacaccctgaanactcactctctggccctgggctctgttgtgtgcaccgcctgtntgcaatggcccaagccttgcctcgaagcantcccctggggaacaagnn

SEQ ID NO: 4104 - DNA, 693 bp, Homo sapiens
  misc_feature (320)..(320): "n" may be a, t, c, g, other or unknown
  misc_feature (534)..(534): "n" may be a, t, c, g, other or unknown
  misc_feature (603)..(603): "n" may be a, t, c, g, other or unknown
  misc_feature (608)..(608): "n" may be a, t, c, g, other or unknown
  misc_feature (612)..(612): "n" may be a, t, c, g, other or unknown
  misc_feature (622)..(622): "n" may be a, t, c, g, other or unknown
  misc_feature (649)..(649): "n" may be a, t, c, g, other or unknown
caaacatgaggcaaaagaaaaaatacatgtttttaagaaaacattgagcagagaactgcagccaggatgcgctcagcagacattcactctggctgctgggacatcagaaaacaaagtcttcatctctctctccagtttcacccaccccaccctttgctttcatttcaggtgtgttggtctatatgacagggaggagagtaaaggagagcaggagcaattggctgcctgcaaagccagctggaggtgaagtgcaggaaaggaaaggtcaccccattctactccatggcctctctgctcccagctgtggtaggctcacatanccagtgtgatcggtttttaagaggcagtgcttttcagcttttctccctgatatatccattttgcttcccagcactttttaggagtagtgagagcacttcctgcccttgttggaagccccagggtggacactcaagcacgaaggtctctcccttaactgctgcccttccaagacttgctcccgagatggagtgggcgtggtcttccaaggctggnccttccttctcctcaccgccaccttccctgccccaagccccaagcagccatgggtacatgggtccccanctcanctangggttcccgncaagtctgcccagctgcaagtactcangccccatgggggggattcttgggtccggtttttcttggtgggaa

SEQ ID NO: 4105 - DNA, 604 bp, Homo sapiens
  misc_feature (526)..(526): "n" may be a, t, c, g, other or unknown
  misc_feature (559)..(559): "n" may be a, t, c, g, other or unknown
  misc_feature (573)..(574): "n" may be a, t, c, g, other or unknown
  misc_feature (577)..(577): "n" may be a, t, c, g, other or unknown
attaatattgggaaaattatgataaaatgctttaaaaattaatatgccagattaaaataactgaatagtttactatttcattcaagcatgtttaaaacaaataatttcctttcaccagtttttcttagtaaactcctgaaaaagtaggaaaggtggaaagtatatatcatttttataaattttaaattgtacatcagacttttaaaatctgtaatatacaagcaagcaaaattattttaaatgacttaattgtatgctaatactcatctgataataaatgcttcttaaagttgacatttaactgctatcacaaagttttatatgtagaaaagtggggtccttttgaataaaagatcattcaactaaaaatattaaaatttatttcactggatggtaatgtaaccttaaaagcatcataataggtaaagtctaatattagttcccttaacaaaatcctaactgtataccagaattaggtcactgaaagaacttgatttgaattacgtttagacaaaaatgatttaantgtaaattccctaaaactttctaaatgcataanttgggcaaaaaagnnaanccacggttaccagtgtaggaagttaca

SEQ ID NO: 4106 - DNA, 622 bp, Homo sapiens
  misc_feature (26)..(26): "n" may be a, t, c, g, other or unknown
  misc_feature (80)..(80): "n" may be a, t, c, g, other or unknown
  misc_feature (105)..(105): "n" may be a, t, c, g, other or unknown
  misc_feature (285)..(285): "n" may be a, t, c, g, other or unknown
  misc_feature (369)..(369): "n" may be a, t, c, g, other or unknown
  misc_feature (551)..(551): "n" may be a, t, c, g, other or unknown
  misc_feature (597)..(597): "n" may be a, t, c, g, other or unknown
  misc_feature (604)..(604): "n" may be a, t, c, g, other or unknown
  misc_feature (618)..(618): "n" may be a, t, c, g, other or unknown
  misc_feature (622)..(622): "n" may be a, t, c, g, other or unknown
aaatgtttttatgcctaaatcttaantagaatggggaatgcatcagcaacccccacacccccctccagatcagccatggntgccaccaacaccaggcccaatggncattgttcctccttctgaagacagcaacagtcaggacagtggggaatttgcccctgacaacaggcatatatttaaccagaacaatcacaactttggtggaccacccgataattttgcagtggggccagtgaaccagtttgactatcaggtgaaagatattttgttgctttaatattgtanatgtgcacgtaatccattctttggaagtgtctcatcaagaatacctaagatacgtgtttcacttttcagacttgtataaataancacattctgtctcagttatcaatttttgagtattaaaataattagaatttgttttctgattttttatttcattaggaaaatggtataaaagatcattacggcaaacttttgaaaaaattaaaaatgtataagtgcaatagctatatgatgttttattttctaatttatatttcaaaatgggnatatttaaatgttaaagactaagagaatgcacagtaattgaatatngctcaanggttaagacatganttan

SEQ ID NO: 4107 - DNA, 771 bp, Homo sapiens
  misc_feature (656)..(656): "n" may be a, t, c, g, other or unknown
  misc_feature (685)..(685): "n" may be a, t, c, g, other or unknown
  misc_feature (694)..(694): "n" may be a, t, c, g, other or unknown
  misc_feature (700)..(700): "n" may be a, t, c, g, other or unknown
  misc_feature (729)..(729): "n" may be a, t, c, g, other or unknown
  misc_feature (762)..(762): "n" may be a, t, c, g, other or unknown
tacagagttaggttcctacaagcctctggtcacaacattttatctactgattaatatataaccacgtattatgtgtgtttctgtttaaagattcctcatttaatatatattgttgattcactaacattaagttcatggtcaacatcactctaactcatacctgaaccaagcttatctaatgtgcatatttttccccataaggcctttttgcacttaggaatgccagacagcactttggcactacatttgggggccattttaaacagtgaagccaccaaaaacacaaaaatgtggcaccaaacagatggtgaaagggctgttgtggatagtaagagctgaaactagaaagcagcagagatcacagagttcagcttcagctggggacgtgtgcatatggtaactcaaatattttgccactttgcacatgtctgcaatgaccacagaaataccacaagtattggtttgggggttacacatgaattttagcaaacaggcaaattcacaaatatggaatctgtaaatgatcaagatcaactgtatatacgcatgcatacactcatataaatatataggtttgtatgggctgttttaatttattatataatgtaaaaacattctgcaagcatagtttttttaagttaatgatgtggcttgtngacgttttttatgaagctacactaagatnaagttgtantcctangaagtggataccataattattccataatnagggatctaccaataattttaaaccattccgtnctaaatgga

SEQ ID NO: 4108 - DNA, 661 bp, Homo sapiens
  misc_feature (552)..(552): "n" may be a, t, c, g, other or unknown
  misc_feature (589)..(589): "n" may be a, t, c, g, other or unknown
  misc_feature (616)..(616): "n" may be a, t, c, g, other or unknown
  misc_feature (643)..(643): "n" may be a, t, c, g, other or unknown
  misc_feature (646)..(646): "n" may be a, t, c, g, other or unknown
  misc_feature (659)..(659): "n" may be a, t, c, g, other or unknown
gtacaaaaaaaaacttataaaatgtttaaaaaaatgttcaaagcttgggagaaaagctttcttcattagtcaaggtgttttgatatggtattaaaatgtctaataaaagatggcactgcgtgattttattttaatgaagtgttatacaatcaagaaatgggggcaagggcctgccccccactccctcacctacctccttagcattccttcaggctgctactcggggctccaggtgtgtgaattggtcctcagatagtcaggcctgggtggagggagtggcaagtcaggcgtgcctcctacaagcttcctaacctcttaagcatcatggaaccagtcagccctctgtggagtcattgtgctggacctctgaaaagatctgcaggggccaagatgttgcagccaccggaggctgcaaggatgtgggttcttccaggtgtgggcccagcccccctccttccagcctttgctccccatcccacgttccactcgccctgcctgttgttcagtttgcgtctcagtgctgactcacgggcatgcttcattgaggcccangaagaggccctggtttggggctgtgccaagctcaganccctttgaccaagaaccaactgctcanggtcacaaaaagttggcaaaaattgcnggnctggggcaagganct

SEQ ID NO: 4109 - DNA, 641 bp, Homo sapiens
  misc_feature (584)..(584): "n" may be a, t, c, g, other or unknown
  misc_feature (592)..(592): "n" may be a, t, c, g, other or unknown
  misc_feature (607)..(607): "n" may be a, t, c, g, other or unknown
  misc_feature (625)..(625): "n" may be a, t, c, g, other or unknown
  misc_feature (629)..(629): "n" may be a, t, c, g, other or unknown
agtcccccttgaacgcacctcaggatggcccgtactttggaaccactagcaaagaagatctttaaaggagttttggtagccgaacttgtaggcgtttttggagcatattttttgtttagcaagatgcacacaagccaagatttcaggcaaacaatgagcaagaaatatcccttcatcttggaagtttattacaaatccactgagaagtctggaatgtatggaatcagagagctagatcaaaaaacatggttgaacagcaaaaattagatccagtcatcacgttcagcctcccatctaagctgtttgagacctttgagagaagaagaaaagatgagtgtactaccacactgtagactcttggtggtcccacagaacatgctgctgagtcacaggaacttctagcctgccttggcctgtggtttcccacccactatacaaacccactgcttgtttgttgcttttcttctcatatttattgtcaaagatgaatgtttcaaaaagaaatgactaaggaaggaaaagaaacaaatgctctaaagattttctctccccaagcacttttactggtgaaataaaaaccagtnacaatcantatgtaaaaacgggnccacttccctaaaaaaangtantttttgtagtct

SEQ ID NO: 4110 - DNA, 749 bp, Homo sapiens
  misc_feature (598)..(598): "n" may be a, t, c, g, other or unknown
  misc_feature (674)..(674): "n" may be a, t, c, g, other or unknown
  misc_feature (680)..(680): "n" may be a, t, c, g, other or unknown
  misc_feature (710)..(710): "n" may be a, t, c, g, other or unknown
  misc_feature (721)..(721): "n" may be a, t, c, g, other or unknown
  misc_feature (731)..(731): "n" may be a, t, c, g, other or unknown
gagagaatggataaagatctgggatctgtgcagggatttgaagatacaaataaatccgagagaactgagagtctggaagcaggagatgacgagtccaagttagatgatgcacattcattaggctctggtgctggagaaggatacgagccaatcagtgatgacgaactagatgaaattctggcaggtgatgcagaaaagagggaggaccaacaggatgaggagaagatgccagatcccttagatgtgatagatgtggattggtctggtcttatgccaaagcatccaaaagaaccacgagagcctggggctgcactcttaaaattcacacctggagctgttatgctaagagttgggatttctaaaaagttggcaggttctgaactctttgccaaagtcaaagaaacatgtcagagacttttagaaaaacccaaagatgcagacaatctctttgaacatgaattgggggctctcaatatggctgcattactacgaaaagaagaaagagcaagtcttcttagtaatcttggcccatgttgtaaggcgttgtgcttcagacgggattctgcaattcgaaagcagcttgttaaaaattgagaanggcaccataaaacaagcttacacgaagtgctccaatgggtagacaatgaattacttcgattggagtcctcggttantttaancgggaaagactactttgccaaggctccaangacaatgaaanagactggaangataataaaactttcaca

SEQ ID NO: 4111 - DNA, 802 bp, Homo sapiens
  misc_feature (726)..(726): "n" may be a, t, c, g, other or unknown
  misc_feature (742)..(742): "n" may be a, t, c, g, other or unknown
  misc_feature (748)..(748): "n" may be a, t, c, g, other or unknown
  misc_feature (776)..(776): "n" may be a, t, c, g, other or unknown
  misc_feature (781)..(781): "n" may be a, t, c, g, other or unknown
gcaggagaatcaattaaagccattgtgaaagatgtcatgtatatctgcccatttatgggagcagtgagtggaaccctgacagtgacggactttaagctgtacttcaaaaatgtcgagagggacccgcattttatccttgatgttccccttggagtgatcagcagagtggagaagattggagcacagagccatggagacaattcctgtggtatagagatagcgtgcaaggatatgaggaacttgcggcttgcttataaacaggaagaacagagtaaactagggatatttgaaaacctcaacaaacatgcatttcctctttctaacggacaggcactatttgcattcagctataaagaaaaatttccaattaatggctggaaagtttatgatccagtatctgaatataagagacagggcttgccaaatgagagttggaaaatatccaaaataaacagtaattatgagttctgtgacacctaccctgccatcattgttgtgccaactagtgtaaaagatgatgacctttcaaaagtggcagcttttcgagcaaaaggcagagtccctgtgttgtcatggattcatccggaaagtcaagcaacgattacccgttgcagccagccacttgtgggtcccaatgataagcgctgcaaaagaggatgaaaaatacttgcaaaacaataaatggatgccaacgcacagtcacacaagccttatcatcctttgaangccccgacaaaaacangtgtcnccggataaccaaacaaaggatggctgcnttgcntgggggcaattaagaaattgc

SEQ ID NO: 4112 - DNA, 629 bp, Homo sapiens
  misc_feature (479)..(479): "n" may be a, t, c, g, other or unknown
  misc_feature (553)..(553): "n" may be a, t, c, g, other or unknown
  misc_feature (574)..(574): "n" may be a, t, c, g, other or unknown
  misc_feature (590)..(590): "n" may be a, t, c, g, other or unknown
  misc_feature (608)..(608): "n" may be a, t, c, g, other or unknown
  misc_feature (623)..(623): "n" may be a, t, c, g, other or unknown
gttgttggccacagcgtgggaagcagctctgggggagctcggagctcccgatcacggcttcttgggggtagctacggctgggtgtgtagaacggggccggggctggggctgggtcccctagtggagacccaagtgcgagaggcaagaactctgcagcttcctgccttctgggtcagttccttattcaagtctgcagccggctcccagggagatctcggtggaacttcagaaacgctgggcagtctgcctttcaaccatgcccctgtccctgggagccgagatgtgggggcctgaggcctggctgctgctgctgctactgctggcatcatttacaggccggtgccccgcgggtgagctggggacctcagacgtggtaactgtggtgctgggccaggacgcaaaactgccctgcttctaccgaggggactccggcgagcaagtggggcaagtggcatgggctcgggtggacgcgggcgaangcgcccaggaactagcgctactgcactccaaatacgggcttcatgtgagcccggcttacgagggccgcgtggancaaccgccgcccccacgcaancccctggacggctcantgctcctgcgcaacgcantgcaagcggattgangggcga

SEQ ID NO: 4113 - DNA, 714 bp, Homo sapiens
  misc_feature (516)..(516): "n" may be a, t, c, g, other or unknown
  misc_feature (601)..(601): "n" may be a, t, c, g, other or unknown
  misc_feature (622)..(622): "n" may be a, t, c, g, other or unknown
  misc_feature (631)..(631): "n" may be a, t, c, g, other or unknown
  misc_feature (647)..(647): "n" may be a, t, c, g, other or unknown
  misc_feature (689)..(689): "n" may be a, t, c, g, other or unknown
  misc_feature (712)..(712): "n" may be a, t, c, g, other or unknown
attttgaatgtgcagctgcagcgggcgtgagttgggggaggacgggttgccgactcgcctacctagcggtctcttgattgtcgatattttgttggcataggtttatgtagagacgtatacatatatatagacacactgtctttaaatctaggcctgtatccggtgtccgaggcgaactcagtaagatgatgttaagaggaaacctgaagcaagtgcgcattgagtaaaacccggcccgccttcgcgccctggagtccgcggtgggcgagagcgagccggcggccgcggcagccatggcgctcgctcttgccggggagccggcaccgcccgcgcccgcgcctccagaggaccacccggacgaggagatggggttcactatcgacatcaagagtttcctcaagccgggcgagaagacgtacacgcagcgctgccgcctcttcgtgggaaatctgcccaccgacatcacggaggaggacttcaagaggctcttcgaacgctatggcgaacccagcgaantcttcatcaaccgggaccgtggcttcggcttcatccgcttggaatccagaacctgggctgaaattgcaaaaaggcaaacctgggncggcaccattctcaagagcanacctctacnggattcgctttcgctncacattggagcaaccttgactgtcaaagaacctttctccaanttggtttccaaatgaactggctnga

SEQ ID NO: 4114 - DNA, 769 bp, Homo sapiens
  misc_feature (660)..(660): "n" may be a, t, c, g, other or unknown
  misc_feature (675)..(675): "n" may be a, t, c, g, other or unknown
  misc_feature (685)..(685): "n" may be a, t, c, g, other or unknown
  misc_feature (733)..(733): "n" may be a, t, c, g, other or unknown
  misc_feature (751)..(751): "n" may be a, t, c, g, other or unknown
  misc_feature (762)..(762): "n" may be a, t, c, g, other or unknown
attccccaacctgatagccctccgcgacgcattacgcaccgcggacagctggagaggccgaggcgctctcgctttgatttcggcgcctccgccctcgcggggagagattggctgcggccgcgggacggggtagtgagcgcgtcacttcctgccgctgccaggcgcgtcctcccgcgcgctatgacggccagcgcacagccgcgcgggcggcggccaggagtcggagtcggagtcgtggtgaccagctgcaagcatccgcgttgcgtcctcctggggaagaggaaaggctcggttggagctggcagtttccaactccctggaggtcatctggagttcggtgaaacctgggaagaatgtgctcaaagggaaacctgggaagaagcagctcttcacctgaaaaatgttcactttgcctcagttgtgaattctttcattgagaaggagaattaccattatgttactatattaatgaaaggagaagtggatgtgactcatgattcagaaccaaagaatgtagagcctgaaaaaaatgaaagttgggagtgggttccttgggaagaactacctcccctggaccagcttttctggggactgcgttgtttaaaagaacaaggctatgatccatttaaagaagatctgaaccatctggtgggatacaanggaaatcatctctangtgggccganaagattttgattttctttaaaaagacaagaaataaggtcctgggttangggaattgaaaaaatgtntacatttcggnacaaact

SEQ ID NO: 4115 - DNA, 602 bp, Homo sapiens
  misc_feature (583)..(583): "n" may be a, t, c, g, other or unknown
  misc_feature (591)..(591): "n" may be a, t, c, g, other or unknown
  misc_feature (594)..(594): "n" may be a, t, c, g, other or unknown
ctcaggcctacctcctcctggcctgttcctttcttggtccccatagaactgactgctttgtgtgccgccctgtatgccccttccccttcattgtcccgcctggccgcgctccatcccgcatggcagaagtgctgctcctgctcctgctcctttcgctggtggggggaagagtgatcagggctctcagctgaacctcccaggcccagcccaggacccctagtgggtctgctgtgggggctgggaaggtgagttgcttaggaaaggagagggtaggagctttcttgggacctgaacatcagttcttggaggcccccttgtaaaacctgcctcagcctctcctttgcaaagccagaaacaggaaagagggctggggtccccacctctggatggtgctgaggtctccaggctcctggagtgcctcatgctggctaagttctctctgggctcctccaggggttctgtgtgctcttggaggtccctctgctagtggtggctaactagagagtcagcaggggggtgactgggaaagagggagaggtgatgttgcctggtactcccctccttgcggacctcataccacgtnacgtggcngcnttgggcca

SEQ ID NO: 4116 - DNA, 794 bp, Homo sapiens
  misc_feature (609)..(609): "n" may be a, t, c, g, other or unknown
  misc_feature (635)..(635): "n" may be a, t, c, g, other or unknown
  misc_feature (657)..(657): "n" may be a, t, c, g, other or unknown
  misc_feature (700)..(700): "n" may be a, t, c, g, other or unknown
  misc_feature (726)..(726): "n" may be a, t, c, g, other or unknown
  misc_feature (772)..(772): "n" may be a, t, c, g, other or unknown
  misc_feature (775)..(775): "n" may be a, t, c, g, other or unknown
  misc_feature (790)..(790): "n" may be a, t, c, g, other or unknown
accaatatagagaatcaccagtatagagaacatttagtttcatgagatctcctagggaatgagtgtaagtagagaagggaaaggggactgaaccttggagtactcagatgcttggacttctggaaggtgagcatctggtaaaggaacagctggtgatgtaagagagtaaaaatctggggaagaaagatagatcagctgtgtcagctgcttctcattggtggagtacaatgaggcctggtgactgcagaagtcaagggcagcttccctggaggggctcttgagagaatgggaggaggtaacttgaaaacaactagtttagagcattttcttgagcggtttggctaatgaggagagcatagaaatgggacagtaactgaaagaaaggatattggggatcaagcaggggtttttttgaacatagaagttagaatttttttgtatatagaatgtttgatctcactaaagagaaagatcaaatgaaaaggaggaatttggcatgacggaggaaggaggagaattgcttgtctgctatatccaaggcccctgaaaaaggatgggatccagtgcatgagtggttgggcatgcacttctaggagcaagggaaggcanagggaggagaataaaccttaaaacangtcacaccaaaccggtagtggncaataagtgcactcttcctccactgttgatactggagatttanaatttttaatacaattttttaaaccnctacacatttgataggtttgcctaaattttacctttcattactacnganaataaactttttcanatta

SEQ ID NO: 4117 - DNA, 731 bp, Homo sapiens
  misc_feature (652)..(652): "n" may be a, t, c, g, other or unknown
  misc_feature (661)..(661): "n" may be a, t, c, g, other or unknown
  misc_feature (669)..(669): "n" may be a, t, c, g, other or unknown
  misc_feature (685)..(685): "n" may be a, t, c, g, other or unknown
  misc_feature (730)..(730): "n" may be a, t, c, g, other or unknown
tcactagaatgtaaaaatcacaaaaggaagttgtttgttttgttcacttgtgtatctctaataactagaacaatgctcagtatatgctggattgttagatgaatggacaggactttaaataagtgcttctttagctatgatgaatgactagtttttaattacgaatctgtcacaacctagtacttttgtaaaatgcggtggaaatagtatatatgtatttattagtgtcatgttattaaaatcaacaggcattaaattgtcagattgctataaaaacttctaaatgttttcaattttttgctcataatgaccttctaataaacttgttgtggtcagcacccatttgcagacgacactatcagtaccactgtactagaacatatttaccattttatagtcagcagttaaaatgtgaaagctaaatgaaggacgtattcttctccttgctagacaagaagaagccacttaagagctgatgtcacattatgatggctgaattcctgcaggattattaacttacaaaaaggtttttttagtaataccaggaaaatttgataagtaccaattctatgcagagataagtctttttcagtggactcaattaaaacatcataatcctcattttaagtctgtcatttaatttgaggtttgnttttaatanctggttangtgttattcaatgaantctcagttttacagggttaaaaatattttaacccaagtaaacacng

SEQ ID NO: 4118 - DNA, 708 bp, Homo sapiens
  misc_feature (560)..(560): "n" may be a, t, c, g, other or unknown
  misc_feature (614)..(614): "n" may be a, t, c, g, other or unknown
  misc_feature (618)..(618): "n" may be a, t, c, g, other or unknown
  misc_feature (631)..(631): "n" may be a, t, c, g, other or unknown
  misc_feature (654)..(654): "n" may be a, t, c, g, other or unknown
  misc_feature (678)..(678): "n" may be a, t, c, g, other or unknown
taattgtaaagttttgttatatatcttttatcacaactttagttgtaagtaaacaaagtagaggctaaatgctaccttatacatttataggttgcttaagtcgtgaagcaatatgagtcatatatgtagcacataacatatactgtatataagtcaagttgtacatagtttaaagaaaatcaggtgtgcagaaactcagaccaaattgggaagtatttgcattataaaataactcattataaggatttttcagttagtagatctccatagtaaatttcattcagcaaatgtgtatttttcctatttatttatttttttatttattgagatgaagtctcgctctgttgcccaagctggagtgcagtggcgtgatcttggctcactgcaacctctgcctcccaggttcaagcgattcttctgcctcagcctcctgagtagctgggactacaggtgcgcaccaccatgcctggctaatttttatatttttagtagaaacggggttttactatgttggtcaggctggtctcgaactcctgaccttgtgatcctcccgcctcggnctcccaaaagtgctgggattacaggcgtgagccactgtgccaggtccaagttanttanttatttattgtanagatgggctctcactgtgttggncaagggtgggcttgaactcctggnctcgagcaatccttccatctcagtctccca

SEQ ID NO: 4119 - DNA, 670 bp, Homo sapiens
  misc_feature (510)..(510): "n" may be a, t, c, g, other or unknown
  misc_feature (619)..(619): "n" may be a, t, c, g, other or unknown
  misc_feature (632)..(632): "n" may be a, t, c, g, other or unknown
  misc_feature (647)..(647): "n" may be a, t, c, g, other or unknown
  misc_feature (658)..(658): "n" may be a, t, c, g, other or unknown
  misc_feature (667)..(667): "n" may be a, t, c, g, other or unknown
attacatgggttattcaaatcctgggtcctgagctgctgtttccaatcatgaagaaaaacagtgaatccagtgaacagggattctccaagcagtcatttcagggggctcctgctgaccccgccactcagcagtgcactccccggatcacagcagggcgtttacatagaaagacgttttggtctcgattagctccgatgctttgcgctgaagttgcaaaagatctgtgcactgaacagtgaaggtggcttccggcacactccccgctgccccggaagagacatcctttgaccctctcagcaagtctgtgtgtgtgcgtgtctgtgcgtgtgcgcgcgtgtgtgcatgtgtgtcaaaattgccagtgttgtttaggcaatgtaacatttaccggctgtgtacagcaaacaagctattttttagaaaccgacgtttcagggaagaggggagagagccgcggggtcctgcccgtggttactatgaatgtattgctgttggaggacatctcgatncaaagaacagccgttcctgtgcgggccttcgttgccctcctgctttcaatttttaaagaaatcttgagtgcttgaaggccttggaactgaatttttttttttggtccanccaaatttagcantgtttaaaatggganctaaggtaaanaacaaaacntgc

SEQ ID NO: 4120 - DNA, 751 bp, Homo sapiens
  misc_feature (685)..(685): "n" may be a, t, c, g, other or unknown
  misc_feature (691)..(691): "n" may be a, t, c, g, other or unknown
  misc_feature (695)..(695): "n" may be a, t, c, g, other or unknown
  misc_feature (698)..(698): "n" may be a, t, c, g, other or unknown
  misc_feature (743)..(743): "n" may be a, t, c, g, other or unknown
atatatctttgggaaatatctcctcaagtccattaccctttttaaatcaacttatttggttttgttattgttgttgagttgtaggagttctgtattttctctgggtactaaccccttttcaaatacatgttttgaaatctgttctcccattttgttgcctttttgctatcagtaatgtccttcgatgcacaaaagttttaaatttttatgcagtccaatttattttttcttttattccctgtgcttttggtggcatgtctaagaaatcattgccaaactcaggttcatgaagatttcaccctatgttttcttctaggagctctacagttttagctctatgaaaacaactacttaggttcaaaccaagcctaccacccacacacccactaacttccatgccttatccgctgtcccatcaccccagctggtagccagtcatgttggccttgtttcctcctgattctaagtgtaaacaataaagaagtcccctaggttttgtcttcacagtagacacatctctacaagtgcatttactgaacgtccagatggctggtttgtgcagttgagcatgtaaggtcacatggggtcaagtcagctttattcttccctatgaagtttttcctggtttgtttttcaaaaccccaagttgggccgttttttggaccacaataagtatttgaatgancgtcangaanggnttgcaagaaaagcccattgccaatagctaaaggaaataactttangcctgatt

SEQ ID NO: 4121 - DNA, 567 bp, Homo sapiens
  misc_feature (237)..(237): "n" may be a, t, c, g, other or unknown
  misc_feature (322)..(322): "n" may be a, t, c, g, other or unknown
  misc_feature (339)..(339): "n" may be a, t, c, g, other or unknown
  misc_feature (391)..(391): "n" may be a, t, c, g, other or unknown
  misc_feature (427)..(427): "n" may be a, t, c, g, other or unknown
  misc_feature (445)..(445): "n" may be a, t, c, g, other or unknown
  misc_feature (486)..(486): "n" may be a, t, c, g, other or unknown
  misc_feature (516)..(516): "n" may be a, t, c, g, other or unknown
  misc_feature (552)..(553): "n" may be a, t, c, g, other or unknown
  misc_feature (564)..(564): "n" may be a, t, c, g, other or unknown
tttttctggcagaaggcggggttctcctcgtacgctgcggagtctctgcggggtgtagaccggaatcctgctgacgggcagagtggatcagggagggagggtcgagacacggtggctgcaggtctgagacaaggctgctccgaggtagtagctctcttgcctggaggtggccattcattcctggagtgctgctgaggagcgagggcccatctggggtctctggaagtcggtgcccangcctgaaggatagccccccttgcgcttccctgggctgcggccggccttctcagaacgaagggcgtccttccaccccgcggcgcangtgaccgctgccatggnttttccccatcggccggacgcccctgagctgcctgacttctccatgctgaanaggctggctcgagaccagctcatctatctgctggancaacttcctggaaaaaangatttattcattgaggcagatctcatgagccctttggatcnaaattgccaatgtctccaacctgaaagcancacgaagtagacaagctatacaagggtggagaacannccagccctcanctc

SEQ ID NO: 4122 - DNA, 820 bp, Homo sapiens
  misc_feature (729)..(729): "n" may be a, t, c, g, other or unknown
  misc_feature (750)..(750): "n" may be a, t, c, g, other or unknown
  misc_feature (772)..(772): "n" may be a, t, c, g, other or unknown
  misc_feature (781)..(781): "n" may be a, t, c, g, other or unknown
  misc_feature (813)..(813): "n" may be a, t, c, g, other or unknown
taaatttaatatctgggcaattgagacctttaaacttactttaaaagtatgatcttgatgtatatgatactgttttgtctttgctatattaacagaattagaggggtgttctgcaattcaaataccttatatattccaaattttattctctataatggacttttaaaataaaaggtatatgtgcttcaagagggcaaaatttgaatcatgagctaatttgctaagcatcagattatagaaaagcatccttgattaatttggaactgtgaaagggggcgggtaaaactgttttctgcagaaatttactagtgcagcaaccatttaaattaaatgtttgttaacataatagtgatggcattttctcctccccctccttgtggttttgtccaactagatgttacagtggcagttgcactgactgttaagtgtttaaatgatgacaccattatgtgaagtgattttgaaatgagagattccagccaagaattacatctgctcccatctccttcaaatcatactctctggcagtacagattatgattgatttgtttgtgacagattgcaggaaacagtcattgatttttcaatattttaccttaaaattatttacaagttgtaaccatggggaggtattttcatgggctgtcagcccctgaaagactaggataatattccctgctctctgacaagacaaattacctgtaatgagtgcagtaactgaaggggtanacctttaatttaaaataaggncaataacccccagtgactaaancgaatatgnatttagcaaaaatgaaaccccggagtaacgtngaaaaat

SEQ ID NO: 4123 - DNA, 514 bp, Homo sapiens
  misc_feature (491)..(491): "n" may be a, t, c, g, other or unknown
  misc_feature (498)..(498): "n" may be a, t, c, g, other or unknown
  misc_feature (502)..(502): "n" may be a, t, c, g, other or unknown
gagttcggggccagcagccgtctacccggtgtcgcgttctgtgttgtggcggccctggatccggcgtcagggcgaccgggcggacgaggtggagccagagtctgtcaggcgggttggtgaagggcgcggggccgggcacggcgttgggagtgcgcggcagggaccggccaggcgggctgcaggcacctcagagcccgggacaccccctcaacgtccgcaggcgcgatgaaggcactgatcttagtggggggctatgggacgcggctacgggcgctgacgctgagcaccccgaagccactggtggacttctgcaataagcccatcttgctgcaccaagtggaggcgctagccgcggcaagcgtggaccacgtgatcctgggcgtgagctacatgtcgcaggtgctggagaagggaatggaggcacaggagcagaggctgggaatccgaatctccaagtcccatgaagaagagcctttggggacagcttgggnccctggngctnggccctgaccta

SEQ ID NO: 4124 - DNA, 780 bp, Homo sapiens
  misc_feature (742)..(742): "n" may be a, t, c, g, other or unknown
  misc_feature (750)..(750): "n" may be a, t, c, g, other or unknown
  misc_feature (771)..(771): "n" may be a, t, c, g, other or unknown
  misc_feature (775)..(775): "n" may be a, t, c, g, other or unknown
  misc_feature (780)..(780): "n" may be a, t, c, g, other or unknown
cgcttttaaaatgattcgtaccaacgtttctcatgtggttggccagttggatgacataagaaaaaaccctaggaagtttgtttgcctgaatgacaacattgaccacaatcataaagatgctcagacagtgaaggctgttctcagggacttctatgaatccatgttccccataccttcccaatttgaactgccaagagagtatcgaaaccgtttccttcatatgcatgagctgcaggaatggagggcttatcgagacaaattgaagttttggacccattgtgtactagcaacattgattatgtttactatattctcgttttttgctgagcagttaattgcacttaagcggaagatatttcccagaaggaggatacacaaagaagctagtcccaatcgaatcagagtatagaagatcttcatttgaaaaccatctacctcagcatttactgagcattttaaaactcagcttcacagagatgtctttgtgatgtgatgcttagcagtttggcccgaagaaggaaaatatccagtaccatgctgttttgtggcatgaatatagcccactgaccaggaattatttaaccaacccactgaaaacttgtgtgttgagcagctctgaactgattttacttttaaagaatttgctcatggacctgtcatcccttttataaaaaggctcactgacaaagaggacaagctgttaatttcccacagcaatcaattgcagactaaactttattanggagaaancctaatgccaacctggggaantganttgcn

SEQ ID NO: 4125 - DNA, 679 bp, Homo sapiens
  misc_feature (527)..(527): "n" may be a, t, c, g, other or unknown
  misc_feature (555)..(555): "n" may be a, t, c, g, other or unknown
  misc_feature (622)..(622): "n" may be a, t, c, g, other or unknown
  misc_feature (627)..(627): "n" may be a, t, c, g, other or unknown
  misc_feature (665)..(665): "n" may be a, t, c, g, other or unknown
  misc_feature (674)..(675): "n" may be a, t, c, g, other or unknown
atgatggttggcagttagcttcctggagtgtggacgggtccttccctgcctgactgacttgtccacagggcagcaagaagatgcgccccttggtgtgtcccgagtgtctcctgtaggcagctgagctttcgcaggtctggctgggagccaaggttaccaatctggggggtaacccagccatcatctggatgagcgttggggtctttctgctctggattgcagggcagacgtcgttttgtgctggtcaggcccctcgcctgcctgattcccttggagccccccaagacaggagatgggcagatgtcctctgaagtggcatgggctgcttgctcactggccttcccaggaccctgcccaggtggtgctgcttggccccaggtcgaattcctgtgctggcagcaagcaggggcctgggccgtcggctggctggggctcatgcagccatcccctttgcagccatccgggtgacctgcataggttcctgcggggtctccaacaaggctaatgacacagcgtgggtagtgganggagggttacttcaacagttccctgtcnctggcaaacaaggggagcctgccgctggaggagcacaagcttccccttccaagttcctgcttcctgncactngcacccacgtcctttgagggtcctttcggggaagatcntgcaacaanntgaa

SEQ ID NO: 4126 - DNA, 728 bp, Homo sapiens
  misc_feature (687)..(687): "n" may be a, t, c, g, other or unknown
  misc_feature (703)..(703): "n" may be a, t, c, g, other or unknown
  misc_feature (722)..(722): "n" may be a, t, c, g, other or unknown
tcgcagttcaaacctggtatgccatcaagaaaattcatacaggagaaaagccttacaaatgtaatcaatgtggcaaggtctttaatcaagcatcataccttacaagacatcaaataattcatactggagagaggccttacagatgtagtaaatgtggcaaagcatttcgagggtgttcaggccttactgcccatcttgcaatccatactgaaaagaaatctcatgagtgtaaagaatgtggcaagatcttcactcagaagtcttccctcaccaatcaccatagaattcacattggagagaaaccttacaaatgcaccctgtgcagtaaggtcttcagtcacaattctgaccttgcacagcatcagagagttcattcatgagagtccctacaaactgtgtatggcaaaaccatcatcatgagttctagcattaatcaacatcagtgagtccatactaagtggaaatcatataaatgaaatgtatgtgacacaggctttatcaaggcctgccaaatcactgggacatcaccacatcactgtggaggatgaaagcacacagatgaattgtgtgtacttgggctattattcaagggccattgctatagaacacgatagggatttacacaagaagtaactctgtctctgggtctctgatactaatctatgatattgcatgatgcaagataanggctaagtcaaaatangttgaatccccatgacccngatggt

SEQ ID NO: 4127 - DNA, 643 bp, Homo sapiens
  misc_feature (442)..(442): "n" may be a, t, c, g, other or unknown
  misc_feature (446)..(446): "n" may be a, t, c, g, other or unknown
  misc_feature (458)..(458): "n" may be a, t, c, g, other or unknown
  misc_feature (503)..(503): "n" may be a, t, c, g, other or unknown
  misc_feature (509)..(509): "n" may be a, t, c, g, other or unknown
  misc_feature (606)..(606): "n" may be a, t, c, g, other or unknown
  misc_feature (618)..(618): "n" may be a, t, c, g, other or unknown
  misc_feature (620)..(620): "n" may be a, t, c, g, other or unknown
  misc_feature (625)..(625): "n" may be a, t, c, g, other or unknown
  misc_feature (632)..(632): "n" may be a, t, c, g, other or unknown
attacaaaggttgcttaacttctaattatttgatcactgaggaaaatccagaaagctacacaacactgaaggggtgaaataaaagtccagcgatccagcgaaagaaaagagaagtgacagaaacaactttacctggactgaagataaaagcacagacaagagaacaatgccctggacatggctccagagatccacatgacaggcccaatgtgcctcattgagaacactaatggggaactggtggcgaatccagaagctctgaaaatcctgtctgccattacacagcctgtggtggtggtggcaattgtgggcctctaccgcacaggaaaatcctacctgatgaacaagctagctgggaagaataagggcttctctctgggctccacagtgaaatctcacaccaaaggaatctggatgtggtgtgtgcctcaccccaaaaagncagnacacaccttagncctgcttgacactgagggcctgggagatgtaaagaagggtgacanccagantgactcctggatcttcaccctggccgtcctcctgaagcagcactctcgtgtacaatagcatgggaaccatcaaccagcaggctatggaccaactgtnatatccttttgngncccanggacagnaccaagggtca

SEQ ID NO: 4128 - DNA, 833 bp, Homo sapiens
  misc_feature (709)..(709): "n" may be a, t, c, g, other or unknown
  misc_feature (771)..(771): "n" may be a, t, c, g, other or unknown
  misc_feature (800)..(800): "n" may be a, t, c, g, other or unknown
  misc_feature (814)..(814): "n" may be a, t, c, g, other or unknown
  misc_feature (817)..(817): "n" may be a, t, c, g, other or unknown
  misc_feature (828)..(828): "n" may be a, t, c, g, other or unknown
tcaaaccttgtactactcagctgatcacaagttgcttgatgggaacctactagatggacaggctgaggtgtttggcagtgatgatgaccacattcagtttgtgcagaaaaagccaccacgtgagaatggccataagcagataagtagcagttcaactggatgtctctcttctccaaatgctacagtacaaagccctaagcatgagtggaaaatcgttgcttcagaaaagacttcaaataacacttacttgtgcctggctgtgctggatggtatattctgtgtcatttttcttcatgggagaaacagcccacagagctcaccaacaagtactccaaaactaagtaagagtttaagctttgagatgcaacaagatgagctaatcgaaaagcccatgtctcctatgcagtacgcacgatctggtctgggaacagcagagatgaatggcaaactcatagctgcaggtggctataacagagaggaatgtcttcgaacagtcgaatgctataatccacatacagatcactggtcctttcttgctcccatgagaacaccaagagcccgatttcaaatggctgtactcatgggccagctctatgtggtaagtggatcaaatggccactcagatgacctgagttgtggagagatgtatgattcaaacatagatgactggattcctgttccagaattgagaactaaccgttgtatgcangagtgtgtgctcctgaatggggaaggttatacatccgttggtggctccggatccatatgggncaaaaaagggcctggaaaaaattggtganggtatttggtcctnggnaacaaaagttnttggg

SEQ ID NO: 4129 - DNA, 633 bp, Homo sapiens
  misc_feature (481)..(481): "n" may be a, t, c, g, other or unknown
  misc_feature (551)..(552): "n" may be a, t, c, g, other or unknown
  misc_feature (606)..(606): "n" may be a, t, c, g, other or unknown
  misc_feature (632)..(633): "n" may be a, t, c, g, other or unknown
gatgagcacctaggaggactttcctcatgtttgccttttcacacacatgcaaatgtttcattgaaaatcttctgaaagccgcaatcttgccagaatccccagtaatgagcttcgttcttagtatactaagaatttagtttatgtgaacttagaaactattgcactccccccacaagtaaaaagctgtaagatcatttctgaaataattaaaataactcaaatttaagcaagatgataaaaacatacatgaaaacttaaaaatataaatgtaaatgataaaatttttcatttgtgtgaagcactgcaaaaaattttcccaaaaaaagctgtgcgaaaaaacacgtagtagtaataggaacccaaaaaacttaatcacctttccagataccagagcaaaatcataaaggaacctgccccatagactgtcacccaaatggtgcgtgctactgccagaatggaccttagccattggttccttcantctggctttgcagaggaagtttcatgtcagatactgagcccaagctgcagctaccccagcagagcctcannggctttcccgcactgtcttgggaaacatgggcgtactttgaggtctcctgcaancgtgttgtttggggtcccccaaatgnn

SEQ ID NO: 4130 - DNA, 739 bp, Homo sapiens
  misc_feature (556)..(556): "n" may be a, t, c, g, other or unknown
  misc_feature (577)..(577): "n" may be a, t, c, g, other or unknown
  misc_feature (701)..(701): "n" may be a, t, c, g, other or unknown
  misc_feature (710)..(710): "n" may be a, t, c, g, other or unknown
  misc_feature (734)..(735): "n" may be a, t, c, g, other or unknown
  misc_feature (737)..(737): "n" may be a, t, c, g, other or unknown
gcttccatgactaacttggtcaagatgggctttccttctaaaacagacagccctagctgtgaatattctcggtttgattttgatagcgatgaggacttcaatgctttcttcaactcctcccgagcacaacaaggagaggtgatgaggttggcatgtcgtttggatcccaaaactagcttccagatggctggggagtggctaaagtatcaactatcaacttttcttgatgctggttctgtgaattcttgttctgcagttggaactggagaaggaagcctctgttccgtcttctcaccttcattcgtgcagtgggaagccatgactctttttttggaaagtgttatcacccagatgtttcgaacactaaatagagaagaaattcctgttaatgatggaatagagctattgcagatggttctgaactttgataccaaggatcccctcatcctgtcctgcgtccttactaaagtctctgcactctttccatttgtcacctacagaccaagaagttcctgccccaagtcttctctaagctattttcatctggcacttttgnaactgttgaagaaagtaaggnccccaagaacccgggcagtgaggaatgtgaggaggcatgcttgttcctccaacatcaaagatgtgtcgtgactaccccaagcttgtgctgcccaattttgacatgcttttataaccatgtgaangcaaactcntctccaattgagctaactccctgnnanaa

SEQ ID NO: 4131 - DNA, 695 bp, Homo sapiens
  misc_feature (617)..(617): "n" may be a, t, c, g, other or unknown
  misc_feature (648)..(648): "n" may be a, t, c, g, other or unknown
  misc_feature (650)..(651): "n" may be a, t, c, g, other or unknown
  misc_feature (676)..(676): "n" may be a, t, c, g, other or unknown
cggcccaggccatggctatgatggggaggagagagcggtgagtgatagcttcgggcctggagagtgggatgaccggaaagtgcgacacacttttatccgaaaggtttactccatcatctccgtgcagctgctcatcactgtggccatcattgctatcttcacctttgtggaacctgtcagcgcctttgtgaggagaaatgtggctgtctactacgtgtcctatgctgtcttcgttgtcacctacctgatccttgcctgctgccagggacccagacgccgtttcccatggaacatcattctgctgaccctttttacttttgccatgggcttcatgacgggcaccatttccagtatgtaccaaaccaaagccgtcatcattgcaatgatcatcactgcggtggtatccatttcaagtcaccatcttctgctttcagaccaaggtggacttcacctcgtgcacaggcctcttctgtgtcctgggaattgtgctcctggtgactgggattgtcactagcattgtgctctacttccaatacgtttactggctccacatgctctatgctgctctgggggccatttggttcaccctgttcctgggttacgacacacaagctggncctggggaaccggaatcacaacatcagcccngnngactacatcactgggggccctgcangatttacacagacatcatc

SEQ ID NO: 4132 - DNA, 772 bp, Homo sapiens
  misc_feature (427)..(427): "n" may be a, t, c, g, other or unknown
  misc_feature (523)..(523): "n" may be a, t, c, g, other or unknown
  misc_feature (555)..(555): "n" may be a, t, c, g, other or unknown
  misc_feature (566)..(566): "n" may be a, t, c, g, other or unknown
  misc_feature (576)..(576): "n" may be a, t, c, g, other or unknown
  misc_feature (583)..(583): "n" may be a, t, c, g, other or unknown
  misc_feature (675)..(675): "n" may be a, t, c, g, other or unknown
  misc_feature (713)..(713): "n" may be a, t, c, g, other or unknown
  misc_feature (732)..(732): "n" may be a, t, c, g, other or unknown
  misc_feature (761)..(761): "n" may be a, t, c, g, other or unknown
  misc_feature (772)..(772): "n" may be a, t, c, g, other or unknown
acagagcctttcaattcaagcttggggtgagctgcacttcaggcatggggatataatagtgtgatgaaccattcttctgaaggttcttctgaaaagctgctggtcttgggatactgtgagagcccctctcattgctctttagaagtaatttaaatttttctgctacattgtctgctcagctcgtattctggtcatagaggaacctgaagccagagaaactagacaaaaaggaacctctttcaggagctataaaagaaagggaggaatcatgtccacaattgcagctttctatggcggcaagtccattctcatcacgggggccacaggctttctgggcaaagtgctaatggagaaactgtttcgcaccagcccagacctgaaagtcatttacatccttgtgaggcccaaggctggccagacactgcancagagggttttccagatcctagacagtaagctatttgagaaagtcaaagaagtttgtccaaatgtgcatgatgaagatcagagctatttatgcagntccaatcaggaatgactttgccatcagcaaanaggacatgcangagcttctcncctgtanaaacataatatttcactgtgcagccactgtacgcctttgaccgacactctcaagacatgcctgtgcaaacttaacgtcactgccaaccgggnagctccttgcttaaggctactcagattccaaagctggnaagccttttatacatatcnccactgcctattcaaattgtaaccttganagccacatcgn

SEQ ID NO: 4133 - DNA, 783 bp, Homo sapiens
  misc_feature (568)..(568): "n" may be a, t, c, g, other or unknown
  misc_feature (653)..(653): "n" may be a, t, c, g, other or unknown
  misc_feature (668)..(668): "n" may be a, t, c, g, other or unknown
  misc_feature (715)..(715): "n" may be a, t, c, g, other or unknown
  misc_feature (722)..(722): "n" may be a, t, c, g, other or unknown
  misc_feature (750)..(750): "n" may be a, t, c, g, other or unknown
  misc_feature (764)..(764): "n" may be a, t, c, g, other or unknown
  misc_feature (771)..(771): "n" may be a, t, c, g, other or unknown
agacgttgttgcttgggcgcttctccgctgcgtgtaggtgaagggggcttcctgaccgagacatggatttaggtgctattacaaaatactcagcattacacgccaagcccaatggactgatccttcaatacgggactgctggatttcgaacgaaggcagaacatcttgatcatgtcatgtttcgcatgggattattagctgtcctgaggtcaaaacagacaaaatccactataggagtcatggtaacagcgtcccacaatcctgaggaagacaatggtgtaaaattggttgatcctttgggtgaaatgttggcaccatcctgggaggaacatgccacctgtttagcaaatgctgaggaacaagatatgcagagagtgcttattgacatcagcgagaaagaagctgtgaatctgcaacaagatgcctttgtaattattggtagagataccaggcccagcagtgagaaactttcacaatctgtaatagatggtgtgactgttctaggaggtcaattccatgattatggcttgttaacaacaccccagctgcactacatggtgtattgtcnaaacacgggtggccgatatggaaaggcaactatagaagggtactaccagaaactctctaaggcttttgtgggactcaccaaacangcttcttgcaatggngatgatacagatcacttaagggttgactgtgcaaatggcataagggncctgaanctaagggaaattggacactacttctcanaagggcctgtcaantttaaancggtttaaggaa

SEQ ID NO: 4134 - DNA, 776 bp, Homo sapiens
  misc_feature (465)..(465): "n" may be a, t, c, g, other or unknown
  misc_feature (518)..(518): "n" may be a, t, c, g, other or unknown
  misc_feature (538)..(538): "n" may be a, t, c, g, other or unknown
  misc_feature (636)..(636): "n" may be a, t, c, g, other or unknown
  misc_feature (656)..(656): "n" may be a, t, c, g, other or unknown
  misc_feature (701)..(701): "n" may be a, t, c, g, other or unknown
  misc_feature (703)..(703): "n" may be a, t, c, g, other or unknown
  misc_feature (716)..(716): "n" may be a, t, c, g, other or unknown
  misc_feature (753)..(753): "n" may be a, t, c, g, other or unknown
  misc_feature (763)..(763): "n" may be a, t, c, g, other or unknown
acattaaccggcaggatgtcggaggtgcggctgccaccgctacgcgccctggacgactttgttctggggtcggcgcgtctggcggctccggatccatgcgacccgcagcgatggtgccaccgcgtcatcaacaacctcctctactaccaaaccaactaccttctctgcttcggcatcggcctcgctctcgccgggtacgtgcggccacttcatacgctcctgagcgcgctggtagtggcggtggccctcggcgtgctggtgtgggcagctgagacccgcgcagctgtgcgccgctgccgccgcagccaccctgcagcctgcctggccgcagtgcttgccgtcggcctcctgatgctctgggtcgcgggcggcgcttgcaccttcctgttcagcatcgccgggccggtgcttctgatcctggtgcacgcctcgttgcgcctgcgcaaccttaagaacaagattgangaacaagatcgagagcattggtctcaagcggacgccaatgggcctgctactanaggcactgggacaagagcangaggctggatcctaggcccctggggatctgtacccaaggacctggagaatacaccccacccccagcccataattgggaacccagaagccctttcccancacttaaaacaggagcctanagccccctgcccaaacaaaacaggacatctgtgacgtcctacccnangccatccccaaanctaagatatccctcaaaaccagcccccaattacctanggggacaagnagtccttccccaa

SEQ ID NO: 4135 - DNA, 689 bp, Homo sapiens
  misc_feature (607)..(607): "n" may be a, t, c, g, other or unknown
  misc_feature (632)..(632): "n" may be a, t, c, g, other or unknown
  misc_feature (649)..(649): "n" may be a, t, c, g, other or unknown
  misc_feature (666)..(666): "n" may be a, t, c, g, other or unknown
  misc_feature (668)..(668): "n" may be a, t, c, g, other or unknown
aagaagatgtctcaagagtctgttggagcatctggtcaacgccctgttttctgccctgtacacaaacaagaacagttgaaacttttctgtgaaacatgtgatagattgacatgtagagactgtcagctattggaacacaaagaacataggtatcagtttttggaagaagcttttcaaaatcagaagggtgcaattgagaatctactggcgaaacttcttgagaagaagaattatgttcattttgcagctactcaggtgcagaataggataaaagaagtaaatgagactaacaaacgagtagaacaggaaattaaagtggccattttcacccttatcaatgaaattaataagaaaggaaaatctctcttacaacagctagagaatgttacaaaggaaagacagatgaagttactacagcagcagaatgacatcacaggcctttcccggcaggtgaagcatgttatgaacttcacaaattgggcaattgcaagtggcagcagcacagcactactatacagcaagcgactgattactttccagttgcgtcatattttgaaagcacggtgtgatcctgcccctgctgctaatgggagcaatacgtttccantgtgatcccaccttccggggcaaangatgtagtccaatttanggtaatcctagtaatangngagtaaaccagctcctggtta

SEQ ID NO: 4136 - DNA, 664 bp, Homo sapiens
  misc_feature (488)..(488): "n" may be a, t, c, g, other or unknown
  misc_feature (535)..(536): "n" may be a, t, c, g, other or unknown
  misc_feature (599)..(599): "n" may be a, t, c, g, other or unknown
  misc_feature (605)..(605): "n" may be a, t, c, g, other or unknown
  misc_feature (616)..(616): "n" may be a, t, c, g, other or unknown
  misc_feature (652)..(652): "n" may be a, t, c, g, other or unknown
  misc_feature (661)..(661): "n" may be a, t, c, g, other or unknown
cgcatgcgcagaaacactgggcacagggggaggtaactgcagtaagtcccgcttggccctggagtccacgcggattttcgaagctggggctggcaagaggccgctggacaccacgctccagtcgtcagcccacttcctagctgaacagcgcgaggcggcggcagcgagccgggtcccaccatggccgcgaattattccagtaccagtacccggagagaacatgtcaaagttaaaaccagctcccagccaggcttcctggaacggctgagcgagacctcgggtgggatgtttgtggggctcatggccttcctgctctccttctacctaattttcaccaatgagggccgcgcattgaagacggcaacctcattggctgaggggctctcgcttgtggtgtctcccgacagcatccacagtgtggctccggagaatgaaggaaggctggtgcacatcattggcgccttacggacatccaagcttttgtctgntccaaactatggggtccatcttccggctgtgaaactgcggaggcacnntggagatgttccaatggggtaaaaactgagggagtccaggggagtacaccgaggaatgggcangtgaangaaaggagacnaggtaattccctacaacaacttgaattggaggtcanaaaatcatncaa

SEQ ID NO: 4137 - DNA, 724 bp, Homo sapiens
  misc_feature (479)..(479): "n" may be a, t, c, g, other or unknown
  misc_feature (482)..(482): "n" may be a, t, c, g, other or unknown
  misc_feature (496)..(496): "n" may be a, t, c, g, other or unknown
  misc_feature (563)..(563): "n" may be a, t, c, g, other or unknown
  misc_feature (687)..(687): "n" may be a, t, c, g, other or unknown
  misc_feature (702)..(702): "n" may be a, t, c, g, other or unknown
  misc_feature (719)..(719): "n" may be a, t, c, g, other or unknown
  misc_feature (723)..(724): "n" may be a, t, c, g, other or unknown
gagaaatgcctgaaattgctccaggctggtgctcagctgctgagctgggctagttgttaaaatattcagtggtccccaacctttttggcaccagggaccagtttcgtagaaggcaatttttccatggactggggaatgaaactgttccacctcagatcaccgggcattagattctcataagaagcatgcaacctagatccctcgcatgcacagttcacaacagggttcaagctcctatgagaatctaatgccactgctgatctgacaggaggcggagctcaggcagtaatgctggctgaactgctgctcacctcctgatgtgaagcctggttcctaacaggccacggatgggtgccggtccatgatccgggggatggggacccctgaatattggctagctattgccctgagccctccctagccaaccccagtcactctgatcttgtccccaggaccctctaaacctctccaccttccancanctaaagggtcccangaccctcctccatcactatgacatgcacccatccccttctgaatggtcaagtgcccagctgcactantttgttaaatattttgaatctcaactccgggtgcaagggagtcctgggctccatgaagaaaagtgagtggggtaaacttgggggcaactttgcttaaactgctctgacctttcccattcccaanatccctgcattggangggttgtgattgggaanttgnn

SEQ ID NO: 4138 - DNA, 667 bp, Homo sapiens
  misc_feature (475)..(475): "n" may be a, t, c, g, other or unknown
  misc_feature (579)..(579): "n" may be a, t, c, g, other or unknown
  misc_feature (629)..(629): "n" may be a, t, c, g, other or unknown
  misc_feature (648)..(648): "n" may be a, t, c, g, other or unknown
  misc_feature (663)..(663): "n" may be a, t, c, g, other or unknown
  misc_feature (667)..(667): "n" may be a, t, c, g, other or unknown
gttttgcagtctttcactttaaaaactcaaaatggaaaattatatactttattttaatatttacaaatatttacaaatatttatttttaaataaaatgtatataccatgtagtatgttgtatttatttactcaatgttcttttaagtgtttcaggctgcatgtaccaagtagttcagacgattggctcggatggaaaaaatcttctgcaattacttccaattcctaagtcttctggaaatcttataccactagttcaatcttcagtcatgtctgatgctttgaaagggaatacaggaaaaccagttcaagttacttttcagactcagatttccagctcttccacaagtgcatcagttcaattgcccatttttcagccagccagttcttcaaactattttcttacaagaacagtagatacatcagaaaaagatccataatgagatggcatcaacatcagataaaggtgcccaaggnagaaatgacaagatagattctcaaggaagaagtaataaggcattacatctgaagagtgatgctgaatttaaaaagatatttggccttactaaggatttgagagngtgccttactcgaattcctgaccatttggacctctggagaaggtttccgnttcctttagcaagtttggnaaagagtgggacttncaan

SEQ ID NO: 4139 - DNA, 814 bp, Homo sapiens
  misc_feature (673)..(673): "n" may be a, t, c, g, other or unknown
  misc_feature (681)..(681): "n" may be a, t, c, g, other or unknown
  misc_feature (782)..(782): "n" may be a, t, c, g, other or unknown
  misc_feature (790)..(791): "n" may be a, t, c, g, other or unknown
  misc_feature (801)..(801): "n" may be a, t, c, g, other or unknown
  misc_feature (811)..(811): "n" may be a, t, c, g, other or unknown
gaatgaaggcccatgtagcaaaatactgattcaatgtaaagcaaactttgaaaataagctaatagtccttaaagaaaaacttatttcagatagcaaaagacaagccaatgaactcattagttttaaaaaccaaagtcaagaaaggctgaataagaaaaagacagattatgaaaaagaattattggaaaaaagccggaagttggctttaactgtaaagggcaaagaattgagtgaggaagagttacatgagaaattcaatcaactttggaaaaagtgggtgtgtgatgtatccacaactctcccgcaagttacagagcctgacattgatttggattctgaaaacatcctttgggagtatttcaaaaacaagacgaatgtcgtgggtctactgacaaattctgcagagaagtttcaaatcaattatgataaacatatcaaggtgaataagaaatataaccatatcccaatgacattaacagtctttgagaaagagttcattaatatgactactgactacattgtttcaagatttaataaaattattaacaacatgtggaaacaacagtgtggttacaatccaaattatttccatgagattctaaagacaatagaagaaagaagtgaaatctgcctctactcagaagagatacacatttacaaatacatttatcantgacttangtgtgtgtttaattcaaaggagcaagagagaaatttaagggaatgcacaagggcaatcaagagagcaaatggatcccggtaaactacctagaaaagttagnaaagtggnnttcctcaacnaggttttaanatt

SEQ ID NO: 4140 - DNA, 677 bp, Homo sapiens
  misc_feature (630)..(631): "n" may be a, t, c, g, other or unknown
  misc_feature (645)..(645): "n" may be a, t, c, g, other or unknown
  misc_feature (663)..(663): "n" may be a, t, c, g, other or unknown
  misc_feature (665)..(665): "n" may be a, t, c, g, other or unknown
tttaaagcatgccatcaccacatatctattttgcacttaccctgatgcgcatgagggccgcctttcatatatgagaagcaaaaaggtcagcaactgtaatctgtatcgccttggaaaaaagaagggactacccagccgcatggtggtgtcaatatttgatccccctgtgaattggcttcctcctggttatgtagtaaatcaagacaaaagcaacacagataaatgggaaaaagatgaaatgacaaaagactgcatgctggcgaatggcaaactggatgaggattacgaggaggaggatgaggaggaggagagcctgatgtggagggctccgaaggaagaggctgactatgaagatgatttcctggagtatgatcaggaacatatcagatttatagatagtatgttaatggggtcaggagcttttgtaaagaaaatctctctttctcctttttcaaccactgattctgcatatgaatggaaaatgcccaaaaaatcctccttaggtagtatgccattttcatcaagattttgaggattttgactacagctcttgggatgcaatgtgctatctggattctagcaaagctgttgaagaagatgactttgtggtggggttctggaatccatcannagaaaaactgtggngttgacaccgggaaaagnantccaatttctta

SEQ ID NO: 4141 - DNA, 765 bp, Homo sapiens
  misc_feature (682)..(682): "n" may be a, t, c, g, other or unknown
  misc_feature (712)..(712): "n" may be a, t, c, g, other or unknown
  misc_feature (714)..(714): "n" may be a, t, c, g, other or unknown
  misc_feature (723)..(723): "n" may be a, t, c, g, other or unknown
  misc_feature (761)..(761): "n" may be a, t, c, g, other or unknown
ctggggaaatttcctatcgcacgtctgctgcagcagtctcctgtttctcctcctaccttctccatttttctagtccctgcagggcataattggaatatcatttggagaaagtgtcatggaagttctgcgtccacagcttataagaattgatggccggaattacaggaagaatccagtccaagaacagacctatcaacatgaagaagatgaagaggacttctatcaaggctccatggagtgtgctgatgagccctgtgatgcctacgaggtggagcagaccccacaaggattccggtctactttgagggcccccagcttgctctataagcatatagttggaaagagaggggacactaggaagaaaatagaaatggagaccaaaacttctattagcattcctaaacctggacaagacggggaaattgtaatcactggccagcatcgaaatggtgtaatttcagcccgaacacggattgatgttcttttggacacttttcgaagaaagcagcccttcactcacttccttgcctttttcctcaatgaagttgaggttcaggaaggattcctgagattccaggaggaagtactggcgaagtgctccatggatcatggggttgacagcagcattttccaagaatcctaaaaagcttcatctaaactattggggaatgtttgggtgccntttgagttgaaggaagagattccagcaggncnatgttaagnatgctacaagcaagtgttaaaagagggaattcattaantgga

SEQ ID NO: 4142 - DNA, 663 bp, Homo sapiens
  misc_feature (586)..(586): "n" may be a, t, c, g, other or unknown
  misc_feature (613)..(613): "n" may be a, t, c, g, other or unknown
  misc_feature (616)..(616): "n" may be a, t, c, g, other or unknown
  misc_feature (650)..(650): "n" may be a, t, c, g, other or unknown
  misc_feature (658)..(658): "n" may be a, t, c, g, other or unknown
tttataaatgttgctttctgatttttatcaagagtgagaaaattaaaattattgatttgcaagtagtaaacagttcatattttgatttcccctcattttagtttaatataatttgcaataaatgtacatattgttgtttgtttcataaagcatatcactttaaaatggtttttactcctgtgattatgttggaatatttggaattttgaaggagtaaagactgtccagcatttggttttataatgtttgtcaccagatttttattaatgtaaaaaaaatcaatttttaaaaaatagttggactttggcagcttttaaggaaagttggaggtgttttaggattgctatcaattttcagcattgtgctatttggaaataagtgttttgcttttgtctgatggtctgggctcatttttatgtttattttagaaaactgttgcatcaatatattatgtttcttggcattgttcagcataggtaatgtgtgcactttatgtgtacacataatcatatttaagttttttgcataaaataaatgcttctagatgtcatggcagtctttttaatctctttaacatatgctttcntgtgaattttttcatgttaaagagctnaangtcataacatggattacagtcaactctccattantctatatnaaata

SEQ ID NO: 4143 - DNA, 625 bp, Homo sapiens
  misc_feature (379)..(379): "n" may be a, t, c, g, other or unknown
  misc_feature (421)..(421): "n" may be a, t, c, g, other or unknown
  misc_feature (492)..(492): "n" may be a, t, c, g, other or unknown
  misc_feature (497)..(497): "n" may be a, t, c, g, other or unknown
  misc_feature (509)..(509): "n" may be a, t, c, g, other or unknown
  misc_feature (589)..(590): "n" may be a, t, c, g, other or unknown
  misc_feature (609)..(609): "n" may be a, t, c, g, other or unknown
  misc_feature (624)..(625): "n" may be a, t, c, g, other or unknown
actgcggtgtggactcgagggctgggcgcggggccggcgcagaagccgccagctggagacgatggtggaccacttggccaacacggagatcaacagccagcgcatcgcggcagtggagagctgcttcggggcctcggggcagccgctggcgctgccaggccgagtgctgctgggcgagggcgtgctgaccaaagagtgccgcaagaaggccaagccgcgcatcctcttcctctttaacgacatcctggtgtatggcagcatcgtgctcaacaagcgcaagtaccgcagccagcacatcatccccctggaggaggtcacactggagctgttgccggagacgctgcaggccaagaaccgctggatgatcaagacggccaanaagtcctttgtggtgtcggccgcctccgctacggagcgccangaatggattagccacatcgaggagtgcgtgcggcggcaactgagggccacgggccgcccgcccagcacggngcacncgggaccctggntccccgacaaggccacggacatctgcatgcgcttgcacgcagacgcgcttctctgccctcaccaagcggccaacaactgnncgcaaagttcgggtttccntggtctgcgctgaann

SEQ ID NO: 4144 - DNA, 791 bp, Homo sapiens
  misc_feature (706)..(706): "n" may be a, t, c, g, other or unknown
  misc_feature (728)..(728): "n" may be a, t, c, g, other or unknown
  misc_feature (737)..(737): "n" may be a, t, c, g, other or unknown
  misc_feature (787)..(787): "n" may be a, t, c, g, other or unknown
  misc_feature (789)..(789): "n" may be a, t, c, g, other or unknown
agaagcatcgaaagcgttggagaggtgttaccggaacggcggcgacaagggtgttcccgaactagagtggggcatacataatcttgctgctatgcttcgaagctgtagtctgaatcaacctaagttttaaacagaaggtgaacctctgagatagaaaatcaagtatattttaaaagaagggatgtgggatcaaggaggacagccttggcagcagtggcccttgaaccagcaacaatggatgcagtcattccagcaccaacaggatccaagccagattgatagggctgcattggcccaagcttggattgcccaaagagaagcttcaggacagcaaagcatggtagaacaaccaccaggaatgatgccaaatggacaagatatgtctacaatggaatctggtccaaacaatcatgggaatttccaaggggattcaaacttcaacagaatgtggcaaccagaatggggaatgcatcagcaacccccacacccccctccagatcagccatggatgccaccaacaccaggcccaatggacattgttccaccttctgatgacagcaacagtcaggacagtggggaatttgcccctgacaacaggcatatatttaaccagaacaatcacaactttggtgggaccacccgataattttgcagtgggggccaagtgaaccaagtttgactatcaagcatgggggctgcttttggnccaacgcaaggtgggatttcancctccttantgggaaaccaggaacctccaagggacctcccagcaacctccccaagaatncnaa

SEQ ID NO: 4145 - DNA, 815 bp, Homo sapiens
  misc_feature (731)..(731): "n" may be a, t, c, g, other or unknown
  misc_feature (759)..(759): "n" may be a, t, c, g, other or unknown
  misc_feature (780)..(780): "n" may be a, t, c, g, other or unknown
  misc_feature (791)..(791): "n" may be a, t, c, g, other or unknown
  misc_feature (794)..(794): "n" may be a, t, c, g, other or unknown
gagctcatgctacacaattaaatatattccttaaatattgtgtgcttgcaacttttgattttgtaaatgggttcccacaggacaaaaatgagtcttaaacataaaattaaaccatatgaatgttagttttttagttaatttcagctgggtggtagtctatagtcccagctactcgagaggctgaggcagaaggatcgcttgagcccaggagttcagggctgcagtgagctgtgatcacaccactgcactccagcctgggggaagagcaagaccctacaaacaaaaaagagttaattccattatatttatttttacatacccagagtttgactaaaatataccagacaatctcctgtccccaaatccatgtccaagcaaggggagccacgttttctaagctcacagtttaaaggttaaagagacacactgaggaaaactcagggaaagaagctgatttgcatggacactaggcctgtcgttgattccctcatttcaaaagttgcatgtgccatgggaggcggagtctctgaggacatcctgggctgtgcctcggtggctctggactccagctctacgcagagcgccttaacactgtactggaagaaatgggaaatcgcattgaggacttacagaagaatgtcaatgactttaatggtgcaagctggcattgaaaattctattaaaggaacaaatgctgaagacctaactgcagcaatgtccggtatttgggngatggggcctcctacagaagtcattaanggttacatccgggtcctgaangggtggggggnccntcaatccaaacaagggattcc

SEQ ID NO: 4146 - DNA, 719 bp, Homo sapiens
  misc_feature (662)..(662): "n" may be a, t, c, g, other or unknown
  misc_feature (686)..(686): "n" may be a, t, c, g, other or unknown
  misc_feature (695)..(695): "n" may be a, t, c, g, other or unknown
  misc_feature (700)..(700): "n" may be a, t, c, g, other or unknown
  misc_feature (712)..(712): "n" may be a, t, c, g, other or unknown
tatttttcgaagatctctctaagtgacaaatctagtaatccataaagatggcaatttcaaggctaagcatgttctatttggaaagtttttccaatctcagaataaataaaatgcttcttattggtatgtaatatcagattaagcagcagctaagtgaatgctctgcatcacaaagacctattagtagcaacatgacttgaaacactagcgttgtataccacagttttctaacacgaaggagggattaaaaatgcaagctggtaaaatgttaatggttctattttgtcccacacaaatttatacctttataaattttcccctcgtgagggaaaaatcaaagatgtcagatttcaaatttttttaaacaaaactccaacttataaattgggcttttgaaaatgcatgatgaaacaaaaataccattccgtgactgcacttagttctagcaggtacttttataattagcatttaaaaaatacatttgcattcattcaatctgcttcagaaatttgttatgtagtgcgaaaaaccactttcataagcataagataaactcttagaagttttttttgaaggatgcttttttattaagcattatggaactaatactgtatttaagacaggaacccctgggccctaacaagttgatttatgcttccganactaaaaaataaagtattactgantcctccacnggagncatttaaagggnatcctcc

SEQ ID NO: 4147 - DNA, 669 bp, Homo sapiens
  misc_feature (598)..(598): "n" may be a, t, c, g, other or unknown
  misc_feature (639)..(639): "n" may be a, t, c, g, other or unknown
  misc_feature (642)..(642): "n" may be a, t, c, g, other or unknown
gaagttggcgcatgcgcctaaagctgacgggtttgaaatggcttcgatgttagccgggacccgactcagatcgatgctatagaagacaaacaagggaaggttttttttccttttgcatcatggctcaatttggaggacagaagaatccgccatgggctactcagtttacagccactgcagtatcacagccagctgcactgggtgttcaacagccatcactccttggagcatctcctaccatttatacacagcaaactgcattggcagcagcaggccttaccacacaaactccagcaaactatcagttaacacaaactgctgcattgcagcaacaagccgcagctgcagcagctgcattacaacagcaatattcacaacctcagcaggccctgtatagtgtgcaacaacagttacagcaaccccagcaaaccctcttaacacagccagctgttgcactgcctacaagccttagcctgtctactcctcagccaacagcacaaataactgtatcatatccaacaccaaggtccagtcaacagcaaacccagcctcagaagcagcgtgttttcacagggggtgggttacaaaactacatggntacatttgggatttgtgggatgaagatgtattctttcagcntangtgctgtcaaaggggaaaaccccccca

SEQ ID NO: 4148 - DNA, 814 bp, Homo sapiens
  misc_feature (646)..(646): "n" may be a, t, c, g, other or unknown
  misc_feature (698)..(698): "n" may be a, t, c, g, other or unknown
  misc_feature (705)..(705): "n" may be a, t, c, g, other or unknown
  misc_feature (718)..(718): "n" may be a, t, c, g, other or unknown
  misc_feature (775)..(775): "n" may be a, t, c, g, other or unknown
  misc_feature (779)..(779): "n" may be a, t, c, g, other or unknown
  misc_feature (808)..(808): "n" may be a, t, c, g, other or unknown
  misc_feature (813)..(813): "n" may be a, t, c, g, other or unknown
tagctttcctcacctcaggattctagcttttgttctatggaaagagatgaggaagactctataatcgtctcagaaggaataattgaggaatacctagcattcgatcacatagatatagaagagggatttcatgggaagaaatcagaagcagctacagagaaacagaaattagggtatcctcccattgctccattttactgcatgaaagaagatgtccttgcttatgtgtttgacagtgtatggtgcaaggttgtgagctgtatggagcagttgacacgtagtcactgggaaggatttgcctctgatgatgagagtaatgttgcagttaccagacccgattcagaaagttcctgtgtgctgagtgaactacatcctttggtgttaccgcgagtgccacagtctaaggtgctgtacattacctcaaatccgatgagtctctgtcaagcaagcagacatcagccaaatgtgaatgatctcttggttcatggaatgcctctacagccaagaaatctctccctaatggacaagctcctagatcttgatgacaagctacttatgaggcctgggtccagtaccatcctttcaactcgaaattggccaaatcgagctgtggagtttagtacatcatctctgtcatacacaagtncagtccaccaggaggacgcaatccaccaccacgaaactcttcatccgattangcacgangccattcatgtgnctggaaacaccaagatctggtggaaagaaatcctcaagagggagcccgagtcccaantggnacccggactcgctctcccttctccctcancggang

SEQ ID NO: 4149 - DNA, 664 bp, Homo sapiens
  misc_feature (571)..(571): "n" may be a, t, c, g, other or unknown
  misc_feature (608)..(608): "n" may be a, t, c, g, other or unknown
  misc_feature (619)..(619): "n" may be a, t, c, g, other or unknown
  misc_feature (626)..(626): "n" may be a, t, c, g, other or unknown
  misc_feature (656)..(656): "n" may be a, t, c, g, other or unknown
agaacgcgctctcagcttcgggtcctgcggctgcggctgccgccatcatggtgcggaagcttaagttccacgagcagaagctgctgaagcaggtggacttcctgaactgggaggtcaccgaccacaacctgcacgagctgcgcgtgctgcggcgttaccggctgcagcggcgggaggactacacgcgctacaaccagctgagccgtgccgtgcgtgagctggcgcggcgcctgcgcgacctgcccgaacgcgaccagttccgcgtgcgcgcttcggccgcgctgctggacaagctgtatgctctcggcttggtgcccacgcgcggttcgctggagctctgcgacttcgtcacggcctcgtccttctgccgccgccgcctccccaccgtgctcctcaagctgcgcatggcgcagcaccttcaggctgcagtggcctttgtggagcaagggcacgtacgcgtgggccctgacgtggttaccgaccccgccttccttgtcacgcgcagcatggaggactttgtcacttgggtggactcgtccaagattaagcggcacgtgctaaaagtacaatnaggagcgcgatgacttcgatctggaaacctacggatntcccactttgnaatgggntgtcttttacagatgggaaaactggagggnctgatgct

SEQ ID NO: 4150 - DNA, 771 bp, Homo sapiens
  misc_feature (567)..(567): "n" may be a, t, c, g, other or unknown
  misc_feature (697)..(697): "n" may be a, t, c, g, other or unknown
  misc_feature (724)..(724): "n" may be a, t, c, g, other or unknown
  misc_feature (743)..(743): "n" may be a, t, c, g, other or unknown
  misc_feature (752)..(752): "n" may be a, t, c, g, other or unknown
  misc_feature (760)..(760): "n" may be a, t, c, g, other or unknown
tgaatatgacagatgtaaatgggcagacacctctcatgttatcagctcacaaagtaattgggccagaaccaactggatttcttttaaagtttaatccttctctcaatgtggttgataaaatacaccaaaacactccacttcactgggcagttgcagcaggaaatgttaatgcagttgataagcttttggaagctggttctagcctggatatccagaatgttaagggagaaacacctcttgatatggctctacaaaacaaaaatcagctcattattcatatgctaaaaacagaagccaaaatgagagccaaccaaaagttcagactttggaggtggctgcagaaatgcgagctcttcctgctgctgatgctttctgtgattaccatgtgggctattggatacatattggacttcaattcagattcttggcttttaaaaggatgtcttctagtaacactgttttttctgacatctttgtttccaaggttcttggttgggtataagaaccttgtatacttaccaacagcctttctgctaagttctgttttttggatatttatgacttggntcatcttattttttcctgatttagcaggagcccctttctatttcagtttcattttcagcatagtagcctttctatactttttctataaagacttgggcaactgatccaagcttcactaagggcttccgangaaagaaaagaaagtgaatatcatcancctttgcaaaaaactgggntctccgggncttcaagnaacaattttgg

SEQ ID NO: 4151 - DNA, 662 bp, Homo sapiens
  misc_feature (511)..(511): "n" may be a, t, c, g, other or unknown
  misc_feature (517)..(517): "n" may be a, t, c, g, other or unknown
  misc_feature (564)..(564): "n" may be a, t, c, g, other or unknown
  misc_feature (619)..(619): "n" may be a, t, c, g, other or unknown
  misc_feature (635)..(635): "n" may be a, t, c, g, other or unknown
  misc_feature (644)..(644): "n" may be a, t, c, g, other or unknown
  misc_feature (662)..(662): "n" may be a, t, c, g, other or unknown
tctctccacacaccaagcaagcactcctccagcagacacaagctgggtgtcgtgtagttcaattcaatcctaacactgtgtacctggagataacatcagaccccacaggttgagtgctcagtcccccaagagtgtcctccacttcagatgccaactgcaagccccaggttgtggcctgtgcttccgacagagcagccataaatcagggttcccatgactctccttctcagtttctgttaacttactagaggttctcacataactcagggagacacttacatttacccacttattatgaaggacattataaaaaatacagatgaacaaccagatggaaaagtgtatagattaaagtatggaagaagggacatggagctttcatgctctcactggcacattactttccaagaaactttcacatgttcagctacccagaagctgttccaaactctgcctttttgagtttttatggtggcttcattgcataggcatgattgattatatcattggncattgntgatggccaactcaatcttcagcccctctcccttctccaaaggttanggctgaaaagtctcaaatcctctaaattatggtcctggggctttctgggaaccanctcccatccctggaanctatcttangggttccaacaaccgtan

SEQ ID NO: 4152 - DNA, 746 bp, Homo sapiens
  misc_feature (20)..(20): "n" may be a, t, c, g, other or unknown
  misc_feature (501)..(501): "n" may be a, t, c, g, other or unknown
  misc_feature (570)..(570): "n" may be a, t, c, g, other or unknown
  misc_feature (680)..(680): "n" may be a, t, c, g, other or unknown
  misc_feature (703)..(703): "n" may be a, t, c, g, other or unknown
  misc_feature (727)..(727): "n" may be a, t, c, g, other or unknown
  misc_feature (737)..(737): "n" may be a, t, c, g, other or unknown
  misc_feature (744)..(744): "n" may be a, t, c, g, other or unknown
acatcttttcctttccccanaagagatccctaacctattgttttattgacagccttgctgttagaggctctttcccagaagttggacgaagaggctcaggcgttgctgtttcttgtcttccaagtcaagtggttactctggtaatggattgcctctctccgagctttcaccctggtgagactgtccagatctagtctgtaaacccagcttagaagcactgttgtaaaaatgactgaagagcccatcaaggagatcctgggagccccaaaggctcacatggcagcgacgatggagaagagccccaagagtgaagttgtgatcaccacagtccctctggtcagtgagattcagttgatggctgctacagggggtaccgagctctcctgctaccgctgcatcatcccctttgctgtggttgtcttcatcgccggcatcgtggtcaccgcggtggcttacagcttcaattcccatgggtctattatctccatctttggcctgggntgttctgtcatctggactttttttactagcctccagtgccttgtgctggaaagtgagacaaaggagcangaaagccaagagacgggagagtcaaacagctctcgtggcaaatcagagaagcttgtctgcttgagactgaatacgaccaaatgggccattgggcctggaaaacgtgctcngaacttggcacccaattcaccangaaaccaatggtgggagagaacangacttggcgnttgggcnaa

SEQ ID NO: 4153 - DNA, 703 bp, Homo sapiens
  misc_feature (481)..(481): "n" may be a, t, c, g, other or unknown
  misc_feature (610)..(610): "n" may be a, t, c, g, other or unknown
  misc_feature (620)..(620): "n" may be a, t, c, g, other or unknown
  misc_feature (645)..(645): "n" may be a, t, c, g, other or unknown
  misc_feature (682)..(682): "n" may be a, t, c, g, other or unknown
  misc_feature (703)..(703): "n" may be a, t, c, g, other or unknown
attttactcttatcgtgctttccagaaagtttgcctgctgggagagtctttttgatcgtttcccatgtgttgtcagatagctccatagaattcagtttctgagaaccagccagaagcatgcagtgacattgcacaatctgcctctgaagctggagatactagctgcagagctcaggggagctgctccacatcaccgacatgaagggaacaggcatcatggactgtgcgcccaaggcactcctggccagggcactttatgacaactgccctgactgctctgacgagctggctttcagcagaggggacatcctgaccattctggagcaacacgtaccagaaagcgagggttggtggaagtgtttgctccatgggaggcaaggcctggcccctgccaaccgcctccaaatcctcacggaggtcgctgcagacaggccgtgccccccattcctgagaggcctggaagaagctcctgccagctcanaggagacctatcaggtgcccactctaccccgccctcccactccaggccccgtttatgagcagatgaggagttgggcggaggggcccagccccctactgcccaagtctatgaattccccgaacctcccancagtgccagnatcatctggtgaaaaagactctcanctttccaaaaacaagggccatcctcacgcttcccaanacctgtcccggggctcactgn

SEQ ID NO: 4154 - DNA, 720 bp, Homo sapiens
  misc_feature (642)..(642): "n" may be a, t, c, g, other or unknown
  misc_feature (690)..(690): "n" may be a, t, c, g, other or unknown
  misc_feature (692)..(692): "n" may be a, t, c, g, other or unknown
  misc_feature (706)..(706): "n" may be a, t, c, g, other or unknown
  misc_feature (715)..(715): "n" may be a, t, c, g, other or unknown
caaattattattgtctcttaggtttggatattgatgggatatacagagtaagtggcaacctcgcagtgatccagaaactaaggtttgcagtcaatcatggtaagattatatttactgttgttattcagatgcatcactcataactttttgaactggcttaaagtaattttttaaaatgtccaattcctgctgtttttcagatgagaaattggacttgaatgacagtaaatgggaagatattcatgtcattactggagccctcaaaatgttttttcgagaattaccagaacctctttttacatttaatcattttaatgattttgttaatgcaattaagcaagaaccaagacagcgagtcgctgctgttaaggacctaatcagacagttgccaaagccaaaccaagacacaatgcagattcttttccgacatctcagaagagttatagaaaatggagagaaaaatcgaatgacctatcagagtatagcaattgtttttggtcccactctattaaaaccagaaaaagagactggtaatatagcaagttcatactgggtaccaagaatcagattgtagaattaattcctcctggaactgagttccatcttcggacggttgattcctactgaagacaaccctgtggnataaaaactgggattccatcagatttcaaatggttatacacaaatggnantttaattttttggnccaaagcantgacc

SEQ ID NO: 4155 - DNA, 685 bp, Homo sapiens
  misc_feature (642)..(642): "n" may be a, t, c, g, other or unknown
  misc_feature (657)..(658): "n" may be a, t, c, g, other or unknown
  misc_feature (680)..(680): "n" may be a, t, c, g, other or unknown
  misc_feature (683)..(683): "n" may be a, t, c, g, other or unknown
gattcttccggtttcaagaagttaaggctggtgtcctggccccagtccacctctgggagcgcctgcgccgctccgcggagagtccgtggatctcacaggttcccagttttccagacctgaagtgttttccagtcaaagcgaagagacgatctgtggatgttgaatatgcaaggagctgaagagagagacattagaagagagacttgtccaggctgggtaaacaagaacaagcctgctctggagcaggatgtctgtaaaattgactcatcagggatagtagtaaagaggttccaagaggatgaataccaagattctacatttgaagaaaaatatgcatgtgagggcatgaaggaaaactctcctagggagattgctgaatcatgccttttccaggaaggaggttttgggagaataactttcatccacaaagaagcaccccctgaaattattagtcaaggatataattttgagaaaagcttgcttttgacctcaagccttgttacacgtctcagggtttctacagaagagagtctgcatcagtgggaaacaagtaatatacaaaccaatgatatttcaaaccaaagtaaatgtccaactctctgcacacagaaaaaatcttggaaaatgttatgaatggtgggnaaaacctttactcannagctcatcccttacccaacatnagngg

SEQ ID NO: 4156 - DNA, 740 bp, Homo sapiens
  misc_feature (568)..(568): "n" may be a, t, c, g, other or unknown
  misc_feature (671)..(671): "n" may be a, t, c, g, other or unknown
  misc_feature (721)..(721): "n" may be a, t, c, g, other or unknown
  misc_feature (726)..(726): "n" may be a, t, c, g, other or unknown
  misc_feature (736)..(737): "n" may be a, t, c, g, other or unknown
atcccacgggatcaagcatcagcaacgtgcagctggcagacactgtcatgttcaccattggagctctgtctgaatggctggctgaccaccccgtcatgatcaacagtgttctgcccttggtactgcatgccctaggcaatcctgagctgtctgtctcttctgtgtccaccctcaagaagatctgccgagagtgcaagtatgacctgcctccctatgctgccaacattgtggctgtgtcccaggatgtgctgatgaaacagatccacaagacaagccagtgcatgtggctgatgcaggcgctgggcttcctgctgtcagctcttcaagtggaggagatccttaagaacctgcactcgcttatctcaccctatatccagcaactggagaagctggcagaggagatacccaatccctccaacaagctggccattgttcacatcttggggcttctctccaacctcttcaccacactggacatcagtcatcatgaggatgatcatgaaggccctgagcttcggaaagctgccaagtgccacagggacccaaccccgtggtggtggtgctgcancaggtcttccaagcttatccagaaggtgctgagcaaatgggttaaatgatgcccaagttgtggaagcggtgtgcgctatcttttgagaaaatctgtttaaggngctgctgggattaactttgccccccatgggggccacaagctgtgtttaanatgcntgggtccggnntgt

SEQ ID NO: 4157 - DNA, 776 bp, Homo sapiens
  misc_feature (551)..(551): "n" may be a, t, c, g, other or unknown
  misc_feature (568)..(568): "n" may be a, t, c, g, other or unknown
  misc_feature (602)..(602): "n" may be a, t, c, g, other or unknown
  misc_feature (723)..(723): "n" may be a, t, c, g, other or unknown
  misc_feature (755)..(755): "n" may be a, t, c, g, other or unknown
  misc_feature (759)..(759): "n" may be a, t, c, g, other or unknown
attgggtgttatctaagccaataaaacattgttgattataggtttggtgttttgaccattagctgacatttgattaacctttttttctatgataagagaaccatggtcacttttaagcatataatgaacttttatatttttaacagaagataattgttttaaaatattacacttattacgtgtaattatgtctacagggctcactcagctatccatttttgttgtctgttggggaaatactccttaagaggattgtgtgcacaatattaagttatcattaatcaaatattctcttctgggagataatttttatgtgttaaagtagtctcactatggaaaaacttctaatataactattaaatgtctctcctcacttacgttatttttagagttactgtgacaacaacatactttggccactctgaacagatatcccaggagaggtatcagtatgtcgactgtggaagaaacacaacttatcagttggggcagtctgaatatttaaatgtacttcagccacaacagtataaactggaagagatggatttaangaagaaatatctattgntatttcctatactctcaatgaagaggtatttccnaataggagaccttaaattgaacaaacctaaaggttacacttctaagagtacagttaaaaagtatgtggacctgcagttcttgtaactctccactctgtgttaatggataaaattggaccanggatccttttacttgaaatcctaaatttaccngggntgatttccctttctcca

SEQ ID NO: 4158 - DNA, 667 bp, Homo sapiens
  misc_feature (607)..(607): "n" may be a, t, c, g, other or unknown
  misc_feature (642)..(642): "n" may be a, t, c, g, other or unknown
  misc_feature (648)..(648): "n" may be a, t, c, g, other or unknown
  misc_feature (663)..(663): "n" may be a, t, c, g, other or unknown
  misc_feature (667)..(667): "n" may be a, t, c, g, other or unknown
ccgagtgccccttctcagggctcaagtctgaccgtagccacgtcctgcctcgcgccgcccctcgggcctgacctggaagctccgtcagctccgtccttgtccttagagctgagcccagaccccggggtctggccgaatcctcacccccagggcagtgtttttggtctgccaccttcaggaaaacggctgcggcctcggcctcccttcgggcacccaggaatgcgggggtctgctcagtccccccaccctccatgctccaacccccgggggctgcggagcctgctgccccctccccgcgggtggggacgttctatgcaatacagggttccactttagaagtgcgcgcggctagggtcaccgcccgcccttcccggcgcagcccccgagctccacagctgaggcagcccctctggcttctaaatccgcggtcgggattcttcctcctgtttagttttttagtttttccttaaaaaaaaacaacacatcgatggactttgcttccctgttcttgaagaatacttgaatgtcggggggcctgggggtgggggcctcggagaccgtctgccaagccctgctgcccctcctgaatctcgtatgatggtcacantccggtggccgtgggggtgctctgccttccctggnccccantggcccaaaatctgntggn

SEQ ID NO: 4159 - DNA, 793 bp, Homo sapiens
  misc_feature (55)..(55): "n" may be a, t, c, g, other or unknown
  misc_feature (119)..(119): "n" may be a, t, c, g, other or unknown
  misc_feature (239)..(239): "n" may be a, t, c, g, other or unknown
  misc_feature (380)..(380): "n" may be a, t, c, g, other or unknown
  misc_feature (409)..(409): "n" may be a, t, c, g, other or unknown
  misc_feature (510)..(510): "n" may be a, t, c, g, other or unknown
  misc_feature (514)..(514): "n" may be a, t, c, g, other or unknown
  misc_feature (586)..(586): "n" may be a, t, c, g, other or unknown
  misc_feature (659)..(659): "n" may be a, t, c, g, other or unknown
  misc_feature (690)..(690): "n" may be a, t, c, g, other or unknown
  misc_feature (743)..(743): "n" may be a, t, c, g, other or unknown
  misc_feature (754)..(754): "n" may be a, t, c, g, other or unknown
  misc_feature (765)..(765): "n" may be a, t, c, g, other or unknown
  misc_feature (790)..(790): "n" may be a, t, c, g, other or unknown
  misc_feature (793)..(793): "n" may be a, t, c, g, other or unknown
tgttgaatgggtctatgaatagaagaagcaagtacaggtcacaatggaggtatanaggagggacatttaacacagactggaggagacgacacttgtgctaggggttgaaggaaatgtangtgtgagccaggcaaagaatgggaggaagatgtttttcagggatcaagcccaaatccattcattggtaggccaagaattcattgtcagtaaatctttgggtctcctgttgagaagaacantgattgtattagtcagttctcatgctgctaataaagacgtacccaagtctgggtaatttataaagaaaaagaggtttaacggactcacagttctacatggctggggaagcctcacaatcatggtggaaggcaaaggagganaaaggcacatcttacacagtggcaggcangagggcgcttgtgcaggggaactcccttttataaaaccatcagatctcatgagacatatcattatcatgagaacagcatgggaaagacccacccccatgantcanttacctcccacgacatgcgggaattatgggagctacaattcaagatgagatttgggtggggacacagccaanccatatcaatgatgctaaatcaacccattggtaacactcacagaagtaacctggatcactgagtccccatgtnggttaaaattaagactgcccttttctgtaangggaaaatattttgaaccttaggggcttctcaaaaaaggggttttggtgagancctttgccaancaattccttantcaaaggccttcaaggacaaacccngcn

SEQ ID NO: 4160 - DNA, 755 bp, Homo sapiens
  misc_feature (662)..(662): "n" may be a, t, c, g, other or unknown
  misc_feature (710)..(710): "n" may be a, t, c, g, other or unknown
  misc_feature (721)..(721): "n" may be a, t, c, g, other or unknown
  misc_feature (735)..(735): "n" may be a, t, c, g, other or unknown
  misc_feature (740)..(740): "n" may be a, t, c, g, other or unknown
tcctttgtcaaagatcaagttgaccatatttatatggatctatttctgggctctctgttctgttgcattgctctctatctgttgtccttcctttcactgctaccatactgtctttgattcctatagctttacagttagtcttgaagtcacaaaagcatgggatcccccattagtggatcgtcctggaatttttaactctcagatttgtacacacctagccttcagcaatttgtgaattacagttcagattttcctaccctagcactggttcccaaagaggtttctgttaaagtatgttgtgattctctccatctacgactttctcttcctatttttgggacagaggtttgtcttgtgacctcacttctcttacagatctaagagtaatggttgatttttcaagtttgttcaactttttacttgttaggatagagtggtgacttccaagcttcatgcagaaccggacaacagaaattgagagggaaatttctatgacagaagagagaaagaagaaaattgctggaataatgaccttgaatagaggaaatgggatatcatctggtaagcaaatagagaagctggctttagataagagcctggacaattcattcatagaatagcagaaaaggcagaatttatgtccatagatgcaagtggtaaangtagatatagtgatgggaatttgtaaaaagttaccttccaaatgccantttttttaaangaaattaaggaaancaaangtcaatcaaactcaa

SEQ ID NO: 4161 - DNA, 694 bp, Homo sapiens
  misc_feature (464)..(464): "n" may be a, t, c, g, other or unknown
  misc_feature (649)..(649): "n" may be a, t, c, g, other or unknown
  misc_feature (658)..(658): "n" may be a, t, c, g, other or unknown
  misc_feature (663)..(663): "n" may be a, t, c, g, other or unknown
  misc_feature (671)..(671): "n" may be a, t, c, g, other or unknown
  misc_feature (694)..(694): "n" may be a, t, c, g, other or unknown
atcaggatgtctgagaggagagcatggtgtttttgcttcattggatccatgcaggtcttggagggtggtggcccactctttctgggccaagtagagggtggctcagacacccccccttcctccaggcttctcatctgtaactggtgaagcccggaagagcttgttgttcaagaggaaatcttgtgttacttctttatgaaggactccagcctggtggagatgaatgagtcctgaagatggaatcgaagctgtttgggcacaatactttaatcagcatttaatgacccagtcgaaaattcattgtttggacccaagcactggtgggaaaggcaggaggggaggcctgccttccttcctccctcccgagccctacagcaggccatggagtggtgagcgagttcgtacagtgccaaccacattcccagaaacttccagcagaggttaatcctgctcctctcaagtangagacaatgaatggattttaacaaatggactccctgtgttagctaatgccaagtccctactcaacctaggatgactccaatggcgcatgtccccattcccgggccctaaggctgcgctaacatgctatcctgcctgccccttcattctccaacctggcacattcccactcctttcccctcccaanacggaaagncatgncctggacntgggacaccccttccataccaan

SEQ ID NO: 4162 - DNA, 752 bp, Homo sapiens
  misc_feature (3)..(3): "n" may be a, t, c, g, other or unknown
  misc_feature (7)..(7): "n" may be a, t, c, g, other or unknown
  misc_feature (99)..(99): "n" may be a, t, c, g, other or unknown
  misc_feature (114)..(114): "n" may be a, t, c, g, other or unknown
  misc_feature (257)..(257): "n" may be a, t, c, g, other or unknown
  misc_feature (405)..(405): "n" may be a, t, c, g, other or unknown
  misc_feature (607)..(607): "n" may be a, t, c, g, other or unknown
  misc_feature (662)..(662): "n" may be a, t, c, g, other or unknown
  misc_feature (680)..(680): "n" may be a, t, c, g, other or unknown
  misc_feature (703)..(703): "n" may be a, t, c, g, other or unknown
  misc_feature (715)..(715): "n" may be a, t, c, g, other or unknown
  misc_feature (730)..(730): "n" may be a, t, c, g, other or unknown
tanaaanaacatttgccatgaaggacttttcaggtgtttcagatgctgacaactcatccatgaaattgaaccaggatgtgctattagttaatgaatcanaaaagggaatattanatgaagataatgaaaaagaaaaaagggactctttaggcaatgaagaatctgttgataaaacagcatgtgaatgtgtaaggagtccaagggagtctttggatgacctgtttcaaatatgttctccatgcgccattgcaagtggncttcggaacgacctggctgaattgacaacattatgtttggagttgaatgtattgaattctaagatcaaaagcaccagtggacatgtggaccacactttgcaacagtactctcctgaaattctggcttgccagttcctgaagaagtacntttttctcctgaacttgaaaagagcgaaggagagtatcaagcttagttacagtaatagcccttctgtttgggatacttttattgaaggattgaaagaaatggcaagttccaatcctgtgtatatggagatggaaaaaggagatctaccaacaaggttaaagttactagatgacgaggttccttttgatagtccgttgttggntgtttaagctacccggttgtatgaaaagtttggggaagtctgctcttccgatccntaatcaagttctttccanccattttgccatcggatatcatnaaactttggcancatcaacctgctgangtttttggggccaatttaaaca

SEQ ID NO: 4163 - DNA, 665 bp, Homo sapiens
  misc_feature (318)..(318): "n" may be a, t, c, g, other or unknown
  misc_feature (435)..(435): "n" may be a, t, c, g, other or unknown
  misc_feature (480)..(480): "n" may be a, t, c, g, other or unknown
  misc_feature (586)..(586): "n" may be a, t, c, g, other or unknown
  misc_feature (609)..(609): "n" may be a, t, c, g, other or unknown
  misc_feature (645)..(645): "n" may be a, t, c, g, other or unknown
  misc_feature (654)..(654): "n" may be a, t, c, g, other or unknown
  misc_feature (665)..(665): "n" may be a, t, c, g, other or unknown
agttggtgagcatcatggcaaccgttacagccacaaccaaagtcccggagatccgtgatgtaacaaggattgagcgaatcggtgcccactcccacatccggggactggggctggacgatgccttggagcctcggcagcttcctgatgtggtagaaatgccatggtagccccacaggaaatcacctcatgtgcgcctcccacccacaggcttcgcaaggcatggtgggtcagctggcggcacggcgggcggctggcgtggtgctggagatgatccgggaagggaagattgccggtcgggcagtccttattgctggccanccgggcacggggaagacggccatcgccatgggcatggcgcaggccctgggccctgacacgccattcacagccatcgccggcagtgaaatcttctccctggagatgagcaagaccgangcgctgacgcaggccttccggcggtccatcggcgttcgcatcaangaggagacggagatcatcgaaggggaggtggtggagatccagattgatcgaccagcaacagggacgggctccaaggtgggcaaactgaccctcaaggaccacaganatgggagaccatctacgacctgngcaccaagatgattgagtccctgaccaagggacaangtccaaggncgggggacgtn

SEQ ID NO: 4164 - DNA, 733 bp, Homo sapiens
  misc_feature (652)..(652): "n" may be a, t, c, g, other or unknown
  misc_feature (662)..(662): "n" may be a, t, c, g, other or unknown
  misc_feature (709)..(710): "n" may be a, t, c, g, other or unknown
  misc_feature (730)..(730): "n" may be a, t, c, g, other or unknown
ctttcttgatgccgttacgtccatggatttttttccaggattaaatttggaaggctatcctaacagagacagtacgaaatatgctgagatttatggcatttcttctgctcacactttgttgcgggggacactgagatataagggattggaatgctgaataatggattggaatgttgaataatgttgaataccttcctatggtatcctccctaactccttccccttgaaccacccagccccatctatggatatatgaaagctttgaatggatttgtaaaattaggtcttataaacagagaagcgcttcctgcctttagacctgaggccaaccctctcacccggaaacaactcctctgtgacctagttgggatttcaccctcctctgagcatgatgtgttgaaggaagctgttcttaagaaactaggaggagacaatacccagttggaggctgctgaatggtaggcacccaccactcaacttagagcaaaatatactgggatcaatgattgctaatttctactcaaaaaaagttaaatattttacatttgtctttgattaattcgttgctccaatgtgggtagagagattaccatgtgccatgttcatgtgggcataaagagtagattaaagagaggagctcaatgggcaattnagaattttgngaaaatgcttatctcgaaacactttaccactcagttcccaagcatanngggggtatttttgctttccnggt

SEQ ID NO: 4165 - DNA, 690 bp, Homo sapiens
  misc_feature (458)..(458): "n" may be a, t, c, g, other or unknown
  misc_feature (577)..(577): "n" may be a, t, c, g, other or unknown
  misc_feature (598)..(598): "n" may be a, t, c, g, other or unknown
  misc_feature (601)..(601): "n" may be a, t, c, g, other or unknown
  misc_feature (605)..(605): "n" may be a, t, c, g, other or unknown
  misc_feature (656)..(656): "n" may be a, t, c, g, other or unknown
  misc_feature (690)..(690): "n" may be a, t, c, g, other or unknown
ataaataaaatccatatttcctctcatacagaccccagagttgctttgcctgacagtgtagttgatggagaaaataatctttatccttagcctccatctggttgcagaccataaagacagggaaaaaatgagggtgttggtagcttcgttagaaactgaaagctcactgattttttcaaaacctaaatagcctgtgtttctccaaataactaatttgcagccttcggcagccaggactggcagggatggggctagggggactggggagaactgctctctcctgagggtggtctgacccgacagcacgcatgaccttcccacagtcaggaactgctcagagacgtgatggcaactccatagaatgaaatactcttcagccagtaaaatgtatttttggataaatatttgctttaaaaaactttactatatgttgttaaatgaaaaaaaaaccttaaggnatcagaaattatgtgcagtaaaatctcacttttgtaaataaatatacctgtttactacgtatgcataaaaagaatcctgagaaatataagtactgtatgcatattggttgttaaagtantttttccggttgcttatctanaantccnaattttgcttcaaaggaaaaagtttactccgggcaatattaaaaaattaanataactaattttggccttgtcaatcaaaaccagn

SEQ ID NO: 4166 - DNA, 731 bp, Homo sapiens
  misc_feature (471)..(471): "n" may be a, t, c, g, other or unknown
  misc_feature (513)..(513): "n" may be a, t, c, g, other or unknown
  misc_feature (704)..(704): "n" may be a, t, c, g, other or unknown
  misc_feature (709)..(710): "n" may be a, t, c, g, other or unknown
  misc_feature (727)..(728): "n" may be a, t, c, g, other or unknown
gcaccgggaaaataacaatcgtatttcaggttgaaagctcctattactgctgggttttggaggctgcgataaaatcttcatcgacgtgaaggtaccttctgggttggcttgggtcgtaagtcctaagatgggggccgtccttccctgggggcagggacgtagggaaccaggcggtggggagggagaaaggagcgacgaggtcagaggaaaccttgggtttccaaggctcctggggcaccaaagggcttcccgcagtcggggaattgagccctggggaggagccttttgcgagaacgtgagcgcgccccaacacgcctcagacctcgtaaacccacttggcaaagaccggggaagcggctggcggaccgactgcggtgaactcaagaaattaacctgcgctgcaactaaacgggctgccgccctttcacactcacctcgagcgaccgagatagagaaagctcccgaaccggncgcggggggacttggctccaccctcccgtcccgggagaagangacaaaaaggggagatggacttggaatggccccgcccttcacaagcgctccaatccttggaaaccaaacctcctctccaaagcctccacgtctagaagggacaaaggcagcgaaggagattcagagacccgacggggaaatggtggctttcaaggcttctgggtgttgggttgcatgggggaaaaggtacnatggnntaaactttccaatcaannaat

SEQ ID NO: 4167 - DNA, 493 bp, Homo sapiens
  misc_feature (395)..(395): "n" may be a, t, c, g, other or unknown
  misc_feature (421)..(422): "n" may be a, t, c, g, other or unknown
  misc_feature (431)..(431): "n" may be a, t, c, g, other or unknown
  misc_feature (445)..(445): "n" may be a, t, c, g, other or unknown
agccatggagcaggcacctccggaccccgagcggcagctccagccggcgcccttggagccgctgggctccccagacgctgggctgggggctgcggtcggcaaggaagcggagggggccggagaagagagctctggggtcgacacgatgacacacaataatttttggttgaagaagatagaaatcagtgtttcagaagcagaaaaacgaactggaagaaatgccatgaacatgcaagaaacatatactgcttacctcattgaaacaaggtcagttgaacataccgatggtcagagtgtcctaacagactcactatggcggcgatatagtgaatttgagttgttgagaagctaccttttagtttactatccacatattgttgtgccacctctgccanaaaaacgggcaaaatttggttgggannaactccccngctgaaacaatggnttcaaaattttgtgggagaaggcaacgggtttggtttagaaaactttc

SEQ ID NO: 4168 - DNA, 664 bp, Homo sapiens
  misc_feature (594)..(594): "n" may be a, t, c, g, other or unknown
  misc_feature (622)..(622): "n" may be a, t, c, g, other or unknown
  misc_feature (632)..(632): "n" may be a, t, c, g, other or unknown
  misc_feature (645)..(645): "n" may be a, t, c, g, other or unknown
  misc_feature (664)..(664): "n" may be a, t, c, g, other or unknown
aaaaagtgtgggggcagtgggcggaacaaacgcgccgactacagaggctggacgtaagcttagcggtggcgcgcgtgcgcagcgccggcccgagttgccaaaacaaaggggatttggtgatggaggctttgttagaaggaatacaaaatcgagggcatggtgggggatttttgacatcttgtgaagcagaactacaggagctcatgaaacagattgacataatggtggctcataaaaaatctgaatgggaaggacgtacacatgctctagaaacttgcttgaaaatccgtgaacaggaacttaagagtcttaggagtcagttggatgtgacacataaggaggttggaatgttgcatcagcaggtagaagaacatgaaaaaatcaagcaagagatgaccatggaatataagcaggagttgaagaaactacatgaagaattatgcatactgaagagaagctatgaaaagcttcagaaaaagcaaatgagggaattcaagaggaaataccaaaaatcacagggaagatcggtctgaaattgagaggttaactgcaaaaatagaggaattccgtcagaaatcgctggactgggaaaancaacgcttgattttacagcaacaagtancctcactggnggcacaaaggaangctctggctgaacaatcan

SEQ ID NO: 4169 - DNA, 780 bp, Homo sapiens
  misc_feature (135)..(135): "n" may be a, t, c, g, other or unknown
  misc_feature (501)..(501): "n" may be a, t, c, g, other or unknown
  misc_feature (517)..(517): "n" may be a, t, c, g, other or unknown
  misc_feature (532)..(532): "n" may be a, t, c, g, other or unknown
  misc_feature (656)..(656): "n" may be a, t, c, g, other or unknown
  misc_feature (665)..(665): "n" may be a, t, c, g, other or unknown
  misc_feature (692)..(692): "n" may be a, t, c, g, other or unknown
  misc_feature (709)..(709): "n" may be a, t, c, g, other or unknown
  misc_feature (727)..(727): "n" may be a, t, c, g, other or unknown
  misc_feature (779)..(780): "n" may be a, t, c, g, other or unknown
tactcaacatacaagcacttacactgcagagaaaccctatgactgcaatgaatgtgggacgtctttcatctggagctcttaccttattcaacataagaaaactcatactggagaaaaaccctatgaatgtgatanatgtggaaaagtttttaggaatcgctcagcctttacgaaacatgaacggactcacactggaataaaaccctatgaatgtaataaatgtggaaaagccttcagctggaattctcatcttattgtacataagagaattcatacaggagaaaaaccttatgtttgtaatgagtgtgggaaatctttcaactggaactctcatcttattggacatcagaggactcatacaggagagaaaccttttgaatgtactgaatgtgggaaatcattcagctggagctcccatcttattgcccatatgagaatgcatactggagagaaaccctttaaatgtgatgaatgtgaaaaagcttttagggactactcagnccttaagaaacatganagaactcattctggngcaaaaccatataaatgtactgaatgtggaaaatccttcagctggagctcccatcttattgcccatcagagaactcacacgggggagaagaaaccatataacctgtcaggaaatggtggcaaancattcagangaacgctcaagccctcactaagcatgnggataattcaatctggnatttaagccctatgaatngtaataaaatggtgggaaatcctggttagccagattggctcaaccttgttann

SEQ ID NO: 4170 - DNA, 714 bp, Homo sapiens
  misc_feature (463)..(463): "n" may be a, t, c, g, other or unknown
  misc_feature (575)..(575): "n" may be a, t, c, g, other or unknown
  misc_feature (621)..(621): "n" may be a, t, c, g, other or unknown
  misc_feature (628)..(628): "n" may be a, t, c, g, other or unknown
  misc_feature (648)..(648): "n" may be a, t, c, g, other or unknown
  misc_feature (673)..(673): "n" may be a, t, c, g, other or unknown
  misc_feature (707)..(707): "n" may be a, t, c, g, other or unknown
gattttaatgataatgttttgtggtgggttaaagacctcctaacaacagggggtttttatacaacaacaagaagtttttaaataattgagtttttaaagtggaaagcagcagtaaattaaactagaaggatatattttatacctagaaataaataaagctcaacttgttttgtaagcctgttttaaaaatatttaatcatttaatttgtgcaagtatagagttctcctatggcaaaactataccatcatcttctccaattgtgcatggcagctgtactaagttctgcaaaaacaagacatatggatgtgtttcataccttctcagaattggtatatcaagacacatttaaatataagccctctggaaatggatttatatacagtcaacataaatacccccttagaaattggtaatattttatagccaggtttaggtttagtgtcaagtatagtgattgctggnctatcactactcatgaagtgggaaccccctctactcataaaaaccccaatcaaacatatagatgaatagaaccttgataacattagaatgccttggttctctgaaggcttangaagacaatacgtcagggaaatatgaaggagaagctgaggaacganaagaaancttcgacaaagagaatgggnaatgtacatgctatagcataactgnaggataaaattacagggttggaggttttaaaaantatatcc

SEQ ID NO: 4171 - DNA, 578 bp, Homo sapiens
  misc_feature (425)..(425): "n" may be a, t, c, g, other or unknown
  misc_feature (524)..(524): "n" may be a, t, c, g, other or unknown
  misc_feature (526)..(526): "n" may be a, t, c, g, other or unknown
  misc_feature (555)..(556): "n" may be a, t, c, g, other or unknown
  misc_feature (560)..(560): "n" may be a, t, c, g, other or unknown
ttctttgatgcgacctcaggaaggagatgagggccggtgcataaacttctcccgagttccatctcagtaaaagggaagcaggaagaccaagaaggtacgaagatggcacattttcacatagctgattttcaaccaaatgaaaaaaatcaagtgcatttcagaagcttttggaagagcagcttaattcctctcagtcgggaaatgttttctctgccttctgctttgcttgcaccaaacatttctaaacacttgttctgccatctacatgggaggtgatgaaactcagtggtaactcatggtttatgacattgaaaataaagaggaacattgacctgcagactatggtttgtacaagaaagtttgtttgaatgtgtagaagaggaaaaagcaacaacagcaacaacatgaagatgataccaacacanggaccacaaaacaactagccatgatgggagacaggagttttttacatggaaacatggcacctgtgtttttatgtggcaagatctttatctataggcaanangtatgaaatttcccaccagggctaagcanntaangaagtccattgccttaaa

SEQ ID NO: 4172 - DNA, 681 bp, Homo sapiens
  misc_feature (597)..(597): "n" may be a, t, c, g, other or unknown
  misc_feature (653)..(653): "n" may be a, t, c, g, other or unknown
  misc_feature (658)..(658): "n" may be a, t, c, g, other or unknown
  misc_feature (672)..(672): "n" may be a, t, c, g, other or unknown
  misc_feature (678)..(678): "n" may be a, t, c, g, other or unknown
tttgcatgtattttcataatgggatgttaatctgtggttttctcttcttgtgatgtctttgtctagctttggtatcaggatacagctagcctcatggaatgaactaggaagtatgccctcctcttctagtttttggatgacccatcatctcttacctcacctacagcaggaaccttgaaattggacttctgcctcacaccctgcaatctcatctccacattatgaccagagtgatcttcttttttaaaaaaaacttattgttactatttcaattgataaatgaattgtatatatttatggtgtacaacgtggtattttgattgtgtacacattgtggaatggctaaatcaagctaattaacacaccattttttgtggtgagaacacttaaaatctactctcagcagttttcagatacagactacattgttattgactgtagtcaccatgttgtacagagtgatcttctcagtggacaactctgtgcacatccctcagagccgcaaggcagtgatatccaggttcctgaacagggtctccaaagccctccacccacgggtcctttccttcctggctcgccacatcttccaagtccatntctcaactatgtgagggtcctttttcaagttccctaaagcacatccccaatgttanctcanaagattatgttgcnagcccnaaa

SEQ ID NO: 4173 - DNA, 646 bp, Homo sapiens
  misc_feature (610)..(610): "n" may be a, t, c, g, other or unknown
  misc_feature (615)..(615): "n" may be a, t, c, g, other or unknown
  misc_feature (642)..(642): "n" may be a, t, c, g, other or unknown
aaaaaaaaaaaaaaagtcggcggccggactgggaagatggacgcagctactctgacctacgacactctccggtttgctgagtttgaagattttcctgagacctcagagcccgtttggatactgggtagaaaatacagcattttcacagaaaaggacgagatcttgtctgatgtggcatctagactttggtttacatacaggaaaaactttccagccattggggggacaggccccacctcggacacaggctggggctgcatgctgcggtgtggacagatgatctttgcccaagccctggtgtgccggcacctaggccgagattggaggtggacacaaaggaagaggcagccagacagctacttcagcgtcctcaacgcattcatcgacaggaaggacagttactactccattcaccagatagcgcaaatgggagttggcgaaggcaagtccataggccagtggtacgggcccaacactgtcgcccaggtcctgaagaagcttgctgtcttcgatacgtggagctccttggcggtccacattgcaatggacaacactgttgtgatggaggaaatcacaaggttgtgcaggaccagcgttccctgttgcaagngccanatgcggtttcctgcaaaatttcccgancggg

SEQ ID NO: 4174 - DNA, 756 bp, Homo sapiens
  misc_feature (127)..(127): "n" may be a, t, c, g, other or unknown
  misc_feature (242)..(242): "n" may be a, t, c, g, other or unknown
  misc_feature (297)..(297): "n" may be a, t, c, g, other or unknown
  misc_feature (565)..(565): "n" may be a, t, c, g, other or unknown
  misc_feature (623)..(623): "n" may be a, t, c, g, other or unknown
  misc_feature (665)..(665): "n" may be a, t, c, g, other or unknown
  misc_feature (735)..(735): "n" may be a, t, c, g, other or unknown
  misc_feature (738)..(738): "n" may be a, t, c, g, other or unknown
  misc_feature (747)..(747): "n" may be a, t, c, g, other or unknown
  misc_feature (751)..(751): "n" may be a, t, c, g, other or unknown
cttttccggcccgcagcgcggcctgggctcccgcgtgtttaaaagtgcgcttgtggctgctgctgtcttaactcctgtgcttggcggacagacaggcgagatggcggcggaggtgttgccgagtgcnaggtggcagtattgtggggcgcccgacgggagccagagagctgtactggtccagttctccaacgggaagctacagagtccaggcaacatgcgctttaccttgtatgagaacaaanattccaccaaccccaggaagaggaatcaacggatcctggcagctgaaacagatangctctcctatgtgggaaacaattttgggactggagccctcaaatgcaacactttgtgcaggcactttgtgggaattttgaacaagacctctggccaaatggaagtatatgatgctgaattgttcaacatgcagccactattttcagatgtatcaagttgagagtgaactggcgctagagagtcaagaccaaaacttacagagaaaagatggattcttgtattgaagcctttggtaccaccaaacagaagcgaagctctgaacaccaangaggaatgaacaagagttggcaatgaatctttgaatcgtgcagtggctaaagctgcanagactatcattgatacgaagggtgtgactgctctggtcagcnatgctatccacaatgactttgcaaggatgactccctctaaccttcctccctgctaatgatgattgcaagncanggcctgaangacntggta

SEQ ID NO: 4175 - DNA, 802 bp, Homo sapiens
  misc_feature (599)..(599): "n" may be a, t, c, g, other or unknown
  misc_feature (676)..(676): "n" may be a, t, c, g, other or unknown
  misc_feature (728)..(728): "n" may be a, t, c, g, other or unknown
  misc_feature (755)..(755): "n" may be a, t, c, g, other or unknown
  misc_feature (767)..(767): "n" may be a, t, c, g, other or unknown
  misc_feature (775)..(775): "n" may be a, t, c, g, other or unknown
  misc_feature (797)..(797): "n" may be a, t, c, g, other or unknown
agcataacctgtttgtgaaactgcaaaaaggttgacatggctgaagcagaagatgggttggtactgaatggttgggagagatatgtagcggctgaccctgaaggacgttgcagcccatgctatggagacctgattttattttgtaagaggtgggcaacccctgaagcattttagtgatgcgaacagatgtgtctgttaccaagcaaagccagttaaagaaggtcacagaggaggaatgatcacaaagagtctgagaagccaactggggccaaacaagttttagaacctctactggctgatgccaacatcatcagagatgaactgttcttaccagaaacttctctgctcctgacaccccacctctccccagaagagaagaaggagagtggccacgttgattcagccaagcacctccaggaggtcccctctggatgtcccatgaggctgcccctcagccacagcccagagcacgtggagatggctttgctcagcaacatcctagcggcctattcctttgtctcagaaaatcctgagcgagcagctctgtactttgtttctggcgtgtgcatcgggctggtgctgaccctggctgctctggngataaggatctcttgccacacagactgcaagcggcgtcccggggaagaagttcctgcaaggacagagagagcaacancgacagcaacgacagcgaaggattgcaattaaggacaccgtgtccgatttcnccggtgcgggagaaaaccgccgcttcnaaaaggactttngaacaaanaatgtgtttaacctctgccggnaggaa

SEQ ID NO: 4176 - DNA, 565 bp, Homo sapiens
  misc_feature (400)..(400): "n" may be a, t, c, g, other or unknown
  misc_feature (485)..(485): "n" may be a, t, c, g, other or unknown
  misc_feature (515)..(515): "n" may be a, t, c, g, other or unknown
  misc_feature (528)..(528): "n" may be a, t, c, g, other or unknown
  misc_feature (541)..(541): "n" may be a, t, c, g, other or unknown
  misc_feature (564)..(564): "n" may be a, t, c, g, other or unknown
gtgggattcaacaaaaggagcaacaagcattgaaaagtatgatctccgtacaaatatgtggactccagtagcaaatatgaatgggaggaggctacagttcggtgttgcagtgctagatgacaaactgtatgtggttggaggaagagatggactgaagactttgaatactgtagagtgctacaaccccaaaacaaaaacttggagtgtgatgccacctatgtccacacatagacatggccttggtgtggctgtactggaaggtcccatgtatgccgtaggaggacatgatggctggagctatctgaacacagtggaaagatgggaccctcaggctcgccagtggaattttgttgccactatgtctacccctaggagtacagtaggtgtggcaagtactaantggaaaactttatgcaagttggtggtcgtgatgggaagttcttgtctcaaatcagtagaatgtttttgatcctcatactaataangtggacactgtgttgcacagatgtcaaaanggaaaaggtggcnttaggagtgaccnacctgggaatggactgctgtatnc

SEQ ID NO: 4177 - DNA, 563 bp, Homo sapiens
  misc_feature (267)..(267): "n" may be a, t, c, g, other or unknown
  misc_feature (287)..(287): "n" may be a, t, c, g, other or unknown
  misc_feature (382)..(382): "n" may be a, t, c, g, other or unknown
  misc_feature (421)..(421): "n" may be a, t, c, g, other or unknown
  misc_feature (430)..(430): "n" may be a, t, c, g, other or unknown
  misc_feature (435)..(435): "n" may be a, t, c, g, other or unknown
  misc_feature (492)..(492): "n" may be a, t, c, g, other or unknown
  misc_feature (533)..(534): "n" may be a, t, c, g, other or unknown
  misc_feature (551)..(551): "n" may be a, t, c, g, other or unknown
  misc_feature (563)..(563): "n" may be a, t, c, g, other or unknown
ttttttcatactattagaccatatctcataaaaccttttgaattaatgaaggtacttgtttcctttctcaataatgaaaataggcttctagttttagaaggctgagccgaaactacaccttgcctagggatcagccccactgtcttttctttgtataactaaatctgcattttcaaatgttgtcaatcacatttttcttagagctgaatatccaggctgtaattctctaaaccctttttcttgacctcattgcatcattccacaggncttgccccgattttgtctancagctacccatttctggagtcaggatgtgaaacctctgttcctctgacctcattaagctgggggtctgtctaagttaacgtttgccctatttggnaacacaaaaacacaccagactttttaaccgtacgctcanctaacatgntttgngaaattcataaccaggcactcaaatatccttggtagcctacgaaaagtgagtaaggnaataaattttgcctttggtagggaagaactacaaaagttgnnaatcctttaaagctggnccattttttaan

SEQ ID NO: 4178 - DNA, 689 bp, Homo sapiens
  misc_feature (575)..(575): "n" may be a, t, c, g, other or unknown
  misc_feature (641)..(641): "n" may be a, t, c, g, other or unknown
  misc_feature (673)..(673): "n" may be a, t, c, g, other or unknown
  misc_feature (675)..(675): "n" may be a, t, c, g, other or unknown
  misc_feature (677)..(677): "n" may be a, t, c, g, other or unknown
  misc_feature (682)..(682): "n" may be a, t, c, g, other or unknown
ttccactacagtaagttttcactggatctcagaactgccaatcattctcccaaaggaggtgacaaaaaggcatcaaaacatttctgctgttttggcacagacctagctcttttgtgtctgctcttttaacacaagccttccccttccttccaaaagcagaaagtcacaatgactctagtattttaaaatgaagaacccacgtgcggaggagtgaagccaatatagtaatatctgaatgccatctaaaaatgttttgagtggtaaataaaggggtcataaagaatagcatcttaacctgaaatgcctatgtccactacaggaaaaattcatgagagaaaagagggcaacacatgaaacatgcctgcactggctctcatgagcctccctgtagatacttgtgagagcctccccaggtatatccatctagtggagtacatgaaacaataaccatgccatgacattcaaatacatacacatcaaaatgtagtattgactcatgggtcaattatttttattttgctgcttaaaacttttgttttccacattttcctcaaagtgcatgtttttggttttgnttttcttaactagaaaaaatatcccttactaacgcactgggggaattacaaagggggggggggggnagaacaatatccccttcttcaaaaagtcctangngntttgnccctggg

SEQ ID NO: 4179 - DNA, 662 bp, Homo sapiens
  misc_feature (596)..(596): "n" may be a, t, c, g, other or unknown
  misc_feature (629)..(629): "n" may be a, t, c, g, other or unknown
  misc_feature (636)..(636): "n" may be a, t, c, g, other or unknown
  misc_feature (638)..(638): "n" may be a, t, c, g, other or unknown
  misc_feature (655)..(655): "n" may be a, t, c, g, other or unknown
agacccatcccgcggtgcagccgccggcccggtaggcgccaggaccccgagcctcggcggcggcggcggcggcggcagcgctgccttcactcacctcgtcctcgctcccgtcctaccccgttccgcgctgggtggagtccaagtctgattgcgagagtccggaacgccgcctcgggggcttgactccagccccggggatcgagaacggcgcccaggggtccctacgtctgccttgggggctcgagtcccgccctgggcgtccgtgacgtcgcccaggggtctccacgtttgtcctggaacctggagagccgccgtgggggccccggaagccgcccaggagtccccacgtctgccctgggggctcgagtccagctctcagggtcccggacgccacccagggggtccccatgtctgctttgggggctcgagtccagccatgggggtcctggacgccgcctcggcgtccccgcgtctgccttgggggcccgagtcccgccctgggggtcctggacgccgcctcggcatccccgcgtctgccttgggggctcgaagtcccgccctgggggtccccgatgccgcccgggggtcctcaagtntaccttggagaactggagttcccccgttgggantctcggnangccaaccccggagtcancgtgtca

SEQ ID NO: 4180 - DNA, 831 bp, Homo sapiens
  misc_feature (600)..(600): "n" may be a, t, c, g, other or unknown
  misc_feature (728)..(728): "n" may be a, t, c, g, other or unknown
  misc_feature (754)..(754): "n" may be a, t, c, g, other or unknown
  misc_feature (776)..(777): "n" may be a, t, c, g, other or unknown
  misc_feature (805)..(805): "n" may be a, t, c, g, other or unknown
  misc_feature (830)..(830): "n" may be a, t, c, g, other or unknown
gggaaaaaatcaaaaagtggtaaactgaggaaaaagggtaacatgaagataaatgagacgagagaggacatggatgcacagttgttagaacaacaaagcacgaactcaagtgaatttgaggctccatccctcagtgacagtatgccttctgtagcagattctcactctagtcatttttctgaatttagttgttctgacctagaaagcatgaaaacttcttgtagtcatggttccagtgattatcacacccgctttgctactgttaacattcttcctgaggtagaaaatgaccgtctggaaaattccccacatcagtgtagcatttctgtggttacccaaactgcttcctgttcagaagtttcacagttgaatcatattgctgaagaacatggtaacaatggaataaaacctaatgttgatttatattttggcgatgcactaaaagaaacaaataacaaccactcacatcagacaatggaattaaaagttgcaattcagactgaaatttaggcccataaatgctgcagaataattaccactgtacaaccgtgtttggagctggttgaactacatgtgactacttaagtttcaggttaccancaaaagccgggtttcattatcataatgcagatacattttctgtgttcagcaaggcattgtgtgtcatgtggatcttaagttaccaaactatgaagtgaaggcttttaaaagtgcattatttttaaggntaataaattttgaagagcaaagcaangttttgtgtggtttggcacaannacaattgccttgaagcacatactttagnatagaaaattgggccttaattttana

SEQ ID NO: 4181 - DNA, 675 bp, Homo sapiens
  misc_feature (308)..(308): "n" may be a, t, c, g, other or unknown
  misc_feature (459)..(459): "n" may be a, t, c, g, other or unknown
  misc_feature (586)..(586): "n" may be a, t, c, g, other or unknown
  misc_feature (609)..(609): "n" may be a, t, c, g, other or unknown
  misc_feature (631)..(631): "n" may be a, t, c, g, other or unknown
  misc_feature (638)..(638): "n" may be a, t, c, g, other or unknown
  misc_feature (656)..(656): "n" may be a, t, c, g, other or unknown
agggcgatggcaggttcgccgggtgtgaggcttcacagcggtccggtgaccaagtcgaggatttttctggtggtctagtctcagagattacatctgtagtcagcacaatgattcccttccaagcccagtggtgcccagttgcctccaggtcccagacctttatgtggacaagaaaagcttacagaggaaatggtaattctccacttgcacactgaggtgtccagttgcagcccatggagatccagttcaattatgaatctcaggaacaccaccttctgtcagatggtgagaacaagaccaagattggnaagccagcttcagaggagggaattacagcaaaaattgaaccattgacaggaagagtctagcagtctcagaatgttctccaggattctgaaggcaaagaattctgtgaatttggggataaattaaatgaaaaagatcagaacgtctttaaanaggagacctcataactgtgacgaatatgggcaaagctttgtttggagtacaagcctttttaggcatcgaaaaacgcactgtgaagaaaccttatgaatgggataagtgtggaaaggccactgggganaaaccttattcctgtaattgggngtattaaaagtttcaagttggngcctcanaccttattaaacaccaanggaggtccacacctgggga

SEQ ID NO: 4182 - DNA, 647 bp, Homo sapiens
  misc_feature (549)..(550): "n" may be a, t, c, g, other or unknown
  misc_feature (577)..(577): "n" may be a, t, c, g, other or unknown
  misc_feature (580)..(580): "n" may be a, t, c, g, other or unknown
  misc_feature (637)..(637): "n" may be a, t, c, g, other or unknown
ttagtatgtgtgggctatttaaagtataatgactttggtttggttatatgagtgacacagaatttaaggaggcttcatgccatagttcatagtttgctctaatggcttggtggtatccctgaacagtctacttttagaaattaacagtaaatacacaatccagctgtaatcttaccctccaccagggggagcttcaacatcggttaatactttttttttttttgagatggagtctcgccctgtcgcccaggctagagtgcaatggctcagtctccgctcaccgcaatctctgcctcccgggttcaaacagttgtgcctcagtcttccaagtagctgggattacaggcacccgccaccacgcccagctaatttttgtatttttaagtagagacggggtttcatcatgttggcgaggctggtcttgaactcctgacttcgtgatccgcccccccctcaagcctcccaaagtgctgggattacaggcgtgagccaccgcgcctggcccggttaatactttcaaaagcattgaagtaactatttaagtcctannacataaacactgtgtggttcacaaaanggnatagagacattctctcaagaggttacaatctaattgggcagggaagattcctacagntcatcaaagg

SEQ ID NO: 4183 - DNA, 612 bp, Homo sapiens
  misc_feature (579)..(579): "n" may be a, t, c, g, other or unknown
  misc_feature (596)..(596): "n" may be a, t, c, g, other or unknown
  misc_feature (601)..(601): "n" may be a, t, c, g, other or unknown
  misc_feature (603)..(603): "n" may be a, t, c, g, other or unknown
  misc_feature (612)..(612): "n" may be a, t, c, g, other or unknown
agtaactcttgagctggctcagggagcgcacttccttctcagccagcgcgtcgccccctgcatccgtggcctccactggagctgggcaggaccctacccagtgaatctggagaaaacaaacttgggagacagacgaaagcttagggcacattggaggacagcgcagctgtggctcccatttttggagatgcagtcgaatttgagctcacagggaggtgtggttgcctcctggggatggaaaggcttcctttctccacctctgtaactggtgcttctgagaagtaaatggtatttggatcctgacctcagacgcgaatttgggtcttctgtgcttaggagcagaaagagcccaggaggggcctgttcctttacttcttgggggaaacgcaatgcgtggcctgacttctcatgacgggaaaggctactccaccttctctgtactcctggaggggagtcttgttcacatgtttaccaagcggccaggacaaggaagagaaaaggtattgacattaagaggatggtttgctgaaggctgtgaaacttgaacgctattagtcagtgggaacctgcctggcttangggaatggctgcagcanaatcnanacgtttccn

SEQ ID NO: 4184 - DNA, 739 bp, Homo sapiens
  misc_feature (604)..(604): "n" may be a, t, c, g, other or unknown
  misc_feature (613)..(613): "n" may be a, t, c, g, other or unknown
  misc_feature (643)..(643): "n" may be a, t, c, g, other or unknown
  misc_feature (696)..(696): "n" may be a, t, c, g, other or unknown
  misc_feature (703)..(703): "n" may be a, t, c, g, other or unknown
  misc_feature (715)..(716): "n" may be a, t, c, g, other or unknown
aagtggcaccaagcacttccggtacggaaaactcgctgctgccccaacctggcttgacaggcttggtctctgcaagtggctctcagccccttcttctttcctgcctcaccttccaattcgtttgccgccgccgtcccgcagctgctgtttccggagttgccccttccccatgttccggggcaggagtccgcaaagcgaagatccgcccgccggttccccatcatgtccgaactgactaaagagctgatggagctggtgtggggcaccaagagcagccccggtctctcggacaccattttctgccgctggacgcaagggtttgtgtttagtgaatcagagggatctgcattagaacagtttgaaggtggcccctgtgctgttattgcacctgttcaggcatttcttttgaagaagctcctgttttcttcggagaagtcttcttggcgggattgttcagaggaagagcagaaggaactcctttgtcataccttgtgtgatattttagaaagtgcttgttgtgaccactctggatcatactgcttggtttcaaggttaagaggaaagacaactgaggaaactgctagtatttctgggagtcctgcanaagtctaanttgccaagtggaacattcttctgccttggntgtccaagagcttggctttgagcgatttcaatgcattaaattcaaaaaagatngttcaanaagtttaacaannatttaaaaaggatctgtcctggg

SEQ ID NO: 4185 - DNA, 617 bp, Homo sapiens
  misc_feature (430)..(430): "n" may be a, t, c, g, other or unknown
  misc_feature (475)..(475): "n" may be a, t, c, g, other or unknown
  misc_feature (560)..(560): "n" may be a, t, c, g, other or unknown
  misc_feature (575)..(575): "n" may be a, t, c, g, other or unknown
  misc_feature (587)..(587): "n" may be a, t, c, g, other or unknown
  misc_feature (608)..(608): "n" may be a, t, c, g, other or unknown
  misc_feature (616)..(616): "n" may be a, t, c, g, other or unknown
taaaactaactccaatacagcgtgaagccacaaatggaatgggaagctcaaaccctgaaccctgctctgcaatttctcttatttgctcttctgacacagtagggaaaaggaacctacttttcaaacttggctaagacatcagctacgacggttcgactttcaatggctttgtcgacgtggccgttgtattcaaacaaagcaaacatgttcctgctgtcctccatggccaggcctcggatcagcttctccaccacctggaagacacaccagggggacttcagttccacaggctgcggccccaacacgtgttcccagaacgtgccatcacctgatcccagagggagctgctggcacaagggcgtctccagcctcctaaaaatgttacccgtgtggtcatcccagaatttcaaaagtactattttccctttgntctcttgagattaggtttatctctttcctgctgaaaataactcanggtattttgcccatcggtagaggcagatgctgggctgatttcttgcaaacctatattaacaggaaaagcgggtgaaaagcttcangtcctgtcttttggntgataaatttangaactccaaggaacaacaagngactccang

SEQ ID NO: 4186 - DNA, 771 bp, Homo sapiens
  misc_feature (660)..(660): "n" may be a, t, c, g, other or unknown
  misc_feature (706)..(706): "n" may be a, t, c, g, other or unknown
  misc_feature (725)..(725): "n" may be a, t, c, g, other or unknown
  misc_feature (735)..(735): "n" may be a, t, c, g, other or unknown
  misc_feature (768)..(768): "n" may be a, t, c, g, other or unknown
  misc_feature (771)..(771): "n" may be a, t, c, g, other or unknown
gaaaatgcaaactgaaacctgggaaacagtgcagtccaagtcaaggtccttgttgtacagcacagtgtgcattcaagtcaaagtctgagaagtgtcgggatgattcagactgtgcaagggaaggaatatgtaatggcttcacagctctctgcccagcatctgaccctaaaccaaacttcacagactgtaataggcatacacaagtgtgcattaatggggtaagcatttaactatatgttttaaaatttaattttagaaaacttgtttttcagaagaattattgatgcttaaagctacatagttaaagtaattaatcttggtctctgtttaagtaatattccctcacaaaaccatgaatatattatgtggcattcaattagctactaatttgtctttcatctttccatgtacatgtggttgatattctctagagaaacatagttgtacaactcggcatgtgatttgtctataatatttaagttttataaaataatatttcagtagcctaaataaaagaactctttggtcatcttctctgaatatcaaaccttcaaagcttttgtggctgaatatcactttgctctacaggaaaaaaatttaatttttctttctttatagaagagccgtaataaccaacattaaaatcgattctcaactaanctcttgctctgcttttaaattcaattttttaaagttggccattgcnttaaaagatttactatccnttccctgggntttaccgggttttcaaaaattttttttcaaaanggn

SEQ ID NO: 4187 - DNA, 708 bp, Homo sapiens
  misc_feature (588)..(588): "n" may be a, t, c, g, other or unknown
  misc_feature (664)..(664): "n" may be a, t, c, g, other or unknown
  misc_feature (695)..(695): "n" may be a, t, c, g, other or unknown
  misc_feature (701)..(701): "n" may be a, t, c, g, other or unknown
atactatatgcttcaagaacaagtcagtgaatatttgggtgtgacctcctttaaaaggaaatatccagatttagagcgacgagatttgtctcacaaggagaaactctacctgagagagctaaatgtcattactgaaactcagtgcactctaggcttaacagcattgcgcagtgatgaagtgattgatttaatgataaaagaatatccagccaaacatgctgagtattctgttattctacaagaaaaagaacgtcaacgaattacagaccattataaagagtattcccaaatgcaacaacagaatactcagaaagttgaagccagtaaagtgcctgagtatattaagaaagctgccaaaaaagcagcagaatttaatagcaacttaaaccgggaacgcatggaagaaagaagagcttattttgacttgcagacacatgttatccaggtacctcaagggaagtacaaagttttgccaacagagcgaacaaaggtcagttcttacccagtggctctcatccccggacagttccaggaatattataagaggtactcaccagatgagctgcggtatctgccattaaacacagncctgtatgagcccctttggatcctgagctccctgctctagacagtgatggggattcagatgatggcgaaagatggnccaaggtgattgagaaaccgggaaaattaanggaacnttcgggc

SEQ ID NO: 4188 - DNA, 774 bp, Homo sapiens
  misc_feature (662)..(662): "n" may be a, t, c, g, other or unknown
  misc_feature (740)..(740): "n" may be a, t, c, g, other or unknown
  misc_feature (751)..(751): "n" may be a, t, c, g, other or unknown
  misc_feature (761)..(762): "n" may be a, t, c, g, other or unknown
  misc_feature (766)..(766): "n" may be a, t, c, g, other or unknown
cagttcagcttttactatatatttctatttatggttatcttcgtatctttagaagttttgggttttttttttatagttttgtgaaagaaaggatgggaataagatttgtgtttattttgcataaacctatctcgtgtggaagatgtgtaatgatttcaaataaaagacatcacagcaatggtacttagattttgagttaataaatggtgtttagtttgagatacacatctgttatgattttcagtaatattaatgatggtgatagcaacatttatgtaaccacaagttaatattattcaaagctccattctgatttggaaagaacagcagattttgcatccaaggactgactcttaagtcttacttttgccacttagtagccgagtgacccataaaatgagaatggtaatacacgcttctactcagtgtatataaatgatgaagaataaatatgcttattggagatcattttaatctatgaagcactgtaagacataagctgttatttatcaaaaaatataattctaatgttgccccagtgttgctccaaataacaaaacttttaaagtcataaaaacaagtaaaaattttgggtaaaaacgtaactttttattaaataagcattgcattacagttgagcaaaagataatgttgaaattcanaattggggtgtagaaacgatactggagtatttgtgtcaagcattgtcaaagggaggaattgcagatgccgattggaanactggatgcanggaggaccannatantaaatggg

SEQ ID NO: 4189 - DNA, 609 bp, Homo sapiens
  misc_feature (572)..(573): "n" may be a, t, c, g, other or unknown
  misc_feature (578)..(578): "n" may be a, t, c, g, other or unknown
  misc_feature (596)..(596): "n" may be a, t, c, g, other or unknown
  misc_feature (599)..(599): "n" may be a, t, c, g, other or unknown
gtgtggccactctccctggggtccaaagtcccttcccgagggccggcctgtggagctacgggggtgctgggccagggtctgtgggcctcagtcccctctgaacctcactgtgccccagatcgtcaacacctgcagtggcccagacatcgcacgctccgtctcctgcccactgctctcccgagatgccgtggacttcctgcgcggccacctggtccctaaggagatgtcgctgtgggagtcactgggagagagctggatgcggccccgttccgagtggccgcgggagccacaggtgcccctctacgtgcccaagttccacagcggctgggagcctcctgtggatgtgctgcaggaggccccctgggaggtggaggggctggcgtctgcccccatcgaggaggtgagtccagtgagccgacagtccataagaaactcccagaagcacagccccacttcagagcccacccccccgggggatgccctaccaccagtcagctccccacatactcacaggggctaccagccaacaccaaccatgggcaagtacgtcaagattctgtatgacttcacanncccgnaatgccaacgagctatcngtngctcaaggat

SEQ ID NO: 4190 - DNA, 684 bp, Homo sapiens
  misc_feature (631)..(631): "n" may be a, t, c, g, other or unknown
  misc_feature (650)..(650): "n" may be a, t, c, g, other or unknown
  misc_feature (653)..(653): "n" may be a, t, c, g, other or unknown
  misc_feature (657)..(657): "n" may be a, t, c, g, other or unknown
  misc_feature (668)..(668): "n" may be a, t, c, g, other or unknown
acaaatatttacacaacatgtaccttttggaaggtatacctgatctttaaagcaggtaaacatgttctaaaaattgacacattaatttgaaataatataggaaattgaagcttagattttatgataaacttaaaagaataggtacaacttttctgctttatttaaattttattttctggtttatttaaatttagtcaaattctgtttgtggcatttaacttcatacttggaaaaatatacagtctcccactgttgaggaactcttctggagagtatatttttatgtgataataagtagagatgatgaagaaatgatttttgtatgccaaaggatacaaaaatgtttttatttaagcgagaattaatcaaatctgttttaagaaaattaattacttgattttgaaaactgtaagatatactaatgaagttcttatggaaaataacctattttggagtaatatcccaagctggcagaggctcagtgaaactaaatattcttaagtgccattgacactatttattattggtctgtttttaaagcaacatgacaatatagaggaagagcaattaagattcccatacactttgaccctgttattccatccttaagaaattatttcaaagaaatagntcaatagagatgaaaagcntantggnacattgtccancaaagcaaaacatggg

SEQ ID NO: 4191 - DNA, 700 bp, Homo sapiens
  misc_feature (534)..(534): "n" may be a, t, c, g, other or unknown
  misc_feature (560)..(560): "n" may be a, t, c, g, other or unknown
  misc_feature (587)..(587): "n" may be a, t, c, g, other or unknown
  misc_feature (665)..(665): "n" may be a, t, c, g, other or unknown
  misc_feature (667)..(667): "n" may be a, t, c, g, other or unknown
  misc_feature (670)..(670): "n" may be a, t, c, g, other or unknown
  misc_feature (697)..(697): "n" may be a, t, c, g, other or unknown
  misc_feature (700)..(700): "n" may be a, t, c, g, other or unknown
tttgttatgtgcaagagttctaaagccattttataatactgcagtatccccccccccccacctttttttttttgagacggactgtctgttgcccaggctggagtacagtggcgcaatcttggctcactgcaacctccacctccctggttcaagcaattcccctgcctcagcctcccatgtagctgggattacgggcgcacaccaccacacctggctaatttgtattcttagtagagacggggtttcaccatgttgaccagactggtctcgaactcctgacctcaggcaatctgcccgcctcagcctcccaaagtgctggaattacaggtgtgagccaccgtgcccggccaagtatctcttttctacagccttattaaactaactacaaacatttattttccaatttagttttactttcagtgcatatcaaagttgttgtactcttcagaccaacaaattaacttgagggcaaattacatagctttccatgtacccttttttcctcaggtgctaatcaaaggctctgaaaatggntactgctttagtgatgtctgctttantcttaaaatgcttatttcttttgctanatgtaaagatttggtgttaacaaaagtgggtttaatatgtaaatatgaatgaatgcctttagtttaccctgtttgtcnantantaatctgttttaattaaccttcaaagnggn

SEQ ID NO: 4192 - DNA, 677 bp, Homo sapiens
  misc_feature (552)..(552): "n" may be a, t, c, g, other or unknown
  misc_feature (637)..(637): "n" may be a, t, c, g, other or unknown
  misc_feature (659)..(660): "n" may be a, t, c, g, other or unknown
  misc_feature (664)..(664): "n" may be a, t, c, g, other or unknown
  misc_feature (666)..(666): "n" may be a, t, c, g, other or unknown
ctccgctcggggtcctcgctcggcctctgctggcctccgcgactccgcggtgcccgcccccgttgagttcaaaaggacgcgcggagcggcgccggcccttcaccagcagcccgtccgactggaaagatctgcctcttctccaagaaactcaaccactagtgacaatgaccagcctcctgactactccttctccaagagaagaactgatgaccaccccaattttacagcccactgaggccctgtccccagaagatggagccagcacagcactcattgcagttgttatcaccgttgtcttcctcaccctgctctcggtcgtgatcttgatcttcttttacctgtacaagaacaaaggcagctacgtcacctatgaacctacagaaggtgagcccagtgccatcgtccagatggagagtgacttggccaagggcaacgagaaagaggaatatttcatctaatgactcccaggccccaaggagcttattcctggctccatcgctaacacgttgactgcttattatgggaaagttttctctgaagccaagggagaancattgattgatgtgggcaaaatccaaagctccagccaaggtcgcagtcccaaatgccgacattcactgactccaaggggaccaangacatgggagaaagctgtttanngatnanctttaaaccaa

SEQ ID NO: 4193 - DNA, 618 bp, Homo sapiens
  misc_feature (454)..(454): "n" may be a, t, c, g, other or unknown
  misc_feature (504)..(504): "n" may be a, t, c, g, other or unknown
  misc_feature (539)..(539): "n" may be a, t, c, g, other or unknown
  misc_feature (551)..(551): "n" may be a, t, c, g, other or unknown
  misc_feature (580)..(580): "n" may be a, t, c, g, other or unknown
  misc_feature (585)..(585): "n" may be a, t, c, g, other or unknown
  misc_feature (605)..(605): "n" may be a, t, c, g, other or unknown
ctaaacagtgggagaggagtgcaggaggcccatcagctgtgcctttcccagaagtagcaggatctgagcaagtgtctgttggttgaagaggcacacatgtcaggctggcaaccagcagcatcaggaaataacctaagacgcggtgtgtttatcattcccctgctgggagcctttggcttggtccgtccgcataacacggggttctttgggtaggcggctagaagccgagcggccgggtcgcagcatcgtctcctttactgcattgtactccacagtcgtaatgggaggttcccgcttcccacatcctttccctcagccgttacatcttggagcctggatgcattatgaaggtatttttgtttcgtggcaacaatttttttaaaattttgttttggtgcttctttgacaacgcggcccacgcagctgccctctgtgcaagccattaccccaccangcctgacacagcttctctctctgggcctgggtatgagggcacagtccaanagtaacactgactttctctctctttcccccttccngttcctttgacnatctctctttaggcctaccagtttttggnaacanaaagtttacgggtcaataantcaagcaagttaa

SEQ ID NO: 4194 - DNA, 688 bp, Homo sapiens
  misc_feature (620)..(620): "n" may be a, t, c, g, other or unknown
  misc_feature (640)..(640): "n" may be a, t, c, g, other or unknown
  misc_feature (673)..(673): "n" may be a, t, c, g, other or unknown
aaaaaaaaaaaaatagctaacttactgacagccatgccatggaccacgcaaagctgctggtgaaagggggtccctagcttctcagtgtgtttgagccagcaggatctgtcttgacataggccctctctggcctggctcatggtatggccccctcccctggtcgcccccagccgtcccacgaagggtgttatgcgaaatgtttcccatgcaggaattggctgaattctctcaacatccctgtgaggtagattctcttactgtctccgttttatgctgagggtcctgaggctcagaaaggggcagacacacatttaaggtcccacattagtgagcagtggagctgggattgaacccaggtctgcctgactcccccgattgtctgcttgttgcccctgagccctcctgcctctcctgcctccacttccctggtaacccctgcagctgagcaaaagactggaagcacatccccagctgtcaaggcttatgagagaaatggctacctgagccctcagcagcagatgggggcgggctgaagcctcctgctccctgggggtcaggtgggcagcactgatgctcctgtccctaagtgtccatgtgtgttttccccaaggatcagccanaggaggaacgggggaaacangagtcctctcctaacccatcttgggaaggctangcgcatggcaataaa

SEQ ID NO: 4195 - DNA, 605 bp, Homo sapiens
  misc_feature (564)..(564): "n" may be a, t, c, g, other or unknown
  misc_feature (568)..(568): "n" may be a, t, c, g, other or unknown
  misc_feature (601)..(602): "n" may be a, t, c, g, other or unknown
  misc_feature (604)..(604): "n" may be a, t, c, g, other or unknown
ttttatggatgaatgcatctgaggccaagacaggaaaatgacttattgctggttgaattgctgattagtggctggattggaggtagaacccagatcatctgcctcttcattctactcatgtcctgtcatggaaattagtcaatccaattattattattatagaagtctgttttcaccagaaagtttgtgaactgacaaccgtaaaatctgtggtaaattcacaggcttcatcaatgacactatgaaatattgaccctcagcttcccagattgcaactccccaagtcttggtctgtttgctgttaagatttgttacaacttcttgcttattgccttttgttacacaagcagtgctaaatatgggctggatattggaaagagggcaagaaaatgagaacccacagttctgtgacgtgacaacactgattggccaagtcactgttatctgcaggatgtgcttttcttaaggatgaacatattttggtccacaagtttccaagacaagcacattcctgccaacatgatccttggacaaactgttctggaatttgaacttgctactggnaganggttaagtccaaggacacacacacacacacacnnana

SEQ ID NO: 4196 - DNA, 771 bp, Homo sapiens
  misc_feature (555)..(555): "n" may be a, t, c, g, other or unknown
  misc_feature (566)..(566): "n" may be a, t, c, g, other or unknown
  misc_feature (701)..(701): "n" may be a, t, c, g, other or unknown
  misc_feature (709)..(709): "n" may be a, t, c, g, other or unknown
  misc_feature (714)..(714): "n" may be a, t, c, g, other or unknown
  misc_feature (731)..(731): "n" may be a, t, c, g, other or unknown
  misc_feature (765)..(765): "n" may be a, t, c, g, other or unknown
gaatcacttaatcgtcagccttttcaagagagtgacgtcaggcacgtaggacttgtagaggtctaaaccctcatccagtacaagtgttgaatagagaccacattctggttgaagacactaagccatcttatttcagcccgaatctagtaatcagaagctcactaactcttgatgcctcctgcttgctagttagataactccaaagattagagagtacattattttattgagtaatttttttctttgtaaatttttctaattgtactctctggtggaatataagcaaatctattttatattttttccactataaatctttagattgtaatgttatttctttgaaatcagggaccatatatctttcatatgcatatcctttctctgcttaatattaatataaaaaacatcttttgagcactaggcactgtgcctggtgtttgtcataaaaatgaataagatatgattcctttcctcaggaaggatatacaaaaaaaggctatacaaagtatatacaaagaaatgcatacaagctgtggtataaattgctgtaatggnagcatgtacanaatgctaaaggaagctaagagagcatctaatatggcttaggaaaagaggctgacctagctatggagaaattttttgggtgagtcttaaaagagaaaattttcctggcaagaaaaagaggggaaagaattttgggngtcagtgnagatnagcaatgtccaaaaggnacaagagggaaagaaagttgggaagcacacattngttaaa

SEQ ID NO: 4197 - DNA, 671 bp, Homo sapiens
  misc_feature (385)..(385): "n" may be a, t, c, g, other or unknown
  misc_feature (417)..(417): "n" may be a, t, c, g, other or unknown
  misc_feature (435)..(435): "n" may be a, t, c, g, other or unknown
  misc_feature (452)..(452): "n" may be a, t, c, g, other or unknown
  misc_feature (459)..(459): "n" may be a, t, c, g, other or unknown
  misc_feature (486)..(486): "n" may be a, t, c, g, other or unknown
  misc_feature (529)..(529): "n" may be a, t, c, g, other or unknown
  misc_feature (542)..(542): "n" may be a, t, c, g, other or unknown
  misc_feature (555)..(555): "n" may be a, t, c, g, other or unknown
  misc_feature (578)..(578): "n" may be a, t, c, g, other or unknown
  misc_feature (594)..(594): "n" may be a, t, c, g, other or unknown
  misc_feature (631)..(631): "n" may be a, t, c, g, other or unknown
  misc_feature (652)..(652): "n" may be a, t, c, g, other or unknown
  misc_feature (666)..(666): "n" may be a, t, c, g, other or unknown
aaattcaatgcaatgtctcacaatagctgcgctctccttcttccaagcacagagattctctctctacgccacaaagccactgccatgggatggggacgggtggcatcagcaactcaagactgtcttccctaccctcttcattgcctctttcaacagtatgaagttaaaatcagctctgaagatgacaatgcattcaaattcaccagatcacccccagctctgaagatgacaatgcattcaaattcaccagatcacccccagctctgaagatgacaatgcattcaaattcaccagatcacccccagctctgaagatgacaatgcattcaaattcaccagatcacccccagctctgaagatgacaatgcattcaaattcaccagatnacccccagctctgaagatgacaatgcattcanattcaccagatcatctantgaagtttcacttctgnttcttancacctccctgactcttctgttccctanagtggaaggagggtctgggaaaggacctttgcctgaaactaanaagtcaacatggntacccctcaatancccacctgggaagggagctgccnatgagccggaagcagntggggaggagatgaaactggggctatcggctttgcangctgggagccccctcctgtanctgccttatcttcnggtat

SEQ ID NO: 4198 - DNA, 389 bp, Homo sapiens
  misc_feature (377)..(377): "n" may be a, t, c, g, other or unknown
  misc_feature (381)..(381): "n" may be a, t, c, g, other or unknown
  misc_feature (384)..(384): "n" may be a, t, c, g, other or unknown
aaactttgcaaagttccgcgtcagagcctggggaggcaaagtgctcccccttctccccggcgttccccctccctctgcccccgcctccctgtcctcgcacagccgggagcacccgtgataggacgagccccgggcgtgcattgtgtatatgcaaaccggagctgggctccccacggctgcccgacccgggcctgggctgtggctgtgactggcgctgccgtgggcgccgcagccctcgcgggagccggacgcggtaatgccccagcggcgcagcgggcggctgcgtccctgagccgctatataagcgcggcagggaacatccggaggggctgaagatgaaggtgcccgcgcatgggcccccgctgattgccagtccntctngancccga

SEQ ID NO: 4199 - DNA, 814 bp, Homo sapiens
  misc_feature (614)..(614): "n" may be a, t, c, g, other or unknown
  misc_feature (661)..(661): "n" may be a, t, c, g, other or unknown
  misc_feature (757)..(758): "n" may be a, t, c, g, other or unknown
  misc_feature (768)..(768): "n" may be a, t, c, g, other or unknown
  misc_feature (777)..(777): "n" may be a, t, c, g, other or unknown
  misc_feature (812)..(812): "n" may be a, t, c, g, other or unknown
gatgccatgtgacaagggcagaacttgccaagattatgcgtaccagagcgaaggaaattgaagtgaaattgcttctttttgctattcaaagaacaactaactttgaggggtttcttgcaaaacgcttctccggctgcaccctgaccgatgggaccctgaaaaagcttgagtctccacccccatctaccaatcccttcctggaagatgagccaacaccagagatggaggaactggcaacggagaaaggagatttagatcaaccaaagaagcctaaagccccagacaatccatttcatggcattgtttccaagtgttttgagcctcatctctacgtgtatatcgaatcccaagacaagaacctcggagagctgatagatcggtttgtggctgatttcaaagcccaggggccacctaagcccaacactgatgaagggggtgccgtgctccccagctgcgccgacctctttgtctactacaagaagtgcatggtgcaatgctctcagctcagtactggggagcccatgatcgccctgaccaccattttccagaagtacctccgagaatacgcctggaaaatcctctctgggcaacctgcccaaaaccacaaccagcantggaggactgactatcagcagcctcctcaaggaaaaggagggctcanaagtagccaagttcactctgggaggagctctgcctcatctggttacaatcctgagcacgggaaaagttactgtctgggcaacaacccaacagctannaaggaaaaanctcaaaggnaaaaaagtgggattgttaagtccggatttgaaccnaa

SEQ ID NO: 4200 - DNA, 688 bp, Homo sapiens
  misc_feature (380)..(380): "n" may be a, t, c, g, other or unknown
  misc_feature (454)..(454): "n" may be a, t, c, g, other or unknown
  misc_feature (604)..(604): "n" may be a, t, c, g, other or unknown
  misc_feature (633)..(633): "n" may be a, t, c, g, other or unknown
  misc_feature (680)..(680): "n" may be a, t, c, g, other or unknown
  misc_feature (683)..(684): "n" may be a, t, c, g, other or unknown
ccttagataggtaactgttgccaggaaaatgccctgtgtggattggcctggactaagcaggatcctcctctaaagagagagatgagatgaatgcctgacccaagtctgggatcttgggtgggaagcgtgtggatagtaggtcagaggtcagcagtgtctgtggtgtagggtgtaatcccatctccacagagctgcatacaagtgtgtttaagtgtgtgcaagtgattaactttgattagtagtttcaactctttacaatgaacatatttatcttttttaaaaaataaagccattttaaaagatcttgccaaaaaacaatcattccttaagtcaccacttaggatagacctagaatatttgtcctttctcaagagcaccanagagttttctggtaatccacgcaataaacagttataaaaggtaattgttgagatcaggggaagatggcagatangaggcagtgctaatgtgtagctcccacatggatggacaaaacaccatgtggagactcacactgtgaccctgttgtgctccaagaactatcataggaacgtactgggaaaaccaatagaattcacggatcctttgaaaagaagacgcacancactgtaaattctgtggaacagggagaanaactggtccttgggggggaaggcatccttccaattcctaactggatnaannaaag

SEQ ID NO: 4201 - DNA, 770 bp, Homo sapiens
  misc_feature (439)..(439): "n" may be a, t, c, g, other or unknown
  misc_feature (481)..(481): "n" may be a, t, c, g, other or unknown
  misc_feature (528)..(528): "n" may be a, t, c, g, other or unknown
  misc_feature (583)..(583): "n" may be a, t, c, g, other or unknown
  misc_feature (622)..(622): "n" may be a, t, c, g, other or unknown
  misc_feature (694)..(694): "n" may be a, t, c, g, other or unknown
  misc_feature (699)..(699): "n" may be a, t, c, g, other or unknown
  misc_feature (708)..(708): "n" may be a, t, c, g, other or unknown
  misc_feature (714)..(714): "n" may be a, t, c, g, other or unknown
  misc_feature (723)..(723): "n" may be a, t, c, g, other or unknown
ttttttcatttaagaaattattgtgacttgtaagttacttatcccataaaggtttgttacttccctcacttcacctccataagaacctgtgtttccataagtaagattacgtacctgatttcctgtctgagaactatggtaacagatgttaatagttgcagggtctcaccacttcattagataagtgttgtctacctagtctaggaggcacagaattctcattctgttatccagttcattccagcaatcatagttaatacagtacttggtgacacgccctacccccttctcttccaagtttcccactcacttgaggaggaaaaatggcaaaagaaagctgtctagggttttaccattgaagggtggaagaacagagacaaagaggagctctttttctgtgagctgggttgcacaggaagaatgtcacagggaaccaatnagcacagaaaaaggaagtgctggtgcatatttttgagttaanatatttccctattttatcatgattactaagtgagtagtatagacagnagtatataactaatggttgaaaatacatatattcatttctttataaaaaacaaanaaccttaccggtagtaatataatttcccccttgggtggnttttcagacacctggcagcaagaagaaatactgactgactaggcattattttccataaaatcccctctcaanaagtnggaaaaganttcccncttgctggnggagaaaaagcttttacccacccaatggagttattggctggtccaac

SEQ ID NO: 4202 - DNA, 726 bp, Homo sapiens
  misc_feature (42)..(42): "n" may be a, t, c, g, other or unknown
  misc_feature (79)..(79): "n" may be a, t, c, g, other or unknown
  misc_feature (125)..(125): "n" may be a, t, c, g, other or unknown
  misc_feature (635)..(635): "n" may be a, t, c, g, other or unknown
  misc_feature (644)..(644): "n" may be a, t, c, g, other or unknown
  misc_feature (689)..(689): "n" may be a, t, c, g, other or unknown
  misc_feature (696)..(696): "n" may be a, t, c, g, other or unknown
  misc_feature (718)..(718): "n" may be a, t, c, g, other or unknown
aaacaacctaccctccttccccattttctgtggtccaactancctcggcgatcccaggcttggcggggcaccgcctggnctctcccgttcctttaggctgccgccgctgcctgccgccatggcanagttgggcctaaatgagcaccatcaaaatgaagttattaattatatgcgttttgctcgttcaaagagaggcttgagactcaaaactgtagattcctgcttccaagacctcaaggagagcaggctggtggaggacaccttcaccatagatgaagtctctgaagtcctcaatggattacaagctgtggttcatagtgaggtggaatctgagctcatcaacactgcctataccaatgtgttacttctgcgacagctgtttgcacaagctgagaagtggtatcttaagctacagacagacatctctgaacttgcaaaccggtaataaaatttgaacttgcaactgtgacaataatggcccaagcataatcttaaaagttagtgaacatctttggctgcatattttcttggggctagtgtgtgaggaaatttgggtagggtaacagcaaagcattgagtcactgagtgatctcttgggtaccactaagcacccttttaaaagttctcctgtttcnactggtccnaggtattacaaaggccaatcgagatttatgaaatttgcttttcangggttancattaaattatttcctacaagnatttttgg

SEQ ID NO: 4203 - DNA, 728 bp, Homo sapiens
  misc_feature (202)..(202): "n" may be a, t, c, g, other or unknown
  misc_feature (381)..(381): "n" may be a, t, c, g, other or unknown
  misc_feature (531)..(531): "n" may be a, t, c, g, other or unknown
  misc_feature (569)..(569): "n" may be a, t, c, g, other or unknown
  misc_feature (589)..(589): "n" may be a, t, c, g, other or unknown
  misc_feature (608)..(608): "n" may be a, t, c, g, other or unknown
  misc_feature (646)..(646): "n" may be a, t, c, g, other or unknown
  misc_feature (651)..(651): "n" may be a, t, c, g, other or unknown
  misc_feature (685)..(685): "n" may be a, t, c, g, other or unknown
  misc_feature (700)..(700): "n" may be a, t, c, g, other or unknown
  misc_feature (711)..(711): "n" may be a, t, c, g, other or unknown
aaagtgaagccgccctgaaggaacgaattgagctcagaaaagtcaaagcctctgtggacatgtttgatcagcttttgcaagcaggaaccactgtgtctcttgaaacaacaaatagtctcttggatttattgtgttactatggtgaccaggagccctcaactgattaccattttcaacaaactggacagtcagaagcattggnagaggaaaatgatgagacatctaggaggaaagctggtcatcagtttggagttacatggcgagcaaaaaacaacgctgagagaatcttttctctaatgccagagaaaaatgaacattcctattgcacaatgatccgaggaatggtgaagcaccgagcttatgagcaggcattaaacttgnacactgagttactaaacaacagactccatgctgatgtatacacatttaatgcattgattgaagcaacagtatgtgcgataaatgagaaatttgaggaaaaatggagtaaaatactgggagctgctaaagacacatgggttgcacaagaangtgaaaccaaatcttcaagacttttaataccattctgnaatgtctccgaagatttcangtgtttgcaagatcgccangcttacaagggtttacgtgaaatgaaaagccattgggnatagnaacctcgcttgcaacatatcaccatattaattcncctggtttggtcaancctgggggaancccttttaaaggaggtt

SEQ ID NO: 4204 - DNA, 873 bp, Homo sapiens
  misc_feature (669)..(669): "n" may be a, t, c, g, other or unknown
  misc_feature (711)..(711): "n" may be a, t, c, g, other or unknown
  misc_feature (721)..(721): "n" may be a, t, c, g, other or unknown
  misc_feature (755)..(755): "n" may be a, t, c, g, other or unknown
  misc_feature (778)..(778): "n" may be a, t, c, g, other or unknown
  misc_feature (809)..(809): "n" may be a, t, c, g, other or unknown
  misc_feature (821)..(821): "n" may be a, t, c, g, other or unknown
  misc_feature (849)..(849): "n" may be a, t, c, g, other or unknown
  misc_feature (861)..(861): "n" may be a, t, c, g, other or unknown
ataatccaaaattctttggcaatcttcagtctgatgattccaaaaaaaatgactcaaaaataaaagttactgtgttggaaatgtctgaatatttgaacaaatatgaaagcatgtcctcaaataaagactcaaaaaggcctaagacatgtgagcaaaatactcaacttaatagcatagagaattatctcaataaagataatgaaggtttcaaatgtaaaaagtcagaccaattaaaaaatgaacaagataagcaagaagatccaactaatgaaaaatcccaaaactattctcagagaagaagtataaaagactgtttgtctacatgtgagcaaccaaaaaatacagaggtattgaggactacactgaaacattcaaatgtgtggcgaaaacataattttcattccttggatggaacttcaaccagagcctttcatcctcaaactgggattgcctcttctttcaagccctgttcctcaaagaaaaacacaatcaggttgctttgatctggattcttcattactacatctgaaaagcttctcatctagaagtcctccgaccatgtttaaacattgaagatgacccagatattcatgaaaaaccatttttgagttctagtgctccacctataacaagtcttagtctcctagggaaattttgaggaatctgtcntgaactaacgtttccgatcctctcgggcaattgttgatgggntttactgccnaggtaaggggcaagtggtggctttctggcccaanacaatttgacctcttccaagttngaaagtgtcaattccaacaagtgttttcaanattgacaaaggntccctctccctaaaaagggggtggggantaactttaaaangtccccttgggg

SEQ ID NO: 4205 - DNA, 577 bp, Homo sapiens
  misc_feature (383)..(383): "n" may be a, t, c, g, other or unknown
  misc_feature (418)..(418): "n" may be a, t, c, g, other or unknown
  misc_feature (439)..(439): "n" may be a, t, c, g, other or unknown
  misc_feature (455)..(455): "n" may be a, t, c, g, other or unknown
  misc_feature (518)..(518): "n" may be a, t, c, g, other or unknown
  misc_feature (549)..(549): "n" may be a, t, c, g, other or unknown
  misc_feature (553)..(553): "n" may be a, t, c, g, other or unknown
  misc_feature (560)..(560): "n" may be a, t, c, g, other or unknown
  misc_feature (570)..(570): "n" may be a, t, c, g, other or unknown
atctagcgcccccgtcaggacgtgcgaaaagcgacggcgcagcacggtgcggcgcagctcctgctcgcctttcccttcgctgggcgagaggtgtctatggggcacccgctgccgccgccgctaccgccaccgccaccgccaccgccgccgagtgctgtctctatggcgaggaggaggaggaggagcgcgagctcagcgatacaagtacataaataaaggataaaatattttatgaaacaaatcttcaatcaagtataacattttgatgcttggcatctagactcccttgtgccctcactatgccagcggcaactgtagatcatagccaaagaatttgtgaagtttgggcttgcaacttggatgaagagatgaagaaaattcgncaagttatccgaaaatataattacgttgctatggncaccgagtttccaagtgtggntgcaagacccattggngaattcaggagcaatgctggctatcaataccaactatttgcgggggtaaatgtagacttgttnaaggataatttaagctagggactgacatttnatgnaatgagncaaagggggnaaaccct

SEQ ID NO: 4206 - DNA, 505 bp, Homo sapiens
  misc_feature (416)..(416): "n" may be a, t, c, g, other or unknown
  misc_feature (437)..(437): "n" may be a, t, c, g, other or unknown
  misc_feature (466)..(466): "n" may be a, t, c, g, other or unknown
  misc_feature (490)..(490): "n" may be a, t, c, g, other or unknown
  misc_feature (504)..(504): "n" may be a, t, c, g, other or unknown
gactctcgctgcggcgcttctggctccagaccgccctccggatcggaccctgcgaatggttttggctatatcttcatgtaggacctactccctatcccgtcggccgcggtgaatcccacctgcggtgctttaacttgtgtaacagagatgctgcctctgggagaggcggggagggacgggccaactggagcgggcggcgggagggtggagggcggggcgcggcttggggcctgggttcctttgccccttgcccaccagggaggggtgggagacgagagagggtgaactttcccctgcgagattctggtgaaaggggaaatatgcttcgagtcagtaaagctgcgcaagtgcacagtcaaggagagagtcttgggaaaaccaaggatagttcccggagatgacttttggactgcggnaacgtttgtcaaaggaaagangcttcaatttaatgtgagatcattggaanttgaactattcaagcggcgagcanagcccctttctcanc

SEQ ID NO: 4207 - DNA, 713 bp, Homo sapiens
  misc_feature (258)..(258): "n" may be a, t, c, g, other or unknown
  misc_feature (439)..(439): "n" may be a, t, c, g, other or unknown
  misc_feature (457)..(457): "n" may be a, t, c, g, other or unknown
  misc_feature (525)..(525): "n" may be a, t, c, g, other or unknown
  misc_feature (621)..(621): "n" may be a, t, c, g, other or unknown
  misc_feature (637)..(637): "n" may be a, t, c, g, other or unknown
  misc_feature (701)..(701): "n" may be a, t, c, g, other or unknown
  misc_feature (706)..(706): "n" may be a, t, c, g, other or unknown
  misc_feature (709)..(709): "n" may be a, t, c, g, other or unknown
tggcaagacatttttggggttccaatgttgccaaagtatggaacaaaatctgtaagaagtacattgcagccaatgccaaatgggacacctgttaatttattaggaacttccaagaatagtaatgtcaaaagttacatcaaaaataatggctctgattgtccatcatctcattcatttaattggaggaaagcaaataaatatcagctttgtgcacaaggtgtcgaagagcctaacaatactcaaaattcacatgataanataattgatcctgaaaaacgtgttcctactcaaggaatgtttgataaaaatgggataaagggaggtttgaaaagtgtttctttattcacatcaaagctagcaaagccatccactatgtttgtgtcatctacagaggagttaaaccaaaagtctttttctggaccatctaatttgggtaaantcaccaaaggcacattantaggaaggacttcatattcttcgatcaatactccaaaatcacagttgaatggattttatggaaaccgntcagctggtaacatgcaaaaggcctaaagcgaactcctgtgccaccaaaagcagttctggagaaaagcttaactcaatccccaagacagtagtaantctattaattatgaanaaatgggtaaggggcacaaaggttttcacattccattcaggagttcaatccttccaccttcaanctagngancagg

SEQ ID NO: 4208 - DNA, 552 bp, Homo sapiens
  misc_feature (387)..(387): "n" may be a, t, c, g, other or unknown
  misc_feature (472)..(472): "n" may be a, t, c, g, other or unknown
  misc_feature (505)..(505): "n" may be a, t, c, g, other or unknown
  misc_feature (508)..(508): "n" may be a, t, c, g, other or unknown
  misc_feature (512)..(512): "n" may be a, t, c, g, other or unknown
  misc_feature (532)..(532): "n" may be a, t, c, g, other or unknown
agtttggccaactaacaaatcaagaatctgaggggcatgttctatttcccaggaatgattgacactttggtgctggggttttgtgggggcggggggtagtttttgtttagcttttgtggagattgtgtgtgtgagaggagatttgatttttttttcttcttttcctttgtgagctgatggctgaagtgtaacagtacatcttcaggtaaagagagggatttctcaatctactttctgttatgtcagactataagagaaaccctttcagctgctttctagatgtacctaaattcagtcagacattttggattaagaaacctaaagtcctgatacattacatactccaaggaaatatatcagggacagacaattggctgaaacactggnacttcaatgtgacacatttttatagaacatttctaccagggggtactgaccttgatttctcctacaaggaccacactgcctttgngtttaatggaatgcaatttgtgtaccttctaancanatanctgcagttcctcatttttanaaaactttgatatcatgcca

SEQ ID NO: 4209 - DNA, 654 bp, Homo sapiens
  misc_feature (502)..(502): "n" may be a, t, c, g, other or unknown
  misc_feature (570)..(570): "n" may be a, t, c, g, other or unknown
  misc_feature (589)..(589): "n" may be a, t, c, g, other or unknown
  misc_feature (599)..(599): "n" may be a, t, c, g, other or unknown
  misc_feature (606)..(606): "n" may be a, t, c, g, other or unknown
  misc_feature (628)..(628): "n" may be a, t, c, g, other or unknown
catgagccttttaaaagacccttcaaagccacctactttatagacagctcctcttaactgaagactctctgtgccatgccccggtgctttgcattttcttgtcccagactctgattccatttcacaggatggggaaacaaggcaccgaagtgggaccacagctcaaatcctgtgtgactccgggaaatcctgagctcttaaccactctgcttctctaccctggagggagtagggctgtcaggccacccaagcctcagaggcagacctgggtctgacctgcctcagctgctgcatgtgccaccgctgcctctgtctggaggctgcagggctgtgtgtggagtgctcttgcagggcatccacctacacattccattttgctacaagcattctaactggcagcaagacattttgaggcccaccagaaaacgttaggaaagccgttacctccgccattccttcctggcagcctgcgcagtccagagcagccacagtcccatagcanggtttcttccttaggctgtagcttcctaggacaaagggatggatttgtcaacaaaagggttgtcctgngaaacaaatccagattcangttcacccancaacaancctgaaatgcttgcaagggcangggacaattcggggggaaacgtctgg

SEQ ID NO: 4210 - DNA, 822 bp, Homo sapiens
  misc_feature (727)..(727): "n" may be a, t, c, g, other or unknown
  misc_feature (760)..(760): "n" may be a, t, c, g, other or unknown
  misc_feature (797)..(797): "n" may be a, t, c, g, other or unknown
  misc_feature (811)..(811): "n" may be a, t, c, g, other or unknown
  misc_feature (817)..(817): "n" may be a, t, c, g, other or unknown
agcagtttacggaagtgtaacgttgaggcccttcttgtgtatctggagaaaatagaggttctgactcctcaggagcaaaaaacataacctgaagagggaggaagtggatttggggttcaccatttcttggggcacacttgattgaaaactgagacttctgaagagaaggccagaagatacaaagacagaccatcccagttgaatgctgtcttccaagaacagaagaaaatgatccaggcccaggaatccataacactggaggatgtggctgtggacttcacttgggaggagtggcaactcctgggcgctgctcagaaggacctgtaccgggacgtgatgttggagaactacagcaacctggtggcagtggggtatcaagccagcaaaccggatgcactcttcaagttggaacaaggagaacaaccgtggacaattgaagatggaatccacagtggagcctgttcagacatatggaaagttgatcatgtgctggagcgcttgcagagtgaaagcctggtgaacagaaggaaaccatgtcatgaacatgatgcatttgaaaatattgttcaatgcagcaaaagtcagtttccgttaaggcaaaatcatgatatatttgacttacgtggaaaaagtttgaaatccaatttaactttagttaaccagagcaaaagggctatgaaataaaagaactccgttgaagtttactgggaatggggactcctttccntcaagctaaccatgaacgacttcatactgcaanttaaattcccctgcaagtcaaaaactcatcaagaccnaagtcccaaatttnaacagncccaa

SEQ ID NO: 4211 - DNA, 795 bp, Homo sapiens
  misc_feature (608)..(608): "n" may be a, t, c, g, other or unknown
  misc_feature (674)..(674): "n" may be a, t, c, g, other or unknown
  misc_feature (753)..(753): "n" may be a, t, c, g, other or unknown
  misc_feature (779)..(779): "n" may be a, t, c, g, other or unknown
  misc_feature (785)..(785): "n" may be a, t, c, g, other or unknown
  misc_feature (788)..(788): "n" may be a, t, c, g, other or unknown
  misc_feature (791)..(791): "n" may be a, t, c, g, other or unknown
tacttcatgtttcatacagataattcacattcaaaattacattttctctttgaactagatggtattccttattcacttacattacaaatctaagaccatgtgataagcatgactggagaggtttaatttttataaacaaaaatagctataaagtacaaagctgctgctgcatgcaaccttattgcaatcagtatatcattcctgtggcaatttctgtcaccttatattgtgaataaaatttttctatagaaattaaatgatttaaaaactcacctatatgaaacatttaatgcttttcagcctgctttctggctgattttgttatttgatgtgctaatttgggcaacttaatttacattctggcagtcggtgtagataactaaaagcccagttaagtattttataatttcaggctactgaggccatgcttgggatgttgtttgaaagaaagaaaaaatacacttgacatatttcacatttctgtaccttcatctttacttccaagtaaacccgtggatgatttgatgagggataaatgaacctatttcttttacacacataccaaggacatgcttgtggctaaagtgagttgataatgttgtgcaaanggatagttgtcaccaactcatttctttaaggtccaaaatgaaataaaaattttgtatactgttaantctgtaaacagatgcatgttcaaaaagatctaagaatggtcctgtaatcttaatccaatataattttagatattttaantttttccccccctggggggaacacantttagnatnagnggta

SEQ ID NO: 4212 - DNA, 785 bp, Homo sapiens
  misc_feature (588)..(588): "n" may be a, t, c, g, other or unknown
  misc_feature (600)..(600): "n" may be a, t, c, g, other or unknown
  misc_feature (610)..(610): "n" may be a, t, c, g, other or unknown
  misc_feature (692)..(692): "n" may be a, t, c, g, other or unknown
  misc_feature (735)..(735): "n" may be a, t, c, g, other or unknown
  misc_feature (775)..(775): "n" may be a, t, c, g, other or unknown
  misc_feature (777)..(777): "n" may be a, t, c, g, other or unknown
  misc_feature (782)..(782): "n" may be a, t, c, g, other or unknown
gttacctaaaggtaaggcttgttccttttgcaaagggccacaagatactgtccctctgagaaacttatgagggggaaatttgcaaatccacagagagctgccctcagccgagcagaggcagtggttggggaggccgccacactcttcctgactcacctcaaggtacctggcaggttgtatctaccagcaagtgcctgcctgcagggccacctctggatgagtggggaggccaggtttgcccctcaacctgtctagctttttcacagggtggatgttttacacctctggtattcttccagtctgaactcaatcccatcccccaaccaattaggcaggttgtaaatgactgctgggtgcttgatgaaccaatctgcctgagttaggaactcttcctaacccacataaagtatttgaccctacctgaccatttactgcatgacccccatgcttagcctctctggaccagtttctggtcagtcatacctcaccggcgcaatacgaagattcaatgaatgaaaacgtaagtagtttgtgccctttctatgtgggatgactgaaaggagcttaccaagccatgatgactttggnacatgactatantttgtttgantcttatatcaatcctgtgagacaaggcaaggtctcacactaatcaacaccaatttacagattagaaaaactgagactgagantggttaagggactttgccaagtctgtcaattcttgactgacanaactggaaccaagtctccaaaatcccaattcagtaatccngnccccntta

SEQ ID NO: 4213 - DNA, 747 bp, Homo sapiens
  misc_feature (653)..(653): "n" may be a, t, c, g, other or unknown
  misc_feature (658)..(658): "n" may be a, t, c, g, other or unknown
  misc_feature (690)..(690): "n" may be a, t, c, g, other or unknown
  misc_feature (709)..(709): "n" may be a, t, c, g, other or unknown
  misc_feature (716)..(716): "n" may be a, t, c, g, other or unknown
gagaaattccaaaggtggccagcatggtggctcatgcctgtaattccagtactttgaggccgaggtgggaggaatgcttgagcccccagtctgggcaatatagtgagaccccatctctgcaaaaaaagaagttccagaggcccagacttgctactggtgcccagggggctgtggggcagcttgggcattgagccctcatgctgtgggatctgatgctgtctctaggtagatagtgttggaattgaattggaggacacccaactggtgtccgctgcagaactgattgcttgcctggtggtggggagaaatccttacatattttttggagtcacagaagtcttctgtgttgattgttgtagtgtgaaagcagaggaaaaacaatggtttgggttttttcaaaacaactttcatgacacatacgagaatgtaaattccagaagggccaaggccatgtctgttttacctactctttttcccccagcttctaagtacataggaggcatttgatatataccaaacaaacaagcaagtgactgactagttgatgtcctgagaatcttcttgctgctggaagggtcctcctgccctcaagcatttctctctgggaagctcttagactactctctcagtcatgcccaccttttcggtcatangtcanaagccaatgacctggccctgaagctggctcgncaatacacgggacaacaangacgtgntgggattagattatccgtaatcgccgggcaa

SEQ ID NO: 4214 - DNA, 761 bp, Homo sapiens
  misc_feature (501)..(501): "n" may be a, t, c, g, other or unknown
  misc_feature (529)..(529): "n" may be a, t, c, g, other or unknown
  misc_feature (587)..(587): "n" may be a, t, c, g, other or unknown
  misc_feature (676)..(676): "n" may be a, t, c, g, other or unknown
  misc_feature (703)..(703): "n" may be a, t, c, g, other or unknown
  misc_feature (728)..(728): "n" may be a, t, c, g, other or unknown
  misc_feature (734)..(734): "n" may be a, t, c, g, other or unknown
  misc_feature (742)..(742): "n" may be a, t, c, g, other or unknown
ataagacctcagatcagacagaggtaagtgtattgtttctcactttgattagggctttttgttactgtttgacagtgcagcgtaagtatgcacagatgaagatggaactaagccgagtaagaagacatacaaaagcctcttctgaaggaaaagacagtgtagtcctgcaaaacattttgaggtacattgttttgtctcagctattttgtagcagactcgtgcccccattagtgtgcctctttggaaattatcgcccacatttgtaatatagtcgccattgaaaagttaattatcctttttttagggattttgatgtcatttcttttttttttttaataaaaaggttgaactgttttttttttttctttttggtattaagtccatcttgtgttggtacattggcagagacatatgctttaaaaacttaaatatttcggaggcacatgttggactactttgttttaattaaactgctagtatttctttgtcaaggatgtttcnagttttttgctttattgccttgcattcnaatgcagtttgttctgtaactcgaagagccagtagcattggattgatgggaagtgtanggtttaagaattattgcaagctgactaccatacctcacacaagcgttggtgttgtgagcgggccatgaaaagccaaattaaaaatcaanggattcaagtcaaacctaagcaaggtnctcaaggcaagtactcctttctccnacccanatccaggnttgaatgccaattgcccgg

SEQ ID NO: 4215 - DNA, 839 bp, Homo sapiens
  misc_feature (502)..(502): "n" may be a, t, c, g, other or unknown
  misc_feature (555)..(555): "n" may be a, t, c, g, other or unknown
  misc_feature (591)..(591): "n" may be a, t, c, g, other or unknown
  misc_feature (621)..(621): "n" may be a, t, c, g, other or unknown
  misc_feature (663)..(663): "n" may be a, t, c, g, other or unknown
  misc_feature (690)..(690): "n" may be a, t, c, g, other or unknown
  misc_feature (743)..(743): "n" may be a, t, c, g, other or unknown
  misc_feature (777)..(777): "n" may be a, t, c, g, other or unknown
  misc_feature (781)..(781): "n" may be a, t, c, g, other or unknown
  misc_feature (811)..(811): "n" may be a, t, c, g, other or unknown
  misc_feature (827)..(827): "n" may be a, t, c, g, other or unknown
tttcagattgtctgctcagagttcatctcaaagcctggcaaggattggagaggtcaataagagtcagcgcctttaaaaagaaatctactcactcttctgtgtgcataaggccgagcagaggttcttcgtctcaagaggaactgacttctgttgagcactcaacacgccacagagaccagccatcttgcaacctcacctcacagcatggagagaggagaccaacctaagagaaccaggaatgaaaacattttcaactgcttatacaaaaaccctgaggcaacttttaagctgatttgctttccctggatgggaggtggctccactcattttgccaaatggggccaagatactcatgatttgctggaagtgcactccttaaggcttcctggaagagaaagcagagttgaagaacctcttgaaaatgacatctcccagttagttgatgaagttgtttgtgctctgcagccaagtcatccaggataaaccatttgcattttttggncacagtatgggatcctacattgcttttaggactgcactaggtctaaaagaaancaatcaaccagaaccattgcatttatttttgtcaangtgcaactcctgtacattcaaaggcctggnatcgcattccaaagatgatgaattgtcagaaagaacaaatangtcattaccttatgggatttggggggnacccccaagcattttgctgaagccaaaggggaattttgtgaaacaaatgtagnccccatcataaggggcaagatttggaacaattgntaanaaagttgcacctctaacgttacaaacctanggggggttccttcccngggaccttgaca

SEQ ID NO: 4216 - DNA, 801 bp, Homo sapiens
  misc_feature (596)..(596): "n" may be a, t, c, g, other or unknown
  misc_feature (615)..(615): "n" may be a, t, c, g, other or unknown
  misc_feature (627)..(627): "n" may be a, t, c, g, other or unknown
  misc_feature (651)..(651): "n" may be a, t, c, g, other or unknown
  misc_feature (705)..(705): "n" may be a, t, c, g, other or unknown
  misc_feature (718)..(718): "n" may be a, t, c, g, other or unknown
  misc_feature (743)..(743): "n" may be a, t, c, g, other or unknown
  misc_feature (777)..(777): "n" may be a, t, c, g, other or unknown
  misc_feature (795)..(795): "n" may be a, t, c, g, other or unknown
ttatttctcacagttctggatgctgggaagtccaagttcaaggcagattcaatgtctggtgagggcccacttcctagttcttagacagctgtcttcctgcagtgtcctcacgtggtagaagaggaaggcagctctccggggtcccttttataagatcactaagccggttcatgagaggtctgctctcatgacctaatcacctcccaaaggccccacctcccaataccatcacattaggggttaggatttaacatgaattttggggacatataaacattaagtctgtagtagcagcagctgactaacgagggagatagggagattctgacaaacttctactcttgattgtgatcctaattcaaggaatatcaagtcccagcccctgcaacccaggctgctgcttaattttcatgtcagtatcatcaaaatccaatgttctgcttaaactcaagatggaaagtccagtccaaggtacactgttcatctttttcttcacattttgcacatccttcaaggggatctttaacctctttaaccctttgtactgcacctcaaataatgtgctttttagctcaatacactgaaaccatatggtnacacaaattcacatataantgggggttaagncccaaactcctatacaagctttangccctggcctttcaattagccatgttataatataactccatgttccaatgcaantgggatttttggnccccggtaatagcaattaagggtanagggttaccccaatcaaccttaacaacctcaaanactaccctgtggggaagnccctta

SEQ ID NO: 4217 - DNA, 860 bp, Homo sapiens
  misc_feature (655)..(655): "n" may be a, t, c, g, other or unknown
  misc_feature (667)..(667): "n" may be a, t, c, g, other or unknown
  misc_feature (779)..(779): "n" may be a, t, c, g, other or unknown
  misc_feature (798)..(798): "n" may be a, t, c, g, other or unknown
  misc_feature (801)..(801): "n" may be a, t, c, g, other or unknown
gggatcaggctcgtgaacatattcggcaaaacctagaaagtttcataagacaggactttccaggaactaaattgagcctgtttggctcctccaaaaatggatttgggttcaaacagagtgaccttgacgtctgtatgacaattaatgggcttgaaactgctgagggattggactgtgtcagaactattgaagaattagcaagagtcctcagaaaacattcaggcctgagaaacatcttacctattacaacagcaaaggtgccaattgtgaagttcttccatttgagaagtggtctggaagtagatatcagtttgtataacacattggcccttcataacacaaggcttttatctgcttattccgccattgatcccagagtgaagtatttgtgctataccatgaaagtatttacaaagatatacaaaggtgaaaagaaacctgaaatatttgttgatggctggaatatttatttttttgatcaaatagatgaactgcctacctattggtcagaatgtggaaaaaatacagaatctgttgggcagttatggttgggccttcttcgtttctacacagaggaatttgattttaaagaacatgttattagcatcaggagaaaaagtctgcttacaacttttaagaaacagtggacctcaanatacattgttantgaagatcctttgatttgaatcaaaatcctggagctggattatcaaggaaaatgacaaattttataatgaaggcttttatcaaatgggtagaagagtatttgggaattcccngtcaaagggatttccaaanggncctaacccccccaaaaaattgggataccttttttggatccaaaatggggttaaccggaa

SEQ ID NO: 4218 - DNA, 656 bp, Homo sapiens
  misc_feature (270)..(270): "n" may be a, t, c, g, other or unknown
  misc_feature (353)..(353): "n" may be a, t, c, g, other or unknown
  misc_feature (376)..(376): "n" may be a, t, c, g, other or unknown
  misc_feature (442)..(442): "n" may be a, t, c, g, other or unknown
  misc_feature (529)..(529): "n" may be a, t, c, g, other or unknown
  misc_feature (581)..(581): "n" may be a, t, c, g, other or unknown
  misc_feature (611)..(611): "n" may be a, t, c, g, other or unknown
  misc_feature (639)..(639): "n" may be a, t, c, g, other or unknown
  misc_feature (647)..(647): "n" may be a, t, c, g, other or unknown
  misc_feature (649)..(649): "n" may be a, t, c, g, other or unknown
aatgaagcatcggaatggtgcgctcacgtcgccttctcctgaaatacctccgagtctgcaagtgagaaaacgcgctgatcctgttgcaaactgtgaatattctgatgatgccagtacagtttgatttattaaatgtgggtcctcaagcttctcagtgtcatctcttttctgccagagtgtgctactgtgaacagggccaggcccaggaatcgtgtccaccatatggctggttttcagcatccgtctttctgtcagcttttgttttatcanagataagatgtttttgtattagcatttaatgttgtcaatcaaaattatgggaagagctagaaactgatggggtttttaatcangtccccatcttggtcaaggttangcagctggagaggaaggtataattgagcaaaacgtgtccagaggacccatggctgcaccccatcangtcagggcccaggaggactgcctggcatgggtgtgcttggcattgtgcccacagcactgctgtccgtggtacagactggcagttggnagggggcttaagccggctgagaagtttgggcttctgggttgaaatccacggncccgggttgaagccttgtgtgctgaagtgncaaaagctgggagttttccaaccttggnaaatctgnangaattaa

SEQ ID NO: 4219 - DNA, 776 bp, Homo sapiens
  misc_feature (542)..(542): "n" may be a, t, c, g, other or unknown
  misc_feature (605)..(605): "n" may be a, t, c, g, other or unknown
  misc_feature (693)..(693): "n" may be a, t, c, g, other or unknown
  misc_feature (729)..(729): "n" may be a, t, c, g, other or unknown
  misc_feature (731)..(731): "n" may be a, t, c, g, other or unknown
  misc_feature (765)..(765): "n" may be a, t, c, g, other or unknown
  misc_feature (776)..(776): "n" may be a, t, c, g, other or unknown
gttgcgcctgcgcagtgcatcaccgcaggcgggcctcgcgggtccgggagcgcggcggagacgatgcctgagatcagagtcacgcccttgggggccggccaggacgtgggccgaagctgcatcctggtctccattgcgggcaagaatgtcatgctggactgtggaatgcacatgggcttcaatgacgacgtgagtcccttgggcaggaggcccagaggctgggagagccggccatccacagctggaccctgggcctcagagccgggacagtggggtggtgggcagcagtggttgtgcttggatggctgcaccctgtggggagcagggatgggtgggcctggccgaggtgagcccctgcatggtggggtccccctgtgctggcgctgagccccagccccggggtcctgtaggctggactccgtgagaccctgggctcagcttccagctcacatctgtcagtgaggttgggggtaacctcggcccctccggatgctgtgagcagccaggggtcctggtgccacctgcgggatgggagtgcccancctgagtctgcacatagaaccccccttcctgggggcccctccctggggcatgggtggccccanatgctgcctggagaacactgtgcaacctgaaaccccacatccttcctagcgacgcttccctgacttctcctacatcacccagaacggncgcctaacaagacttccttggactgtttgattattnancaactttcaacctggaccaactgcgggggcaatnccctactttan

SEQ ID NO: 4220 - DNA, 829 bp, Homo sapiens
  misc_feature (639)..(639): "n" may be a, t, c, g, other or unknown
  misc_feature (678)..(678): "n" may be a, t, c, g, other or unknown
  misc_feature (707)..(707): "n" may be a, t, c, g, other or unknown
  misc_feature (772)..(772): "n" may be a, t, c, g, other or unknown
  misc_feature (776)..(776): "n" may be a, t, c, g, other or unknown
  misc_feature (803)..(803): "n" may be a, t, c, g, other or unknown
  misc_feature (814)..(814): "n" may be a, t, c, g, other or unknown
  misc_feature (826)..(826): "n" may be a, t, c, g, other or unknown
atgcgtgcagcaaagaatggaggagtcggaacccgaacggaagcgggctcgcaccgacgaggtgcctgccggaggaagccgctccgaggcggaagatgaggacgacgaggactacgtgccctatgtgccgttacggcagcgccggcagctactgctccagaagctgctgcagcgaagacgcaagggagctgcggaggaagagcaggaggacagcggtagtgaaccccggggagatgaggacgacatcccgctaggccctcagtccaacgtcagcctcctggatcagcaccagcaccttaaagagaaggctgaagcgcgcaaagagtctgccaaggagaagcagctgaaggaagaagagaagatcctggagagtgttgccgagggccgagcattgatgtcagtgaaggagatggctaagggcattacgtatgatgaccccatcaaaaccagctggactccaccccgttatgttctgagcatgtctgaagagcgacatgagcgcgtgcgggagaaataccacatcctggtggagggagacggtatcccaccacccatcaagagcttcaaggaaatgaagtttcctgcagccatccctgaaaagcctgaaagaagaaaaggcattcaccaaccaacacccantcagattcaagggcatccccaacattctatctggccgtngacatgataggcatcgcttttcacggggntcaaggcaaagacactgggtggtttcaagtttgcccgtcatcaatgttctgcctgggaacaaganaaanaggtttacccttttcaaaaacgccaangggggcccttntggggctcaacnatc

SEQ ID NO: 4221 - DNA, 605 bp, Homo sapiens
  misc_feature (474)..(474): "n" may be a, t, c, g, other or unknown
  misc_feature (575)..(576): "n" may be a, t, c, g, other or unknown
  misc_feature (580)..(580): "n" may be a, t, c, g, other or unknown
  misc_feature (594)..(594): "n" may be a, t, c, g, other or unknown
  misc_feature (598)..(598): "n" may be a, t, c, g, other or unknown
acataatgttataaataagaaaactgaggctcaaaaagttttacacttgtccaaaggtatccagcaggctgcagacctggactttgaatccaagtttttctcattcaaaatatgttttttctaatgcaatatgaggcatgaaggcaatggtatccttttgagaggtgtgatggtaagttttatgtcagcttggctaggctgtgatgtctaattgcttaaccaaacactggtctaaatgtttctatgaaagtatctgtggatatgattaacactcacaatcagctgagcacagtgggctcatacctgtaatcccagcattttgagaggccgaggcaggaaggtcacttgaaccaaagagttcaaggccagcccagggaacatggtgaaccactgtctcaacaaaaataaaaataaaaattagccaggcatggtgtcatatacctataatcccagctacttgggaggctgaagtancaggattgcttgagcccaggaggtcaaggctgctgtgagtaatgaccatcacaccactgcattccacttgggatgaaaaaccaaaacattgtcaccaaaannacanaaatgtataaatanatangataaat

SEQ ID NO: 4222 - DNA, 745 bp, Homo sapiens
  misc_feature (586)..(586): "n" may be a, t, c, g, other or unknown
  misc_feature (626)..(626): "n" may be a, t, c, g, other or unknown
  misc_feature (659)..(659): "n" may be a, t, c, g, other or unknown
  misc_feature (697)..(697): "n" may be a, t, c, g, other or unknown
  misc_feature (714)..(714): "n" may be a, t, c, g, other or unknown
  misc_feature (724)..(724): "n" may be a, t, c, g, other or unknown
  misc_feature (745)..(745): "n" may be a, t, c, g, other or unknown
gatgccactccaagctggacgggctcgtggagtctgcattcgagggattccctagtccgtccagtcatcacgggctgctgcccgcctgcccgtgccgtccaaggcacctggccttgggccggtatcaggtagccgcgcctgggtcacacctgccctccacgttcatctctccacctacagatcatagggaccgtttcctcattttattgtcatgcaaatgttgtacataaatacatggctataaacaggcagctcagagtaaccaggaggctcttttctcagtgacagatcacaccctcttagagtagtaatttttgaataattgttgcaaaatatgaaaacctttagcaaaactccagcaccactgaagtcatcaggaagtgtttgggagaatacgtgtctgtgctggatgctgttgaagcaggtcaggccgttggggtcccttcgttcttagggcttctccaccaagcttctaaatggggaatgccaactttgtgccaggcacacactacctgctgagacactgtggatgaacaaggcgttgacccagggctcactctgtagaggaagaagaccagagaatggntaccaccaagacagtgataagtgctgcaacaaggttcaanagctgcacaagaagtccccaaaggtagtggaanccatcaatccgggggcttaaggaaagaagcttttaaangggaagattaaagccancaaggtgacnccaaaaaactggggtaattcn

SEQ ID NO: 4223 - DNA, 849 bp, Homo sapiens
  misc_feature (681)..(681): "n" may be a, t, c, g, other or unknown
  misc_feature (722)..(722): "n" may be a, t, c, g, other or unknown
  misc_feature (741)..(741): "n" may be a, t, c, g, other or unknown
  misc_feature (800)..(800): "n" may be a, t, c, g, other or unknown
  misc_feature (807)..(807): "n" may be a, t, c, g, other or unknown
  misc_feature (825)..(826): "n" may be a, t, c, g, other or unknown
  misc_feature (847)..(847): "n" may be a, t, c, g, other or unknown
gagaaaaaaaaaagaaaaaaaaccatatgtgtattagggtgactgagtggtgacttcatttataataatacagagaatagctataagctcattgacagtaaaaacaacaaaccaggattctactgtttgaaaagaagtttcgttttaattttggaatttagaatgtgtatttgcaaagtcaccaattttcatctaaaaggttatattctagttgtgtcaccaaaccatcaaaaaaccttaaaaaagaagtaacttgctttgtaggtttgtattgttgatctaaacctgatacatgcttcatttaatcaggaataatccttttttttctgctggacatgtataaatttcactggattgtataaatttttatctattgccttaaacatttacatgattctcaatatgttttagctgtacagttttggtgttcatcttagaggattcttcagcagaagtgatatttctttactgttttgtgaggtaatactgattttgaaaatatatataagctaaaaacagtatttcgttgatatcagtagtcattgggttaactataaagtcaagtgccagcaaagaactttaaaactgtaaagctgtgtatagaactgttttgtgtagcatggaaataatctgtcagctttttaaagtcactaaatgttcctggattatcaacttgaaggnaatttttggaattacaaagttgacaagttgcctgggtgtantgggctcatgccctgtaancccaagcaaccccggggcttaaggtggggaaggattgcttcaagcccaaggagttttgngaacaancccttggggcaacaatanncaaaaacccccaacccctacnaa

SEQ ID NO: 4224 - DNA, 774 bp, Homo sapiens
  misc_feature (702)..(702): "n" may be a, t, c, g, other or unknown
  misc_feature (717)..(718): "n" may be a, t, c, g, other or unknown
  misc_feature (731)..(731): "n" may be a, t, c, g, other or unknown
  misc_feature (763)..(763): "n" may be a, t, c, g, other or unknown
ttagaacagcatctgaaacaaattcacgaggaagcactgagcaaattccagaaaattgaaccaagcaccgtggtgccagctcagacaccctgggacaagcctagggaattccagataacatgtggcccggattcatttgctacagatccctctaaacaaacaaccgtcagcgttagcttcctcttaccggacatcaccgacacatttgaagccttcacattaagtcttctgtcttcactcttgacttctgggcccaattctcccttttacaaagccttgattgaatctggccttggcacagacttttctcctgatgttggatataatggctacacgagggaggcctactttagtgtcggcctccaagggattgtggagaaagacattgagaccgtcagaagcctcatagacagaacgattgatgaagtagttgagaaaggatttgaagatgatcgaattgaggctttacttcataaaattgaaatacagatgaaacatcaagtctaccaagctttgggctgatgctgacatcatacatagcttcttgctggaaccatgatggggaccctgtggagctcttgaagttgggaaatcagttagctaaattcagacagtgcctgcaggaaaatccaaaaattttgcaagaaaaaagtaaaacagtattttaaggaataaccagcataagctgactttatcgatganggcaaatgacaagtnncacgaggaagcangcacaaggtggaagccacgaagctcaagcaanaagggccaagg

SEQ ID NO: 4225 - DNA, 721 bp, Homo sapiens
  misc_feature (448)..(448): "n" may be a, t, c, g, other or unknown
  misc_feature (539)..(539): "n" may be a, t, c, g, other or unknown
  misc_feature (633)..(633): "n" may be a, t, c, g, other or unknown
  misc_feature (647)..(647): "n" may be a, t, c, g, other or unknown
  misc_feature (670)..(670): "n" may be a, t, c, g, other or unknown
  misc_feature (682)..(682): "n" may be a, t, c, g, other or unknown
  misc_feature (696)..(696): "n" may be a, t, c, g, other or unknown
atttttagtagagatgagggttcaccatgttggtcaggctggtctcgagctcctgacctcgtgatcccctcacctcggccttccaaagcgctgggattacaggcgtgagctaccgcatacggccgatctcaagtaatttttttttttttttttaagagacggagtctcgctgtgtcgcccaggctggagtgcggtggcgcgatcttggctcactgcaagctccgcctcccgggttcacgccattctcctgcctcagcttcctgagtagcccacgctgggctaatttttgtatttttagtagagatggggtttcaccgtgttagccaggatggtctcgatctcctgacctggtgatctgcccgcctcggcctcccaaagtgctgggatttactggtgtgagccattgcgcctggccacctttccccagctttcttaagtcactgcgcanaggtgagaggaaaaaggaaaagtgatacccaaaataaaagggcataagtatactcatatgattattgtatcgcaggtggcattgcctttangttcttgtttaattttttaaaactgagataacttgttaatcataatatagtacagcttgtacttgtgacctgaatttacttagggtgctgaacngtaattaacctgangggggccaatgtcatccaatcantaatgggttggnaagagagaacaagncctaagctccggaaatgtggaccaa

SEQ ID NO: 4226 - DNA, 695 bp, Homo sapiens
  misc_feature (512)..(512): "n" may be a, t, c, g, other or unknown
  misc_feature (611)..(611): "n" may be a, t, c, g, other or unknown
  misc_feature (640)..(640): "n" may be a, t, c, g, other or unknown
  misc_feature (644)..(644): "n" may be a, t, c, g, other or unknown
  misc_feature (663)..(663): "n" may be a, t, c, g, other or unknown
  misc_feature (687)..(687): "n" may be a, t, c, g, other or unknown
gtaagtccccccgcctcgcatgatggctgcggtgccgccgggcctggagccgtggaaccgtgtgagaatccctaaggcggggaaccgcagcgcagtgacagtgcagaaccccggcgcggcccttgacctttgcattgcagctgtaattaaagaatgccatctcgtcatactgtcgctgaagagccaaaccttagatgcagaaacagatgtgttatgtgcagtcctttacagcaatcacaacagaatgggccgccacaaaccccatttggccctcaaacaggttgagcaatgtttaaagcgtttgaaaaacatgaatttggagggctcaattcaagacctgtttgagttgttttcttccaatgaaaatcagcccttaactaccaaagtatgtgttgtccccagtcagccagtggtggagttggtgttgatgaaggttttgggagcctgcaagttgttgctccgcttgttggactgctgctgcaaaacttttcttttgactgtgaaacatctangtttgcaagagttcattattttaaaccttgtgatggttgggctggtgagcaagttatgggttctctaaaaaggtgtcttaaaaagggtgattttgttanatgagcctttgtttggattgcttcaagangtcnctaggattcaaccaaatgncttacttcaaagaatttacctttnccttctga

SEQ ID NO: 4227 - DNA, 710 bp, Homo sapiens
  misc_feature (627)..(627): "n" may be a, t, c, g, other or unknown
  misc_feature (649)..(649): "n" may be a, t, c, g, other or unknown
  misc_feature (666)..(666): "n" may be a, t, c, g, other or unknown
  misc_feature (686)..(686): "n" may be a, t, c, g, other or unknown
  misc_feature (701)..(701): "n" may be a, t, c, g, other or unknown
attgagaaagagttcaagaatgactacaaaaaactgtcaatgcagtgcaaagactttgttgttggactccttgatctgtgcagaaacactgaagaagtcgaggccattctgaatggggatgttgaaacgctccagagtggtgatcacggtcgcccaaatctcagccgtttaaaacttgccattaaatatgaagtaaaaaaatttgtagctcatccaaactgccaacagcaacttctctccatttggtatgagctttctggtttacgacagcagacaatggcggtcaagttccttgtggtccttgctgttgccattggactgcccttcctggctctcatttactggtttgctccatgcagcaagatggggaagataatgcgtggaccattcatgaagtttgtagcacacgcagcctccttcaccatttttctgggactgctagtcatgaatgcagctgacagatttgaaggcacaaaactccttcctaatgaaaccagtacagataatgcaaaacagctgttcaggatgaaaacatcctgcttctcaaggatggagatgctcattatatcctgggtaataagcatgatatgggctgaatgtaaagaaatctggactcaaggccccaangaatatttgtttgagttgtggnacatgcttgattttggnatgttagcaaattttcgcancatcaattcaatgcnaagattcaa

SEQ ID NO: 4228 - DNA, 828 bp, Homo sapiens
  misc_feature (537)..(537): "n" may be a, t, c, g, other or unknown
  misc_feature (619)..(619): "n" may be a, t, c, g, other or unknown
  misc_feature (628)..(628): "n" may be a, t, c, g, other or unknown
  misc_feature (752)..(752): "n" may be a, t, c, g, other or unknown
  misc_feature (757)..(757): "n" may be a, t, c, g, other or unknown
  misc_feature (769)..(769): "n" may be a, t, c, g, other or unknown
  misc_feature (822)..(822): "n" may be a, t, c, g, other or unknown
  misc_feature (828)..(828): "n" may be a, t, c, g, other or unknown
gaaaaacaagctcagcgatggcgggctccagaaggcagcggtctaggcgaggacgcccggctggaccaggagaccgcccagtggctgcgctgggacaagaattccttaactttggaggcagtgaaacgactaatagcagaaggtaataaagaagaactacgaaaatgttttggggcccgaatggagtttgggacagctggcctccgagctgctatgggacctggaatttctcgtatgaatgacttgaccatcatccagactacacagggattttgcagatacctggaaaaacaattcagtgacttaaagcagaaaggcatcgtgatcagttttgacgcccgagctcatccatccagtgggggtagcagcagaaggtttgcccgacttgctgcaaccacatttatcagtcaggggattcctgtgtacctcttttctgatataacgccaaccccctttgtgcccttcacagtatcacatttgaaactttgtgctggaatcatggtaactgcatctcacaatccaaagcaggataatggntataaggtctattgggataatggagctcagatcatttctcctcacgataaagggatttctcaagctattgaagaaaatctanaaccgtggnctcaagcttgggacgattccttaattgatagcagtccaattctccacaatccgagtgcttccaatcaataaatggcctactttgaagaccttaaaaaagttccggtttccacaagggagcgttnaacangggagacaaaanggggaaatttttgttgcaaaacctcctgtccaaaggggggtggggtccaaaanctttgn

SEQ ID NO: 4229 - DNA, 656 bp, Homo sapiens
  misc_feature (545)..(545): "n" may be a, t, c, g, other or unknown
  misc_feature (581)..(581): "n" may be a, t, c, g, other or unknown
  misc_feature (609)..(609): "n" may be a, t, c, g, other or unknown
  misc_feature (614)..(614): "n" may be a, t, c, g, other or unknown
  misc_feature (632)..(632): "n" may be a, t, c, g, other or unknown
  misc_feature (654)..(654): "n" may be a, t, c, g, other or unknown
cttttaaaggcatcacctaattaggtcaggcccactcaacagttgattaaccttaattatatttgcaaaatccctttgccatttaagatgacacaataattggaatgatatcccatcatattcacaggtcctacctatactcaaaaggtggtaggttatacagggtggatatagtgttgaaagaaggaatgaatgaaatgaatgaattctgatagctggaagcacagcaactagctttttttgtagcatgagtgagagaaggtattgagttccttattgaagaatgcagttgcaacagtttatcactagtgagctgcttcttggtaactataagacataagcagacaagaaacagcaagaaaggaaggaaggagaaaagagaacgagaaggaaatcattattttggaccgatttccggtggtggtttcaagaagttctccccaccctccagactgctgtcatttacaattgctagagaacaagagctgggagcctctccttggttctgctcctgtggcatagccatgggggatgcagaagggcantggtgcccactaaagggaatccccgtcagctttggntttaagtttccagagattgagcctctgncttangctgagagaaatacttantgtgagtccttaattgctcccnta

SEQ ID NO: 4230 - DNA, 377 bp, Homo sapiens
  misc_feature (289)..(289): "n" may be a, t, c, g, other or unknown
  misc_feature (340)..(340): "n" may be a, t, c, g, other or unknown
  misc_feature (373)..(373): "n" may be a, t, c, g, other or unknown
aattattatgtggaatctcttaagtgagcaactaagaaaaagccttatagaaagactacactggatttataagtgtgtttatgtttctctaagaatgggagcttctgttaacttaggggtggagttgttctgaggaaaccagtagattggatgactgactggagaatccagaataacaaatccattatccagacatgtttacttttatattaagaagtttgttgattaggtcttaattttcaaatgcaaacaccaagctttgaaaatattgcatatacaatgtattggncaccaatttaataatatttaatttgaagttaattactgttaatccttctanaaaagttttttttctttaaataaaagtacatanatat

SEQ ID NO: 4231 - DNA, 801 bp, Homo sapiens
  misc_feature (595)..(595): "n" may be a, t, c, g, other or unknown
  misc_feature (660)..(660): "n" may be a, t, c, g, other or unknown
  misc_feature (719)..(719): "n" may be a, t, c, g, other or unknown
  misc_feature (774)..(775): "n" may be a, t, c, g, other or unknown
  misc_feature (779)..(779): "n" may be a, t, c, g, other or unknown
  misc_feature (791)..(791): "n" may be a, t, c, g, other or unknown
gtgcgcctgcgcgcggcgccgaggggacggggtccgactcagaaatggcggcctccatgttctacggcaggctagtggccgtggccacccttcggaaccaccggcctcggacggcccagcgggctgctgctcaggttctgggaagttctggattgtttaatgaccatggactccaagtacagcagcaacagcaaaggaatctctcactacatgaatacatgagtatggaattattgcaagaagctggtgtctccgttcccaaaggatatgtggcaaagtcaccagatgaagcttatgcaattgccaaaaaattaggttcaaaagatgtcgtgataaaggcacaggttttagctggtggtagaggaaaaggaacatttgaaagtggcctcaaaggaggagtgaagatagttttctctccagaagaagcaaaagctgtttcttcacaaatgattgggaaaaaattgtttaccaagcaaacgggagaaaagggcagaatatgcaatcaagtattggtctgtgagcgaaaatatcccaagagagaatactactttgcaataacaatgggaaaggtcatttcaaggtcctgtattaatangaagttcacatgggggtgtcaacattgaagatgttgctgctgaaaactcctgaagcagttaattnaaggaacctaattgatatttgaaagaaaggcatccaaaaagggaacaaagctcctccanccttgcacaagaagattgggaatttccaaccctaataattgtgggaatcaacaannaagnaaaacaatgggncaaagctttt

SEQ ID NO: 4232 - DNA, 675 bp, Homo sapiens
  misc_feature (441)..(441): "n" may be a, t, c, g, other or unknown
  misc_feature (649)..(649): "n" may be a, t, c, g, other or unknown
  misc_feature (652)..(652): "n" may be a, t, c, g, other or unknown
  misc_feature (664)..(664): "n" may be a, t, c, g, other or unknown
  misc_feature (667)..(668): "n" may be a, t, c, g, other or unknown
ggattattttttcccctttggaataacttttgtgaattattataatgcagtttccctagtaatatagtacttttcatttgaaccacatcttgactgatctgtattgtaatatatgtcagcaggtaaggttgcctgctggatcattttgaggacagaggcatgagggagcacatctcttgtgaagttgcagccagatttgtaaccaaccctgaaattcatcagcttaattcatttatcagcttgattcattcatcattcattgcttatatccaaagcaaagacggtaagaaaatgaattcatcctgaaatataaagaaaagggtctgaaggaacaaacacgattctcttatattttggggctcatgagccttgatagacagtttcctctcgtcttcatttccacccctcatcctcagtagtctcctctcccccacgccccancccaacttcccccccaagcttgagttaaagacagaatagctaaagacagtgctgcctttacaatgcagtaattgccatctttggggccgaaagacaagctctgtgttgtgcttttcttgaccaacccttatcctgggctctggagcttgtgtttccctgctggcgactgtaccttgggtaattggtgctacctcccctgtttgctcantangaccctggtccnggnnggcaatt

SEQ ID NO: 4233 - DNA, 594 bp, Homo sapiens
  misc_feature (39)..(39): "n" may be a, t, c, g, other or unknown
  misc_feature (525)..(525): "n" may be a, t, c, g, other or unknown
  misc_feature (553)..(553): "n" may be a, t, c, g, other or unknown
  misc_feature (588)..(588): "n" may be a, t, c, g, other or unknown
aacagtctgggagcaaagagtttactcgccactgggtantgggccatggacaccccagtctccaccagaagttcgggattgcaaaatgggactctggcagcaaatttcaaactgtatgccagacctggccctttgcagtgatataaaatttttcttgaggtgtctggaaagatggctgaataggaacagctctgctctgcagctcccagcgagatcaacgcagaaggagataatttctgcatttccaactaaagtacccagctcatctcattgggactggttagacagtgggtgcagcccacagaaggcaagcagaagcagggtggggtgtcgcctcacccgggaagcgcaaggggtcagggaactccctcccctagccaagggaagctgtgagggactgtgccgtgaggaacggggcattccggcacagatactatgctttccccacggtctttgcaacccacagaccaaggagattcccttgggtgcctgcaccaccaagggccctgggtttcaagcaaaaanctgggcagccatttgggcaaacactganctagcagcagggagtttttttcataccctaagtanccccta

SEQ ID NO: 4234 - DNA, 617 bp, Homo sapiens
  misc_feature (385)..(385): "n" may be a, t, c, g, other or unknown
  misc_feature (444)..(444): "n" may be a, t, c, g, other or unknown
  misc_feature (511)..(511): "n" may be a, t, c, g, other or unknown
  misc_feature (528)..(528): "n" may be a, t, c, g, other or unknown
  misc_feature (541)..(541): "n" may be a, t, c, g, other or unknown
  misc_feature (604)..(604): "n" may be a, t, c, g, other or unknown
  misc_feature (609)..(609): "n" may be a, t, c, g, other or unknown
  misc_feature (617)..(617): "n" may be a, t, c, g, other or unknown
atgataaagatgcagtacctttctcttaaaaaaaaatgctatggaaagctgtgagaattgaagagacaaattggctgtgtcagtgtggggttatgtcatgatttctagaagccctgaagttgctcttttgagcagctttgcatgacacgctctggtaaaaggtgtgcatctttaaattatttcatggatactttgaaaaatattgtatcacttcaaatacagcaataagtttatatgttctcaagatttcatttgtttttaagaattttaagttcgtggattaatatcactacttgaatactgacagttgttgattagacaccgaaaggttactgattgttgaatgtatctgtgttagagctgtgcactggcacgcttgcatcangggctggggccacacggccgccacacagattcccccgtgatgcctggagctgcttccanagccgggtgtctccaagaggcacctgtaggacttcccatttaagaaatctcttgagtgggtttgtangttaccttctccaaggnttatttaggacanagatattgctgggaaggtcatgggtcaaattccctcacaacccaactcgtctgcgggtgcaancccantccaaggn

SEQ ID NO: 4235 - DNA, 613 bp, Homo sapiens
  misc_feature (555)..(555): "n" may be a, t, c, g, other or unknown
  misc_feature (571)..(571): "n" may be a, t, c, g, other or unknown
  misc_feature (575)..(575): "n" may be a, t, c, g, other or unknown
  misc_feature (598)..(598): "n" may be a, t, c, g, other or unknown
  misc_feature (606)..(606): "n" may be a, t, c, g, other or unknown
aaaagcaaaatctgagcaggcttccgaggtttcctatgcaggagtgattggggcagatgtgagagggcacggcctcatctgtgaggggcggccagtgacgtcacggctggctgtcatctgtggaacgtcttcttgtcacatggggatcagcaaagacccgatttttgtaccaggcgtctgggggccttatttctcagccatggtacctgggttctggctgaatgaaggtggtcagagcgttactggaaaattgatagaccacatggtacaaggccatgctgcttttccagaactacaagtaaaggccacagccagatgccagagtatatatgcatatttgaacagtcacctggatctgattaagaaggctcagcctgtgggtttccttactgttgatttacatgtttggccagatttccatggcaaccggtctcccttagcagatctgacactaaagggcatggtcaccggattgaaactgtctcaggaccttgatgatcttgccattctctacctggccacagttcaagccattgctttggggactcgcttcantatagaagccatggangcancaagggcactcaatcagtactcntttcctangtggagg

SEQ ID NO: 4236 - DNA, 892 bp, Homo sapiens
  misc_feature (670)..(670): "n" may be a, t, c, g, other or unknown
  misc_feature (742)..(742): "n" may be a, t, c, g, other or unknown
  misc_feature (754)..(754): "n" may be a, t, c, g, other or unknown
  misc_feature (794)..(794): "n" may be a, t, c, g, other or unknown
  misc_feature (823)..(823): "n" may be a, t, c, g, other or unknown
  misc_feature (839)..(839): "n" may be a, t, c, g, other or unknown
  misc_feature (863)..(863): "n" may be a, t, c, g, other or unknown
  misc_feature (874)..(874): "n" may be a, t, c, g, other or unknown
aaataggtgacttaaaagaaggcattccatcatagatggcaaaaaaccaaaaatctgttggaccagtaactcttctttttctttgacttgcttagtaggttaaaaagtgataatgaattcaagtttttgttattgttgttcaaaacatcatttttaagacccgaggctctagtgctgcatttcctacctgttaataaaggaatatctggaacataaatatttgtgcagtgagtgggcatttctctagaagtgtttcaacagatacagtacagactcctagaagtagagatgctacagcagtgggtttgcgtatttaacatcttggttgagattgtgaaactttctccgataactttctacccatttataactttagtaatatacaatgtgactttttttagtatccttgctagtattgggcattgtcattgttttaatctttgccaatctgatagttataagtgatactcatttaaatttaaatcacaatatttcttttttaattgaagaaaaaatcagcattaggtgaggtttaccaagcattggtggtgattactgggtattggtggctcagacgtaggatgatggactgttggcatgatattgccttgattgcctaatctgtaactcctaataaatactggaaaattagcttgcctgaaacattggnaagaactttttaaaaattacctttaatttcctacttgggccttgactggcatcctggggcccaagccagttncatatgcatatnatatgaatgacaaatggaaaatgggtaagacagcatgtancctggtcccctaaaaaagggtactcctangggcaaaagaccttgnttttggaaaaattttggaattacnaaatttttagncctaaataacaacaaaaa

SEQ ID NO: 4237 - DNA, 712 bp, Homo sapiens
  misc_feature (506)..(506): "n" may be a, t, c, g, other or unknown
  misc_feature (571)..(571): "n" may be a, t, c, g, other or unknown
  misc_feature (577)..(577): "n" may be a, t, c, g, other or unknown
  misc_feature (632)..(632): "n" may be a, t, c, g, other or unknown
  misc_feature (660)..(661): "n" may be a, t, c, g, other or unknown
  misc_feature (671)..(671): "n" may be a, t, c, g, other or unknown
  misc_feature (712)..(712): "n" may be a, t, c, g, other or unknown
atattatgaaatacccggcccaataaacaagacaacagagcgacatctagctatcaactgtgttcatgatagagttgtttgctggtggccactggtcaacgatgatgcttggccttgggcccccatttcttctgagaaggacagagccaatctactcctcctgggttatgctcaaggaagactagaggttctgagttctgtccgcacagaatgggacccactggatgttcgctttggcaccaaacagccttatcaggtgttcacagtggagcactccgtaagtgtagacaaagagcccatggctgacagctgcatctatgaatgcattcggaataaaatccagtgtgtgtcagtcaccagaataccactaaagtcaaaggccatcagctgctgcaggaatgttactgaagacaaactgattctgggctgtgaagattcttcgctaattctttatgaaactcaccgtagagtgactctcttagcacagactgaacttttgccttcantaataagctgccacccaagtggtgccattctgctagttggcaacaaccaaaggggagttgcaaanttttgntatggctctatcccctattaacatccaactgttggctgaaagaccgcttacccangggaggaatcttgcaaattcaattaaannttattttggntccctccaagcaagttccttgttcaaaatgcaaatgggggn

SEQ ID NO: 4238 - DNA, 816 bp, Homo sapiens
  misc_feature (685)..(685): "n" may be a, t, c, g, other or unknown
  misc_feature (694)..(694): "n" may be a, t, c, g, other or unknown
  misc_feature (720)..(720): "n" may be a, t, c, g, other or unknown
  misc_feature (768)..(768): "n" may be a, t, c, g, other or unknown
  misc_feature (786)..(786): "n" may be a, t, c, g, other or unknown
  misc_feature (790)..(790): "n" may be a, t, c, g, other or unknown
  misc_feature (804)..(804): "n" may be a, t, c, g, other or unknown
agagcgaacttgcggctcgtccgagtacatgtgagcggtaatcgcccctgcagctggttatcctgacattatgcactccgaagcagaagaatccaaggaagtggccacagatgtctttaattccaaaaacctggccgttcaggcacaaaagaagatcttgggtaaaatggtgtccaaatccatcgccaccaccttaatagacgacacaagtagtgaggtgctggatgagctctacagagtgaccagggagtacacccaaaacaagaaggaggcagagaagatcatcaagaacctcatcaagacagtcatcaagctggccattctttataggaataatcagtttaatcaagatgagctagcattgatggagaaatttaagaagaaagttcatcagcttgctatgaccgtggtcagtttccatcaggtggattatacctttgaccggaatgtgttatccaggctgttaaatgaatgcagagagatgctgcaccaaatcattcagcgccacctcactgccaagtcacatggacgggttaataatgtgtttgatcatttttcagattgtgaatttttggctgccttgtataatccttttgggaattttaaaccccacttacaaaaactaagtgatggtatcaacaaaattgtttggatgaagagaacatattagcacatgagttaagantggtgaccngatcatggatttaatttgaagatggngcactgctggattttatgaagggaaaaaaggaagaattttcctaaagnattacacaatatttcaanaaanggcttttacccaanttcaatttgtca

SEQ ID NO: 4239 - DNA, 677 bp, Homo sapiens
  misc_feature (450)..(450): "n" may be a, t, c, g, other or unknown
  misc_feature (523)..(523): "n" may be a, t, c, g, other or unknown
  misc_feature (597)..(597): "n" may be a, t, c, g, other or unknown
  misc_feature (616)..(616): "n" may be a, t, c, g, other or unknown
  misc_feature (626)..(626): "n" may be a, t, c, g, other or unknown
  misc_feature (668)..(668): "n" may be a, t, c, g, other or unknown
  misc_feature (673)..(673): "n" may be a, t, c, g, other or unknown
ttattatatgcaaataatattttcccgccatcgttatggaaaattctatattttgtcaacgttcattttcttctcaaaagccttttgttattatttccaaatgaatattatgtgtgtctcagacaaccacagaaagttttgtttttgtcacattctactgctactgtgtcaatggcagcattttgatataggtggagggatgctcacatcaaccccataatttgtgtcagcttctcctgaagttatcagaagcatacaatttaagtaaaaacagtatcttcgctatccaaatgatgttccaaggtaaatctcctcagatcccttccagtacatgtatgctccaaggcctgctctatgtagaacttttggagccatcaacgtactgcttgaggttgctttgaacaaaaggtatttgacataagctctataagatcagggactcttttttantttattcattgttctttatcttctagagcaataatttgcaaaatgactatttattgaataaactaggacggangtgaaaaggaaagaacaagctcatccttccaaggggaagagagcagtatcccaaatccaaattgaagaaaatanacatatatctattcaccangaagagatanaagggaagacagggcagaatttctgtgggtcttacaaactcngcacntcta

SEQ ID NO: 4240 - DNA, 561 bp, Homo sapiens
  misc_feature (405)..(405): "n" may be a, t, c, g, other or unknown
  misc_feature (451)..(451): "n" may be a, t, c, g, other or unknown
  misc_feature (461)..(461): "n" may be a, t, c, g, other or unknown
  misc_feature (480)..(480): "n" may be a, t, c, g, other or unknown
  misc_feature (536)..(536): "n" may be a, t, c, g, other or unknown
  misc_feature (555)..(555): "n" may be a, t, c, g, other or unknown
  misc_feature (560)..(561): "n" may be a, t, c, g, other or unknown
agtcagggaggcgaactgctgagcactggccgcggacgctccgttgcagtctcgcccaggggccggtacctgcgctcgcgccgccgggttgaaaggatgaagccgcagctggagcagccaccctatgattggctgtggcgcttgtgaacccaaagtaaagatggcgggcgggcaggcagccgccgcactgcccacttggaagatggcggcgcgccgcagcctcagcgctcgcggccgggggatcctgcaggcggctgcggggcggctgctgccgctgctcctgctgagctgctgctgcggtgcgggcggctgcgcagcggtgggcgagaatgaggagacggtgatcatcgggctgcgactggaggacacgaacgacgtgtcgttcatggaagggggggcgctgcnggtgagcgaacggacccgggtcaagctgcggggtgtacggggcaanaacatcaatnaacgaagacgttggtcccngcatcgcctttaaccgaagcacgaagccggcgggcgccaacaagcccggggggganccgcggggcctgggggggnccccnn

SEQ ID NO: 4241 - DNA, 707 bp, Homo sapiens
  misc_feature (7)..(7): "n" may be a, t, c, g, other or unknown
  misc_feature (578)..(578): "n" may be a, t, c, g, other or unknown
  misc_feature (634)..(634): "n" may be a, t, c, g, other or unknown
  misc_feature (653)..(653): "n" may be a, t, c, g, other or unknown
  misc_feature (695)..(695): "n" may be a, t, c, g, other or unknown
  misc_feature (701)..(701): "n" may be a, t, c, g, other or unknown
  misc_feature (706)..(706): "n" may be a, t, c, g, other or unknown
aattaangatggctgcgcccatgtaacatcactagcgaccggtgacctctttttcccccttgcctggctcctgtggtggcaggctgggcacgaggaccatgctgggccggagcctccgagaagtttctgcggcactgaaacaaggccaaattacaccaacagagctctgtcaaaaatgtctctctcttatcaagaagaccaagtttctaaatgcctacattactgtgtcagaagaggtggccttaaaacaagctgaagaatcagaaaagagatataagaatggacagtcacttggggatttagatggaattcctattgcagtaaaagacaatttcagcacttctggcattgagacaacatgtgcatcaaatatgctgaaaggttatataccaccttataatgctacaagtagttcaagaagttgttggatcagggagctctactaatgggaaaaacaaatttaagatgagtttgctatgggatctgggagcacaagatggtgtatttggaccaagttaaaaacccctggagttattcaaaacaatatagagaaaagaggaagcaagaatccccacagngagaatgaaagattcagactggctggataactgggagggaagctcaaggtgggaantgcaactggctggtatccnggggttcaaaatgctaacccgggcttttagggattaaggttncagggnggggnt

SEQ ID NO: 4242 - DNA, 670 bp, Homo sapiens
  misc_feature (310)..(310): "n" may be a, t, c, g, other or unknown
  misc_feature (358)..(358): "n" may be a, t, c, g, other or unknown
  misc_feature (384)..(384): "n" may be a, t, c, g, other or unknown
  misc_feature (436)..(436): "n" may be a, t, c, g, other or unknown
  misc_feature (440)..(440): "n" may be a, t, c, g, other or unknown
  misc_feature (497)..(497): "n" may be a, t, c, g, other or unknown
  misc_feature (518)..(518): "n" may be a, t, c, g, other or unknown
  misc_feature (547)..(547): "n" may be a, t, c, g, other or unknown
  misc_feature (575)..(575): "n" may be a, t, c, g, other or unknown
  misc_feature (613)..(613): "n" may be a, t, c, g, other or unknown
  misc_feature (634)..(635): "n" may be a, t, c, g, other or unknown
  misc_feature (649)..(649): "n" may be a, t, c, g, other or unknown
atgaggcggacaggccccgaggaggaggcctgcggcgtgtggctggacgcggcggcgctgaagaggcggaaagtgcagacacatttaatcaaaccaggcaccaaaatgctaacactccttcctggagaaagaaaggctaatatttattttactcaaagaagagctccatctacaggcattcaccagagaagcattgcttccttcttcaccttgcagccaggaaagacaaatggcagtgaccagaagagtgtttcatctcatacagaaagtcagatcaacaaagagtccaagaaaaatgcgacccagctanaccatttgatcccaggcttagcacacgattgcatggcatcccctttanccacttcaaccactgcggacatccangaagctggactctctcctcagtccctccagacttctgggcaccacagaatgnaaancccattttcaactgaagctatctttgctccaagcctgatactccagactgtgctggngatagtcataccccactgggntttttccttcaccgagggacttggaaagntcttgtttgctagaccgtaaagggaacnaaaaaagggggattctgccaaggaaaatggggaatggnttcatgagtctaaggaagganntatcagagtatggnggaaacacaccaaactacctg

SEQ ID NO: 4243 - DNA, 729 bp, Homo sapiens
  misc_feature (640)..(640): "n" may be a, t, c, g, other or unknown
  misc_feature (701)..(701): "n" may be a, t, c, g, other or unknown
  misc_feature (706)..(706): "n" may be a, t, c, g, other or unknown
  misc_feature (716)..(716): "n" may be a, t, c, g, other or unknown
  misc_feature (719)..(719): "n" may be a, t, c, g, other or unknown
cttttcgcggccgggccccagcatggctgcccccacggctgagggcctggcagctgctgcgccctcgctttcttgacattccctggcttctgtgctctcttccccaggccaccccagcagacatgtttgccaaggcctttcgggtcaagtccgacacggccatcaaggggtcggacaggagaaagcttcgagctgatgtgacaactgctttccccacccttggaactgatcaagtctctgagttagtacctggaaaggaggagctcaacattgtgaagttgtatgctcacaaaggggatgcagtgactgtgtacgtgagtggtggtaaccccatcctctttgaactggagaaaaatctgtatccaacagtgtacacgctgtggtcctatcctgatcttctgccaacctttacaacatggcctctggtgctcgagaaactggtagggggagcagatttgatgctgcctggactggtgatgccccctgctggtctgcctcaggtacagaagggcgacctctgtgccatttctttggtggggaacagagcccctgtagccattggagttgcagccatgtccacagctgagatgctcacgtcaggcctgaaagggaaaggggcttctctgtgctccacacttancaaggaccacttgtggcggtctggaaacaagtcctctccaccttccattgctccactgggncctgngattcagcanatntcaagtgaaa

SEQ ID NO: 4244 - DNA, 778 bp, Homo sapiens
  misc_feature (21)..(21): "n" may be a, t, c, g, other or unknown
  misc_feature (688)..(688): "n" may be a, t, c, g, other or unknown
  misc_feature (693)..(694): "n" may be a, t, c, g, other or unknown
  misc_feature (703)..(703): "n" may be a, t, c, g, other or unknown
  misc_feature (756)..(756): "n" may be a, t, c, g, other or unknown
aaaaaaaaaaaatttccacangatgctggtcctcagtggattaggtcagaagctcatgttctgatagttcttcattatttcacaaaggtggacaacctgaaagagaaaaggctgcttgatgtcagcagaatctaaacccctacattaaagctttgcctcccattctgtggttgtggtggtggtaagaaggagatattggtaccaagaaaaatttccaaaactattgagagagagagagagaaagtattgaaattttgttctgccttgcaggatccatttatcattcattggtaaaggatatattccttgttcttaccaagtgtacatttaactcttgctgacatgttcagtgtattttattacttttaatgctgtcttaaaatgaacattctttaaagttggacaggaaggtggcatttcttatttattaacatttttaactttaaacatattgtgactcatctagaccttttaataagacgatcaacttcacacttagggaaaaaattaaaatgtgatggccacttctaataattcaggtagttataagggatctggaagaaatccagtctttatgaatatactattagttgggcattaaaaaatcagtatatattttaactttttgtgacatgctaacacattttcagaataattattgcatagtagaatttattactccaagaanagaanngaccttacntcaattcaaatgaaggttaagtaatttacatttcctggggtaaaaaaccgggntctataaaattaaagttagaag

SEQ ID NO: 4245 - DNA, 789 bp, Homo sapiens
  misc_feature (725)..(725): "n" may be a, t, c, g, other or unknown
  misc_feature (746)..(746): "n" may be a, t, c, g, other or unknown
  misc_feature (768)..(768): "n" may be a, t, c, g, other or unknown
  misc_feature (785)..(785): "n" may be a, t, c, g, other or unknown
  misc_feature (787)..(787): "n" may be a, t, c, g, other or unknown
gagttttaaagtagaagtacttgctagtaatgcagatagagtcagttctctcaccagtatggatttaaattgtcctttccatctcagtttactcttttttttaaaaaaaacaaaccaatatgctacctgaaactagaaacacatttttaattctgcagctctcctaacagattattttgctttagtacagagctgggctgcaggctgagttgggagttggtaaaggattgaggacagcaatgtaggtcgcctcttcctacaggaaaaaattgaggaacgttgtgtattactggttaaaagattgattaggattatttcaagggatggttgagttgtcgttttacttatttcacccaatattttgtgtctctacttaagcagtgttgttttaaatgttactggataattgtaacataatcaaattaaattttatatttaactgatacccaagcatttgatgaaaacatgttgcaggaatgggagagtattccatagcttttgttttattgtgatttgattaaatgtgacaactaataagttaaagacaggacttcactgttttagcctgatttcctgtagaaagtgtggctaagtttaattggaaagaaatgtcttcttactagaactggattttggggggactttatccaactcttacttggggacactaactggttggctataaagggtcaaaaaagggagccaacaagttgcctaatttgggnaatgtttgaaaataatcaacngggctaatttttaagaggtatngaagccaaaccttttancnaa

SEQ ID NO: 4246 - DNA, 662 bp, Homo sapiens
  misc_feature (435)..(435): "n" may be a, t, c, g, other or unknown
  misc_feature (462)..(462): "n" may be a, t, c, g, other or unknown
  misc_feature (518)..(518): "n" may be a, t, c, g, other or unknown
  misc_feature (567)..(568): "n" may be a, t, c, g, other or unknown
  misc_feature (599)..(599): "n" may be a, t, c, g, other or unknown
  misc_feature (602)..(602): "n" may be a, t, c, g, other or unknown
  misc_feature (651)..(651): "n" may be a, t, c, g, other or unknown
aaattcgatgagcgcgtcgggctccaaggcaggcgctgtcagcccgggagggctgtctgggatttctagagggtcccagaacgggttcttcccaggccgatcccgcctgcttcctgccccgtctctccacccgcctcccgccctctgtaagggaccccgagggcggcgccggaaacacggagaaggcccagaacggcgcgggacccgagaggcctacgttggcaaacgcagcccgctgcccctttgctcgcttcccccgggcctggagtggctcctgtcgcttctggcgctccgatttcgagaaatgactttcagctgtgcaaggcgagaatgctactttagataatgagaaaaaatctctcgaatggctcccaaaatgaggtccttgtttaagaagccacaggaagccgccagccgaacgctgataccaaagangaggccaagaagcggactgtggcttgntgacctgtttggtattgccaaattttcagcttttattaaagctgaaacaccttggnctgtttaaaacgttcgacaaggacttttttatgaacgttaacggcacannatacgggttttttggaaaaaaaaaaaggcanganttcaacccgttcggcccctttgtgaaggtccattcatgaaaccctcgangttaaaaggcc

SEQ ID NO: 4247 - DNA, 760 bp, Homo sapiens
  misc_feature (529)..(529): "n" may be a, t, c, g, other or unknown
  misc_feature (642)..(642): "n" may be a, t, c, g, other or unknown
  misc_feature (684)..(684): "n" may be a, t, c, g, other or unknown
  misc_feature (691)..(691): "n" may be a, t, c, g, other or unknown
  misc_feature (741)..(741): "n" may be a, t, c, g, other or unknown
  misc_feature (743)..(743): "n" may be a, t, c, g, other or unknown
  misc_feature (760)..(760): "n" may be a, t, c, g, other or unknown
ctgtcctggtagggcacctgcacctgcgaatcttgcaccttgcaaacaatcagttacagacctttcctgcaagcaaactaaataaattggagcaattggaggaactgaacctaagtggcaacaagcttaaaaccattcccacaaccatagcaaactgtaaaaggctgcacacccttgttgcacactccaacaacatcagcattttcccagaaatactgcagttgcctcagatccagtttgtagacctaagttgcaacgacttgacagaaatcctgattccagaggctttgcctgctacattacaagaccttgacctgactggaaatacaaatctggttctggaacacaagacactggacatatttagccatatcacaaccctgaaaattgatcagaaacctttgccaaccacagattctacagttacgtcaaccttctggagccatggactggctgagatggcagggcagagaaataagctgtgtgtctcagcacttgctatggatagctttgcaagagggggtggganctgtgtatggcatgtttgatggagaccgaaatgaggagctcccgcgcctgctgcaatgtacgatggcagatgtgcttttagaagaggtacagcaagtcaactaatgacacagnttttcaaagggtaaacaccttctttgggaatcccacaagggnaattttnggaatggctggggccaaaaaatttggggcgccccccggtccccccggggncnaaaatcccggccccggn

SEQ ID NO: 4248 - DNA, 630 bp, Homo sapiens
  misc_feature (312)..(312): "n" may be a, t, c, g, other or unknown
  misc_feature (438)..(438): "n" may be a, t, c, g, other or unknown
  misc_feature (448)..(448): "n" may be a, t, c, g, other or unknown
  misc_feature (614)..(614): "n" may be a, t, c, g, other or unknown
  misc_feature (619)..(619): "n" may be a, t, c, g, other or unknown
  misc_feature (621)..(622): "n" may be a, t, c, g, other or unknown
  misc_feature (629)..(629): "n" may be a, t, c, g, other or unknown
catttctttataatcgttatgcaggaaaattgcctaagaattatgacccaaaagttaccccagatccagaaagatggctgccaatgcgagaacgttcttactaccggggaagaaagaagggtaaaaagaaggatcagattggaaaagggacccagggagcaactgcaggagcttcatctgaactggatgccagtaaaactgtgagcagcccacccacctccccaagacctggcagtgctgcaacagtatctgcctctacaagtaacatcatacccccaagacaccagaaacctgcaggggctccagcaacanaaaagaaacagcaacagaaaaagaagaaaggtggaaaaggtggctggtgatgagaatattcttgttgcaggctgtttttaaactagtgtcagtgacactaggaatataataaaggtaacacagcangaagcacagnactactccctcttcatctccatattttcataagttcttgtgtttcaaattagggaaacatcttcctcaaagtctgcctagtgagatatggcctactggttgcctcatagctttgtacaagattacgaggactgaaaataattgggcatttacccatcttgggatcngttgngnncctttanc

SEQ ID NO: 4249 - DNA, 788 bp, Homo sapiens
  misc_feature (709)..(709): "n" may be a, t, c, g, other or unknown
  misc_feature (717)..(717): "n" may be a, t, c, g, other or unknown
  misc_feature (723)..(723): "n" may be a, t, c, g, other or unknown
  misc_feature (729)..(729): "n" may be a, t, c, g, other or unknown
  misc_feature (738)..(738): "n" may be a, t, c, g, other or unknown
ttactccaatgaacttcttccccactcattggaaaaacagaaatgatatgacatgagaaagacagcaaaatataatattagcgtggcaaagagccaggaaaattaaaagacatataaagggaagagatggcgaaaagaccctctagaaatatctaaaaattcagatgtgtggacacagaaatgaccttagccaagacttgttgttcacgccaccctcaagccctgagctatctaagggcaggctgagaagcacgtgttgaagaataccaatgtttataaggtggcagttcaaaaactctcccatccaaaattggacaaaggaacaaaaaaatctgccatgtgacaaatttaaagtttccaaattccagggttctttgatctctgacacaaccagattatcaaaattaaacctctactacttaacaatgataaagggtatttcattctcataagtgtagctagtagtatatcttttccatcatggctttttctctgtttatcttttctctctttctttatttccctgtagctttcaagcagaaattcttttcattttgttttggctctgtaattaaacactcaaagtgtatcagtagctaaaacattacttcaatacccacatttattctggctagaaaatcattccattttataccatggagcatccaagttatttaattaagaaaatttcccttaagatttataccanatatgggnaaaggngtaaangccaatgtnaggggcaaaacaaaatgtctgctgcggttgttgatttcaatttgcataat

SEQ ID NO: 4250 - DNA, 617 bp, Homo sapiens
  misc_feature (433)..(433): "n" may be a, t, c, g, other or unknown
  misc_feature (470)..(470): "n" may be a, t, c, g, other or unknown
  misc_feature (472)..(472): "n" may be a, t, c, g, other or unknown
  misc_feature (489)..(489): "n" may be a, t, c, g, other or unknown
  misc_feature (562)..(562): "n" may be a, t, c, g, other or unknown
  misc_feature (600)..(600): "n" may be a, t, c, g, other or unknown
  misc_feature (607)..(607): "n" may be a, t, c, g, other or unknown
  misc_feature (611)..(611): "n" may be a, t, c, g, other or unknown
  misc_feature (614)..(614): "n" may be a, t, c, g, other or unknown
gtttagcgaccggacccgaaacggggaagttgtcttgtgtggagaggttagtagagcagcgcgcgcgtcaccagagtcgtttctcttcggagtcttaggtgatcgagggtgtgcccagggggcggacttgtttgcgcctcccgttccctcccaatttccaaacgtgtcaccccggcgccgacggccctgtgcaggggaagcagatggagttcaagctggaggctcatcgcatcgtcagcatctctctgggcaagatctacaactcgcgggtccagcgcggcggcatcaagctgcataagaacctcctggtctcgctggtgctgcgcagcgcccgccaagtctacctgagcgacccgtgccccggcctctacctggccggtcccgctgggaccccggcgccgccaccgcagcagcagcccggggagccggcggncgggccacccgccggctggggagagccgcccccgccngncgctcatgcctcttggncggagaccgagccgcagccggagcgctcctccgtctcagacgcgccgcgggtaggggacgaggtgccggtggncacggtgactggagtcggggacgtttttcaaggcgganaggcggncgcnacngaa

SEQ ID NO: 4251 - DNA, 621 bp, Homo sapiens
  misc_feature (459)..(459): "n" may be a, t, c, g, other or unknown
  misc_feature (533)..(533): "n" may be a, t, c, g, other or unknown
  misc_feature (563)..(563): "n" may be a, t, c, g, other or unknown
  misc_feature (574)..(574): "n" may be a, t, c, g, other or unknown
  misc_feature (587)..(587): "n" may be a, t, c, g, other or unknown
  misc_feature (594)..(594): "n" may be a, t, c, g, other or unknown
cggcaatgtccgccacctggtgcagcccagagggtcaaggaatgggccagggccctggcagggaggtcggaggaaattccgccgccagcggccccgcctctcccataaggaacccatgcctttctgaagcaggactgaaggggcccccaagtgcccaccccctgcggttatgtctcctccatagattggtctgcttctctggaggcctcacgtccattcagctctcacctcgcacctgctgtagccaccagtgggcccagctcttctcacctgcctgcttcccccagtggcgtgctcctggctgtagtttggatgattcccgttctctcacaagaatccgtccagtccatcttcctggcccctccctggactgactttggagacctagccccagaaagcctcccttcttctccaggtcccctccgccctagtccctgcctgtctcatctaacgccccanaccttcatttgggccttccttcctcatgtctgccctgagcgcggggtggaaatgctcccttctgtgggctccancagatcccttgttttcctgtcagttggacncctcacctggnctccagggaagantgcaganaaaagcaaggagagactctagttaaga

SEQ ID NO: 4252 - DNA, 843 bp, Homo sapiens
  misc_feature (774)..(774): "n" may be a, t, c, g, other or unknown
  misc_feature (786)..(786): "n" may be a, t, c, g, other or unknown
  misc_feature (817)..(817): "n" may be a, t, c, g, other or unknown
  misc_feature (820)..(820): "n" may be a, t, c, g, other or unknown
  misc_feature (837)..(837): "n" may be a, t, c, g, other or unknown
taacaaatactgtgactgaaatgcatgcaccttgttgaagagaaaacattttattaatctccactataatgtctgtgaaatgtgcagtattccatccttagagagtttatctggttcatcagcatctgcatgtatcctctgaataatgaagcaacatttcagcaattctgttaaccacaccattagagacatttttagaagtgctgcaacatggtgggaacctagtactttaataatttcctatgatatttattagagcataaaatgtacatcacgatagtacagtatgtagtcctttaagaccagaaggtatgttaactgcaccatcattaagcagtctatcctattttcttatttatttgttagaattgaatcctttctcaatatctgtaccattcctatgatggtagccattcttctctttataaaatatttcctctttgaaaagcgtcctaaaacattaatttcaaatcccctcttggatgcaaagtgtccctaagaccatccattcaacagtatttatgtgagccaacttactagagccgctacaactaatcatgatagacagtccagaatctccctggactttatactgggccagcctcattgtccctaagatttctctttttatgtctcatggattacttctctttttaattgccccaggcacattccaaatgagaacctggtaaaagtcacattggacccccttcagtatgtcttcggctaatgtgttagccttcaataagggtgataaccccttttcaacctaanctagtccataanggagggaaaaaattcagattttggagttccnaancctaatttcccccaaanggggaa

SEQ ID NO: 4253 - DNA, 915 bp, Homo sapiens
  misc_feature (864)..(864): "n" may be a, t, c, g, other or unknown
  misc_feature (867)..(867): "n" may be a, t, c, g, other or unknown
  misc_feature (884)..(884): "n" may be a, t, c, g, other or unknown
  misc_feature (887)..(887): "n" may be a, t, c, g, other or unknown
  misc_feature (894)..(894): "n" may be a, t, c, g, other or unknown
aatgagaaggaaccggaaaaacaattctggtaatataagaaaacaagcttctttaacacgcagaaaagatcacactagctcaccagcaatggatccaaacaaagaatacatctctgaattgccagaaaaagaattaagaaagtcaattattaagctactcaagaaggcaccagagaaaggtaaatatcaacttaaagaaatgttttgttttttgtttttttgagatggagtctcgctctattgcccaggctggagtgcagtggcgcgatctgggctcactgcaagctcggcctcctaggttcatgccattctcttgcctcagcctcccgagtagctgggactacaggtgcccaccaccacacctggctaattttttgtattttttagtagagacagggtttcaccctgttagccaggatggtctctatcccctgacctcgtgatccactggcctcgacctcccaaagtgctgggattacaggcatgagccaccacgtttggcctaaagaaatgttttaaatgatacagtgtatgaatgaaaaaatctccagaagaatagatggcataaatttaaaacaatcacaacttctggaaatgaaagacacatttagagaaatgcaaaatacacgggaaaaactcaacaataaaatggaacaagtagagagaacttcagaacttgaagacaaggcttttgaattaacccaatcaaacagagattaagaaaaaataattttaaaatataaacaaaccctccaagaagttggggattgtgttaaatgaacaaacttaaggataaatggggttcttgaggagggaagagaaagctaaaccgtttgggaaagcatattgggagggaaataattngangggaaacttcccctggnccntgcctanagattcagacatccaattcca

SEQ ID NO: 4254 - DNA, 836 bp, Homo sapiens
  misc_feature (613)..(613): "n" may be a, t, c, g, other or unknown
  misc_feature (740)..(740): "n" may be a, t, c, g, other or unknown
  misc_feature (749)..(749): "n" may be a, t, c, g, other or unknown
  misc_feature (775)..(775): "n" may be a, t, c, g, other or unknown
  misc_feature (819)..(819): "n" may be a, t, c, g, other or unknown
  misc_feature (830)..(830): "n" may be a, t, c, g, other or unknown
ttgaggggaggtgcagctttcatctgaccatgcaggcgtgctttgcagtgggtagagcagtgctttcctcctcccagctgcacactggaatcacctggagagtccagaaacttcccgcctcagtgaaagaacatcagtgtatcagcacagcaaatattccaaatgccaggctggattccctccaattaccaggacctccaggcttctcctcctttcaagaactttctgaccctggatccagtctaaatgttggttataaactcacctgacatccacagggcccttccaaaatactgtcaaggctgactgctggtgcctggaacctgcacaccctcctgggactctgcatctctgctggggctggtttctcctctgagccaccttaaggaatcccaccctgacccggtcagagctcaccatgcctccctctcctacttgctcagcattttgtgtctatctagactgaagcctttgctttctctctgtgattgtggtgaaagttcaatttgctttcctatctctagaatgtcagcacgaaggcagaggcatggtctcctgagttccataaccccaaagcctaactccctgcctgccacactgaggggcttagtanacattgacttactaaattgaatagttgagtaataatgctccttgaaaataatttggagttagatcttgagccttgtgtgggcaagaggatgggtgaggacacatcattaaaactaaaggtaactgancatgccaantggttggggtgagaaaattgcatggnggaatccaagacacagaggcagcaaaaacccaagtgctgggaantcaagagtganaaaagt

SEQ ID NO: 4255 - DNA, 539 bp, Homo sapiens
  misc_feature (32)..(32): "n" may be a, t, c, g, other or unknown
  misc_feature (156)..(156): "n" may be a, t, c, g, other or unknown
  misc_feature (250)..(250): "n" may be a, t, c, g, other or unknown
  misc_feature (287)..(287): "n" may be a, t, c, g, other or unknown
  misc_feature (295)..(295): "n" may be a, t, c, g, other or unknown
  misc_feature (475)..(476): "n" may be a, t, c, g, other or unknown
  misc_feature (489)..(489): "n" may be a, t, c, g, other or unknown
  misc_feature (514)..(514): "n" may be a, t, c, g, other or unknown
  misc_feature (533)..(533): "n" may be a, t, c, g, other or unknown
taaacaaatgagcatggctgtgtttcagtaantaaaatttacaaaaacaggtggtctgttggatttgacctgcaagccataatttgctggcccctagtttagcagttaaagatttacatacataatttgaattaatattaattataccaagttggnaacattgaaggacacatacagtgttttagggaatcttaaactttatttttattctctaaagttttagtttgtgttttctgttctcaagtcttgnggaatgctcacagattatctttctgctcatctctgangggtttancacttttgagcattacacatgaactgtcagaaaggacctgagtgccttagtgtgaattaatagctgtctccatgtctaagaagttaccatcattgggttttttcctccaggctaaactcccatcttccagcaagctttgagtgtctctgtaaagtgagcaaaaacatatcagtatacatnnctatttactaccnagtccttggatctttagatggcgcnttctcagctattgcctaanggctga

SEQ ID NO: 4256 - DNA, 833 bp, Homo sapiens
  misc_feature (799)..(799): "n" may be a, t, c, g, other or unknown
  misc_feature (817)..(817): "n" may be a, t, c, g, other or unknown
  misc_feature (826)..(826): "n" may be a, t, c, g, other or unknown
  misc_feature (830)..(830): "n" may be a, t, c, g, other or unknown
  misc_feature (832)..(832): "n" may be a, t, c, g, other or unknown
gcgccagggatttgaaccgcgctgacgaagtttggtgatccatcttccgagtatcgccgggatttcgaatcgcgatgatcatcccctctctagaggagctggactccctcaagtacagtgacctgcagaacttagccaagagtctgggtctccgggccaacctgagggcaaccaagttgttaaaagccttgaaaggctacattaaacatgaggcaagaaaaggaaatgagaatcaggatgaaagtcaaacttctgcatcctcttgtgatgagactgagatacagatcagcaaccaggaagaagctgagagacagccacttggccatgtcaccaaaacaaggagaaggtgcaagactgtccgtgtggaccctgactcacagcagaatcattcagagataaaaataagtaatcccactgaattccagaatcatgaaaagcaggaaagccaggatctcagagctactgcaaaagttccttctccaccagacgagcaccaagaagctgagaatgctgtttcctcaggtaacagagattcgaaggtaccttcagaaggaaagaaatctctctacacagatgagtcatccaaacctggaaaaaataaaagaactgcaatcactactccaaactttaagaagcttcatgaagctcattttaaggaaatggagtccattgatcaatatattgagagaaaaaagaaacattttgaagaacacaattccatgaatgaactgaagcaacccatcaataagggaaggggtcaggactccaagtacctccaaagaagggaagactctctgtnggctttctaatcccaatnaagccaaanggangnc

SEQ ID NO: 4257 - DNA, 789 bp, Homo sapiens
  misc_feature (670)..(670): "n" may be a, t, c, g, other or unknown
  misc_feature (697)..(697): "n" may be a, t, c, g, other or unknown
  misc_feature (716)..(716): "n" may be a, t, c, g, other or unknown
  misc_feature (770)..(770): "n" may be a, t, c, g, other or unknown
  misc_feature (779)..(779): "n" may be a, t, c, g, other or unknown
  misc_feature (783)..(783): "n" may be a, t, c, g, other or unknown
aggaaaacactgaatttgtttggatgttctaagaaatggtgctaagaaaatggtgtctttaatagctaaaaatttaatgcctttatatcatcaagatgctatcagtgtactccagtgcccttgaataataggggtaccttttcattcaagtttttatcataattacctattcttacacaagcttagtttttaaaatgtggacattttaaaggcctctggattttgctcatccagtgaagtccttgtaggacaataaacgtatatatgtacatatatacacaaacatgtatatgtgcacacacatgtatatgtataaatattttaaatggtgttttagaagcactttgtctacctaagctttgacaacttgaacaatgctaaggtactgagatgtttaaaaaacaagtttactttcattttagaatgcaaagttgatttttttaaggaaacaaagaaagcttttaaaatatttttgcttttagccatgcatctgctgatgagcaattgtgtccatttttaacacagccagttaaatccaccatggggcttactggattcaagggaatacgttagtccacaaaacatgttttctggtgctcatctcacatgctatactggaaaacagttttatacaaaattgtatgacaagttcaatgctcaaaaaatggtncagttttaaagaattttctattaaccngcagggtaataattagctncatgctgcaagactccaacaaaagcctaagttcaactggaaagcccaaatgccnaattttaangggntttaat

SEQ ID NO: 4258 - DNA, 737 bp, Homo sapiens
  misc_feature (44)..(44): "n" may be a, t, c, g, other or unknown
  misc_feature (466)..(466): "n" may be a, t, c, g, other or unknown
  misc_feature (470)..(470): "n" may be a, t, c, g, other or unknown
  misc_feature (512)..(512): "n" may be a, t, c, g, other or unknown
  misc_feature (524)..(524): "n" may be a, t, c, g, other or unknown
  misc_feature (611)..(611): "n" may be a, t, c, g, other or unknown
  misc_feature (613)..(613): "n" may be a, t, c, g, other or unknown
  misc_feature (636)..(636): "n" may be a, t, c, g, other or unknown
  misc_feature (660)..(660): "n" may be a, t, c, g, other or unknown
  misc_feature (695)..(695): "n" may be a, t, c, g, other or unknown
  misc_feature (725)..(725): "n" may be a, t, c, g, other or unknown
  misc_feature (730)..(730): "n" may be a, t, c, g, other or unknown
  misc_feature (737)..(737): "n" may be a, t, c, g, other or unknown
caaatgtttataaaatgactaccgtatgctaggcagagtatggngcatagcaactatgaaatctgtttcagtaggcttggtccagaaccctcagtatttggaaagttgcatattgtcatcatttactcccattttgattatattaagaaagtatgtgagggcatgagcctctcaggaggggacctcagtgtttccggatccctcctgccctctgtgggacctagatgctggctagctgagcaccgtcaatgtgtcctcgcagaagacgaagcgcatttcctttcttctcttttttgcggttccagtgtgatgacatggcttggtcaccatgcttcgtgtttgctaaaaagaaaccagggatatgagtttctgaattctcaacctggtgcctttgccagagaacaaagtcaggttaatcagacgtcttcccctctccagcccaactcattcgctggctgacctctcntggncccatggttctaagaaccatctccacgataatgattcccaantgaatatcctancccagacctctccctcccactccagacttctgcttggattccgttgggctgtctcataagcatcttatgcctgctacatctaagtcnancaacaagattccaacctccaagnctgctcaagcccttgcctcctgcntttggggaaacgggacatcgcttttttcccctgangttgtgtgttgccaaaaaagtcgttgaaantcaancctttgn

SEQ ID NO: 4259 - DNA, 734 bp, Homo sapiens
  misc_feature (590)..(590): "n" may be a, t, c, g, other or unknown
  misc_feature (593)..(593): "n" may be a, t, c, g, other or unknown
  misc_feature (618)..(618): "n" may be a, t, c, g, other or unknown
  misc_feature (649)..(649): "n" may be a, t, c, g, other or unknown
  misc_feature (667)..(667): "n" may be a, t, c, g, other or unknown
  misc_feature (721)..(721): "n" may be a, t, c, g, other or unknown
  misc_feature (726)..(726): "n" may be a, t, c, g, other or unknown
  misc_feature (731)..(731): "n" may be a, t, c, g, other or unknown
aaataaatacatctgggatgactgaccaagaacaaagaatgtaggcatcaactgaacaccaactgtatacctgggactggatctgagggtaggattgccagattgagcacaaacaaacaaacgaaacacaagaaacaacagaagggtgcctgttaaatatgaatttctggtaagcaataagtaatttttattgtgttcctgtgcaatgataggacgcacgtatcctgaaaacctgtctgtagttcacctgaaattcacatttaactaggcgttctgattttatgtggccgccctatctgctgggaacataggctgatgcccctgggggttctgcgtttccttggccaggttcctgtagggctgaggtcatgggggagccgtggccagggatggtgtccttgccaggggaggtgacgggcagagctgcaggccctacaacttggggttgggcaaggatgagtcgctctatggtggtgcctctgataatagctgttattttagcttctgaaaaatgtgctgccctcaagagcttctgaggctaagcctacttgggtgaaaatagctttccaaggagccacattgtggggacnttnagggaacagccccacactttggggncacttggctgtctccaactcatcctcacttnccaaggctggacaaaggngattaaaaagaaaatgccaaagggggttgggcaaggcaagaaccctgtttggcntttgnaaggngct

SEQ ID NO: 4260 - DNA, 776 bp, Homo sapiens
  misc_feature (569)..(569): "n" may be a, t, c, g, other or unknown
  misc_feature (706)..(706): "n" may be a, t, c, g, other or unknown
  misc_feature (742)..(742): "n" may be a, t, c, g, other or unknown
  misc_feature (745)..(745): "n" may be a, t, c, g, other or unknown
  misc_feature (751)..(751): "n" may be a, t, c, g, other or unknown
  misc_feature (773)..(773): "n" may be a, t, c, g, other or unknown
tatacttttatttcctgtttattcttaggtagattggaagggggaaacagtctgttctccctaattaaattttttctaataacgattagtagaatatggacattctatatgacagtgacattaaaagaggctctttggaagtatatacattattaacataatgtgtacaagtccttttgaaatgacaactttaatgggtttcagctcttttatctagagcttgagataattcaagctgagtttttcagggcatatcacaacggcaaagtgttcagcagtgggatatcaatgcttatttacattttcctactgctatttatataaaatgttattccattcagaggatgccttttatccccacattaaagcacagatcattaagcaataaaaaccaaattgtctgtcattcaaattataactgcagttatttttgcatggtaagagtgaggtgctaattttgtgtgagatgaactttgtaaactactttgggaaatgttctttggaagtaaggttttttctcctttagtcttatgcttccacttttgtctcaagattcacaatccattaanacatggggaaaaaagaaaaggtaaaattgagagacttttgttagaggagctatttggatgaaccaacatttcagattttccaaaatgtaagttaggaagctccaatggcccctgcattaacaaaatacactgttacnacctaatcccaagagtgtcattacagtgagaatccncanttaaangcattccagtggaaattataanaat

SEQ ID NO: 4261 - DNA, 783 bp, Homo sapiens
  misc_feature (664)..(664): "n" may be a, t, c, g, other or unknown
  misc_feature (700)..(700): "n" may be a, t, c, g, other or unknown
  misc_feature (741)..(741): "n" may be a, t, c, g, other or unknown
  misc_feature (752)..(753): "n" may be a, t, c, g, other or unknown
  misc_feature (769)..(769): "n" may be a, t, c, g, other or unknown
ggttatgaagaataacatagaatatcatacatttgagatttttgtacttgcttaaaggaaaccaacaggaagactttttttttttccaaaattgacttacactgaaaagtttatctttgcctccataccccctaaaaatcaaatgatgtatatttttccatgaaatgccttttggtgtggtttatgtgcatgactgattcttagaaagccaataagataggggtggagccaagatggccgaataggaacagctccagtctaaagctcccagcgtgagcgacgcagaagacgaaagatttctgcatttccagctgaggtaccgggttcatctcactgcggattgtcagacagtgggtgcagtgcaccaagtgtgagccgaagcagggcgaggcatcacctcacccaggaagcgcaaggggtcagggaattccctttcctagccaaggaaaggggtgacagatggcacctggaaagtcaggtcactcccaacctaatactgtgcttttccaacggtcttagcaaacggcacaccaggagattgtatcctgcacctggcttggagggtcctatgcccatggagcctagctcattgctagcacagcagtctgagatcaaactgcaaggcagcaagaggctgggggaagggcgcccgccattgcccaangcttgagttaggtaaacaaagtggccgggaaactcnaactgggtggagtccaccgcaagctcaaggaggggctgccnggcctccggtnnaactccaacctctgcngggcaagggcaata

SEQ ID NO: 4262 - DNA, 761 bp, Homo sapiens
  misc_feature (598)..(598): "n" may be a, t, c, g, other or unknown
  misc_feature (604)..(604): "n" may be a, t, c, g, other or unknown
  misc_feature (629)..(629): "n" may be a, t, c, g, other or unknown
  misc_feature (668)..(668): "n" may be a, t, c, g, other or unknown
  misc_feature (689)..(689): "n" may be a, t, c, g, other or unknown
  misc_feature (700)..(700): "n" may be a, t, c, g, other or unknown
  misc_feature (705)..(705): "n" may be a, t, c, g, other or unknown
  misc_feature (756)..(756): "n" may be a, t, c, g, other or unknown
gtacctgtagctgcggcgctgaggtcggaacgtctgcgtgtgtgcgggctggttttgtggcggctgctgctagagctggagcatttgccgggttggtggctcctgcacatttttacagttctccagtccttctctttcgtcagtataaaagattaaactctacagaagaatgcaatcaagtgatggcttttcctttagaatttgaatatggaggctacaggaacagatgaagttgacaagctaaaaaccaaatttatatctgcttggaacaacatgaaatatagttgggtgttgaaaacaaagacgtattttagtagaaattctcctgtattattgcttggaaaatgttaccattttaaatatgaagacgaagataaaacgttacctgcagagtcgggatgtacaatagaggatcacgtaattgcaggaaatgtagaagaatttcgtaaagatttcatttctagaatatggctgacctacagggaagaattccctcaaatagaaggctcagctttgacaacagactgtgggtggggctgcacattgagaactggccagatgctcttgggctcaaggactcatactacactttcttggnagagcntgggacctggccctgatgccttggnataatgaaaattcaaactctgaatcaagggacttcccanactggtcaaaaaattttaacngcaacaatttngaagncatccactttcaagggggaaaagaagaaattccaaaaacccccaaacaaantttcc

SEQ ID NO: 4263 - DNA, 662 bp, Homo sapiens
  misc_feature (193)..(193): "n" may be a, t, c, g, other or unknown
  misc_feature (433)..(433): "n" may be a, t, c, g, other or unknown
  misc_feature (472)..(472): "n" may be a, t, c, g, other or unknown
  misc_feature (570)..(570): "n" may be a, t, c, g, other or unknown
  misc_feature (618)..(618): "n" may be a, t, c, g, other or unknown
  misc_feature (637)..(637): "n" may be a, t, c, g, other or unknown
  misc_feature (640)..(640): "n" may be a, t, c, g, other or unknown
  misc_feature (653)..(653): "n" may be a, t, c, g, other or unknown
aagtctcaatgtttaaggaaaaaagatttagaaatagtggtttttaaaagtttgatggaaaaacacatgagttcctgctggtgcattttacatgctttctaggtccttctgagttttaggatcctgagggatttggttggtattgtttttgggttttcttcttgaaactcagtattaaaacactgaaaagtancagatttttttctacctagagttttctgtttatccatcatgagcccaaataaagtcacaattgtatgttacctgctttacaaagaagccatttatgtttaattgactgttcattttgctttcttgtctgctgggatgacaaccgtgaaattcagtctggtagtttttatgagttggacatgaacctattagaaatgatttaaagtataaaatcatttctcacagggctttcaaaacatanacctgtgatcagaaacctggaatctagaaatttattcangacttgcaagaatttgtagcatatctacattattggagatctattgaaagggcaagaaaaagatgattgcccgttagtatcaacagttatggtacagncaactatgagagaaaccttttagatttggcagctgtatcattaataangtgtcattgggccaattcnaanattacagtaatcnaaaaatggg

SEQ ID NO: 4264 - DNA, 735 bp, Homo sapiens
  misc_feature (448)..(448): "n" may be a, t, c, g, other or unknown
  misc_feature (481)..(481): "n" may be a, t, c, g, other or unknown
  misc_feature (493)..(493): "n" may be a, t, c, g, other or unknown
  misc_feature (623)..(623): "n" may be a, t, c, g, other or unknown
  misc_feature (701)..(701): "n" may be a, t, c, g, other or unknown
  misc_feature (710)..(710): "n" may be a, t, c, g, other or unknown
  misc_feature (714)..(714): "n" may be a, t, c, g, other or unknown
  misc_feature (716)..(716): "n" may be a, t, c, g, other or unknown
  misc_feature (734)..(734): "n" may be a, t, c, g, other or unknown
tctgaatcaagccagggaggacttcaaccaggacatcggctggtgtgtctccctcatcaccgactacagggtccggttaggctgcgggtcttttgctggctctttcctggaatattacgcggctgatataagctatcctgtccgaaaatccatccagcaggacgtcttagggaccaggcttcctcaactgagcaaggggagccccgaggagcccgtggtggggtgccccctggggcagaggcagccctgccggaaaatgctccccgaccgctcgcgggccgcccgggaccgggccaaccagaagctggtggagtacattgtgaaggccaagggcgcggagagccacctgcgggccatcctaaagagcaggaagccatctcgctggctgcagaccttcctgagctccagccagtacgtgacctgtgtggagacctacctggaggatgangggcagctggacctggtggtgaagtacctgcanggcgtctaccangaggtgggggccaaggtgctccagcgcaccaacggcgaccggatccggttcattctggacgtgcttctgcccgaggccatcatctgtgcgatctctgcggtggaccaggtggactacaaagacggctganggagaagtacatcaaggggccttcgctgagctaccggggaaaaagaaatatttgacaaaccaagctccctttaaaaancgggaaccngggngnccgttccggtgaaggganc

SEQ ID NO: 4265 - DNA, 728 bp, Homo sapiens
  misc_feature (620)..(620): "n" may be a, t, c, g, other or unknown
  misc_feature (642)..(642): "n" may be a, t, c, g, other or unknown
  misc_feature (699)..(699): "n" may be a, t, c, g, other or unknown
  misc_feature (704)..(704): "n" may be a, t, c, g, other or unknown
  misc_feature (719)..(719): "n" may be a, t, c, g, other or unknown
  misc_feature (723)..(723): "n" may be a, t, c, g, other or unknown
gagatcggttgctggaaaactctccgtctttgctaatggagtcgtgacttcaattcaggtcagtggaatggggcagtgctcactggctatgacggtaggttcagcagtttgaaaatgagacctgcttcaatcttcaactgctggaaaattcaattatatattattggatcgatatgtttgctacactataacccagaacattatgaaaaccagaaattataattttatatttaatattttctaacggatgactctaggggaattgttagaggaattgtcatgaccattgtccagtttttttcctagattggaacagagaagtattaagaagaaaactgaaattatctgtaatgccacatcacagggataacctctgttaatattttggtatatttttagctctagatttctaaggatatttttctatacgtagattaaaaagatatacatatctatctttttaaagttaaaaagggattatattgtatagagggttttatatcttgctttttctctgtgatgctgggagcatttccttgtaatgaaaagttttcctaaaaccacattctattgagtgaaaacataagccaaggatggcgcatacttgcgcatgagagtcnaggccatctgtgacgatatgantggctcgtttctttgcaccttcttgtttacgtcagggctattgaaaaaaggattgtnttaanggtaaaacgccggcnaaangggaa

SEQ ID NO: 4266 - DNA, 714 bp, Homo sapiens
  misc_feature (680)..(680): "n" may be a, t, c, g, other or unknown
  misc_feature (683)..(685): "n" may be a, t, c, g, other or unknown
  misc_feature (702)..(702): "n" may be a, t, c, g, other or unknown
tataatgaagccaagaaaacgctgacagagctgaagacttacagtgagaaactggacaaagagcaagcagccctcgagaagatagaatccaaagctgatccaagtatcctacagaacctgagagcacttgtagccatgaatgaaaatctgaaaagtcaagaacaggaatttaaagcacattgtcgagaggagatgacacgactacagcaagaaattgaaaacctgaaagctgagagagcaccacgtggagatgaaaagaccctctccagtggagagccgcctggtaccttgacctctgcaatgactcatgacgaagacctagacagacggtataatatggagaaagagaaactttacaagatacgtttactacaggctcgaagaaatcgagaaatagcaattttgcaccgcaagattgatgaagtccctagccgtgccgagctaatacagtatcagaagagatttattgaaccctaccgccagatttcagcagtgcacaaagaaaccaagcagttcttcactttatataataccctggatgataaaaaggttatttggaaaaagagattagtctgctgaactcaattcatgagaacttctcacaggccatgggctcccctgctgcccgggaccagtttttacgtcagatgggaacagattgtgggaaggggattaagcanagnnnaatggaagatgggaaangaaaaagcaagg

SEQ ID NO: 4267 - DNA, 736 bp, Homo sapiens
  misc_feature (681)..(681): "n" may be a, t, c, g, other or unknown
  misc_feature (687)..(687): "n" may be a, t, c, g, other or unknown
  misc_feature (715)..(715): "n" may be a, t, c, g, other or unknown
  misc_feature (725)..(725): "n" may be a, t, c, g, other or unknown
  misc_feature (733)..(733): "n" may be a, t, c, g, other or unknown
gtagttgcgagcgagagtgagtggggccgggacccgcagagccgagccgacccttctctcccgggctgcggcagggcagggcggggagctccgcgcaccaacagagccggttctcagggcgctttgctccttgttttttccccggttctgttttctccccttctccggaaggcttgtcaaggggtaggagaaagagacgcaaacacaaaagtggaaaacagttaatgaccagccacggcgtccctgctgtgagctctggccgctgccttccagggctcccgagccacacgctgggggtgctggctgagggaacatggcttgttggccccagctgaggttgctgctgtggaagaacctcactttcagaagaagacaaacatgtcagctgctgctggaagtggcctggcctctatttatcttcctgatcctgatctctgttcggctgagctacccaccctatgaacaacatgaatgccattttccaaataaagccatgccctctgcaggaacacttccttgggttcaggggattatctgtaatgccaacaacccctgtttccgttacccgactcctggggaggctcccggagttgttggaaactttaacaaatccattgttggctcgcctgttctcaaatgctcggagggcttctttttatacaagccaagaaaagacaccangcatgnaagggacaatgcggcaaaagtttctgangaaacatttncaagcaanatt

SEQ ID NO: 4268 - DNA, 766 bp, Homo sapiens
  misc_feature (464)..(464): "n" may be a, t, c, g, other or unknown
  misc_feature (478)..(478): "n" may be a, t, c, g, other or unknown
  misc_feature (487)..(487): "n" may be a, t, c, g, other or unknown
  misc_feature (548)..(548): "n" may be a, t, c, g, other or unknown
  misc_feature (575)..(575): "n" may be a, t, c, g, other or unknown
  misc_feature (597)..(597): "n" may be a, t, c, g, other or unknown
  misc_feature (725)..(725): "n" may be a, t, c, g, other or unknown
  misc_feature (734)..(734): "n" may be a, t, c, g, other or unknown
  misc_feature (746)..(746): "n" may be a, t, c, g, other or unknown
  misc_feature (750)..(751): "n" may be a, t, c, g, other or unknown
ggaatttttaggtggtcacattgtaaggcatgcccaggctcatcagaaaaaaggcagttttgcatgtgtaatatgtggtaggaaatttagaaacagaggacttatgcagaagcatttgaagaatcatgttaagaagatacagaggcagcaaattgctgcagctcaacaggatgatcaggaagtcactgctttggaagaaataaattgttctagttcttccatttcatttgaaaatgggaattctgatagtaaggatttggaagtggagacacttactgcttctagtgaaggaaacaaagaagtcatccctgagcatgtggctgaattcattgaaattcccataagtgtaccagaagatgttattgaaaatgttattgaaaatggcagtcctaataattctttaaataatgttttcaagcctttaactgaatgtggggatgattatgaggaggaagaggatgaanaaggtgattatgangaagatgantatgacctgaatcaagaaacttcagtaattcataaaatcaatggaactgtgtgccatccanaagacatatatgccacagatcaagaangaaactttaagtgtcctgctcntggttgtgtccggatatttaaaagaattgggtttccaaaataaacatgcaatgacccgtacatccaaccgatttaaatgtggcgacaaacagtatgaactgggcaaaggaaatgcaaattttggcaanggaatttgngatcccacattntcannacttatggcatacta

SEQ ID NO: 4269 - DNA, 729 bp, Homo sapiens
  misc_feature (526)..(526): "n" may be a, t, c, g, other or unknown
  misc_feature (536)..(536): "n" may be a, t, c, g, other or unknown
  misc_feature (552)..(552): "n" may be a, t, c, g, other or unknown
  misc_feature (594)..(594): "n" may be a, t, c, g, other or unknown
  misc_feature (616)..(616): "n" may be a, t, c, g, other or unknown
  misc_feature (643)..(643): "n" may be a, t, c, g, other or unknown
  misc_feature (694)..(694): "n" may be a, t, c, g, other or unknown
  misc_feature (701)..(701): "n" may be a, t, c, g, other or unknown
  misc_feature (705)..(705): "n" may be a, t, c, g, other or unknown
  misc_feature (725)..(725): "n" may be a, t, c, g, other or unknown
aagtttctttgaagctagagatcttcgccagcacatgaacaaacatcttggtgtgaagccattccagtgccaattttgtgataagtgctatagttggaagaaagattggtattcccatgtgaagtctcattctgtcactgagccttataggtgtaatatatgtggcaaagaattttatgaaaaagctttgttcagaaggcatgtaaagaaagctacccatgggaagaaaggaagagcaaagcaaaacctggaacgggtgtgtgaaaaatgtggaagaaaattcactcagctaagagagtataggagacacatgaacaaccatgaaggagttaagccatttgagtgcttaacatgtggagtagcttgggctgatgcccgatctctaaaacgccatgtcagaacacatactggtgaacggccctatgtctgtcctgtatgtagcgaagcctacatagatgctcgaacactccgtaaacatatgactaaattccacagagactatgtgccttgcaaaattatgctgggnaaaaagacanccttcagtttcaaaancaaagggactcaagtgggcacatgctgttaacatcttaacancaaggcatgcaggaacaagganaagcaagtgggcctcaaggaacttgangactggtgggaagtgacaaggagaaaactattgggaaagcctccgggaaanctggttngcangctaactggaaagaggtttnccaa

SEQ ID NO: 4270 - DNA, 741 bp, Homo sapiens
  misc_feature (566)..(566): "n" may be a, t, c, g, other or unknown
  misc_feature (577)..(577): "n" may be a, t, c, g, other or unknown
  misc_feature (644)..(644): "n" may be a, t, c, g, other or unknown
  misc_feature (691)..(691): "n" may be a, t, c, g, other or unknown
  misc_feature (699)..(699): "n" may be a, t, c, g, other or unknown
  misc_feature (702)..(702): "n" may be a, t, c, g, other or unknown
  misc_feature (714)..(714): "n" may be a, t, c, g, other or unknown
taggtggcagtcgcaacccatactattcggacagatggcacagaaaccgctgcgcctcttggcttgtggagatgttgaaggaaagtttgatattttattcaatagagttcaagcaattcagaagaaaagtggaaactttgatctgctgttgtgtgtaggaaatttctttggctccacccaagatgctgaatgggaggagtataagactggcatcaagaaagctcctattcagacatatgtgcttggtgctaataaccaggaaacagtaaaatatttccaggatgctgatggatgtgaattagctgaaaacattacttatctgggtcgtaaaggtatcttcactggaagctcggggctgcagattgtgtacctcagtgggacagaatccttaaatgagccagtaccaggttatagttttagtcccaaggatgtgtcttctctgagaatgatgctgtgtacaacctcccagtttaagggtgttgatatcttgctcacatccccatggcccaagtgtgtggggaactttgggaattcttctgggagaagtggataccaaaaaatgtggntctgctttggnttccagtcttgccacgggcttgaaaccaagataccattttgctgctttgggaaagacctattaagangaggcttccaatatccgaaaccatatcattcctacaggaaaatgganagcaatgncanccgggtttaaanctcctggaaaaggttgggaaatcccag

SEQ ID NO: 4271 - DNA, 723 bp, Homo sapiens
  misc_feature (643)..(643): "n" may be a, t, c, g, other or unknown
  misc_feature (678)..(678): "n" may be a, t, c, g, other or unknown
  misc_feature (701)..(701): "n" may be a, t, c, g, other or unknown
  misc_feature (708)..(708): "n" may be a, t, c, g, other or unknown
  misc_feature (715)..(715): "n" may be a, t, c, g, other or unknown
gcacaaagatagactactgtgcctcatctaatcacggatgtcaagcacgagtgtgttaacacagatgattcctattcctgccactgcctgaaaggctttaccctgaatccagataagaaacctgcagaaggatcaactactgtgcactgaacaaaccgggctgtgagcatgagtgcgtcaacatggaggagagctactactgccgctgccaccgtggctacactctggaccccaatggcaaaacctgcagccgagtggaccactgtgcacagcaggaccatggctgtgagcagctgtgtctgaacacggaggattccttcgtctgccagtgctcagaaggcttcctcatcaacgaggacctcatgacctgctcccgggtggattactgcctgctgagtgaccatggttgtgaatactcctgtgtcaacatggacagatcctttgcctgtcagtgtcctgagggacacgtgctccgcagcgatgggaagacgtgtgcaaaattggactcttgtgctctgggggaccacggttgtgaacattcgtgtgtaagcagtgaaagattcgtttgtgtgccagtgcttttgaaggttatatactccgtgaagatgggaaaacctgcagaaggaaagatgtctgccaaagntattagaccatggggtgtgaacacattttgtgtgnacagtgatgactcatacacgttncaagtgntttggangggattcc

SEQ ID NO: 4272 - DNA, 749 bp, Homo sapiens
  misc_feature (569)..(569): "n" may be a, t, c, g, other or unknown
  misc_feature (576)..(576): "n" may be a, t, c, g, other or unknown
  misc_feature (630)..(630): "n" may be a, t, c, g, other or unknown
  misc_feature (640)..(640): "n" may be a, t, c, g, other or unknown
  misc_feature (660)..(660): "n" may be a, t, c, g, other or unknown
  misc_feature (680)..(680): "n" may be a, t, c, g, other or unknown
  misc_feature (712)..(712): "n" may be a, t, c, g, other or unknown
  misc_feature (734)..(734): "n" may be a, t, c, g, other or unknown
  misc_feature (747)..(747): "n" may be a, t, c, g, other or unknown
ttttgacttataaacaatgctgcaatgaaataattgacatatttccttgtgtacatgtgagcatttcttgagatatgtatctagaacttgaatcactggccaacaggatattcttaatcttcagtttcaccagatacttccaaattgatctccataacatgcataccaaattatattcctaccagccatttataggagttcacattttttccataccctcccaatcctgccttggcagatatgttttttccaatgaataacaatgaaattttgttttgggatttgacaaaatgattctagattcatctggaagaaaagcaagtataagtaagaaatttaaaagggacctgaaaaactaagcaatggatatatttaaaaattggtaccagtagggataaccaaatatttgttaactgtagcaagaaacaatgcatgtttttctcactggttccaccttctatctctcagtcaagccctgcccaggtgtggtaagtcctcatagtctctcactgtaggggtcctctcacatagtaagaccactctcttggagttgaatattggaaaagaangcttggncgggggcaatggctcatgcctgtggtcccagcactttggggaagctgagtcgancgggattgcntgagggcagcagttcgagancagcctggactaacatgggngatgaaagtacaaaattaactggggggtggtngggcaaggcctgcaatcccagntacccgggaaggntg

SEQ ID NO: 4273 - DNA, 688 bp, Homo sapiens
  misc_feature (645)..(645): "n" may be a, t, c, g, other or unknown
  misc_feature (650)..(650): "n" may be a, t, c, g, other or unknown
  misc_feature (670)..(670): "n" may be a, t, c, g, other or unknown
  misc_feature (675)..(675): "n" may be a, t, c, g, other or unknown
  misc_feature (682)..(682): "n" may be a, t, c, g, other or unknown
ttaatttaaaactggattgatgatcattatggtatgatatgatattaaatgtatgcattgttttgatgctatatttagtagacaggtggtagaccctgtccttaaggagctgttgtcctgaaaataagtagggcacatataaatgtccaaagagacctaaaccatttttgctgtttcctgaggatacatgtcttttgcccataactcttctttacttttgtcctgtttgtcttaaaggtagagaataaggtagacattgccagggaagccctggcacccttataccatttctttttcagctttttctctcaagtttctttcttaggaaggagttggatgagtcatcctgggatgagggtaaagaaggttatcattcttatagtgactttaagtgatggtgggcttcccttcaagggagtgtatagttttctgtggctctacagcaagacatctttactgagtaataggcaacctggatagattgcaatccactacttaaaagtacaccacctgtctttctcccagctctctgtaaaaataaaagaacaagccaaacaaatcaaaatttccatagatttgggcactggtgaatttgacaagctcctccacttttaagttcctaaagatgggataaaattggggaanaaatncagattggccttccccaaanggaangtaatangtttcc

SEQ ID NO: 4274 - DNA, 816 bp, Homo sapiens
  misc_feature (543)..(543): "n" may be a, t, c, g, other or unknown
  misc_feature (647)..(647): "n" may be a, t, c, g, other or unknown
  misc_feature (753)..(753): "n" may be a, t, c, g, other or unknown
  misc_feature (767)..(767): "n" may be a, t, c, g, other or unknown
  misc_feature (771)..(771): "n" may be a, t, c, g, other or unknown
  misc_feature (814)..(814): "n" may be a, t, c, g, other or unknown
  misc_feature (816)..(816): "n" may be a, t, c, g, other or unknown
tttttcttaggatggctggctgtggtgaaattgatcattcaataaacatgcttcctacaaacaggaaagcgaacgagtcctgttctaatactgcaccttctttaaccgtccctgaatgtgccatttgtctgcaaacatgtgttcatccagtcagtctgccctgtaagcacgttttctgctatctatgtgtaaaaggagcttcatggcttggaaggcggtgtgctctttgtcgacaagaaattcccgaggatttccttgacaagccaaccttgttgtcaccagaagaactcaaggcagcaagtagaggaaatggtgaatatgcatggtattatgaaggaagaaatgggtggtggcagtacgatgagcgcactagtagagagctggaagatgctttttccaaaggtaaaaagaacactgaaatgttaattgctggctttctgtatgtcgctgatcttgaaaacatggttcaatataggagaaatgaacatggacgtcgcaggaagattaagcgagatataatagatataccaaagaagggagtanctggacttaagctagactgtgatgctaataccgtaaacctagcaagagagagctctgctgacggagcggacagtgtatcagcacagagtggagcttctgttcancccctagtgtcttctgtaaggcccctaacatcagtagatggtcagttaacaaagccctgcaacaacatcccctgatgcaagcacttctctggaagactcctttgcncatttacaactcantggnggacaacacagctgaaaagggtcataagggagaaaggggaagnan

SEQ ID NO: 4275 - DNA, 732 bp, Homo sapiens
  misc_feature (686)..(686): "n" may be a, t, c, g, other or unknown
  misc_feature (692)..(692): "n" may be a, t, c, g, other or unknown
  misc_feature (702)..(702): "n" may be a, t, c, g, other or unknown
  misc_feature (705)..(705): "n" may be a, t, c, g, other or unknown
  misc_feature (710)..(710): "n" may be a, t, c, g, other or unknown
aatacaagtatgtagaccccatctgcaccttcgtcttctccatcctggtcctggggacaaccttgaccatcctgagagatgtgatcctggtgttgatggaagggacccccaagggcgttgacttcacagctgttcgtgatctgctgctgtcggtggagggggtagaagccctgcacagcctgcatatctgggcactgacggtggcccagcctgttctgtctgtccacatcgccattgctcagaatacagacgcccaggctgtgctgaagacagccagcagccgcctccaagggaagttccacttccacaccgtgaccatccagatcgaggactactcggaggacatgaaggactgtcaggcatgccagggcccctcagactgactgctcagccaggcaccaactggggcatgaacaggacctgcaggtggctggactgagtgtcccccaggcccagccaggactttgcctaccccagctgtgttataaaccaggtccccctcctgacctctgccccactccaggaatggagctcttcccaagcctcccatctgactacagccagggtggggactcagcgggtataaagctagtgtgaccctgctcttccagctcctgggccagctctggaagggctgtatttgggcctaatcctcaacaactgttctaccactcgcaggggcaaangtggtnaagccacggnacntcaangggggaaggctgggccccaacg

SEQ ID NO: 4276 - DNA, 558 bp, Homo sapiens
  misc_feature (306)..(306): "n" may be a, t, c, g, other or unknown
  misc_feature (363)..(363): "n" may be a, t, c, g, other or unknown
  misc_feature (467)..(467): "n" may be a, t, c, g, other or unknown
  misc_feature (489)..(489): "n" may be a, t, c, g, other or unknown
  misc_feature (501)..(501): "n" may be a, t, c, g, other or unknown
  misc_feature (519)..(519): "n" may be a, t, c, g, other or unknown
  misc_feature (529)..(529): "n" may be a, t, c, g, other or unknown
ttccgctgctccaggtcccaggctcagccagagcaaaggctgtggaagggggtgttccaagcaccatcagtgtttccccaccatcacccagacccaagtgcagggactgaccttcccggtttgccaagtactgtcccagttttagcactgaaagtcccacatctcaggaaacccttcagtcctgcgtaagcaaggacaactggtgaccccagatcgaagctgtgcaattaggaaggggactcctctcagcccctggccagtgcttagctgctttggagatgagactcgtctcctgaatctgagaantacagtcatttgctgcaggaatcaactcgtcccctagatatcggttcccttattcancaactgtggcctgctataggagtcaatttcttgttacctttggtcaggggaataagacttacttttgagtttttcatggttttcccagtcctccccgcccgccncaacaagcttcccctctctaantgcaacaggaancctcctcttaaagggaangttccctggnctctatctcactgctcttttcccagagga

SEQ ID NO: 4277 - DNA, 753 bp, Homo sapiens
  misc_feature (617)..(617): "n" may be a, t, c, g, other or unknown
  misc_feature (698)..(698): "n" may be a, t, c, g, other or unknown
  misc_feature (701)..(701): "n" may be a, t, c, g, other or unknown
  misc_feature (720)..(720): "n" may be a, t, c, g, other or unknown
  misc_feature (727)..(727): "n" may be a, t, c, g, other or unknown
  misc_feature (751)..(751): "n" may be a, t, c, g, other or unknown
gagtaaaaccgccgcccgggagaagactgaaggagcagttgccgccgttggcggcggcccgagcagttttcgctgctgctacggctgttgccatgaggcgaggctagggaggacctcacttccccggggtgtaataatgttaactgagttatattgggagctagtttcaagatgaaatactaattctaagccagtctatccatatggggatggggaagccttggcattgtcctttttctgataacctttggaccctttgtaatattttatttgacattttatatcctctgctttgtgggtgggggtttagtggttactctcctgcttggaaaaacaaactcagagaagtacctagaacagtgtgaacactcatttcttcctccaacatcacctggggttcctaagtgcttagaagaaatgaaacgggaagccaggactattaagattgatagaagattgacgggtgccaatataattgatgaatctctccagcaagttatccagttttccttgagggattatgtccagtattggtattatacactaagcgatgatgaatcttttcttcttgaaattaggcagactcttcaaaacgcactcattcagtttgctactangtcaaaagaaatagactgggcaaccttattttactacacgcattgtagattgactttggcacacacttacgagtattcaanaanggtcaaacagaaaataacnaggaaangatgatcaaagtgaaaaggtacanca

SEQ ID NO: 4278 - DNA, 776 bp, Homo sapiens
  misc_feature (240)..(240): "n" may be a, t, c, g, other or unknown
  misc_feature (542)..(542): "n" may be a, t, c, g, other or unknown
  misc_feature (565)..(565): "n" may be a, t, c, g, other or unknown
  misc_feature (711)..(711): "n" may be a, t, c, g, other or unknown
  misc_feature (723)..(723): "n" may be a, t, c, g, other or unknown
  misc_feature (742)..(742): "n" may be a, t, c, g, other or unknown
  misc_feature (773)..(773): "n" may be a, t, c, g, other or unknown
  misc_feature (775)..(775): "n" may be a, t, c, g, other or unknown
agcagtcagccggccggagacagagacttcacgactcccagtctcctcctcgccgcggccgccgcctcctccttctctcctcctcctcttcctcctcctccctcgctcccacagccatgtctgcttagaccagagcagccccacagccaactagggcagctgccgccgccacaacagcaaggacagccgctgccgccgcccgtgagcgatgacaggagtgtttgacagaagggtccccancatccgatccggcgacttccaagctccgttccagacgtccgcagctatgcaccatccgtctcaggaatcgccaactttgcccgagtcttcagctaccgattctgactactacagccctacggggggagccccgcacggctactgctctcctacctcggcttcctatggcaaagctctcaacccctaccagtatcagtatcacggcgtgaacggctccgccgggagctacccagccaaagcttatgccgactatagctacgctagctcctaccaccagtacggcggcgcctacaaccgcgtcncaagcgccaccaaccagccaganaaagaagtgaccgagccccaggtgagaatggtgaatggcaaaccaaagaaagttcgtaaacccaaggactatttattccagctttcagctgggcgcattacagagaaggttcacaagactcagtacctcgccttgccgggacgcgncgagctggccgnctcgctgggattgacacantacaggtgaaaaatccgggtttcagaataanang

SEQ ID NO: 4279 - DNA, 812 bp, Homo sapiens
  misc_feature (671)..(671): "n" may be a, t, c, g, other or unknown
  misc_feature (747)..(747): "n" may be a, t, c, g, other or unknown
  misc_feature (771)..(771): "n" may be a, t, c, g, other or unknown
  misc_feature (792)..(792): "n" may be a, t, c, g, other or unknown
  misc_feature (797)..(797): "n" may be a, t, c, g, other or unknown
  misc_feature (806)..(806): "n" may be a, t, c, g, other or unknown
tctctactaaaaatacaaaaaaattagctgggcgtggtggcacgcgcctgtagtcccagctacttgggaggctgaggcaggagaatagcttgaacccaggaagcggaggttgcagtgagccgaggtcatgccactgcactccagcatgggcaatagagcgagactctgtccccccggaaaaaaagaacaagggctaaattcaaatcaaattttccctgtaccctaagaaaaataattaggccgggagatgtttgactaagtgagtaggcattgttctgtgacggtctgagccccagacctttcctctggatgaatgctgtcccaggtaatgaaatgacttcacttattaatatataggtacacagagttcaggtagatgtggaatgaatggggactcgccccgtctgcccttgaatgtatttagtggtttatgtgaaatgtacctttcaaagttgtctgtatgtttcatactctgggggtgggaatataaatcattgcagcctttttgtagggcactttggcagtactcatcaaaatatgcgatgtgcagatgcttagccagcaactccgcttctatgaatctagccaacagaaatacttgtagaagtgtgcagctataaatgtccacaagaggctcagagcctcattgtttttaatagtgaacagttggnaaccaaatagatgtctgtcagtagggatgtggcagaattgtggcatgttttatatgggtataaaaaagtattgganggaacataaacccaactggttggnaagaagttaacctctgggatncaggnataaggtanggggtt

SEQ ID NO: 4280 - DNA, 750 bp, Homo sapiens
  misc_feature (517)..(517): "n" may be a, t, c, g, other or unknown
  misc_feature (522)..(522): "n" may be a, t, c, g, other or unknown
  misc_feature (670)..(670): "n" may be a, t, c, g, other or unknown
  misc_feature (709)..(709): "n" may be a, t, c, g, other or unknown
  misc_feature (715)..(715): "n" may be a, t, c, g, other or unknown
  misc_feature (725)..(725): "n" may be a, t, c, g, other or unknown
  misc_feature (741)..(741): "n" may be a, t, c, g, other or unknown
aaaacaactacgtgctgcggtgtggttggtggtgagatgacgaccttagtgctggataatggagcttacaacgccaaaatcggttacagccatgaaaatgtgtcggttattcctaattgtcagttccggtcaaaaacagcacgtcttaaaacttttactgccaaccagatagatgaaataaaagacccttctggactcttttacatcctcccttttcaaaagggctacttggtgaattgggatgttcagagacaagtttgggattacctttttggaaaagaaatgtatcaggttgattttttagatactaatattattatcactgaaccatactttaacttcacttcaattcaagaatcaatgaatgaaattctatttgaagaataccagtttcaagcagtattaagagtaaatgctggggctctcagtgcacataggtatttccgagataatccttcccgaattatgctgtatcattgttgatagtggatattcctttacacatatagttccttantgtanaagtaaaaagaaaaaagaagcaattattcggataaatgtgggaggaaaactcttaaccaatcatctaaaggagatcatatcttacaggcagctacatgttatggatgaaacacatgtgattaatcaagtgaaagaagatgtatgccanggtgtcccaaggatttttatagagacatggatattgcanagttgnaaaggagaangaaaattcaagtaatnatagaacta

SEQ ID NO: 4281 - DNA, 823 bp, Homo sapiens
  misc_feature (733)..(733): "n" may be a, t, c, g, other or unknown
  misc_feature (741)..(741): "n" may be a, t, c, g, other or unknown
  misc_feature (762)..(762): "n" may be a, t, c, g, other or unknown
  misc_feature (784)..(784): "n" may be a, t, c, g, other or unknown
  misc_feature (819)..(819): "n" may be a, t, c, g, other or unknown
aacaactttagtacttggctttgtgtgaaagaaaacagaattccctatgtaatacccaacacaccatactcatgcaataaatattggtgaatacaggtgctgtactagagatgacaaaagtacaattaagagtcctatttttcactggatctactagttgaataaggatgccatatactaaagcatagaaaagttaaatatccattccctataaaatctaagaaatactatgcagtaatatgtcataaattgccaaataataatttactgtaatacagaaaaagatctgcacctatgtatgaaaagattctcagaaaactaagaataaagggaaattctaacttgatacatcctgtgcacctcaagtctatagcaaaagttacatttcattgagaaattttgagcacaatttaagtaagaggagaagataagaaagaagaaataaagttcactattcgtatatgatatagtcatttgtataaaatccaaaacagcaaactactagaactgagaaaattcagcaagggttgtctaatataagattaatttataaaaagcagttgttttttctataccgagagatcagcaatcttttttaaatgttttcagctttgtgggccatatggtctctgtcataactataactgctgatgtagtatgaaagcagcttagacatcatgtcaagacatgggcaatgcctgtgttccaataaaagctttctttgtagtaaatngcaagccntgggattttgggcctgtgagnccataaaatttctaaacccccngccaatttatcaaggggggaaaccccaacttttgnaaaa

SEQ ID NO: 4282 - DNA, 521 bp, Homo sapiens
  misc_feature (34)..(34): "n" may be a, t, c, g, other or unknown
  misc_feature (279)..(279): "n" may be a, t, c, g, other or unknown
  misc_feature (432)..(432): "n" may be a, t, c, g, other or unknown
  misc_feature (451)..(451): "n" may be a, t, c, g, other or unknown
  misc_feature (457)..(457): "n" may be a, t, c, g, other or unknown
  misc_feature (508)..(509): "n" may be a, t, c, g, other or unknown
tttaattgatgctaaccatagtgatgggagatcnttgcttatacaggagaacataatttattatcttattttaaaataaacattacactaaaaccccacatcatttcaagaaatgtgggcaatagtagttattttattattatacgtaacttttaaaaataacaagatagacaaaatgtttgagctacatgcacatgaaaagtgaaatttacaaaaagcttaagaaatggatccaaaagtatatttaagcacttcctctgaaaccctcataactaacanaatatgaaaaaacaataaatgtggtttataaaccagaaagcctaaaaaatctcttctaatgctatttttattaaaaatgtttactcattaatattttaattggaactttgcatcatctcaggtagaacgtgagtctcctgtcactatatttanacaagaatgtcctaaaagnttgtcnattttctgaaaaatagcctctgctttcccaatggttgctgcttgcttactnngaaatatgcaaa

SEQ ID NO: 4283 - DNA, 698 bp, Homo sapiens
  misc_feature (646)..(646): "n" may be a, t, c, g, other or unknown
  misc_feature (674)..(674): "n" may be a, t, c, g, other or unknown
  misc_feature (679)..(680): "n" may be a, t, c, g, other or unknown
  misc_feature (696)..(696): "n" may be a, t, c, g, other or unknown
ctcggggactggcatcacgggagagtggccaggcgccccccacccgcagggcatgcccacctggacaggactgaaggctgctgccacctctgcagcgcctgccattctcacacccacccctctgcccagttttgctgcgtcgcgtgaaggatcctgcgctggcgcccccacctggtgatgccgagtccctgggggtggtttgctgtgactgcatgcggcgcgcagcgggtatatgtgcaggggaggaggagctatgtgcgcaggggaggaggagagatgtgcccaggggaggggcctgcaactctggtcactagaggtttggggcatagggtttgggaaggccaggaagcgtaaaggggcttctgggggtcccgaagtagcacgggagggtggggcagggctggtcacgcctcctgtgctcgggcagaacaacttcgaggagccagtggcactgcaggagatggacacaagcaacggggtcctattgcccttttacgatcccgactccagcatcgtctacctgtgtggcaagggcgacagcagcattcggtactttgagattaccgacgagccgcctttcgtgcactacctgaacacgttcagcagcaaagagccgcaacggggcatggggtttcatgcccaaaangggactgggattgtcaagcaaagtgttnagatnnccccggtttctacaanct

SEQ ID NO: 4284 - DNA, 780 bp, Homo sapiens
  misc_feature (603)..(603): "n" may be a, t, c, g, other or unknown
  misc_feature (614)..(614): "n" may be a, t, c, g, other or unknown
  misc_feature (661)..(661): "n" may be a, t, c, g, other or unknown
  misc_feature (725)..(725): "n" may be a, t, c, g, other or unknown
  misc_feature (736)..(736): "n" may be a, t, c, g, other or unknown
  misc_feature (743)..(743): "n" may be a, t, c, g, other or unknown
  misc_feature (770)..(770): "n" may be a, t, c, g, other or unknown
  misc_feature (780)..(780): "n" may be a, t, c, g, other or unknown
atcatatgatatctaagtccacattaagatgttccccaaaatatttgtttttgaaccaggattcagtcaaggctcgtgcatttcatttagttatatttctttagtctcttaatgtaaaactttccacctattatttttcccctgtgtcattgactttctaaagagaccaggcctgttctaccaggatttttaaaagggtgacattgccagagggaagttaatgtttctctgaaggtatatgtgcgtttgtatatgtaagtcgatgtggtagctaatactgttcttaaacatttataaaaataagttttggcattaagtactagagcatatattgtgtaaatgtttccgccagccaatgtggctgatatctgttttaaaggtctcatttaaaatttagtgtttttagtataagttactttttggggacataaatatgcatatgatttgtttaaaaatttggattgtaaataaaggtttatctacctatgtgattcagttaaatttttaagtgttaagtggtgtgaattttgtgacactgggagaaagtttgcatatcaggtatgaccttagaaagtaacaaatagatttggtgcattacatcangcatgtggaangatagatttgtccttctgttcatgaagaggtcatttacaaatttatnaggagctaaactgactaagtacttgggaaatctgtacttgtaagctaatcacatttacccaaanccggatttagnaatatanaagggcttttagggaattgtttggaanttttaaaaan

SEQ ID NO: 4285 - DNA, 741 bp, Homo sapiens
  misc_feature (659)..(659): "n" may be a, t, c, g, other or unknown
  misc_feature (681)..(681): "n" may be a, t, c, g, other or unknown
  misc_feature (687)..(687): "n" may be a, t, c, g, other or unknown
  misc_feature (723)..(723): "n" may be a, t, c, g, other or unknown
  misc_feature (740)..(740): "n" may be a, t, c, g, other or unknown
agattcactttgtgtttatgcatgcatgcacgcgtgcacacaattctatcagcagctgtaaactacccacatattttcttaatctcattttttcagtttttcttcatctttaaaagaggttacatttcattcctggtcaactcttaaaaagaattatgtaatgttgggccttcatattaaagagagagactggttataagatcctttacagtccattcattttattctgatgtctaaccagatagacactagcaagcaaaacttccctcttaatcctggaccaaatgcataattttactgtcactttcaaaaatctgttatgactgaatcaaaatccttttaaagaaaggaaaaagctccttttgtgtcaaatagttgaacaacatgaaaacagtatgagccggttaaagatagattgaatttttactttacacatatgaaaaacagtaagttttgactgctgtgtatgttattcatgttaatatgtgctcagttattcactattgttaatccacatataatcagttgctatccctggttagacacactatggaacttgaaatgcacaatatttacattgttagaggcttctatccaaatatctgcattcctttaaaatgtgaactatttgctggtgattaaccaaaagggaagattangtcatcagtgggacattttagntttaanggaaacaaattattaagaaatggaatagaaaagggngtcctttcctttggggna

SEQ ID NO: 4286 - DNA, 786 bp, Homo sapiens
  misc_feature (644)..(644): "n" may be a, t, c, g, other or unknown
  misc_feature (695)..(695): "n" may be a, t, c, g, other or unknown
  misc_feature (746)..(746): "n" may be a, t, c, g, other or unknown
  misc_feature (751)..(751): "n" may be a, t, c, g, other or unknown
  misc_feature (753)..(753): "n" may be a, t, c, g, other or unknown
  misc_feature (755)..(755): "n" may be a, t, c, g, other or unknown
ttcaaagaaagatgtcaccacaaaattaaaagctatgcaggaatttggaaccatgtgtacagagagagacacagaaactgtgaaaggagttcttccatattggccaagaattttttgcaaaatttcacttgatcatgaccgtcgcgtccgagaagccacacaacaagcttttgaaaaacttatccttaaagtaaagaaacagttggctccctacttaaaaagtttaatgggagattggctaatggctcagtgtgatacttacacaccagctgcgtttgcagcaaaagatgcatttgaagcggcttttcctccaagcaagcaacctgaagccatagcattttgtaaggatgaaattacaagtgtgctgcaggatcatcttataaaagaaacacctgatacactcagtgacccgcaaactgttccagaggaagaaagagaagctaaattctaccgggttgtaacttgttccttattggcattaaagagattactttgccttttacctgataatgagcttgattctctggaggagaaatttaagtctcttttatcacagaataagttttggaagtatggaaaacacaagtgtacctcaagattcgctcagcttattttgagttagtctctgcattgtgccaacgcantccacagttgatgaaagaggaagcatccaaagtgagcccatcagttctacntagcaattgatgacagtgacccaatttgtctgcccaagctctccggggaanctgtncncnatacacttacaactaattggagggactggtt

SEQ ID NO: 4287 - DNA, 726 bp, Homo sapiens
  misc_feature (640)..(640): "n" may be a, t, c, g, other or unknown
  misc_feature (698)..(698): "n" may be a, t, c, g, other or unknown
  misc_feature (706)..(706): "n" may be a, t, c, g, other or unknown
  misc_feature (710)..(710): "n" may be a, t, c, g, other or unknown
  misc_feature (715)..(715): "n" may be a, t, c, g, other or unknown
agaagctttttcatttattcgtccaagcagcatcttgtactagtcctgactggaaatttatcagtggtgtggttcctcgtgcaacaaatatgaacgtctgaaggcaaaccaggtagctactggcattcggtacaatgaaaggaaaggaaggtctgaactaattgtcgtggaagaaggaagtgaaccctcagaacttataaaggtcttaggggaaaagccagagcttccagatggaggtgatgatgatgacattatagcagacataagtaacaggaaaatggctaaactatacatggtttcagatgcaagtggctccatgagagtgactgtggtggcagaagaaaaccccttctcaatggcaatgctgctgtctgaagaatgctttattttggaccacggggctgccaaacaaattttcgtatggaaaggtaaagatgctaatccccaagagaggaaggctgcaatgaagacagctgaagaatttctacagcaaatgaattattccaagaatacccaaattcaagttcttccagaaggaggtgaaacaccaatcttcaaacagttttttaaggactggagagataaagatcagagtgatggcttcgggaaagtttatgtcacagagaaagtggctcaaatnaaacaaattccctttgatgcctcaaaattacacaagttccccgcagatggcaacccangcacaatntggngggangatggttctgg

SEQ ID NO: 4288 - DNA, 707 bp, Homo sapiens
  misc_feature (597)..(597): "n" may be a, t, c, g, other or unknown
  misc_feature (636)..(636): "n" may be a, t, c, g, other or unknown
  misc_feature (663)..(663): "n" may be a, t, c, g, other or unknown
  misc_feature (675)..(675): "n" may be a, t, c, g, other or unknown
  misc_feature (699)..(699): "n" may be a, t, c, g, other or unknown
  misc_feature (704)..(704): "n" may be a, t, c, g, other or unknown
aaacaagagaagcgagatggttccaagcacaaatgatccttatgtggcttttagaaggcgtactgaaaaaatgcagactcgaaaaaatcgcaaaaatgatgaagcctcttacgaaaaaatgcttaagctgcgacgagatctaagtcgagctgttactattctagagatgataaaaagaagagaaaaaagtaaaagagagctattgcacttaacactggaaattatggaaaagaggtataatttgggcgactacaatggagagatcatgtctgaggttatggcacagagacagccaatgaaacctacttatgccatccccatcatccctattactaatagcagtcaatttaaacaccaggaagcaatggatgtgaaggagttcaaagttaataagcaagataaagccgatcttatccgaccgaaacggaaatatgaaaagaagcccaaagtcttaccatcgtctgccgctgctactccccaacagacgagtcctgctgcactgccagtcttcaatgctaaagatctgaatcagtatgactttcccagctcagacgaagaactctctcccaggttttgtctggctcttcggaagctganggaagacaatgatcctgatggtccttttgccttccgtanggaaagcaggctgtcagtactaaggcncctcacttagancaaaactgggaactgggccttggncaatnccc

SEQ ID NO: 4289 - DNA, 909 bp, Homo sapiens
  misc_feature (555)..(555): "n" may be a, t, c, g, other or unknown
  misc_feature (742)..(742): "n" may be a, t, c, g, other or unknown
  misc_feature (749)..(749): "n" may be a, t, c, g, other or unknown
  misc_feature (766)..(766): "n" may be a, t, c, g, other or unknown
  misc_feature (772)..(772): "n" may be a, t, c, g, other or unknown
  misc_feature (847)..(847): "n" may be a, t, c, g, other or unknown
  misc_feature (855)..(855): "n" may be a, t, c, g, other or unknown
  misc_feature (894)..(894): "n" may be a, t, c, g, other or unknown
  misc_feature (897)..(897): "n" may be a, t, c, g, other or unknown
  misc_feature (906)..(906): "n" may be a, t, c, g, other or unknown
agtggccggaacccttgagaccagaggcttaccatgctgctccctaggagggccgggaactgctgacgtgaccactggacagttattcgtgtctcttacaattaccaaacagaatggacaagcttaataaaataaccgtccccgccagtcagaagttgaggcagcttcaaaagatggtccatgatattaaaaacaatgaaggtggaataatgaataaaatcaaaaagctaaaagtcaaagcacctccaagtgttcctcgaagggactacgcttcagagagccccgctgacgaagaggagcagtggtccgatgactttgacagcgactatgaaaatccagatgagcactcggactcagagatgtacgtgatgcccgccgaggagaacgctgatgacagctacgagccgcctccagtagagcaggaaaccaggccggttcacccagccctgcccttcgccagaggcgagtatatagacaatcgatcaagccagaggcattccccacccttcagcaagacacttcccagtaagcccagctggccttcagagaaagcanggctcacctccaccctgccggccctgactgctttgcagaaacctcaagtcccacccaaacccaaaggcctccttgaggatgaggctgattatgtggtccccgtggaaagataatgatgaaaactatattcatcccacagaaagcagttcaactccaacctgaaaaagctcccaagggtgaatagatnaaccaangccaaatttcctcaaangcccgnctctcctccaaggaacaagcttaaggtccaaaacagtgggggcctggggaaaccaagtcacctccaacaaagctncaacaatnccccgttgccaaaggggcccggggaaaaaaaccaacgancanccactggangac

SEQ ID NO: 4290 - DNA, 729 bp, Homo sapiens
  misc_feature (499)..(499): "n" may be a, t, c, g, other or unknown
  misc_feature (562)..(562): "n" may be a, t, c, g, other or unknown
  misc_feature (620)..(620): "n" may be a, t, c, g, other or unknown
  misc_feature (677)..(677): "n" may be a, t, c, g, other or unknown
  misc_feature (694)..(694): "n" may be a, t, c, g, other or unknown
  misc_feature (705)..(706): "n" may be a, t, c, g, other or unknown
  misc_feature (721)..(721): "n" may be a, t, c, g, other or unknown
gtagaaaaccaagagtgagaaggagttactgtgccggctgcagaagctgcacctccagcaccagaacgtcacatgtgagaaggaaaagctgctggaacggcagcagcagctgcaggaggagctgcagtgccatgaggcagagctgcagcacctcagggatacggtggcctccttcaaagagagcaatgagaaggacacagagacgcacgctcagcttcaggagatgaagcagctgtaccaggtcagcaaggacgagctggagcggcagaagcacatgtatgaccagctggagcaggacctcctgctctgccagctggagctgaaagagctcaaggcctcccaccccattccggaggacaaaggaaagtgtgctaataagtgtgacacactgctgtccagactgacagaattgcaggaaaagtacaaggccagccagaaggagatggggcagctgcagatggagcagtgtgagctcctggaggatcagaggaggatgcangaggagcaaggccagctgcaggaagagctgcacaggctcacactgccactgccaaagagtggnctcttactcaagagtcaggagctactcaccaagttagaagacctgtgtgaagctgcanctgctctaccaaggcatgcaaggagggaacagaagaagcttgattcaagaacccaanactggtgtatttaaaangaacaattttnnagattccaacgaaanaagctggc

SEQ ID NO: 4291 - DNA, 836 bp, Homo sapiens
  misc_feature (701)..(701): "n" may be a, t, c, g, other or unknown
  misc_feature (777)..(777): "n" may be a, t, c, g, other or unknown
  misc_feature (789)..(789): "n" may be a, t, c, g, other or unknown
  misc_feature (820)..(821): "n" may be a, t, c, g, other or unknown
  misc_feature (824)..(824): "n" may be a, t, c, g, other or unknown
aaccaattgcaccacgaccggatggaagagcccagctgacacaaccaagacgagtctcagtgtctagggaagcttggggttctgctccttttacttcaggcgaacctgaactcagttaatgcaattttgaagcatgccctgaatagattcagtcattatcaagtcaaactaaaaacggtgaaaggttgcgactattaccaaataggaaaaacctgaagacataagaactacacatgaggaatatgtcatttagcactttcactttttgatctccacagaagacaatgagaagtcataccataacaatgacgacaacttcagtcagcagctggccttactcctcccacagaatgcgctttataaccaatcatagcgaccaaccgccacaaaacttctcagcaacaccaaatgttactacctgtcccatggatgaaaaattgctatctactgtgttaaccacatcctactctgttattttcatcgtgggactggttgggaacataatcgccctctatgtatttctgggtattcaccgtaaaagaaattccattcaaatttatctacttaacgtagccattgcagacctcctactcatcttctgcctccctttccgaataatgtatcatattaaccaaaacaagtggacactaggtgtgattctgtgcaagggtgtgggaacactgttttatatgaacatgtanattagcattaatttgcctggattcatcagtttggattgctatataaaaattatccggtctatacaagcaaccgganggcaataacaancaagcaaaagtatttaggtccggttgtaaanntangggatgccttgc

SEQ ID NO: 4292 - DNA, 897 bp, Homo sapiens
  misc_feature (83)..(83): "n" may be a, t, c, g, other or unknown
  misc_feature (647)..(647): "n" may be a, t, c, g, other or unknown
  misc_feature (684)..(684): "n" may be a, t, c, g, other or unknown
  misc_feature (707)..(707): "n" may be a, t, c, g, other or unknown
  misc_feature (770)..(770): "n" may be a, t, c, g, other or unknown
  misc_feature (793)..(793): "n" may be a, t, c, g, other or unknown
  misc_feature (841)..(841): "n" may be a, t, c, g, other or unknown
  misc_feature (873)..(873): "n" may be a, t, c, g, other or unknown
  misc_feature (876)..(876): "n" may be a, t, c, g, other or unknown
  misc_feature (886)..(886): "n" may be a, t, c, g, other or unknown
  misc_feature (896)..(896): "n" may be a, t, c, g, other or unknown
aaatacaggttgacaagtgctaagagagaagtcagaggctgtgggaacagagaggaggagtatctaaccagcctggagtatcnggaagacttcctgaaggaggagaaaacacctgggctaaatcttaaaggaagaccagaagctacccagggaaagaagtgaaggaaggcattataaacagagaggccaggagattccagcctcagcattcccagagaaggcccaggatctccctgagaggcccagttggtgtttgtggaatcatcgctcctctggtgatcacgcagtttgcctcactttctccatggagctctttgctaaaggacattctcctccagctgtgaaggaaaagcccaacaaaaggcagggtactttgttctaactgaggatgtctactgacacagccaagctgtaaagcagaccacggacggcagtgcagcggggagaacaactctacatctggttggaggtggagtaatgtccagtctgggcacagagagatggcaggtgtgcagctgcactcagcatgggatagagcaccacctgccaggccaagaacagaaagaagggcgacggagactggcagagaaacagcaattactgctcagtgagaagtaaacagcgtctgcttccaaaggctttacggnccagaaaagcccacaggaaatagctcctgcttcccancctggagggtcctcatgcactanccctccctggctgcaatttttgatgggttttcgcatatttacaggaatttgtgcaaccatcancatgatcaagtccttagaaagangtttaatcaacccctgaaccccagaaaaactccggttattcaattaanaagtcaatcccctttccccttttcaacccctnctncaaacaattnagggaaaccnc

SEQ ID NO: 4293 - DNA, 739 bp, Homo sapiens
  misc_feature (687)..(687): "n" may be a, t, c, g, other or unknown
  misc_feature (691)..(691): "n" may be a, t, c, g, other or unknown
  misc_feature (695)..(695): "n" may be a, t, c, g, other or unknown
  misc_feature (719)..(719): "n" may be a, t, c, g, other or unknown
  misc_feature (729)..(729): "n" may be a, t, c, g, other or unknown
acaagaacacccaagactacaagcagttcattgtttttacagatagacttcagccaaccactgaagcagcagagatggaatttttaaatagacacaaactagagacagttcctttggtaaggcacaaaggtgaggcttctcagccccatagtggggctgcatgcatacagagaaggtctccacctcgggacagcttcttgaatccggtggatatcaactgtcactgtgtgtcagaatcaccttggggcttttaaaaaataatgatgcttgggcacccactcccagagctcaagtttacctgatctaaggcatgtgcctgggcattggtgtttctttagagcgcctccgtcccaggtgaagctaatggatagccagccctactttacgaatgaaccacagctcaaaatcttgtataaacaatttctctctccaacaccttatgtactcagttccactggatgtcttgcgctttatatgcttgaaactgagttcttgatttgggacccttccctacctggcccttgctcagggttccccatcttggtgagctgcactacccaagcattctgtagtgaccaagaatcccaaagaactccccttcaatctcaattctctgccatcttctcccctgcccgcccatatacaattcgttctcggtggctgaggctattactttccaactggganctangatnatgtccaacggggtccgtcaaacntccccctggnctttctggaa

SEQ ID NO: 4294 - DNA, 519 bp, Homo sapiens
  misc_feature (432)..(432): "n" may be a, t, c, g, other or unknown
  misc_feature (489)..(489): "n" may be a, t, c, g, other or unknown
  misc_feature (492)..(492): "n" may be a, t, c, g, other or unknown
  misc_feature (498)..(498): "n" may be a, t, c, g, other or unknown
  misc_feature (504)..(504): "n" may be a, t, c, g, other or unknown
gttttccggcgcggcccagcgagctcggcaacctcggcgcagcgagcgcgggcggccagccagggccagggggcggtggcggccaaggtccgaccgggtgccagctgttcccagcccccgcctcgggcccgccgccggcgccgccatgggcaagaagcacaagaagcacaaggccgagtggcgctcgtcctacgaggattatgccgacaagcccctggagaagcctctaaagctagtcctgaaggtcggaggaagtgaagtgactgaactctcaggatccggccacgactccagttactatgatgacaggtcagaccatgagcgagagaggcacaaagaaaagaaaaagaagaagaagaagaagtccgagaaggagaagcatctggacgatgaggaaagaaggaagcgaaaggaagagaagaagcggaagcnaagagagggaacactgtgacacggagggagaggctgacgactttgatcctggggaanaangtggangtgganccgcccccagatcgg

SEQ ID NO: 4295 - DNA, 783 bp, Homo sapiens
  misc_feature (595)..(595): "n" may be a, t, c, g, other or unknown
  misc_feature (598)..(598): "n" may be a, t, c, g, other or unknown
  misc_feature (642)..(642): "n" may be a, t, c, g, other or unknown
  misc_feature (650)..(650): "n" may be a, t, c, g, other or unknown
  misc_feature (743)..(743): "n" may be a, t, c, g, other or unknown
  misc_feature (767)..(768): "n" may be a, t, c, g, other or unknown
  misc_feature (770)..(770): "n" may be a, t, c, g, other or unknown
  misc_feature (778)..(778): "n" may be a, t, c, g, other or unknown
gtgatcctggtgttgatggaagggacccccaagggcgttgacttcacagctgttcgtgatctgctgctgtcggtggagggggtagaagccctgcacagcctgcatatctgggcactgacggtggcccagcctgttctgtctgtccacatcgccattgctcagaatacagacgcccaggctgtgctgaagacagccagcagccgcctccaagggaagttccacttccacaccgtgaccatccagatcgaggactactcggaggacatgaaggactgtcaggcatgccagggcccctcagactgactgctcagccaggcaccaactggggcatgaacaggacctgcaggtggctggactgagtgtcccccaggcccagccaggactttgcctaccccagctgtgttataaaccaggtccccctcctgacctctgccccactccaggaatggagctcttcccagcctcccatctgactacagccagggtggggactcagcgggtataaagctagtgtgaccctgctcttccagctcctgggccagctctggaagggctgtatttggggcctaatcctcagcaactgttctgccactcncangggcaaaggtggtgagccacgggacgtccaaggggaggctgggncccagcgngcccatactgcctgcctcatgccccattctcaaccctggctgggccttttgcctttaatgaaatctggagccccctccaatctgccctaatangcaattaggcaaccgggggggttnnanggaacccntccaa

SEQ ID NO: 4296 - DNA, 702 bp, Homo sapiens
  misc_feature (572)..(572): "n" may be a, t, c, g, other or unknown
  misc_feature (608)..(608): "n" may be a, t, c, g, other or unknown
  misc_feature (613)..(613): "n" may be a, t, c, g, other or unknown
  misc_feature (629)..(629): "n" may be a, t, c, g, other or unknown
  misc_feature (651)..(651): "n" may be a, t, c, g, other or unknown
  misc_feature (693)..(693): "n" may be a, t, c, g, other or unknown
agagagctgtttactaggcacgactgcgaaggcaagggggcaccagctcaggactgcatctgcctgccatttcccttccactcctcctttctggagtctgacattagaaagccagcgagaaggaagattcaaacaaccaaccctgatttcctgcttctccttttcatgagtgttcctgtggtctctgcacctcctttctgtcccccggcagagggcagtagagatggccggcccaaggcctcggtggcgcgaccagctgctgttcatgagcatcatagtcctcgtgattgtggtcatctgcctgatgttatacgctcttctctgggaggctggcaacctcactgacctgcccaacctgagaatcggcttctataacttctgcctgtggaatgaggacaccagcaccctacagtgtcaccagttccctgagctggaagccctgggggtgcctcgggttggcctgggcctggccaggcttggcgtgtacgggtccctggtcctcaccctctttgccccccagcctctcctcctagcccagtgcaacagtgatgagagagcgtggcggctggcantgggcttcctggctgtgtcctctgtgctgctggcangcggnctgggcctcttcctcncctatgtgtggaaatgggtcangctctccctccccgggggcctggggtttctagctctgggcancgcccaagg

SEQ ID NO: 4297 - DNA, 629 bp, Homo sapiens
  misc_feature (540)..(540): "n" may be a, t, c, g, other or unknown
  misc_feature (565)..(565): "n" may be a, t, c, g, other or unknown
  misc_feature (574)..(574): "n" may be a, t, c, g, other or unknown
  misc_feature (594)..(594): "n" may be a, t, c, g, other or unknown
  misc_feature (628)..(628): "n" may be a, t, c, g, other or unknown
aatgcatgccgggcactgagccagcatctgccaagaaactgggaccaccacagaccagctcttgaggcaaagcttgaacaccatcagtcaagagtggttccgcgtctccagccggaagtcgtctagccccgccgtggtggcctcctacctccacgaggtccagcctcactccccacacttcctgaaactgcttgtcaacttggccgatcacaacgggaacacggcccttcactacagcgtgtcccactccaacttctccatcgtgaagctgctgctggagacaggcgtctgcaatgtggaccatcagaacaaagctggctacactgccgtaatgatcactcccttggcttccgcagagaccaatgaagacatggctgttgtctggaagctcttaagagaaggaaatgtgaacattcaagctactcagggaggccagactgcgctgatgctgggagtcagccacgacagggaggacatggttcaagcgctgcttagctgccaggcagatgtcaatctgcaggaccacgatggatcctcggncctcatgctggcctgtcaccatggnaacgtgganctggtgcggctgctcctggnacacccagcctgcgacagcaacctgactaacaang

SEQ ID NO: 4298 - DNA, 805 bp, Homo sapiens
  misc_feature (529)..(529): "n" may be a, t, c, g, other or unknown
  misc_feature (654)..(654): "n" may be a, t, c, g, other or unknown
  misc_feature (668)..(668): "n" may be a, t, c, g, other or unknown
  misc_feature (683)..(683): "n" may be a, t, c, g, other or unknown
  misc_feature (693)..(693): "n" may be a, t, c, g, other or unknown
  misc_feature (748)..(748): "n" may be a, t, c, g, other or unknown
  misc_feature (763)..(763): "n" may be a, t, c, g, other or unknown
  misc_feature (789)..(789): "n" may be a, t, c, g, other or unknown
  misc_feature (797)..(797): "n" may be a, t, c, g, other or unknown
  misc_feature (800)..(800): "n" may be a, t, c, g, other or unknown
tttgttttgagcaataaactaatacaaaatgatggccattcatgtgcagctctttgtcaccatgggccggatgagttgtgctcctcctggctcaccatttccccctgctcccccacagccggttctgcacttatcaccgagtcgcccctggaagcagattcccattgagttttccccaccaaggggaccatgcacatggtagaaacattagattctgcattgacagtagcctttccttggcccgggcctgtggtgggaagacgggcaacaagtataccccaccagggcctgagtgactagaggaagagggcgaggccttgttggcactagatttgggtattttctgcatgtcataacatatcctaactgctatttcagaagaggcagcttgtaggtgattgtacaagtgagaattaaagagagaacagatatttaaacaggtgctgtattagtaacagccagtgccctttcagcccttgcatctattaaaaggagattcaggattttattgggcacaggcccttcttantaggaagaaagggtgcttagctttggacctgaccgggtgtgtgtaaaaccatggactgagtcacagcagacactccatgggggtaaatgtgatgggtgcttacacactgtaccttttcctttcanactgatgcctgcanttcaagggctgggantttgtttaanggaattgacctccaacccaactgccccaatgttccaactgggggctggccccaangctgcaatggtcaancctgaaggggcctgggcaaaggaaangggggccnaanaaaat

SEQ ID NO: 4299 - DNA, 719 bp, Homo sapiens
  misc_feature (582)..(582): "n" may be a, t, c, g, other or unknown
  misc_feature (650)..(650): "n" may be a, t, c, g, other or unknown
  misc_feature (688)..(688): "n" may be a, t, c, g, other or unknown
  misc_feature (697)..(697): "n" may be a, t, c, g, other or unknown
  misc_feature (715)..(716): "n" may be a, t, c, g, other or unknown
tcagtggccatcgcctgccggcagctgcaacagcagagcaaggccagcaagatcctcattgtagactgggacgtgcaccatggcaacggcacccagcaaaccttctaccaagaccccagtgtgctctacatctccctgcatcgccatgacgacggcaacttcttcccggggagtggggctgtggatgaggtaggggctggcagcggtgagggcttcaatgtcaatgtggcctgggctggaggtctggacccccccatgggggatcctgagtacctggctactttcaggatagtcgtgatgcccatcgcccgagagttctctccagacctagtcctggtgtctgctggatttgatgctgctgagggtcacccggccccactgggtggctaccatgtttctgccaaatgttttggatacatgacgcagcaactgatgaacctggcaagaggcgcagtggtgctggccttggagggtggccatgacctcacagccatctgtgacgcctctgaggcctgtgtggctgctcttctgggtaacagggtggatcccctttcaaaagaaggctggaaacagaaacccaanctcaatggcatccgctctctgggaggccgtgatccgggtgcacagtaaatactggggctgcatgcaancgcctggcctcctggtccaagactcctggggtggcctnaaagtgccnaagggggcttgacaaaannaat

SEQ ID NO: 4300 - DNA, 757 bp, Homo sapiens
  misc_feature (698)..(698): "n" may be a, t, c, g, other or unknown
  misc_feature (704)..(704): "n" may be a, t, c, g, other or unknown
  misc_feature (735)..(735): "n" may be a, t, c, g, other or unknown
  misc_feature (738)..(738): "n" may be a, t, c, g, other or unknown
  misc_feature (751)..(751): "n" may be a, t, c, g, other or unknown
aaagcaaaggcgtcaggaatggttcttcctcaggtattttttctaaatgtgagatcaaggaattaccaccaaaaaaggagagtaatacaggagaaatattccagacagtaatgttggaaagacatgaaagccacgacatacaagatttttgcttcagagaaacccagaaaaatgtacatgactctcagtgtctgtggaaacatgattgaagacattataagcgagtgcgtgtgacctataaggaaagtctcattggtagaagagacatgcatggtagaaaggatgatgcacaaaagcagcctgttaaaaatcagcttggattaaacccgcagtcacatctaccagaactgcagctatttcaagctgaagggaaaatatataaatatgatcacatggaaaaatctgtcaacagtagttccttagtttccccaccccaacgtatttcttctactgtcaaaacccacatttctcatacatatgaatgtaattttgtggattcattattcacacaaaaagagaaagcaaatattgggacagaacactacaaatgtaatgagcgtggcaaggcctttcatcaaggcttacattttactatacatcaaataatccatactaaagagacgcaatttaaatgtgatatatgtggcaagatcttcaataaaaaatcaaaccttgcaagtcatcaaagaattcatacnggagangaagccatttaaatgtaatgaatgtggcaanggncttccatatatgncacacc

SEQ ID NO: 4301 - DNA, 861 bp, Homo sapiens
  misc_feature (708)..(708): "n" may be a, t, c, g, other or unknown
  misc_feature (730)..(730): "n" may be a, t, c, g, other or unknown
  misc_feature (792)..(792): "n" may be a, t, c, g, other or unknown
  misc_feature (825)..(826): "n" may be a, t, c, g, other or unknown
  misc_feature (833)..(833): "n" may be a, t, c, g, other or unknown
  misc_feature (852)..(852): "n" may be a, t, c, g, other or unknown
tggttatgggctttgtttctggagctcagacagtccttagtttgaatcccaaatctgtccttacctccgataagcctcactaaagctcactaaacctctgtccccttatctgccaattggagataatcatgatatttaatcctatggagtgctgtgaggattaactaaaacaatgcatttgaagttcttggcactatgtctggcatggaggtatatgactatgatttgtaaattgcaatgcttctgagatggcagtagagggagcagagtcaatgggaactggacttcagaaaattagcaagattgatattaaacccttttacaagacaatgttcctgttctgatggagctagagcaacctgcacacagatgagtcgatgagattcacaccaggccatcttatcccaataatccttgctgtcccactcatgtggtactagcagatgcaaccagggaactcaacgcatctttctgcgtgtacatattgtctgtccaacctccaactccagctcaccccagtttcctcagaacacttaagaggggagaggagaagtatggtgatatcacaaaactgaaactagcaaatgtttatattctttgtacaaaaattgggagaaggtggagctggtttacctcccttacagcggcaagagtgatatcctctctcttcctctctctgtttcccacaaaagcagctccactgggcanagtgggaaaagcacaatcaagnaccgattttgaatccaccctggtcctccaatttacaaactgtgaaacctggcctatcccaanccaagactccccttcaacctccaatttccggcnnctggtanagcaaagggtggcaagggnaaacctggg

SEQ ID NO: 4302 - DNA, 725 bp, Homo sapiens
  misc_feature (665)..(665): "n" may be a, t, c, g, other or unknown
  misc_feature (676)..(676): "n" may be a, t, c, g, other or unknown
  misc_feature (678)..(678): "n" may be a, t, c, g, other or unknown
  misc_feature (685)..(685): "n" may be a, t, c, g, other or unknown
  misc_feature (710)..(710): "n" may be a, t, c, g, other or unknown
ttatcaatgctttttaatgtgtttttacccttgcctcactgtgtgtgtgtcactttctataatataaagaaatactataatatttctagagtctggaactgtcaccatgatgaatggccctttcaatgcatagttacagaaattcctgaagattccccaggacttcaatttcattggtttttatttgcagtttttagttgctgtaattgttgctgtttccagtctaaaggacctcctttggtaaaggtgaacaagacctctcccctatgctacccagccagattttgtgtgtgtaatgggctggcccaagagtgttcttttacttagaactccttttgattttgcttttctctgcccctagaaattttagggacaaagacattttggaaattgtcagttacttttagaaagaaaacactgcagaaatatttaacagattacttcttgataaaatttaaatgggattatatgaatttataatgccaattgaaaatattatatacacaaaatttgctattttcacttaaagtaagcatttttaaaggatttattttagaatacaatctatgcaatcctcgaactcagtgtgcttttccctgacaggatatataaaaaggtagattaggtcaaccctcctttaagcttactctcccctcaccttttcntttcactggananaaacggnactttcctgtgattcaaaccaacangaggactttctggga

SEQ ID NO: 4303 - DNA, 652 bp, Homo sapiens
  misc_feature (579)..(579): "n" may be a, t, c, g, other or unknown
  misc_feature (590)..(590): "n" may be a, t, c, g, other or unknown
  misc_feature (607)..(607): "n" may be a, t, c, g, other or unknown
  misc_feature (639)..(639): "n" may be a, t, c, g, other or unknown
  misc_feature (642)..(642): "n" may be a, t, c, g, other or unknown
aatatagttatcttcttaaaaaccattataacaattcagagagagttctttacaaagccatgaatatgaactatggggaatcatggttcttttaaagcaattttcaaaataagtaccaattaaagctttaggttccaagaagattctgggactcaggaagaaaaagtgccatcaggtgaccagctgttgcatttcttgcttattctgttttgtttttgcacatcataatggatttttcttagtgccctaattgtgaagggtttctctagctttggttatgtgtaatgttcacgtgacctttttttgtcaatcgtttttggaatttttctttctttctgtgctttattactaataagtccaatgagtgagtagtagctagatgactagtatgtagttttatattttggtaaaattatttgccctttcagaaatgcctcatctaaagatacatgataattttggagttggagggggccttagaggctctccagctctgcttcttgcccattgccaaatactgaaatggaagcccgtcttacctggggtcactaactggttggttaactgagctaagaatangctgtgggtcncctcacttgtgggccantgctccttccggctatacaaaatgtccaatcncanaattttcctc

SEQ ID NO: 4304 - DNA, 807 bp, Homo sapiens
  misc_feature (517)..(517): "n" may be a, t, c, g, other or unknown
  misc_feature (679)..(679): "n" may be a, t, c, g, other or unknown
  misc_feature (763)..(763): "n" may be a, t, c, g, other or unknown
  misc_feature (767)..(767): "n" may be a, t, c, g, other or unknown
  misc_feature (775)..(775): "n" may be a, t, c, g, other or unknown
  misc_feature (792)..(792): "n" may be a, t, c, g, other or unknown
  misc_feature (794)..(794): "n" may be a, t, c, g, other or unknown
aaatgaatttactaaatgttgtcagagtattttttgtttagataaccaccaagaacagaacaaacctaaaagatacttgggaaaatatctaatcagtcaacattctaaggactgttaaatgtgaaatagcatagttattttttgtcttttgttactagtgtgaacaaagaacggcgcctaacatataatgggcatttagtaactctgttagatgaaagactctccaatttcagattttcttttagcatcttattagtcactacttaattctgatgatttagctctaaatttattttgatctcagtttttttatttttatttttggagacaggatcttgctctgttgcccaggctggagtacagttgtaggattacagttcactccagcctcaatctcctaggctcaagcaatcctcccatctcagcttcccaaatagctacgactacaggtgcatgcctccatgccctgctaatttctgtattttttgtagagatggggttttactatgttccctangctaatcttgaactcctgagctcaagcaatccacccgcctcgggctcccaaagggctgggattacaggcgtgagctatcatgcctggcctaatgtattttttaaaagttgaatctaaaaagaatttaaaacaaatataaatcagctcagtaaggatggatanttttggacatttaaaactattattttagggcccgggagtgggtggctcaacacctggttaatccccagcaatttttggggaaancccnagggcaanggggggattaatcctgnangggccaagggaaa

SEQ ID NO: 4305 - DNA, 765 bp, Homo sapiens
  misc_feature (593)..(593): "n" may be a, t, c, g, other or unknown
  misc_feature (609)..(609): "n" may be a, t, c, g, other or unknown
  misc_feature (670)..(670): "n" may be a, t, c, g, other or unknown
  misc_feature (701)..(701): "n" may be a, t, c, g, other or unknown
  misc_feature (718)..(718): "n" may be a, t, c, g, other or unknown
  misc_feature (723)..(723): "n" may be a, t, c, g, other or unknown
  misc_feature (741)..(741): "n" may be a, t, c, g, other or unknown
gagcgcctgccccatgcgccgccgcctctccgcacgatgttcccctcgcggaggaaagcggcgcagctgccctgggaggacggcaggtccgggttgctctccggcggcctccctcggaagtgttccgtcttccacctgttcgtggcctgcctctcgctgggcttcttctccctactctggctgcagctcagctgctctggggacgtggcccgggcagtcaggggacaagggcaggagacctcgggccctccccgcgcctgccccccagagccgccccctgagcactgggaagaagacgcatcctggggcccccaccgcctggcagtgctggtgcccttccgcgaacgcttcgaggagctcctggtcttcgtgccccacatgcgccgcttcctgagcaggaagaagatccggcaccacatctacgtgctcaaccaggtggaccacttcaggttcaaccgggcagcgctcatcaacgtgggcttcctggagagcagcaacagcacggactacattgccatgcacgacgttgacctgctccctctcaacgaggagctggactatggctttcctgaagctgggcccttccacgtggnctccccggagctccancctctctaccactacaagacctatgtcggcggatctgctgctctccaagcaacataacggntgtgcaatgggatgtccaacgcttctggggntggggccgccaaggacnacganttctaccggcgcattaanggaagctgggctcaagcttttccg

SEQ ID NO: 4306 - DNA, 824 bp, Homo sapiens
  misc_feature (592)..(592): "n" may be a, t, c, g, other or unknown
  misc_feature (751)..(751): "n" may be a, t, c, g, other or unknown
  misc_feature (766)..(766): "n" may be a, t, c, g, other or unknown
  misc_feature (780)..(780): "n" may be a, t, c, g, other or unknown
  misc_feature (821)..(821): "n" may be a, t, c, g, other or unknown
  misc_feature (823)..(823): "n" may be a, t, c, g, other or unknown
aacacaccaagatgagactggtcctaatttttcctctgcgaatatggttttctgattaactactagttatgtctatgccaaaaaaagaaacatgctcagaccacggtttttgcctccagatgaccgaactgtacgtgaaggtgagagaaaagctgccaagctgcattttagtcagttgggcaacagtgaaaattttcttttagaggtggaaaaaagctctagggagaagacaatgaaaaactgtgtaacaggtgagagctctgcatcaaaagtcagtgctaatgttgacagcaggattgaaatggaaagagtcttgctctgtcgcccagactggagtgctgtggcgcgatctcggctcactgcaacctctacctcctgggttcaagcagttctcctgcctcagcctagcgagcagctgggattacagactcaaacaaaggactttttattcccttccccaaccgggaaataaaggattccctaagtacttctgcaactcagggcaatggtacacgtgatcagaaattagacaccttcccactggggacacagagttcagacactactcgcctcgtcagtccacagtccgatncccagagaagatgactagagaagggtaccaagtatcttttttggacaataaagtcttcagggtcttctccaaaaaagggaattgataccaaaacctgatacttttcaacttacccatggatgcctcattgagtaaatgcctggatgtgggtgattctanccagatcatccctancaagttaccttcanatgttggcctgggaaaattatgacagttgttattcccaaantnc

SEQ ID NO: 4307 - DNA, 815 bp, Homo sapiens
  misc_feature (720)..(720): "n" may be a, t, c, g, other or unknown
  misc_feature (737)..(737): "n" may be a, t, c, g, other or unknown
  misc_feature (755)..(755): "n" may be a, t, c, g, other or unknown
  misc_feature (765)..(765): "n" may be a, t, c, g, other or unknown
  misc_feature (778)..(778): "n" may be a, t, c, g, other or unknown
acagttgttgcaaagtgctcagcactaagggagccagcgcacagcacagccaggaaggcgagcgatcccagccagcccagccagcccagccagcccggaggtaaggaaacggtgctcgggcagcagctctgctcggaaagaaggcacggcttctgctcttaagccaagtggtcttttcaaaggccttctttaaaatcgctcagatgggtgcttttgagtctgcgggtctggtttctgaaaacccaggctgcacgcagctgcattgcaaagtgcttttgctaattcggagggcttcacctttctcttcagaaagcaaagggcagttttcttaagtcacttgcagaaggaaatttccatgtgtatttaggaatctggtgtttatttgctgtgtggctatttaagctccagtaagcaggggaactttgcaagaacacagactatccattctgcctgaccaatttggcatggggattagcttggcacccactgtttacctgttttgcttctagtatatcagtttggaaacagataaaattggcagtaaatacgtaattccaagaatgatgaacactttattaagaggatccttaaatggagcagaaaactgctgagaatctttgtgaagtccaagatgtatttgaattcagtactttgggggatttaccaaagtctgtaagtccgggaagctataaacgtgaatgttaaacacagcccgggtcntcctcttccccttgaanggaacgccttgccaaatnctaaatttgngtaattgggtccncccttaaaaagggggtttaaagttccaaactttcaaa

SEQ ID NO: 4308 - DNA, 791 bp, Homo sapiens
  misc_feature (699)..(699): "n" may be a, t, c, g, other or unknown
  misc_feature (712)..(712): "n" may be a, t, c, g, other or unknown
  misc_feature (752)..(752): "n" may be a, t, c, g, other or unknown
  misc_feature (761)..(761): "n" may be a, t, c, g, other or unknown
  misc_feature (780)..(780): "n" may be a, t, c, g, other or unknown
ttgaaaacatatattactctcgaggcttcctgtctcaagaaatagaccagaaggccaaattcttctctttcaatacatcagtttgcctccaagaatatactaaaaaaaggaaaattaattgctaaatacatttaaatagcctagcctcattatttactcatgatttcttgccaaatgtcatggcggtaaagaggctgtccacatctctaaaaaccctctgtaaattccacataatgcatctttcccaaaggaactatcaaagaatttggtatgaagcgcaactctcccaggggcttaaactgagcaaatcaaatatatactggtatatgtgtaaccatatacaaaaacctgttctagctgtatgatctagtctttacaaaaccaaataaaacttgttttctgtaaatttaaagagctttacaaagttccataatgtaaccatatcaaaattcattttgttagagcaggtatagaaaagagtacataagagtttaccaatcatcatcacattgtattccactaaataaatacataagccttatttgcagtgtctgtagtgattttaaaaatgtagaaaaatactatttgttctaaatacttttaagcaataactataatagtatattgatgctgcagttttatcttcatatttcctggtttgaaaaagcattttaatggttggacacagtatttttgggnacaaaaaaaaaangactcactaaaatgtgtcctactaaaggttaacctttggnaatgctggnggttctgtgattctccaanaaacttaattg

SEQ ID NO: 4309 - DNA, 753 bp, Homo sapiens
  misc_feature (593)..(593): "n" may be a, t, c, g, other or unknown
  misc_feature (638)..(638): "n" may be a, t, c, g, other or unknown
  misc_feature (697)..(697): "n" may be a, t, c, g, other or unknown
  misc_feature (702)..(702): "n" may be a, t, c, g, other or unknown
  misc_feature (721)..(721): "n" may be a, t, c, g, other or unknown
  misc_feature (743)..(743): "n" may be a, t, c, g, other or unknown
  misc_feature (748)..(748): "n" may be a, t, c, g, other or unknown
ttttttcccccttgcctggctcctgtggtggcaggctgggcacgaggaccatgctgggccggagcctccgagaagtttctgcggcactgaaacaaggccaaattacaccaacagagctctgtcaaaaatgtctctctcttatcaagaagaccaagtttctaaatgcctacattactgtgtcagaagaggtggccttaaaacaagctgaagaatcagaaaagagatataagaatggacagtcacttggggatttagatggaattcctattgcagtaaaagacaatttcagcacttctggcattgagacaacatgtgcatcaaatatgctgaaaggttatataccaccttataatgctacagtagttcagaagttgttggatcagggagctctactaatgggaaaaacaaatttagatgagtttgctatgggatctgggagcacagatggtgtatttggaccagttaaaaacccctggagttattcaaaacaatatagagaaaagaggaagcagaatccccacagcgagaatgaagattcagactggctgataactggaggaagctcaagtggggagtgcaactgctgtatcggngttcacatgctacgcgggttttaggatcagatacaaggaggatcnaccaagaaatcctgctggcccactgtggggcttgttgggttcaaaccaaagctatgggnttaantttccccgtcaatgggccncaatccccctgggggaattccnatggnttgtg

SEQ ID NO: 4310 - DNA, 661 bp, Homo sapiens
  misc_feature (570)..(570): "n" may be a, t, c, g, other or unknown
  misc_feature (617)..(617): "n" may be a, t, c, g, other or unknown
  misc_feature (637)..(637): "n" may be a, t, c, g, other or unknown
  misc_feature (651)..(651): "n" may be a, t, c, g, other or unknown
  misc_feature (656)..(656): "n" may be a, t, c, g, other or unknown
gtctatcatggcaagctcggactggtcatacggccttgagaagggtagtctcgggatgccgtccgaagtcggcgacagcggccggggcgcaggcgcccgtgcggaatggcagatatttagcttcctgtggtatactgatgagcagaactcttccactacatacctcaattttgcctaaggagatatgtgcacgaactttcttcaaaatcactgcaccattaataaacaaaaggaaagaatattcagagagaagaattttaggatattcaatgcaggaaatgtatgatgtagtatcgggagtggaggattacaagcattttgttccttggtgcaaaaaatcagatgttatatcaaagagatctggatattgtaaaacaagattagaaattggatttccacctgtgttggagcgatatacatcagtagtaaccttggtgaaacctcatttagtaaaggcatcttgtactgatgggagacttttcaatcatttggagactatttggcgttttagcccaagtcttcctgggctacccaagaacttgtaccttgggatttttcaatttcttttgnatttcgatcacttctacattcccagcttgccacactcttttttgatnaagttgtgaaacaaatgggnactgcctttgaaanaaaancatgt

SEQ ID NO: 4311 - DNA, 756 bp, Homo sapiens
  misc_feature (525)..(525): "n" may be a, t, c, g, other or unknown
  misc_feature (599)..(599): "n" may be a, t, c, g, other or unknown
  misc_feature (675)..(675): "n" may be a, t, c, g, other or unknown
  misc_feature (715)..(715): "n" may be a, t, c, g, other or unknown
  misc_feature (726)..(726): "n" may be a, t, c, g, other or unknown
  misc_feature (738)..(738): "n" may be a, t, c, g, other or unknown
  misc_feature (756)..(756): "n" may be a, t, c, g, other or unknown
atactaaaattggaacgatacagagaagattagcatggcccctgcgcaaggatgacacgcaaattcgtgaagcgttccatatttttgatccatccggattggaaacacagccttttctactagactcttgcctgtcagaggagctgttgaatgtttatttgaaatgggctttgaagagggagaaacacatctcatctttcctaaaaaagcttcagtggagcagctgcaaaaaattcgtgacctgattgccatagagagaagtagcagactggatggctcaaataagagccacaaagtaaagtcatctcagcaacctgcagccagtacccagcttcctacaacaccatcttcaaatcccagtgggttaaaccagcacacaaggaaccgtcaagggcagtcatcagatccaccatctgcttcaacggttgctgctgactcagccattctagaagttcttcagtccaacattcagcatgtgctggtctatgaaaatcctgctcttcaggagaaagcgttggcttgtantccggtccaagaactaaaaaggaaatcacaagaaaagttatcgagagctagaaaattggataaagatataatanccctgaagaaacttttggaaacaaagatgtggacggtgtggcgagtgggccaattgttttacactgggctgccganctgtagggtttgaagctccgctatgtttgggattacgcangaccatgtctnggacagaagtcnattctccttctcagcaan

SEQ ID NO: 4312 - DNA, 878 bp, Homo sapiens
  misc_feature (748)..(748): "n" may be a, t, c, g, other or unknown
  misc_feature (840)..(840): "n" may be a, t, c, g, other or unknown
  misc_feature (854)..(855): "n" may be a, t, c, g, other or unknown
  misc_feature (858)..(858): "n" may be a, t, c, g, other or unknown
  misc_feature (860)..(860): "n" may be a, t, c, g, other or unknown
atctcaagttgcacagctaaaaaattcaagtgaagagaaagaagctatgaattccatttgccaagacagcactttctgcagatggcaaagggagcaaaggcagtgaggaggatgtggtgtcaaagaatcaaggcgatagtgccagaaagcagcctggctcatccacctccagttcttctcacctagcgaagccttccagcagcagactgtgtgacaccagttctgcaaggcaggaaagtaccagcaaagcagaccttaactgttctaagaacaaagacctatatcaagaacaggtagaagtaatgttagatgtgacagatacaagtatggatacttatttggaaagagaatgggggaataaaccaagtgactgtgtaccctacaaagatgaagaactttatgatcttccagctccttgtactcctttgtcccttagttgccttcagctcagtactccagaaaatagagagagctctgtggtccaagcaggaggttccaaaaagcactcaaaccatctcagaaaattggtgtttgatgatttttgtgattcttcaaatgtttctaataaagattcttcagaagatgatataagtagaagtgaaaatgaaaagaaatcagaatgtttttcttccccaaagacaggattttggggactgttgttccacaaagctatgcccaaaaacttagattttgaaaagttcagaggggaacacgatagcaaattctgttggagaaatatcctcaaaanttgaggtgaggaaaatcaaggcttaaggtttatccaaaaagggtgaattccaatccgctcctttgaaatggaccgggcaagacatccaagtngaagcatccatggnngcngnttaccttgacaaaatccc

SEQ ID NO: 4313 - DNA, 633 bp, Homo sapiens
  misc_feature (598)..(599): "n" may be a, t, c, g, other or unknown
  misc_feature (607)..(607): "n" may be a, t, c, g, other or unknown
  misc_feature (616)..(616): "n" may be a, t, c, g, other or unknown
  misc_feature (633)..(633): "n" may be a, t, c, g, other or unknown
gaaatcttttgatgcacatcccaggaaggagagccaagtgcgacagcttgcgtgggtgggggatggcgtgtgggtctccattcgcttggattctacgctccgtctctatcatgcacacacttatcaacatctacaggatgtggacattgagccttatgtaagcaaaatgttaggtactggaaaactgggcttctcttttgtgagaattacagctcttatggtgtcttgtaatcgtttgtgggtggggacaggaaatggtgtcattatctccatcccattgacagaaaccgtaatcctccaccagggacgtttactggggctgagggcaaataaaacctcaggtgtaccaggaaatcgtcctggaagtgtaatccgtgtatatggtgatgaaaacagtgataaagtgactccagggacatttataccctattgttcaatggcacatgcacagctttgcttccatgggcaccgggatgctgtgaaattctttgtggcaagtcccaaggtcaaagtcatcagcccacaaagtagcagtagtggcacggatctgacgggtgacaaaagcaaggccatctgcacaaggagcctgggtaatcanncgcccttngaagtctangcttgtcatcaagtggn

SEQ ID NO: 4314 - DNA, 762 bp, Homo sapiens
  misc_feature (500)..(500): "n" may be a, t, c, g, other or unknown
  misc_feature (599)..(599): "n" may be a, t, c, g, other or unknown
  misc_feature (644)..(644): "n" may be a, t, c, g, other or unknown
  misc_feature (678)..(678): "n" may be a, t, c, g, other or unknown
  misc_feature (700)..(700): "n" may be a, t, c, g, other or unknown
  misc_feature (705)..(705): "n" may be a, t, c, g, other or unknown
  misc_feature (713)..(713): "n" may be a, t, c, g, other or unknown
  misc_feature (744)..(744): "n" may be a, t, c, g, other or unknown
cttattcatgcaggctctgcattaagctgctaatgtatgtaaaaagattactggacgtcttacaagtgcaatagcaaaacaggaagatgtctctgttcagctagaagccttggatattatggctgatatgttgagcaggcaaggaggacttcttgttaatttccatccttcaattctgacctgtctacttccccagttgaccagccctagacttgcagtgaggaaaagaaccattatcgctcttggccatctggttatgagctgtggaaatatagtttttgtagatcttattgaacatctgttgtcagagttgtccaaaaatgattctatgtcaacaacaagaacctacatacaatgtattgctgctattagtaggcaagcgggtcatagaataggtgaataccttgagaagataattcctttggtgggtaaaattttgcaatgtagatgatgatgaattaaaagagtactgtattcaagcctttgaatcatttgtaagnaagatgtcctaaaggaagtatatcctcatgtttctaccattataaatatttgtcttaaatatcttacctatgatccaaattataattacgatgatgaangatgaaggatgaaaatgcaatggatgctgatgggtggtgatgatngatgatcaaggggagtgatgatgaatacagtgangatgatgacatgaatttggaangtganacgtgcanctggcgaaagtggcttgggatgcctggtaanttaagcaacaagggcaat

SEQ ID NO: 4315 - DNA, 830 bp, Homo sapiens
  misc_feature (746)..(746): "n" may be a, t, c, g, other or unknown
  misc_feature (755)..(755): "n" may be a, t, c, g, other or unknown
  misc_feature (791)..(791): "n" may be a, t, c, g, other or unknown
  misc_feature (803)..(803): "n" may be a, t, c, g, other or unknown
  misc_feature (806)..(806): "n" may be a, t, c, g, other or unknown
gcgccctcgccgcggacaccgggagctgcggccgctccccgctgtcccccagagatggcagatcctgaggtagttgtgtgtagctgcagctctcatgaagaggaaaatcgctgcaattttaaccagcaaacatctccatctgaggagcttctattagaagaccagatgaggcgaaaactcaaattttttttcatgaatccctgtgagaagttctgggctcgaggtagaaaaccatggaaacttgccatacaaattctaaaaattgcaatggtgactatccagtacttgcagctatacaatgtctccgttgggaatcatgcttatgagaacaaaggtaccaagcaatctgctatggcaatctgtcagcacttctacaagcgaggaaacatctaccctggaaatgatacctttgacatcgatccagaaattgaaactgagtgtttctttgtggagccagatgaaccttttcacattgggacaccagcagaaaataaactgaacttaacactggacttccacagactcctaacagtggagcttcagtttaaactgaaagccattaatctgcagacagttcgtcatcaagaactccctgactgttatgactttactctgactataacatttgacaacaagggccatagtggaagaattaaaataagtttagataatgacatttccatcagaggaatgtaaagactggcatgtatccgggatcaattcagaagaacactccattacatgangatctttgntgcctttggcattctgacttgcttgggttcaataancccctgcattanatntgggattaaggactcaacttcaca

SEQ ID NO: 4316 - DNA, 774 bp, Homo sapiens
  misc_feature (566)..(566): "n" may be a, t, c, g, other or unknown
  misc_feature (703)..(703): "n" may be a, t, c, g, other or unknown
  misc_feature (713)..(713): "n" may be a, t, c, g, other or unknown
  misc_feature (723)..(723): "n" may be a, t, c, g, other or unknown
  misc_feature (731)..(731): "n" may be a, t, c, g, other or unknown
  misc_feature (767)..(767): "n" may be a, t, c, g, other or unknown
cattaatgttgggcagggaaacaggagctgtcagactgagagggccagggatgttcattgtggagattaaatgttctgagtaagtgagtttgtagacattttcttgtaagaaaatgttccatgctttactctgttttggacattttcttttgaaaaattttgagatagaaaccttaatatcatttcatatatttacagcacatagttaatttgagtagagtcaaattaatcttactttagaatttgattactaagtattagcatggataataatgcttcttttgcttaaatgtaaaaattaggccgttttactaggtgtactttgtcttaatcatattcctatttttttatacagctgtgcaaccatattgcttctgggaaaaaatgtcaatatgtgggaaactgttcctttgctcatagtcctgaggaaagagaagtttggacttacatgaaggagaatgggatacaagatatggagcaattttacgaactatggctcaagagtcaaaaaaatgaaaaaagtgaagacatagccagtcagtcaaacaaggaaaatggaaaacaanttcacatgccaacagattatgctgaagttacagtgggactttcactgctggatgtgtgggaaaactgcaacagtgagaagcagtggcagggccacatctcctccgagaagcacaaagagaagggtttccacaccganggacgaccantacctgctgncaagcacngccttcccaacaaggctatttcaggtattggtgacnaggtata

SEQ ID NO: 4317 - DNA, 680 bp, Homo sapiens
  misc_feature (449)..(449): "n" may be a, t, c, g, other or unknown
  misc_feature (602)..(602): "n" may be a, t, c, g, other or unknown
  misc_feature (615)..(615): "n" may be a, t, c, g, other or unknown
  misc_feature (637)..(637): "n" may be a, t, c, g, other or unknown
  misc_feature (662)..(662): "n" may be a, t, c, g, other or unknown
  misc_feature (675)..(675): "n" may be a, t, c, g, other or unknown
aatacttgctggtctgatccatgcacaaggcggggctgctaggcctctgtgcccgggcttggaattcggtgcggatggccagctccgggatgacccgccgggacccgctcgcaaataaggtggccctggcaacggcctccaccgacgggatcggcttcgccatcgcccggcgtttggcccaggacggggcccatgtggtcgtcagcagccggaagcagcagaatgtggaccaggcggtggccacgctgcagggggaggggctgagcgtgacgggcaccgtgtgccatgtggggaaggcggaggaccgggagcggctggtggccacggctgtgaagcttcatggaggtatcgatatcctagtctccaatgctgctgtcaaccctttctttggaagcataatggatgtcactgaggaggtgtgggacaagactctggacattaatgtgaangccccagccctgatgacaaaggcagtggtgccagaaatggagaaacgaagaggcggctcagtggtgatcgtgtcttccataagaagccttcagtccatctcctggcttcagtccttacaatgtcagtaaaacagccttgctgggctgaccaanaccctggccatanagctggccccaaggaacattanggtgaaactgcctaacacctggacntatcaaagactancttca

SEQ ID NO: 4318 - DNA, 758 bp, Homo sapiens
  misc_feature (528)..(528): "n" may be a, t, c, g, other or unknown
  misc_feature (538)..(538): "n" may be a, t, c, g, other or unknown
  misc_feature (689)..(689): "n" may be a, t, c, g, other or unknown
  misc_feature (695)..(695): "n" may be a, t, c, g, other or unknown
  misc_feature (725)..(725): "n" may be a, t, c, g, other or unknown
agagtatgctgaagttattgctgtcaggtgcgtttgccatatactcagggacctgggtcccttccttcttagtctccatcttctccaggagccagaaaaaaaggagagagagagcatcaggtggcactgtttatgggcctttcatggaagtgacacctggggttacttctgcttatgttcctttggacagaattcagttgaatggtcatactagaggcattgtgccaggctttgcagcataaaaagaagttagagacagggactttggatccaagtcctccctgactcaaaacccagagaggcagaggatgcttgccacctttgactagtcctatctcctccaaagggtccttttgatttattagcaagaagccatcttctgaccacaaagacaagatttcaaagttctcacccagttcctagctaaagatgtccaaagagacttctaagccaatgattttcaacaaggaaattgaagttgtatgctttgaagagaggggcttgattgggtggcatcttatgcttaantgtgcatggnagagccatcctacatgcagcatgtgatgggcccccagggactgaggacttgtgtatgactgggagtctacgcaacttggcttcatatcagttcttgccatctcgggatccaaatgctctccaaggcatgaagtcatttcctccaaagagantttgangatgccccaagaagaatctttaaggctaanggtcactaattccttaaagcctaaagggcaacc

SEQ ID NO: 4319 - DNA, 701 bp, Homo sapiens
  misc_feature (455)..(455): "n" may be a, t, c, g, other or unknown
  misc_feature (468)..(468): "n" may be a, t, c, g, other or unknown
  misc_feature (479)..(479): "n" may be a, t, c, g, other or unknown
  misc_feature (616)..(616): "n" may be a, t, c, g, other or unknown
  misc_feature (642)..(642): "n" may be a, t, c, g, other or unknown
  misc_feature (645)..(645): "n" may be a, t, c, g, other or unknown
gatccttgtcctttctctcaaactccctgaagaagctcgtcccctttcagctccctgggtcgaagagtgagcacaaagaacccaaagataaaaagataaacatactgattcctttgtctgggcgtttcgacatgtttgtgagatttatgggaaactttgagaagacgtgtcttatccccaatcagaacgtcaagctcgtggttctgcttttcaattctgactccaaccctgacaaggccaaacaagttgaactgatgagagattaccgcattaagtaccctaaagccgacatgcagattttgcctgtgtctggagagttttcaagagccctggccctggaagtaggatcctcccagtttaacaatgaatctttgctcttcttctgcgacgtcgacctcgtgtttactacagaattccttcagcgatgtcgagcaaatacagttctgggccaacanatatattttccantcatcttcagncaagtatgacccaaagattgtttatagtgggaaagttcccagtgacaaccattttgcctttactcagaaaactgggcttctggagaaactatgggtttgggatcacgtgtatttataaagggagatcttgtccgaantgggtggctttgatgtttcaatccanggntggggggctggagggatgtggggccttttcaacaagggttgtcaaggcaagtttga

SEQ ID NO: 4320 - DNA, 793 bp, Homo sapiens
  misc_feature (644)..(644): "n" may be a, t, c, g, other or unknown
  misc_feature (725)..(725): "n" may be a, t, c, g, other or unknown
  misc_feature (737)..(737): "n" may be a, t, c, g, other or unknown
  misc_feature (745)..(745): "n" may be a, t, c, g, other or unknown
  misc_feature (761)..(761): "n" may be a, t, c, g, other or unknown
  misc_feature (764)..(764): "n" may be a, t, c, g, other or unknown
gtaccaatgcataatcatctatggggtcgcctgggactacaagtacctgactctgaaagtcaaagcttcctacaggaaaataaacactcacatcctaaaggttccagaaacagatgaggtagagctcacctgccaggctacaggttatcctctggcagaagtatcctggccaaacgtcagcgttcctgccaacaccagccactccaggacccctgaaggcctctaccaggtcaccagtgttctgcgcctaaagccaccccctggcagaaacttcagctgtgtgttctggaatactcacgcgagggaacttactttggccagcattgaccttcaaagtcagatggaacccaggacccatccaacttggctgcttcacattttcatcccctcctgcatcattgctttcattttcatagccacagtgatagccctaagaaaacaactctgtcaaaagctgtattcttcaaaagacacaacaaaaagacctgtcaccacaacaaagagggaagtgaacagtgctatctgaacctgtggtcttgggagccagggtgacctgatatgacatctaaagaagcttctggactctgaacaagaattcggtggcctgcaaagcttgccatttgcacttttcaaatgcctttggntgacccagcacttaaatctgaaacctgcaacaaggactagccaacacctggccatgaaacttgccccttcactgatctggntcactctggggnctaagggntttaagcaagcactantgnactttacagaattacccactgggttctgg

SEQ ID NO: 4321 - DNA, 747 bp, Homo sapiens
  misc_feature (612)..(612): "n" may be a, t, c, g, other or unknown
  misc_feature (659)..(659): "n" may be a, t, c, g, other or unknown
  misc_feature (679)..(679): "n" may be a, t, c, g, other or unknown
  misc_feature (711)..(711): "n" may be a, t, c, g, other or unknown
  misc_feature (715)..(715): "n" may be a, t, c, g, other or unknown
  misc_feature (718)..(718): "n" may be a, t, c, g, other or unknown
atgatgccaacagcgtgattgcttagaagttcctacacaaaaaaaggatcatttgaaagcacctggaatggtttattagcttcacaggattttattcttcttggcttctatttggagggaaaataacataaattcaaaaggattccaatctgaagcccaaatcgtttgcctacataacaaaaatatctcatcttttcctgcacattattattcttttatgggttaaaaagaaaaataccttttagtgttttagaactctctcatggtaaaaagtgcaagaatttaaaatgttgctttcatattcctataattctccaaaagtattaaattcgtatatgtttgagtgattttctaaaaactgctcaacctgaaatcaattgcattgaccatttggcttcgcacaatagggagaaaataattggttcattgattatatagagagaaagactaagaaaagctattaattgctaccaattttatgataagctttaaggtttatgaaagtatgtttttttatttaatgagtaatgtccatttgaagttgaaagaaaacatgaaatcctaattgtagttcattttatgttcaaatgaaaccattggttttggttttgntttgaaacagagtctcactctgttgcccaaaggtggagagaagtggnacgcttttgtcctcactggnaaacctccaactccccgaggttcaaagtggantccncgnggcctcaaacctccccaaaatttataagg

SEQ ID NO: 4322 - DNA, 194 bp, Homo sapiens
  misc_feature (185)..(186): "n" may be a, t, c, g, other or unknown
  misc_feature (188)..(188): "n" may be a, t, c, g, other or unknown
atcatggcgtcaatgcagaaacgactacagaaagaactgttggctttgcaaaatgacccacctcctggaatgaccttaaatgagaagagtgttcaaaattcaattacacagtggattgtagacatggaaaggtgatcaggtaccttatatgaaggggaaaaatttcaacttccaattaaatttannantccata

SEQ ID NO: 4323 - DNA, 883 bp, Homo sapiens
  misc_feature (800)..(800): "n" may be a, t, c, g, other or unknown
  misc_feature (831)..(831): "n" may be a, t, c, g, other or unknown
gtgcggaccagtttaagaaggatatcctgctgggggctctcttccctatagcatccagacagctgaaaaacagaattggctgcattcctattttcacaaatggtcagctgagacttctggccgcagcaatgccatgccacatattaagacatatatgaggccttctccagacttcagtaaaattgcttggttccttgtcacaagcgcaaatctgtccaaggctgcctggggagcattggagaagaatggcacccagctgatgatccgctcctacgagctcggggtccttttcctcccttcagcatttggtctagacagtttcaaagtgaaacagaagttcttcgctggcagccaggagccaatggccacctttcctgtgccatatgatttgcctccagaactgtatggaagtaaagatcggccatggatatggaacattccttatgtcaaagcaccggatacgcatgggaacatgtgggtgccctcctgagaatcttgaggcactgtgaaatttaagtgtaagacattgagccacaaacatggaatctcttctttgtactggatgtccacttcccttaaagtcttatttgcacccttacaaaatctttccaaaggtcactcttatgaatggatgttggttatacttttaatggacattaacattcctaataaagtattaagttcctaattcacttttatatgttttggaaagaaaattagtgaacttctctatgttaaaaaatacgtactgcttgagtaacccctgtctgaaaatgcctggggaccagaaagtgtttcancttttgggatttttttgaaatttttgggaanattttgcatagcaataatgagataccttgggaatgggacccaaatccaaaca

SEQ ID NO: 4324 - DNA, 792 bp, Homo sapiens
  misc_feature (742)..(742): "n" may be a, t, c, g, other or unknown
  misc_feature (762)..(762): "n" may be a, t, c, g, other or unknown
  misc_feature (770)..(770): "n" may be a, t, c, g, other or unknown
  misc_feature (773)..(773): "n" may be a, t, c, g, other or unknown
  misc_feature (785)..(785): "n" may be a, t, c, g, other or unknown
gagatgaaggtgaagatgctgagccggaatccggacaattatgtccgcgaaaccaagttggacttacagagagttccaagaaactatgatcctgctttacatccttttgaggtcccacgagaatatgtaagagctttaaatgctaccaaactggaacgagtatttgcaaaaccattccttgcttcgctggatggtcaccgtgatggagtcaattgcttggcaaagcatccagagaagctggctactgtcctttctggggcgtgtgatggagaggttagaatttggaatctaactcagcggaattgtatccgtacaatacaagcacatgaaggctttgtacgaggaatatgtactcgcttttgtgggacttcttttttcactgttggtgatgacaaaactgtgaagcagtggaaaatggatgggccaggctatggagacgaggaagagccattacatacaatattaggaaagacagtgtatactgggattgatcatcactggaaagaagctgtttttgccacatgtggacagcaagtagacatttgggatgaacaaagaactaatcctatatgttcaatgacctggggatttgacagtataagtagtgttaaatttaacccaattgagacatttctcttgggaagttgtgcatctgacaggaatatagtactgtacgatatgaggcaagctaccctttgaaaaaagggtatcttagatatgagaacaaatacaatctgttggnaccctaagggaagctttcanttttacancangcaaatggaagnattataa

SEQ ID NO: 4325 - DNA, 787 bp, Homo sapiens
  misc_feature (737)..(737): "n" may be a, t, c, g, other or unknown
  misc_feature (756)..(756): "n" may be a, t, c, g, other or unknown
  misc_feature (760)..(760): "n" may be a, t, c, g, other or unknown
aacaaatatgaatattgttacatcacctctgactctctgactagtaagaaactatgcatttccatacccaatgaaacctcaattcctacagcaattctacttttattgcctcccaagaactatttcttcatggtcaatatcactctttaaaagctagcaaaatatgactttcttctgaggtttgggcaatctggatcaatatttatgtatctaaccacttgaaaggctgtctccttttttggccttttaaattaaaacttccataaaatgaagcaaaatatgaaaacagctagttgatttatcaataatgtgaaaccctccttctgaatttttttggtaaaaattaccacactgaaaccaaaacttaaccttggcttggactctcagatagattgcttttgtattctttgactacaaagtattctcaaaaagaagaaattatttctgatggtagatcaaactctagccaagaaggtctagataaactagaggactgtataattatctaaagtaattcagggggacttttagaaaaattctttaatttttgttcctgtgtaaaaattattattaatggatggcagcccaaattactattcttcttttaaaatttgtttcaagtgtgtcaccaggcactcataaaattcatttatttggtatataactcaatgacctgaaataataggtgctcaatgctttttcatttgattccttaaaaaacaatttttattccggtncaaaaaaaaaattcccccnggcnaaaaatcccaaaatggatttacctggg

SEQ ID NO: 4326 - DNA, 843 bp, Homo sapiens
  misc_feature (645)..(645): "n" may be a, t, c, g, other or unknown
  misc_feature (718)..(718): "n" may be a, t, c, g, other or unknown
  misc_feature (803)..(803): "n" may be a, t, c, g, other or unknown
  misc_feature (808)..(808): "n" may be a, t, c, g, other or unknown
  misc_feature (827)..(827): "n" may be a, t, c, g, other or unknown
  misc_feature (832)..(832): "n" may be a, t, c, g, other or unknown
  misc_feature (838)..(838): "n" may be a, t, c, g, other or unknown
acaccctcggattgacgtgcgcacgcgcaccggttaccttcaggagcgccgaagaaggaaagaagaacacagagcccgaggcaaagcttaagtgcttacgcttttgtcgggaggtacagacccagctctgcgagagccaggggaaaaggaagagaggcagggaaggaaaggcagcaagtacaaggtgatgaatgactgcactggccattgcttcatgaagagccacgaaaaaacagagccggtttctcagcaggtagctggctgctcagtcacaaaggacctctttggacaggctttatggaaatactgtgcctaggacagtcgctcaaaggcaggagggagagaaaatgcatccgcaagctcactttgtcttctttcttctgctggtcaaaatttgctggctcgggcagttaacgccctcacacatccgagttgtgtcacctggcccctttggtagccactggggaagccagatctaggcatgtggcctgatggctcctgcggtggaaccacatgctcacactcagtcagtcaccactgggatgccctgggcagggcaagctgagtgactgggagatagctgagcctaagatatctaagcaagcacctgtgatgtatgcactgcagtgtccaaatgtgaaaaancaagaaagggagatagaagcatatttttttctggagagaaggaggaaaccaccaggaagaatacaaacagganaaaaagacatgctcatcatgccctgcaaactcctatgaactgggaactacagcagctgttctgccaagggacaaggttcttctcnaaagntcaagctccctggaggganaaagncctgantttgg

SEQ ID NO: 4327 - DNA, 784 bp, Homo sapiens
  misc_feature (595)..(595): "n" may be a, t, c, g, other or unknown
  misc_feature (694)..(694): "n" may be a, t, c, g, other or unknown
  misc_feature (723)..(723): "n" may be a, t, c, g, other or unknown
  misc_feature (776)..(776): "n" may be a, t, c, g, other or unknown
  misc_feature (781)..(782): "n" may be a, t, c, g, other or unknown
ttacattacgcaagagagcaagttgttccaagtagttgcctggcaggagaatttgaaagggtgccccaaaggacaatctctaaaggggtaagggagatacctaccttgtctggtaggggagatgtttcgttttcatgctttaccagaaaatccacttccctgctgaccttagtttcaaagcttattcttaattagagacaagaaacctgtttcaacttgaagacaccgtatgaggtgaatggacagccagccaccacaatgaaagaaatcaaaccaggaataacctatgctgaacccacgcctcaatcgtccccaagtgtttcctgacacgcatctttgcttacagtgcatcacaactgaagaatggggttcaacttgacgcttgcaaaattaccaaataacgagctgcacggccaagagagtcacaattcaggcaacaggagcgacgggccaggaaagaacaccacccttcacaatgaatttgacacaattgtcttgccggtgctttatctcattatatttgtggcaagcatcttgctgaatggtttagcaagtgtggatcttcttccacattaggaataaaaccaagcttcanattctatctcaaaaacataggtgggttgcagacctcataatgacgctgacattttccattttcgaataagtccaatgatgcaaggatttggaccttggnacttcaagtttattctccgcagatacacntcagtttttggttttatggaaacatgtagacttccaaccgtgttccttggggnctgannaa

SEQ ID NO: 4328 - DNA, 823 bp, Homo sapiens
  misc_feature (647)..(647): "n" may be a, t, c, g, other or unknown
  misc_feature (661)..(661): "n" may be a, t, c, g, other or unknown
  misc_feature (664)..(664): "n" may be a, t, c, g, other or unknown
  misc_feature (671)..(671): "n" may be a, t, c, g, other or unknown
  misc_feature (743)..(743): "n" may be a, t, c, g, other or unknown
  misc_feature (778)..(778): "n" may be a, t, c, g, other or unknown
  misc_feature (785)..(785): "n" may be a, t, c, g, other or unknown
  misc_feature (787)..(787): "n" may be a, t, c, g, other or unknown
  misc_feature (809)..(809): "n" may be a, t, c, g, other or unknown
atcatggccacaagaatttgctctgtcgagggtcgtggtgccagctaggtgaggtttggggctctgtcactattggtcagtgtctgttacatacttgggccccagcagtgccctggcactgcacccccaactccatgggcacatttgtcctgttctcttcatctcagtttcctctcctgtaaaatgggtgcattgactgtgcagtggttcctccaaggtcccctgatccccagatgcggcccagggctctgccaaccagtctcaatgtttcaaggtggccaccatgaactttctgcatgtcgaagtaaaacacttcatgcctttctgcacagaggttagccctccacaggctctgggttcaaatcctggattccgttgatgccctgggcacgtccttaaagcccaccaagcctcagtttctccactgtaaaccaccgtcctggggggcatggtgaggatgaagtgggcttgtgcctgggacgttcctactcagccagtgccctgcctgaaacactaggatcgaactgtccattcagccaggcaccttcgaactcctcccaggcataatctctgtctggaaactccttgtgttgaataagatgggaaaatccatccatgagaactgaagccacaaacagcgcttgcangacaagaaggaganaangtctttngggaaggagatgggcacatcgtttctaagtccccacctcacacctgatcttggcctgtcctggaacatgcantgtgacccaagggaaaggcatggggtctcccaaanggcccgntnaaaccgggggaagcctttcccnattcccaagtttaa

SEQ ID NO: 4329 - DNA, 336 bp, Homo sapiens
  misc_feature (274)..(274): "n" may be a, t, c, g, other or unknown
  misc_feature (314)..(314): "n" may be a, t, c, g, other or unknown
  misc_feature (333)..(333): "n" may be a, t, c, g, other or unknown
tgcaaagatgagataaaggcgcgggaaagaagggtctgaattaggggttgagctctgaaatcggacgattctgtgtttcctgccgcatggagggcgtgtgtggttcgcaggctgtggggggtttcttgcagcgggggctgctgcctaaacagactccgcgggccccatgatggcaaaccccctcgccccgttcatgacttaatgcctcctagaagaaaaggctaaaaacaagacacacagaacaagaaattgcactctctcaaaacgacagtcnccctgaaacggacgctggaagaggtttccaggcccgtggngacggtgaggggggtgaangtc

SEQ ID NO: 4330 - DNA, 774 bp, Homo sapiens
  misc_feature (581)..(581): "n" may be a, t, c, g, other or unknown
  misc_feature (594)..(594): "n" may be a, t, c, g, other or unknown
  misc_feature (643)..(643): "n" may be a, t, c, g, other or unknown
  misc_feature (680)..(680): "n" may be a, t, c, g, other or unknown
  misc_feature (728)..(728): "n" may be a, t, c, g, other or unknown
  misc_feature (753)..(753): "n" may be a, t, c, g, other or unknown
  misc_feature (762)..(762): "n" may be a, t, c, g, other or unknown
  misc_feature (773)..(773): "n" may be a, t, c, g, other or unknown
tctacagaacaaactgcacagcttgggtactgagctcttcattgtcaggcaacttcttcaaatagtgaagcagaaaaccaatcaaaattcagtggacactacattgaaatttactttgagtgcactttggaacctcacagatgaatctccaaccacttgtagacactttattgaaaaccaagggttagaactcttcatgagggttctagagtctttcccaactgagtcatccattcagcagaaagttctaggacttttgtgtggatctgctgatgatgaattcttcagcttttgtctgactgaaaacatctttacttaacctttgtttttgaaagatacttttaccagaacaatatagctgaagtacaagaattacattctgaattaatgtggaaagattttatagaccacatcagtagtctcctacacagtgtggaagtggaagtcagttactttgcagctggaattattgcccatttaatatccagaggtgaacaagcttggacattgagtcgtagccagaggaattctctgctggatgatttgcattcagctattttgaaatgggccaactccaagantgtgagatggtancatacagggcctttaatccatttttcccattacttggctgtttcacaanaacaaggagttcagctatggggcaagtttgtgccatncaacaatgtctgcaagcaaggaatccctcaagggtattgcagcatgcngatttgaagaaggggggatttgcancaatttgtncaacatcaaang

SEQ ID NO: 4331 - DNA, 666 bp, Homo sapiens
  misc_feature (492)..(492): "n" may be a, t, c, g, other or unknown
  misc_feature (605)..(605): "n" may be a, t, c, g, other or unknown
  misc_feature (639)..(639): "n" may be a, t, c, g, other or unknown
  misc_feature (645)..(645): "n" may be a, t, c, g, other or unknown
  misc_feature (660)..(660): "n" may be a, t, c, g, other or unknown
  misc_feature (663)..(663): "n" may be a, t, c, g, other or unknown
ttctgcaaaccgagagccccgaatccacagagctccaaagtagactccgccagctgagcctgctctgggaagcagcacagggcgcagtggacagctggagagggggcttacgacagtcgctcatgcagtgccaggacttccaccagttgagtcaaaatctgctgctgtggttagcgagtgccaagaaccggaggcagaaggctcatgtcaccgatccaaaggcagacccccgggctctcctagagtgtcggagggaactaatgcaactggaaaaggagctggtagaacgtcaacctcaagtggacatgttacaggagatttcaaacagccttctcattaagggacatggagaagactgtattgaagctgaagaaaaggtgcatgttattgagaagaaactcaaacagttacgggagcaagtgtcccaagatttaatggccttgcagggaacccagaacccagcctcaaccctgcccagcttcgacgaggtanactcgggggaccagcctcctgcaacatccgtgccagctccccgagcaaagttcaagagcagtgagaactacagaaggcgaggaggagacagagagcaaggtccccggcagcanacgggcaaaagggctccttcctctcaagggtggnccgggnagccctaacccctgnagntgc

SEQ ID NO: 4332 - DNA, 837 bp, Homo sapiens
  misc_feature (607)..(607): "n" may be a, t, c, g, other or unknown
  misc_feature (773)..(773): "n" may be a, t, c, g, other or unknown
  misc_feature (779)..(779): "n" may be a, t, c, g, other or unknown
  misc_feature (787)..(787): "n" may be a, t, c, g, other or unknown
  misc_feature (790)..(790): "n" may be a, t, c, g, other or unknown
  misc_feature (825)..(825): "n" may be a, t, c, g, other or unknown
agaaaaatgtacatgactcccagtgtctgtggaaacatgattgaagacattataagcgagtgcgtgtgacctataaggaaagtctcattggtagaagagacatgcatggtagaaaggatgatgcacaaaagcagcctgttaaaaatcagcttggattaaacccgcagtcacatctaccagaactgcagctatttcaagctgaagggaaaatatataaatatgatcacatggaaaaatctgtcaacagtagttccttagtttccccaccccaacgtatttcttctactgtcaaaacccacatttctcatatatatgaatgtaattttgtggattcattattcacacaaaaagagaaagcaaatattgggacagaacactacaaatgtaatgagcgtggcaaggcctttcatcaaggcttacattttactatacatcaaataatccatactaaagagacgcaatttaaatgtgatatatgtggcaagatcttcaataaaaaatcaaaccttgcaagtcatcaaagaattcatactggagagaagccatataaatgtaatgaatgtggcaaggtcttccataatatgtcacaccttgcacagcatcgcangattcatactgggagagaaaccatataaatgtaatgaatgtggcaaggtctttaatcaaatttcacaccttgcacaacatcaaaggattcataccggagagaaaccttataaatgtatgaatgtggaaaggtcctccatcaaatttcacaaccttgcacaacatcngacaantcatactnggngaaaaaaccttacgaatgtacaaatgtggcaaggngttcaatcccaa

SEQ ID NO: 4333 - DNA, 714 bp, Homo sapiens
  misc_feature (640)..(640): "n" may be a, t, c, g, other or unknown
  misc_feature (686)..(686): "n" may be a, t, c, g, other or unknown
  misc_feature (693)..(693): "n" may be a, t, c, g, other or unknown
  misc_feature (701)..(701): "n" may be a, t, c, g, other or unknown
  misc_feature (709)..(709): "n" may be a, t, c, g, other or unknown
aagttggaggtaggggcctgtggaaacatgaagagggtaaacagctgtgtgaagagtgatgagcatgtcctggaggagctggaaacagaaggggagaggcagctgaaaagcctccttcagcatcaacttgatacttctgtctccattgaggaatgtatgtctaagaaagagagctttgctcctggtactatgtacaagccctttgggaaggaagcagctgggactatgactttgtcccaattccagacactgcatgagaaggaccaggaaactgcttctctcagggaattagggcttaatgaaacagaaatcttgatctggaagagccatgtttctggtgaaaagaagacaaaactgagggcaactcctgaagcaatacagaaccgtcttcaagatattgaagaaaggatctcggagcgtcagcgcattctttgcctgccacagagatttgcaaagagcaaacagctgacccggcgagaaatggaaatagaaaagtctttatttcagggagctgatcgtcactccttccttaaggctctttattaccaagatgaaccccaaaagaagaacaaaggtgatcccatgaacaacctggaaagtttttaccaagagatgataatgaaaaaacgtcctgaagagnttcaacttatgaaaaggtgaacccttttgcttccaatcactgggcncaagctncatcaatnggtgatantggca

SEQ ID NO: 4334 - DNA, 794 bp, Homo sapiens
  misc_feature (484)..(484): "n" may be a, t, c, g, other or unknown
  misc_feature (514)..(514): "n" may be a, t, c, g, other or unknown
  misc_feature (529)..(529): "n" may be a, t, c, g, other or unknown
  misc_feature (549)..(549): "n" may be a, t, c, g, other or unknown
  misc_feature (552)..(552): "n" may be a, t, c, g, other or unknown
  misc_feature (634)..(634): "n" may be a, t, c, g, other or unknown
  misc_feature (678)..(678): "n" may be a, t, c, g, other or unknown
  misc_feature (739)..(739): "n" may be a, t, c, g, other or unknown
  misc_feature (746)..(746): "n" may be a, t, c, g, other or unknown
  misc_feature (756)..(756): "n" may be a, t, c, g, other or unknown
  misc_feature (759)..(759): "n" may be a, t, c, g, other or unknown
  misc_feature (783)..(783): "n" may be a, t, c, g, other or unknown
acacaaccttggacattagagcctgtccgtctgatctagagaaggaatgttgctggggaaggaaaactcagggcgaggtgagagaggacagaacctctaaccaggaagaggctgtccccgccaagctccggagaggcgcggaagcatgaccctcaggtggtaacagaaaacaatccagatggggtgcaggtgctgtaaaataatacaaagctatctctttgatccagtccaagtgccctctcctggctatgtcaatgaagtcaacagctgcaagctagatgaagacgacactgataaattaaaaggcaaatggagcagtgaagtcttggtgcagaaaaatgaccctcagaggcagggctcaaagaagactgagagcagcagcaggacagctgatccatgggagccctgctggcctcaccaagggccgctcccacagggggacgctggaggggaacaccatgcctgcggtgtcaacggcatcggncctgctgccactccacagcccactgggaantccagccccacccangatgacaagggctcctgggncantactgcaaatactgttcccccaactcaacccttcctggaaggaggggggcaccaaggaaaacaaggactgtgtgctgctggnctcaaaagggacccaaagtcatgagaaattgggggactccaaangctccttctgaggcaaaaagttttgccttggaagtacaagaccatgtctccaaattccaanccccagnttacctttancanttggggcccaacttggggaaaacntttgatcataa

SEQ ID NO: 4335 - DNA, 743 bp, Homo sapiens
  misc_feature (595)..(595): "n" may be a, t, c, g, other or unknown
  misc_feature (620)..(620): "n" may be a, t, c, g, other or unknown
  misc_feature (667)..(667): "n" may be a, t, c, g, other or unknown
  misc_feature (702)..(702): "n" may be a, t, c, g, other or unknown
  misc_feature (709)..(709): "n" may be a, t, c, g, other or unknown
  misc_feature (720)..(720): "n" may be a, t, c, g, other or unknown
  misc_feature (727)..(727): "n" may be a, t, c, g, other or unknown
agtctgtgagctgggagcctgttggcaggtccctctttttattttcgctgagagctttcttttactaaatgccaccatccttacctttcaaggtgtctgcgtgcctaatttttcctggttgttagacaagaacccggattttagttgaactctggagcaaaaatcctgcatcatttgtaggtaatgtttgttttctttggttgcttttatgaccttctctttattcctagtatttgggcatttcacaaaaacatttataaatctgaattaaaaaacaaactgaccttgccaaggaccctactgatcccttttcatataattctatctgctaggtcttgtgctgccttctaagttagttcatcagttctatacttcagtatttaattctatattcagccatgttatcaaatgtttatttcaacctttgagtttctcatttgtaatagtattttttcatttttatgtttttaaaagagttcttttcatattttactatttttgtttagtaactttcagtacttgttgcgtagattttatttcatctttaagtttttgagatgtttgcataacacatttaaagacaattacatattgntggtatgatttccaattccttgggncaagaattctcccatttgttgcatcccctgaagagtttcccaaaggngggttaatccttgaataatgggtaaacttgcctgncctcaanttttttaaggntttaaanacctttaacaagttgg

SEQ ID NO: 4336 - DNA, 792 bp, Homo sapiens
  misc_feature (697)..(697): "n" may be a, t, c, g, other or unknown
  misc_feature (704)..(704): "n" may be a, t, c, g, other or unknown
  misc_feature (733)..(733): "n" may be a, t, c, g, other or unknown
  misc_feature (751)..(751): "n" may be a, t, c, g, other or unknown
  misc_feature (790)..(790): "n" may be a, t, c, g, other or unknown
ctgaaaaccttgtgcagcgagatggtgacttcctagttcgtgactctctgtccagccctgggaactttgtcctgacctgtcagtggaagaacctcgctcagcacttcaaaatcaaccggacagttctgcgactcagcgaggcctacagccgcgtgcagtaccagttcgagatggagagcttcgactccatccccggcctggtgcgctgctacgtgggcaaccgccggcccatctcccagcagagtggcgccatcatcttccagcccatcaacaggacggtgcctctgcggtgcctggaggagcattatggcacctccccaggccaggcccgggagggcagcctcaccaagggaaggccggatgtggccaagaggctgagcctcaccatgggtggcgtccaggcccgagagcagaatttgcccaggggaaacctcctcagaaacaaagaaaagagtggtagccaagcccgcctgcctggatcacatgcaggacagaagagccttgtccctcaaagccaccagtcagagagctacctgccgattggctgcaagctgccacctcagtcctcgggtgtggacacaagcccctgcccaaactcacctgtgttcagggacgggaagcgaagcctgccctggagcccgggagtgggttcgggagggtctcctcaagacgccaggggctgggggaaggcgctganggggatnaagacaagtcaaactggtgcccctaaagncccccggcctaaagcccntgcaaagggtggcccgtttccccaaagggttccctccgnct

SEQ ID NO: 4337 - DNA, 748 bp, Homo sapiens
  misc_feature (538)..(538): "n" may be a, t, c, g, other or unknown
  misc_feature (694)..(694): "n" may be a, t, c, g, other or unknown
  misc_feature (716)..(716): "n" may be a, t, c, g, other or unknown
  misc_feature (737)..(737): "n" may be a, t, c, g, other or unknown
  misc_feature (741)..(741): "n" may be a, t, c, g, other or unknown
  misc_feature (743)..(743): "n" may be a, t, c, g, other or unknown
aataacaatctaagttttttttcccccaagtactaaaattgtattgtctttcagacaatataatttttatttaaaattggagcatactatcttcatgctttctaagctaaatcttcatttagatttcactcctcagtagatcccagagaagaagctatataggatccagattcaaatttaacagtgtcttctacttttttagttatgttttctatcaactcctgctgccttttcaaatacggatatttttcaggagactcttctacttgtccactgactgtattttttcctttttgatccgtagccctggttaaatggctgacatccttccgtggatgattcttggaggtggtctcagagttccaaagtgattgtctgtcttcttcttgtcttgatcctaatgcagacattcacctctattatttatttattttttttagacagagtctcgctctgtcaccaggctggagtgcagtggcacaatcttggcttactgtaccctccacctcctgggttcaagcgattctcctgcctcagnctctcgagtagctgggactacaggtgtgtgccaccatgcccagctaatttttgtatttttgggagagatgggggtttaccatgtttgccaaggatgggcctcgatttcccggacccttggggatctgcccaaccttggggcctccccaaaaagtgnctgggaatttacaagggcaatnagggccaaccggttggccctngggncnaacct

SEQ ID NO: 4338 - DNA, 575 bp, Homo sapiens
  misc_feature (452)..(452): "n" may be a, t, c, g, other or unknown
  misc_feature (480)..(480): "n" may be a, t, c, g, other or unknown
  misc_feature (534)..(534): "n" may be a, t, c, g, other or unknown
  misc_feature (543)..(543): "n" may be a, t, c, g, other or unknown
  misc_feature (551)..(551): "n" may be a, t, c, g, other or unknown
  misc_feature (568)..(568): "n" may be a, t, c, g, other or unknown
atcaaggccctgggctggaggaagacatcccagatccagaggagctcgactgggggtccaagtactatgcgtcgctgcaggagctccaggggcagcacaactttgatgaagatgaaatggatgatcctggagattcagatggggtcaacctcatttctatggttggggagatccaagaccagggtgaggctgaagtcaaaggcactgtgtccccaaaaaaagcagttgccaccctgaagatctacaacaggtccctggaggaagaatttaaccactttgaagactggctgaatgtgtttcctctgtaccgagggcaagggggccaggatggaggtggagaagaggaaggatctggacaccttgtgggcaagttcaagggctccttcctcatttaccctgaatcagaggcagtgttgttctctgagccccagatctctcgggggatcccacanaaccggcccatcaagctcctggtcagantgtatgttgtaaaggctaccaacctggctcctgcagaccccaatggcaaagcanacccttacntggtggtnagcgctggccgggagcnggcaagg

SEQ ID NO: 4339 - DNA, 797 bp, Homo sapiens
  misc_feature (622)..(622): "n" may be a, t, c, g, other or unknown
  misc_feature (625)..(625): "n" may be a, t, c, g, other or unknown
  misc_feature (649)..(649): "n" may be a, t, c, g, other or unknown
  misc_feature (728)..(728): "n" may be a, t, c, g, other or unknown
  misc_feature (738)..(739): "n" may be a, t, c, g, other or unknown
  misc_feature (777)..(777): "n" may be a, t, c, g, other or unknown
  misc_feature (797)..(797): "n" may be a, t, c, g, other or unknown
agaggcgcggcgtgactgagctacggttctggctgcgtcctagaggcatccggggcagtaaaaccgctgcgatcgcggaggcggcggccaggccgagaggcaggccgggcaggggtgtcggacgcagggcgctgggccgggtttcggcttcggccacagctttttttctcaaggtgcaatgaaagccttccacactttctgtgttgtccttctggtgtttgggagtgtctctgaagccaagtttgatgattttgaggatgaggaggacatagtagagtatgatgataatgacttcgctgaatttgaggatgtcatggaagactctgttactgaatctcctcaacgggtcataatcactgaagatgatgaagatgagaccactgtggagttggaagggcaggatgaaaaccaagaaggagattttgaagatgcagatacccaggagggagatactgagagtgaaccatatgatgatgaagaatttgaaggttatgaagacaaaccagatacttcttctagcaaaaataaagacccaataacgattgttgatgttcctgcacacctccagaacagctgggagagttattatctagaaattttgatggtgactggtctgcttgcntanatcatgaattacatcattgggaanaataaaaaacagtcgccttgcacaaggcctggtttaacactcaaaaggggagcttttggagagcaacttttacttttantgggggaatnntggaactaacaaagaaagccacaaggcacaaggaaaanttttaaccaaggagaatggn

SEQ ID NO: 4340 - DNA, 642 bp, Homo sapiens
  misc_feature (555)..(555): "n" may be a, t, c, g, other or unknown
  misc_feature (570)..(570): "n" may be a, t, c, g, other or unknown
  misc_feature (616)..(616): "n" may be a, t, c, g, other or unknown
  misc_feature (636)..(636): "n" may be a, t, c, g, other or unknown
  misc_feature (639)..(639): "n" may be a, t, c, g, other or unknown
tatataaaaattattactttaaaaatagctgcataatattttatagtaactacgtgccatgatttatctaaacattccactactgatggattaacagattgtttccaattttttggaaacaatgacaaataatgctgcagtaagaattcttggacatatgctcttgaatactttctgtggcatagatttgttttggcttgctggctgaaattgtaagagcatttcaaatttaatagatattgcgaattttccttccaaaaatgtatagcagtttacattaacaataccagaaaggggtcatcattctcctgaatacccaacagtactgaatatattgctctttagaaatttttgccaggctgatgcatgaaaaattctatcttgttttagtttgcatttctctgactactgctgagattaaacatgttttagatgtttatgaatcctttggatttcttcttccatgaattgtctaattatgcatgtggctgtgtatgtgtgtatatgtgtatgcatctgtatgtttgtgtgtgtatgagatcaagtgattttccnaatgggtaggtgtcntttggaaaatctagtgtaaaggtgcattagttaaaaccaggcctanctgtataaataccagaaaanttncaa

SEQ ID NO: 4341 - DNA, 740 bp, Homo sapiens
  misc_feature (444)..(444): "n" may be a, t, c, g, other or unknown
  misc_feature (574)..(574): "n" may be a, t, c, g, other or unknown
  misc_feature (592)..(592): "n" may be a, t, c, g, other or unknown
  misc_feature (601)..(601): "n" may be a, t, c, g, other or unknown
  misc_feature (694)..(694): "n" may be a, t, c, g, other or unknown
  misc_feature (710)..(710): "n" may be a, t, c, g, other or unknown
  misc_feature (716)..(716): "n" may be a, t, c, g, other or unknown
  misc_feature (719)..(719): "n" may be a, t, c, g, other or unknown
  misc_feature (730)..(730): "n" may be a, t, c, g, other or unknown
tactgtataaggttctatacctggtagcttccaggtggtagttggtaccagaatgggcgcaaacttagtctcttctccattctgacttcaaacctgggtcactacaatttcttggatcacgaaaactgcattcttccttaaatggtgtcactaagttgtctttctgtttctttctgccatggtcattgtcagcagtgaccccaggccaaagaacagtttttcattcattctcaatacctcgatgagaccatgtgctactctgtgtttccacaactctagtgtgattttgaagttgtatgtttttctgttcctgtctagtgagacagtctctaatcttactggatctcatcattaggtaattcaatgacaagtttaattggggaaaagagagaaggatctagtcccccgaatttgttttgggtcctgtcccagttgtcttctggntaagtaggtttttgtgcttaagaatatgttgacttcaggcatttaacaagggacaaaacatctatttttaagtgacttaaggaagtggtaggaacagaatctaagtgtagccagatgaaaggtgacttantttgtttagacaggcaanaactgtggnctaccatgatctgttcatcaaattatccaaaacacagtccttttcaggcttcctttcctttccttcttcctcctttttcccaaactctttggnaaagtggcccatggtnactggnaangacttacccancttgggcaaa

SEQ ID NO: 4342 - DNA, 779 bp, Homo sapiens
  misc_feature (564)..(564): "n" may be a, t, c, g, other or unknown
  misc_feature (597)..(597): "n" may be a, t, c, g, other or unknown
  misc_feature (639)..(639): "n" may be a, t, c, g, other or unknown
  misc_feature (644)..(644): "n" may be a, t, c, g, other or unknown
  misc_feature (685)..(685): "n" may be a, t, c, g, other or unknown
  misc_feature (719)..(719): "n" may be a, t, c, g, other or unknown
  misc_feature (755)..(755): "n" may be a, t, c, g, other or unknown
  misc_feature (760)..(760): "n" may be a, t, c, g, other or unknown
  misc_feature (771)..(771): "n" may be a, t, c, g, other or unknown
tgtgtatggccaagcctggacatgaactcagtgatcatctgggtcaaacagctcactgtgcaacaggaaagttgaggaccagggtcacacaaaattaaactgtattcacagatgatcccctctaaatggtctgagagatcatttggtccagcacttcccattcctggctgcacctggaataaccagcttttaaaacatccttctgcccaggctgcaccccaaggattctgatgttgtgggtctggggttggcctgggaacgggtgtttcccaaagccttctcaggtaatgttgaaggaccactagtgaaaataattactgatgtagtctgacatcctcttgttctgcagaggcccaaagggtaaacgatgttccctgcttactgagctgggtagtagctaagcatttggggaagttccggtgccccaagctctgaaggaccctcttccatgctgacttcctctgttcactccaaacccctgggtgccacaggtcctgacatttcattttttccagtgccattcctgtgtggaaccatggtggtccccatctttacaggaggcanctgatgtcaaatgaatctctcggagttttgganagagaacctcttttgaacaagaaggattataagaaagggaanctcanctctaaggcattcaccattcactttgccctgggctaatccnttaaaaaagatgtgtgttcctaatacttcaaaanccctcaactttagattcctccgaaaccaacaatggntgcangtgtcccaatnaggggaag

SEQ ID NO: 4343 - DNA, 830 bp, Homo sapiens
  misc_feature (693)..(693): "n" may be a, t, c, g, other or unknown
  misc_feature (726)..(726): "n" may be a, t, c, g, other or unknown
  misc_feature (766)..(766): "n" may be a, t, c, g, other or unknown
  misc_feature (789)..(789): "n" may be a, t, c, g, other or unknown
  misc_feature (791)..(791): "n" may be a, t, c, g, other or unknown
  misc_feature (817)..(817): "n" may be a, t, c, g, other or unknown
  misc_feature (830)..(830): "n" may be a, t, c, g, other or unknown
atcttggaccaagcccgaggaagatactgagggagcacaggagcagtcaccgctgccactgctactgccgctactgctgccggcgcgtctgcacctctcggcctgccagtgtacctgccggcgcctcggtcgaccgcccccgccccctctcccgctgcgtccgcactcctgttcctggtcctgacgcccccctcccgcccggaaagctgcccagccaccagcaaccccccagtgccaccatggcaactgcaccatacaactactcttacatctttaaatatattattattggggacatgggagtaggaaaatcttgcttgcttcatcaatttacagaaaaaaaatttatggctgattgtcctcacacaattggtgttgaatttggtacaagaataatcgaagttagtggccaaaaaataaaactgcagatttgggatacggcaggacaggagcgatttagggctgttacacggagctactacagaggagctgcgggagctcttatggtctatgatatcactagaagaagtacatataaccacttaagcaactggttgacagatgcaaggaatctcaccaatccaaatactgtaataattctcataggaaataaagcagatttggaggcacagagagatgttacatatgaagaagcaaacagtttgctgaagaaaattggcttattgttcctcnaaagcgagttgcaaaaacggggagagaatgtanaagattgcttcccttgaggctgccaagaaaaatcatcagnacattcaaggatggaagcttggntntgaatgctgctgaatccggggtaaanaacaaaccttcan

SEQ ID NO: 4344 - DNA, 837 bp, Homo sapiens
  misc_feature (709)..(709): "n" may be a, t, c, g, other or unknown
  misc_feature (728)..(728): "n" may be a, t, c, g, other or unknown
  misc_feature (765)..(765): "n" may be a, t, c, g, other or unknown
  misc_feature (767)..(767): "n" may be a, t, c, g, other or unknown
  misc_feature (806)..(806): "n" may be a, t, c, g, other or unknown
  misc_feature (810)..(810): "n" may be a, t, c, g, other or unknown
  misc_feature (828)..(828): "n" may be a, t, c, g, other or unknown
attattttccaaggaattttttcttaatttttaagatttaacaagtttaactacaattaataaagtactcccggcacaaggactctgaaacattgtttgggtcttggaaaagtttgaaacctccaattcattaggactttgagtaactattttgtacctaagaatgagaattgatggagagagtggtactaagcacataattttatgaaatatgatgaaaacatgagagttttgttatgacgcacataacaataaagaacctgtttctttttagcaggctcctaaaaagtacttcccttataattattaaataaaaacactcacttattcagtactcagctagcttttaagatctgaataacagaagtacacagtgagagaggtacttacatggtttccttggatactggatgatgccattcaggtctatgtttttatctgaaaatggtgccctgtggagaaacgaggcttggtgagtggctgtttatacatagtaagtaaataggaactttgtttattttacaaagcattttttattttgacccagctttccttttctcatcacacccaactcctgtaaacagcaataatatggtagaacaggtactctgtacaactctttttaactccacttaagaaatcataattattaaggcagaagctcagaatgctttggctaaggatgttacctccttgggctgctttatanatcctgactttttaattangtcagacatattaaaggaatattgcctggcctccccnantttccccaaaaagggaatattggctcaaaaccaactaantaangaaatttaggcctaaaancattcacat

SEQ ID NO: 4345 - DNA, 788 bp, Homo sapiens
  misc_feature (467)..(467): "n" may be a, t, c, g, other or unknown
  misc_feature (473)..(473): "n" may be a, t, c, g, other or unknown
  misc_feature (511)..(511): "n" may be a, t, c, g, other or unknown
  misc_feature (626)..(626): "n" may be a, t, c, g, other or unknown
  misc_feature (635)..(636): "n" may be a, t, c, g, other or unknown
  misc_feature (649)..(649): "n" may be a, t, c, g, other or unknown
  misc_feature (712)..(712): "n" may be a, t, c, g, other or unknown
  misc_feature (734)..(734): "n" may be a, t, c, g, other or unknown
  misc_feature (772)..(772): "n" may be a, t, c, g, other or unknown
  misc_feature (781)..(781): "n" may be a, t, c, g, other or unknown
  misc_feature (783)..(783): "n" may be a, t, c, g, other or unknown
ataagagtcctctcgttggtcccggaggtggggttgcgctcacaaggggcgaccgtcgccacggtggcggccactgcatcgcgtcccacctccgcggccctgggcgccgtggtgtcgacgggccccgagcctatgacgggccagggccagtcggcgtccgggtcgtcggcgtggagcacggtattccgccacgtccggtatgagaacctgatagcgggcgtgagcggcggcgtcttatccaaccttgcgctgcatccgctcgacctcgtgaagatccgcttcgccgtgagtgatggattggaactgagaccgaaatataatggaattttacattgcttgactaccatttggaaacttgatggactacggggactttatcaaggagtaaccccaaatatatggggtgcaggtttatcctggggactctactttttcttttacaatgccatcaagtcatataaaacagnaggaanagctgaacgtttagaggcaacagaataccttgtctcanctgctgaagctggagccatgaccctctgcattacaaacccattatgggtaacaaaaactcgccttatgttacagtatgatgctgttgttaactccccacaccgacaatataaaangaatgtttnntacacttgtgaanaatatataagtataacggtgtgcgtggattataaaagggatttgttcctgggctgtttggaanaatcgcatggtgcccttcaagnttaatggcatatgaaattgccggaagttttaaagtttnaaccagcantntcaat

SEQ ID NO: 4346 - DNA, 845 bp, Homo sapiens
  misc_feature (543)..(543): "n" may be a, t, c, g, other or unknown
  misc_feature (718)..(718): "n" may be a, t, c, g, other or unknown
  misc_feature (775)..(775): "n" may be a, t, c, g, other or unknown
  misc_feature (797)..(797): "n" may be a, t, c, g, other or unknown
  misc_feature (806)..(806): "n" may be a, t, c, g, other or unknown
  misc_feature (824)..(824): "n" may be a, t, c, g, other or unknown
  misc_feature (832)..(832): "n" may be a, t, c, g, other or unknown
gctaaaatgaatgactcttcctgctcacttaaacctgtgctcaaaatgacatatttgtcaggcaccctcttcatttaccttaaagaaggagagtttaatgtccatcttggttctgccctatgaatcatcttgtcaagaacaggtgttcttatgcagaaacaatgaaaaccttatactgaagtgtgaaccctggatttcttagtttcttctgagtcctagaagaagggttggaatagaataatacatttacaggatttaggttggttttctttctgtccagtctcatctgaatttcgtctgtctcttgtggtccagaagttccacagagcaacgcagctgcatgtggtgacaggtagagcagttaaagctgccaataggaactcgtccatattccacacacctggtatagtgttatgccctccatgggcacttacctgcaataagcagaagccactgccacattcccgtgtattgggaaaatggactactgtgtgcgaacaggccctttaccctaatggcagggaagatggattatctttgggncagtggagctgccaatctaagacatacacattcaactgaatacaattaaaagcagttctttaaatgcaaatataattactcatctttataatacaatagtattaactgcccatatgctcatagtatgatgagccctgtatagcacaaggtcaacaggtcctctccttgtccttanaatctaaagcagatgacactgacatggacaaaacaagtgcacatgcatagttgcggnagttttagaggaaatctagaangctaggtancaacactatgcataaatnttgggggnccaatggcaatta

SEQ ID NO: 4347 - DNA, 853 bp, Homo sapiens
  misc_feature (689)..(689): "n" may be a, t, c, g, other or unknown
  misc_feature (703)..(703): "n" may be a, t, c, g, other or unknown
  misc_feature (711)..(711): "n" may be a, t, c, g, other or unknown
  misc_feature (806)..(806): "n" may be a, t, c, g, other or unknown
  misc_feature (824)..(824): "n" may be a, t, c, g, other or unknown
  misc_feature (828)..(828): "n" may be a, t, c, g, other or unknown
  misc_feature (841)..(841): "n" may be a, t, c, g, other or unknown
  misc_feature (848)..(848): "n" may be a, t, c, g, other or unknown
aatggataaggactaaagtaaaataattgacagaatctagtaaagaattcaagtaggcagttagatatattaatctggaggtcaagggagagatgaaataaataattttggaagtctttggtgcacagttggtttttaaagccttgagagtggataagctgacaccaaaggactgagtacaaagggtaaaaagaaagggtccaaggactaagccctgagacctaccagcatttagggggtaagcagatgagaagggagcaccacaagggactaagaaggagctgctgccgatctccagtgcaacatggaggcaagagcctcattagatttaggtccagagaaaattagaataaagaaattgcaatagggagtgagtgataacttcacacatatctagctaacccacagctaccttgatgggagctctattggtgggaagaggcaggaagagcctgattaagtgggttcaagaaaacctaagaggaaatgagttggatactaccagtatggaaggtctttgaacaggttttgccctacaagggggaagaaaaacgaggtagcagttggagagaatacaagatgaagacagtttttagaaggcagtgatgttacagaatatttgtgtaagacaagccaatagagaggagaagatgacgatgcaagagaatccattgcaggagcaatgttcntgagtcagtgatangggatggnacataatggacaagttggagtggtgtgatcataaatcactttgatgtaaagaccatctcatcaagaactccaacagctttcccccactggctccntttcataacaccaaaggnccancctttggggtccnaacaaangccta

SEQ ID NO: 4348 - DNA, 694 bp, Homo sapiens
  misc_feature (581)..(581): "n" may be a, t, c, g, other or unknown
  misc_feature (610)..(610): "n" may be a, t, c, g, other or unknown
  misc_feature (613)..(613): "n" may be a, t, c, g, other or unknown
  misc_feature (673)..(673): "n" may be a, t, c, g, other or unknown
  misc_feature (677)..(677): "n" may be a, t, c, g, other or unknown
  misc_feature (687)..(687): "n" may be a, t, c, g, other or unknown
aagacaacgtcactaagcagtttctgggagctacttgccaaggctgagtgtgagctgagcctgccccaccaccaagatgatcctgagcttgctgttcagccttgggggccccctgggctgggggctgctgggggcatgggcccaggcttccagtactagcctctctgatctgcagagctccaggacacctggggtctggaaggcagaggctgaggacaccagcaaggaccccgttggacgtaactggtgcccctacccaatgtccaagctggtcaccttactagctctttgcaaaacagagaaattcctcatccactcgcagcagccgtgtccgcagggagctccagactgccagaaagtcaaagtcatgtaccgcatggcccacaagccagtgtaccaggtcaagcagaaggtgctgacctctttggcctggaggtgctgccctggctacacgggccccaactgcgaacaccacgattccatggcaatccctgagcctgcagattctggtgacagccaacaagaacctcaaggatggaccaatcagcttcaaaccctgggccacctttgctgcagtgatnaaattgaagggttgaagggtgcaaacaanggnaacaagcaagggaaacaatcctggctggggaagaattctccaaagaaattgaatggtttncaanccgggggttnggcaaag

SEQ ID NO: 4349 - DNA, 787 bp, Homo sapiens
  misc_feature (729)..(729): "n" may be a, t, c, g, other or unknown
  misc_feature (741)..(741): "n" may be a, t, c, g, other or unknown
  misc_feature (750)..(750): "n" may be a, t, c, g, other or unknown
  misc_feature (774)..(774): "n" may be a, t, c, g, other or unknown
  misc_feature (787)..(787): "n" may be a, t, c, g, other or unknown
tttattaaatagggtatcctttcccattgcttgtttttgtcaggtttgtcaaagatcagatgcttttagatgtgtggtgtcatttctgagggctctgttctgttccattggtctatagatctgatttgttaccagccccatgctgttttggttactgtagccttgtagaataatttgaagtcaggtactgtgatgcctctagctttgctgtttttgcttaggattgtcttggctatgtgggctcttttttggttccatatgaaatttaaagtagtttttctaattctgtgaagaaagtaatggtaacttgatggggacagcaatgagtctataaattactttgggtggtatagcagtcaggcacagaaatgtccttgtgttaggcaataccattcaggacatagccatgggaagagtcctcatcactaagaacaccaaaagcaatggctacaaaaaccaaaatttacaaatgggatctaactaaacttaagagtatctgcagcgcaaaagaaactattatcagagtgaacaggcaacccacagaatgggagaacattgttgcaatctatccatctgacaaagggctaatatgcagaatctacaaagaacaaatttacaagaaaaaaaaaccatcaaaaagtgagcaaagggtatgaacagacacttaccaaagaaagacatttatacagccaacgaacatgtgaagcaaagcacatcatcactggtcantagagaaatggnaatcaaaancacaatgagatacaaatctcaagnccactttagaaan

SEQ ID NO: 4350 - DNA, 632 bp, Homo sapiens
  misc_feature (549)..(549): "n" may be a, t, c, g, other or unknown
  misc_feature (593)..(594): "n" may be a, t, c, g, other or unknown
  misc_feature (597)..(597): "n" may be a, t, c, g, other or unknown
  misc_feature (606)..(606): "n" may be a, t, c, g, other or unknown
atagcacagctgccagtagacccccggtcaccctgaggctggtggtccctgctagtcagtgtggctctctcattggaaaaggtggatgcaagatcaaggaaatacgagaggctggagtgcagtggcgcagtcatggctcactgcagcaaaacatcgaccttcccagcctcaggcgatcctctcatctcagcctcccaaggagccgggactgcaggctcccaccaccacacccaaatttttgtatttttttgtaaaaatggtgttttgccatgtggcccaggctggtttcgaactcctgagctcaagcaatccacccacctcaggctcccagtgttattactacaggcttgagccagcacacttgcttgcctgcagcgtcatttttcttgaccagacttataaacaacaaggagaaaaataggaagatgtattgggaaatagatgtaattctacatcttttttttttttttgagacagggtctcactcaagctgaagtgcaaggcataatcgtgatcatgggttactgcaacctcgacttctgggctcangttaccctcctaactcaaagcctcctgaggtacctgggaacaannggngcgctccanaaatgccccggggaaattttccctcc

SEQ ID NO: 4351 - DNA, 760 bp, Homo sapiens
  misc_feature (637)..(637): "n" may be a, t, c, g, other or unknown
  misc_feature (682)..(682): "n" may be a, t, c, g, other or unknown
  misc_feature (689)..(689): "n" may be a, t, c, g, other or unknown
  misc_feature (719)..(719): "n" may be a, t, c, g, other or unknown
  misc_feature (729)..(729): "n" may be a, t, c, g, other or unknown
  misc_feature (747)..(747): "n" may be a, t, c, g, other or unknown
acaagtctttagggatccaaactttccctcatcttcctgtcttcttctgagccctccacaaaattccaacctctgtccactatgcagttcaaaatcgcttccacattttcagatatctttatagcagtgccccactcctcagtatcaacttcctgtattagttcattctcacgctgctatacagagacacttgagactgggtaatttataaagaaaagacattttattggcttatggttctgcaggctgtacaggaagcataagtagcttctgcttctgggtaggcctcaggaaactttcaatcatgtcagaaagtgaagcagaagtaggccatgtgttacatgcatggctggagcaggaggaagagaggtagaagggaggtgctacacacttttaaacaaccagatctcatgataactcactatcatgagaacagcaccaaaggggaaattcacctccatgatccaatcacctccaatcaggccccacctccaacactggggattacaatttgacatgaaatttgggtgatgacacagatccaaatatttccattctgttgactgcaatctacctaattccattaggtttaatgggataactcaagattcaagaacaatataattactccatttanctttagaatgggctaagacaaactaatcttgtaagccggattggntttcaanacttcaattttttcaaggcacctattgggncaacactggnttcaagggatttagcaanattaatttggcaa

SEQ ID NO: 4352 - DNA, 867 bp, Homo sapiens
  misc_feature (600)..(600): "n" may be a, t, c, g, other or unknown
  misc_feature (643)..(643): "n" may be a, t, c, g, other or unknown
  misc_feature (683)..(683): "n" may be a, t, c, g, other or unknown
  misc_feature (733)..(733): "n" may be a, t, c, g, other or unknown
  misc_feature (740)..(740): "n" may be a, t, c, g, other or unknown
  misc_feature (788)..(788): "n" may be a, t, c, g, other or unknown
  misc_feature (790)..(790): "n" may be a, t, c, g, other or unknown
  misc_feature (853)..(854): "n" may be a, t, c, g, other or unknown
  misc_feature (864)..(864): "n" may be a, t, c, g, other or unknown
tatctaaatatttttttctttgaaagcagaggctgtgcatttcatctaggcacatagcagaagctcactaaatttttactaatagagctgattcatattttagctagtaaaacggttatgtcaaggcagtagcatttcatcatgacataccaaaatactgacttatattcttactgggatgtgttcttccatgggtgtgactatagcggtatctctaggcagaggcaaaatatttttcaagaaacagtctacgttcctgagtaagtactctgttgataccctagaatttcatgccacgcaagatggcagggatccctgtaacaggaaaatgtggaaagtgccaccagttgtccatatcaattctaaggtgactgaattcttcacaatagttgagttgaaataatatcatgtcctattgggcctagcagaaggaattgggtaaaaatatgttcctccaggaattgccctgctgaactgactttgtttggtatttaccttgtgtaaactagaaaatagctgccaaaaaattttgaatttggatatatttgatgatgagcttttccttctcttactagttagacaacaggatccattgcttcntgaaatatttctcaggttgtgataataaaaccatttgaactanttggagaacagcacatataccctgtttgcaacagcaaggnagtatcactttattcacatttataaagtgtataaataagttgaaaagaantgtgtangtgtttgtgggaagttgaaaggagtcagttttcctttcctgagggatnanggtgtggatttcctaatttttttaggtttaatttttgggggaattttaaaacctttatttggnnggtatttgangat

SEQ ID NO: 4353 - DNA, 636 bp, Homo sapiens
  misc_feature (581)..(581): "n" may be a, t, c, g, other or unknown
  misc_feature (616)..(616): "n" may be a, t, c, g, other or unknown
  misc_feature (622)..(622): "n" may be a, t, c, g, other or unknown
  misc_feature (629)..(629): "n" may be a, t, c, g, other or unknown
  misc_feature (633)..(633): "n" may be a, t, c, g, other or unknown
tatggatgaatactgttgggccctaccataatcgtcaagaaacatataagtacttttcacttccattctgtgtggggtcaaaaaaaagtatcagtcattaccatgaaactctgggagaagcacttcaaggggttgaattggaatttagtggtctggatattaaatttaaagatgatgtgatgccagccacttactgtgaaattgatttagataaagaaaagagagatgcatttgtatatgccataaaaaatcattactggtaccagatgtacatagatgatttaccaatatggggtattgttggtgaggctgatgaaaatggagaagattactatctttggacctataaaaaacttgaaataggttttaatggaaatcgaattgttgatgttaatctaactagtgaaggaaaggtgaaactggttccaaatactaaaatccagatgtcatattcagtaaaatggaaaaagtcagatgtgaaatttgaagatcgatttgacaaatatcttgatccgtccttttttcaacatcggattcattggtttcaatttcaactccttcatgatggtgatcttcttggngggcttagtttcaatgattttaatgagaacattangaaagnttatgcncggnaca

SEQ ID NO: 4354 - DNA, 762 bp, Homo sapiens
  misc_feature (669)..(669): "n" may be a, t, c, g, other or unknown
  misc_feature (677)..(678): "n" may be a, t, c, g, other or unknown
  misc_feature (720)..(720): "n" may be a, t, c, g, other or unknown
  misc_feature (723)..(723): "n" may be a, t, c, g, other or unknown
tttatgctaccaggatttctaaagcacaccaagaggaaatagcaggtgctttcctagtgacactggatccacttatcagtcagctgctcacatttcagcctttcatgcaggtggttttggacagtaaattagacctgccatgtgaactgcagtttccacaatgtcttcttctggttgttgtcatggataagctgccatctcagcctaaggaagtgcaaaccctgtggtgcacagacagccaggtctcagaaacgacaaccaggatatctctactcaaagccgttttctacagttttgagcagtgttctggtgaactctctctacctgttcatttacagggattaaagagtaaggggaaagctgaggtggctgtcaccttgtatcagcatgtttgtgttcatctgtgtacatttattacttcctttcatccctcactgtttgctgaactggatgctgctctgctgaatgctgtacttagtgctaatatgatcacctctttgttagctatggatgcatggtgcttccttgctcgatatgggactgctgaactgtgtgcacaccatgtcaccatagtggctcatctgataaagtcatgccctggagaatgttatcaactcatcaacctatcaatactgttgaaagcgtctcttttttcttcatgggcaccancccatcannctgggaggtttatccaagaaaattttccccaaaaaggaaagncangaaaatcctgccctcctggtgggcaaacaataatttccc

SEQ ID NO: 4355 - DNA, 770 bp, Homo sapiens
  misc_feature (609)..(609): "n" may be a, t, c, g, other or unknown
  misc_feature (617)..(617): "n" may be a, t, c, g, other or unknown
  misc_feature (655)..(655): "n" may be a, t, c, g, other or unknown
  misc_feature (705)..(705): "n" may be a, t, c, g, other or unknown
  misc_feature (736)..(736): "n" may be a, t, c, g, other or unknown
  misc_feature (765)..(765): "n" may be a, t, c, g, other or unknown
  misc_feature (767)..(767): "n" may be a, t, c, g, other or unknown
  misc_feature (770)..(770): "n" may be a, t, c, g, other or unknown
atttattttgatgtcggcggggtgtgcaagatgaccctttcctcacgccgtctccgatattggtgttcaccaaaacatctttatccagtagtgcaaaatgtcatgctaaccttgtcttagtttcacgtctttaattctgaaacttgaaacaaaaacaatgcatcagtgggccatggagacttcttcttctgtgtatgggatactgtgtcttttattcttctattctggtatgtcctccctgatttctagtcatttttgaattatttatagacagtaaacattgcccaatatattatgaaaatgtgtttccactttattgttgcctctgaaaacattttgaacagaagcttttataagcaaggcttgaatttttcttttttatgttgtcttaggtttgtgtgagtttccacctttgtgtaacacatttttccttttaacagaaccattttatcactgtctctcttccttcttgggaaaaagaaaaccatctttttcttttcatttgcattacttacaactatgaattgatttatagagtgctaaaatatttgtaaaatcgagcagattcttctgtgtgcctttttctcctggtgatttatttaaatgggntttctaangggttttcccgtcaagtattgatttgttttgggtggantacgattttaaggtgcgcctaattggctccccggtttcctgaaactatancaacaatttttgggggcaatcccctccttantccccactggaaatgaaggaaccccttgngnaan

SEQ ID NO: 4356 - DNA, 767 bp, Homo sapiens
  misc_feature (674)..(674): "n" may be a, t, c, g, other or unknown
  misc_feature (747)..(747): "n" may be a, t, c, g, other or unknown
  misc_feature (756)..(756): "n" may be a, t, c, g, other or unknown
  misc_feature (760)..(760): "n" may be a, t, c, g, other or unknown
  misc_feature (763)..(763): "n" may be a, t, c, g, other or unknown
tatgagtaatacttgtaaaccttaggagaggaatgttgatgtatttaacttgtaaactttgttttcagcttcttttgtgttaggtaggtacatgtatgcttgggtgtaggataaatagcaatgctataataatactgtatatattgttatatgaagattgcattttatttcaagatttcctttggagataacttttaaaacattgagatttcaaaccacaagatcactaattacttgcataacacttagcataattttctcctaaacgatatcatggtctttctatagttaacactcaaggtgattttctttattgttctctttgccttctttattttgaatttgaggcacttagtatatttttttataagttatagccacatatcagtacttaccagcatgataagcagttctttactataaaattaaagtttgtaaaccattaagtgtaatttttggtcagaccacaagtcctgttgcttttttatttaagttgctttaaaaattttttctaaacatacagaataacaaccgttaagatctcatttttctctccaactactctctcatttgtttcttaaactcccttttttttcagcctgttttttggaaccctgttagagaagaacagacatatattgtccctgaaaggtacatttaattataatcctcangtaattacattatgtaattacactcaatcacctaattagcactgcttaacacatgttaactttgcttttggtncgttttganacanggnctgc

SEQ ID NO: 4357 - DNA, 691 bp, Homo sapiens
  misc_feature (644)..(644): "n" may be a, t, c, g, other or unknown
  misc_feature (658)..(658): "n" may be a, t, c, g, other or unknown
  misc_feature (673)..(673): "n" may be a, t, c, g, other or unknown
  misc_feature (675)..(675): "n" may be a, t, c, g, other or unknown
  misc_feature (678)..(678): "n" may be a, t, c, g, other or unknown
gtaatcaaggaagttaagatattcatcatccacagaagtctcattgtgccactttatgttcttttatcaggaaactgctgaattattttccaaagtatatgtaccattttctgtttctgcagctgtatatgacaattccagttgctctgtgtgtcatcacaaacacttagcatcagcatttattttatattttgagtcattctgaagggtgtgtgttgtgcacatcattatgtttttcatgtttgttacctgaatgactaataatattaagcttctttttatgtgtttatttgccatctgtatatcttctttgctgaattgtcatttcaaacattttgctattaaaaatcaggtttcttttttcttttttctgtttcttttaaacatttcctgaaaattttcagtgtaacatctatgaaatcaaaggatgaagaagatcgtgcccaggtaatacccactctctttgtcttctaaagaaatgttgctttcctgatttcctcccttctcaatttagatgtgaaaatctaacaatacacataatgtacaacatatacaattctctttgtgggggtggtgttcagtgggactctcctcccaactgacacctgaaccctaagacattttaaaatgacagtattcattancaagtgtaatgtanaggattttcctcagnancangtttcccccttgg

SEQ ID NO: 4358 - DNA, 726 bp, Homo sapiens
  misc_feature (578)..(578): "n" may be a, t, c, g, other or unknown
  misc_feature (632)..(632): "n" may be a, t, c, g, other or unknown
  misc_feature (713)..(714): "n" may be a, t, c, g, other or unknown
  misc_feature (716)..(716): "n" may be a, t, c, g, other or unknown
  misc_feature (719)..(719): "n" may be a, t, c, g, other or unknown
ttgcttatcaatttagagctcttctatggaaagagggtgaaaatctgttttgtgcctcttttttttgtatgtaaatgtgcaattatactggattttctcttgtaaaaaacactacaattcttttactgaagctcctaaactgccatttgcctgactccagcaattaattctgcggtgactcattgggcttccagtacttctgttgattggatatggtcccaaaagaaagagcaaaatggaaaatgcgatccatgtcaccaaatataattgctacaagtaacatgaaatacagctcaccaaaacactaaactttgctcttgagcaattatatagttcgatgtccttttaaaaaataagaaaagctaggttttatcatactaaaattttattttgtatatgatgtttggttttttaaacttactaacataaggatttcctttaatattccaaatacagttcttgaaacagtatccaacatgaaatcttatctccttgcttttagacttaagtgctatttactatctaaagacttttctatggtaagccagggtacatcctatatactacagataccttangtttcaagtatttttaagcagcttcttcaatgtgccacattttgttttcataanctgtaacaagagctccggctgaaattaaaaaaaaaattatggattaatagggatttgtttcaccatttcaagaaatccagnntnagnaaaacaa

SEQ ID NO: 4359 - DNA, 821 bp, Homo sapiens
  misc_feature (588)..(588): "n" may be a, t, c, g, other or unknown
  misc_feature (656)..(656): "n" may be a, t, c, g, other or unknown
  misc_feature (712)..(712): "n" may be a, t, c, g, other or unknown
  misc_feature (764)..(764): "n" may be a, t, c, g, other or unknown
  misc_feature (792)..(792): "n" may be a, t, c, g, other or unknown
  misc_feature (796)..(796): "n" may be a, t, c, g, other or unknown
  misc_feature (798)..(798): "n" may be a, t, c, g, other or unknown
  misc_feature (812)..(812): "n" may be a, t, c, g, other or unknown
tctcttgcttttgggaaagttaccacagggtctgcaagaaacctgttgtataactgtagacactctctaatggttctcaaaggaggaaatgtagccttcagtctcctcatttgtcctttgaggaagtccacatttgttcacagttgcaacctttggttttacagtgggaaatggtggtggatgatatggacatatgtagcccagtggcattgtacttctgctgacagctgcacacattacagctgtctccaaacccacagtgatgcttagggaaagaccctgctcaggacccagcaggtcagcaccccagagcagactgataggtccgtgggacccatgttagagcagaaaatttgggctcagcacattttactgttagtagagagccaggaaacgttttctgggttggggattttgtgggattttttaatttttttagtaggttttgtttaacctctgtgcagtttgtatgaatgaattgctatacatttataaggagccagggtctggagggttgctatcactttgtccagcccaaataccttcctgggcaactcctaccatttgtttgcaggttgcctctactanctgatggcagtatgctggaaagaggttgtactataaagagagttctttccttccactccaagagttgntggtgtagctttgccattgaacccgatcaattttttaaactccttaaaggaagcancaagctatttttttgaaaattaaagaaaattctcaggccaaggctcaatggncatgcctataattgtaatgcctttggangctnanctgggagatccttnagacagcca

SEQ ID NO: 4360 - DNA, 801 bp, Homo sapiens
  misc_feature (599)..(599): "n" may be a, t, c, g, other or unknown
  misc_feature (719)..(719): "n" may be a, t, c, g, other or unknown
  misc_feature (727)..(727): "n" may be a, t, c, g, other or unknown
  misc_feature (743)..(743): "n" may be a, t, c, g, other or unknown
  misc_feature (762)..(762): "n" may be a, t, c, g, other or unknown
  misc_feature (784)..(784): "n" may be a, t, c, g, other or unknown
agaaaaaagataatatactaattcttaattttagtaagtagacagttgtagtgtatggatgttttgttaaatctttgttgatacagaatatataatttcctttttctgtttgtgtgagaagtaaagattgaacaaaaatatgtgagtgctaaactgtctttaaaaagtagataactatatcaaaaagagtaaggaccagtgggcaccatgcagaacaagcaaatagaagctcagcctttgagtagcagctttggtagtatacaaaaatgaactgaaaataggaactcagcagtgttttaagatgacagattaaacaaacatcccaccagaaagaggtaatcacttagactaatttcctcatcccctaggataaaatcttaagtcagtgacttgaaaactattttgacccaatccattgagaaatgcatttttacattgcagcccagcacacacatatgtataactgaagcaagagttgtacttaacaatacttacttatccgtgtgttatgcatcttgatatttcttattctcttttaccccttcctctgtgtgtctgtgtgtattctttttcccccccacccacccgataccgttcangaaacactacgttgatttcattacctgctaatgtgttgcaacccctttgagatgatcctactagttatgatgagatgcttccaataaaagttacaccagttgaaaatgccaatatttcanaagggcangatgatgacttagatngtactaatattacaacacnttaggaaagtcattcattttantttaggaaggcactatt

SEQ ID NO: 4361 - DNA, 787 bp, Homo sapiens
  misc_feature (560)..(560): "n" may be a, t, c, g, other or unknown
  misc_feature (607)..(607): "n" may be a, t, c, g, other or unknown
  misc_feature (627)..(627): "n" may be a, t, c, g, other or unknown
  misc_feature (629)..(629): "n" may be a, t, c, g, other or unknown
  misc_feature (631)..(631): "n" may be a, t, c, g, other or unknown
  misc_feature (725)..(725): "n" may be a, t, c, g, other or unknown
  misc_feature (728)..(728): "n" may be a, t, c, g, other or unknown
  misc_feature (745)..(745): "n" may be a, t, c, g, other or unknown
  misc_feature (768)..(768): "n" may be a, t, c, g, other or unknown
  misc_feature (784)..(784): "n" may be a, t, c, g, other or unknown
caatgttgatgctgatgctattgatgatgtttgctgtccactgtacctgggtcacaagcaatgcctactctagtccaagtgtagtcctggcctcatacaatcatgatggcaccaggaatatcttagatgattttagagaagcttacttttggctaaggcaaaatacagatgaacatgcacgagtaatgtcttggtgggattatggctatcagatagctggaatggctaatagaactacgttggtggataataacacctggaataacagccacatagcactggtgggaaaagctatgtcttctaatgaaacagcagcctataaaatcatgaggactctagatgtagattatgttttggttatttttggaggggttattggctattctggtgatgatatcaacaaatttctctggatggttaggatagctgaaggagaacatcccaaagacattcgggaaagtgactattttaccccacagggagaattccgtgtagacaaagcaagatcccctactttgttgaattgccttatgtataaaatgtcatactacagatttggngaaatgcagctggattttcgtacacccccaagttttgaccgaacacntaatgctgagattgggaatnangncattaaattcaaacatttgggagaagctttacatcagaacactgggcttgttagatatataaagttaaagcacctgataacaaggagacattanatnacaaaactccgagtcancaacattttcccaaaacaaaagntatttgtcaaaagaanact

SEQ ID NO: 4362 - DNA, 729 bp, Homo sapiens
  misc_feature (551)..(551): "n" may be a, t, c, g, other or unknown
  misc_feature (661)..(661): "n" may be a, t, c, g, other or unknown
  misc_feature (671)..(672): "n" may be a, t, c, g, other or unknown
  misc_feature (676)..(676): "n" may be a, t, c, g, other or unknown
  misc_feature (723)..(723): "n" may be a, t, c, g, other or unknown
ttttcctcaacatggctgcgcccttgtcagtggaggtggagttcggaggtggtgcggagctcctgtttgacggtattaagaaacatcgagtcactttgcctggacaggaggaaccctgggacatccggaacctgctcatctggatcaagaagaatttgctaaaagagcggccagagttgttcatccagggagacagcgtgcggccaggaattctggtgctgattaacgatgccgactgggagctactgggtgagctggactaccagcttcaggaccaggacagcgtcctcttcatctccactctgcacggcggctgagggcccttctctgggcctgggcacccttagaggggagaacgaagcaatcagacatccccttgggccctgcttccaggtctccctgtcccccttgcctgccttcttccctgctctgtcccctaagctccctccaggcagggaaaagaggccaggtgctaaaaatgagcctttctcaagcacgtgagcagcggaaggcagacaggcgccagagcccagcactcccttttccagcanctgtggtgggggagggttcccctccaagtttgtcaagagttgaaggaggctctggtggccaggtgacctggctgccttccactccttgtacctcaagtctaaacatggantggccgctgnncaanggcgctccaaccccaagaagccaagcgtcttcatggggaaaggattnaaatgg

SEQ ID NO: 4363 - DNA, 775 bp, Homo sapiens
  misc_feature (538)..(538): "n" may be a, t, c, g, other or unknown
  misc_feature (619)..(619): "n" may be a, t, c, g, other or unknown
  misc_feature (621)..(621): "n" may be a, t, c, g, other or unknown
  misc_feature (741)..(742): "n" may be a, t, c, g, other or unknown
  misc_feature (748)..(748): "n" may be a, t, c, g, other or unknown
  misc_feature (760)..(760): "n" may be a, t, c, g, other or unknown
  misc_feature (769)..(769): "n" may be a, t, c, g, other or unknown
gatcgggggcgcgaggcctcacggagctcgtagtttcccggacgggccgctcccggcctcgcggcctcgcctccccacactacaactcccacggggcagcgggcgcggctccccgtacccaccagctggccgggcagggcagccacttcgcggtcgggcccgccggctgcgggcacccgcgcgacgggcgggaagatggcggacgtggtcgtgggtaaagacaagggcggggagcagcggctcatctcgctgcctctatcccgcatccgggtcatcatgaagagctcccccgaggtgtccagcatcaaccaggaggcgttggtgctcacggccaaggccacggagctctttgttcaatgcctagccacctattcctacagacacggcagtggaaaggaaaagaaagtactgacttacagtgatttagcaaacactgcacagcaatcagaaacttttcagtttcttgcagatatattaccaaagaagattttagctagtaaatacctgaaaatgcttaaagaggaaaagagggaagaanatgaggagaatgacaatgataatgaaagtgaccatgatgaagctgactcctaaaccaaaagtgctttaaaaaccagcctgncnaggacagcctggacccactccactgtctctaagtaaacacagcactgcccgcttttagcgtcttcacttcttcacagagttcagtgcgtggaatctttcgaggtatttttcaaggccgannttgagnacctcatgtacntacgccacnagatag

SEQ ID NO: 4364 - DNA, 807 bp, Homo sapiens
  misc_feature (690)..(690): "n" may be a, t, c, g, other or unknown
  misc_feature (710)..(710): "n" may be a, t, c, g, other or unknown
  misc_feature (749)..(749): "n" may be a, t, c, g, other or unknown
  misc_feature (761)..(761): "n" may be a, t, c, g, other or unknown
  misc_feature (764)..(764): "n" may be a, t, c, g, other or unknown
  misc_feature (807)..(807): "n" may be a, t, c, g, other or unknown
attatccagcatggctttatctaagggagggcctacaaagcacagtggaagagggtgggcattagagtcagacttgggtttgattgacagaactagatacttagttattttcacactgggcaattgcctaaacctgttaagcttcattttttttttcatctgtaaattggagaatatggtgtttacttcatatggctattgtaagcaataaaaaaaaaaggtattttaaacacctagcatagcaggtgttagtgctaaattatatattactttctcctgataaagtaaccttttaaaaagtaaagagcttatttatatagagctagtttccagtctcttgttttagagacttaaaaaacagtactggactgctgttgttgtttcactgtggcaaagaatagaagaatgaattttatttcatcatatatttgatggttcccaaatcattccttgcttcttatagccagcagaaacctacagttggattttggtgagtctaagtttgtagtaagtgagattgtttttagtgagctgtcagcgggggttgatgaaaggcagaagaccatggtcgtttttaatgaggttgtgtgaaaatccaatgaagtggtcagtgaaaattctacctcgagataaactgtgcaaactgggctctaacagtagattattttcctctaattataagtttgctanagcttccttttaatttttgnttccgtttttgtttgaaaaccaagaaagtccctttggcngtttcccttaanaancctccgaaaaatccaatggcaatttttgtgaaaaaaggggggn

SEQ ID NO: 4365 - DNA, 778 bp, Homo sapiens
  misc_feature (593)..(593): "n" may be a, t, c, g, other or unknown
  misc_feature (606)..(606): "n" may be a, t, c, g, other or unknown
  misc_feature (626)..(626): "n" may be a, t, c, g, other or unknown
  misc_feature (659)..(659): "n" may be a, t, c, g, other or unknown
  misc_feature (691)..(691): "n" may be a, t, c, g, other or unknown
  misc_feature (727)..(727): "n" may be a, t, c, g, other or unknown
  misc_feature (733)..(733): "n" may be a, t, c, g, other or unknown
  misc_feature (740)..(740): "n" may be a, t, c, g, other or unknown
  misc_feature (771)..(771): "n" may be a, t, c, g, other or unknown
atcactgatgggtattttgcttggttccaagtctttgctattgtgaccagtgccacaataaacatatgtgtgcatgtgtctttatagtagaatgacttacaatcctttgggaatatacccagtaatgggattgctgggtcaaatggtatttctggttctagatccttgaggaattgccacactgtcttccacaatggttgaactaatttacactcccaccaacagtgtaaaagcgttcctatttctccacatcccctccagcatctgttgtttcctgactttttaatgatcaccattctaactggcatgagatggtatttccttgtggttttgatttgcatttctgttatgaccagtgatgatgagcattttttcatatgtccgttggctgtataaatgtcttcttttgagaagtgtctgttcatttcattcacccacttttgatggcattgtttgtttttttcttgtaaatttgtttaagttctttgtagattctggatattagccctttgtcagatggatacattgcaaaaattttctcccattctgtaggttgcctgttcactctgatgatagtttcttttgctgtgcanaaagctctttagnttaattaagatcccattcgncaattttgggcttttgttgccattgcttttggngttttattcatggagtcctttgcccatgcccnaggtcctgaaaggtattgccccaggtttttcctccnaagggngttttangaatttttagggtcttaaaggctcccgggtntttaaac

SEQ ID NO: 4366 - DNA, 823 bp, Homo sapiens
  misc_feature (706)..(706): "n" may be a, t, c, g, other or unknown
  misc_feature (749)..(749): "n" may be a, t, c, g, other or unknown
  misc_feature (767)..(767): "n" may be a, t, c, g, other or unknown
  misc_feature (797)..(797): "n" may be a, t, c, g, other or unknown
  misc_feature (800)..(800): "n" may be a, t, c, g, other or unknown
  misc_feature (811)..(811): "n" may be a, t, c, g, other or unknown
cattttttgtttgttcatttatttttacaggttcgaatgcaagcactgaaatgtttctcagttttagcttttgaaaacccccaggtatcgatgaccctggtaaatggtaggctggagctttcagtggcacctacatgatttaattgatgaactttttagatttaaagaatttccttaatcattgttgtttgttttatttctagttttggttgatggagaattgttaccacagatttttgtgaagatgttacagagggataagcctattgagatgcagctcacatcagcaaaatgtttaacttacatgtgtagagctggagcaattcggacagatgataactgtattgtattaaagacattaccttgtttggttcgaatgtgcagtaaggagagattactagaggagagagttgaaggagctgagacacttgcctatctgattgaaccagatgttgagctacagagaatcgctagcataactgatcacctcattgccatgcttgctgattatttcaagtatcccagctcagtgagtgccatcactgatattaaaaggcttgatcatgatttaaaacatgctcacgaactccgccaggctgcattcaagctctatgcctctcttggagcaaatgatgaagacatccggaagaagatcattgagactgaaaatatgatggaccgaattgtgactggcttgtccgagtcnaaagtcaaggtgcggttagctgccgtcaagaatgtttgcacangtttaacccagatctggngcagcaacttcgaaccagttttcaaggatnaangccggtttggnaaacctttaatg

SEQ ID NO: 4367 - DNA, 689 bp, Homo sapiens
  misc_feature (633)..(633): "n" may be a, t, c, g, other or unknown
  misc_feature (646)..(646): "n" may be a, t, c, g, other or unknown
  misc_feature (648)..(648): "n" may be a, t, c, g, other or unknown
  misc_feature (652)..(652): "n" may be a, t, c, g, other or unknown
  misc_feature (663)..(663): "n" may be a, t, c, g, other or unknown
ctggacaaccaaaacttacataggctttttatcattttactgggcctatgtaactgagttttagccagtggaatgtccaagtgacatttgccacttctaggtctggcacattaacacttgatgtattacatttcagaccctcttatcattctgcagtgtgtttggcgatctgttgtttaagatctatatgcactggttactgttgcttgccttccattcctacccttactaatcagattcctattatagctacttctgtccttgattcattttgtatattagatgtgtgtgtgttcatgtgcatgcatgcaccctcacatgtaggtgtatatgggagtggtggtaaagacaggatatttcttcagttcatgggattttatttcaggagaattcaaacattcacgtattggagaagatgacacatttcttgaatgtctttggctttgagctgaatgcactaactagaagggactccagattgtcctccttcgggggaggtaagtatattcttcatatacaggtaagagtgaaatgatagaagaatgttcctcctctccttttcttcctggacaacaagatcaaatatttctcaagatcttttacagctgaattgggggcacatggacaggtatnatcttaaaatatnanaaantaatttaaaanttacatgctaaaattttataaaaaat

SEQ ID NO: 4368 - DNA, 738 bp, Homo sapiens
  misc_feature (480)..(480): "n" may be a, t, c, g, other or unknown
  misc_feature (601)..(601): "n" may be a, t, c, g, other or unknown
  misc_feature (607)..(607): "n" may be a, t, c, g, other or unknown
  misc_feature (633)..(633): "n" may be a, t, c, g, other or unknown
  misc_feature (650)..(650): "n" may be a, t, c, g, other or unknown
  misc_feature (680)..(680): "n" may be a, t, c, g, other or unknown
  misc_feature (719)..(719): "n" may be a, t, c, g, other or unknown
  misc_feature (723)..(723): "n" may be a, t, c, g, other or unknown
  misc_feature (736)..(736): "n" may be a, t, c, g, other or unknown
attttgactggcaaaatgtggcaagatttcagggatgcaggtggatccttaactgaggtcaaggtggaagaggaagaaagggatccgcagagtcctgaatttgaaattgaggaggaggaagaaatgttgtcatccgtcataccagattccaggagagaaaatgaacttcccgatttcccccacattgatgagttttttacccttaactcaacaccatctagatctgcatatgatgagcctcatttgctcgtaaatattgagaaacagaaactagagttggaaaaacgacgactggatatcgaggccgaaaggctgcaggtagaaaaggaacgcctacaaatcgagaaagagaggctgcggcatttagacatggaacatgagcggcttcagctagagaaggagcggctgcagattgaaagagaaaagttgaggttacagatagtcaattcagagaaaccgtccttgggaaatgaacttggncaaggagaaaaatccatgcttcaaccacaggacatagaaacagagaagttaaaacttgagcgagaacgcttgcaactggaaaaggataagctgcaagtttttgaagtttgaatctgagaanctgcanattgaaaagggaacgcttacaggtanagaaaagacagacttcnaattcagaaagaaaggcacttgcaagtganttttccaggcttccatttagcaaaatgtttggaaaaacnctanatttttccccaanat

SEQ ID NO: 4369 - DNA, 728 bp, Homo sapiens
  misc_feature (575)..(575): "n" may be a, t, c, g, other or unknown
  misc_feature (647)..(647): "n" may be a, t, c, g, other or unknown
  misc_feature (672)..(672): "n" may be a, t, c, g, other or unknown
  misc_feature (686)..(686): "n" may be a, t, c, g, other or unknown
  misc_feature (689)..(689): "n" may be a, t, c, g, other or unknown
  misc_feature (695)..(695): "n" may be a, t, c, g, other or unknown
gggttaatgacattaatgatgaggttctcacttaggctagtgatacagagcgagatggactagccccagaaaagacatcaccagatagagataagaaaaaagagcagtcagaagtatctgtttctcctagagcttcaaaacatcattattcaagatcacgatcaaggtcaagagaaagaaaacgaaagtcagataatgaaggaagaaaacacaggagccggagcagaagcaaagaggtaattaacactttgtagtgaataggtactttaaaatacttataaagtgtctggtagaaagatttgtatgaatataagacgttgtcaagggaagaagacatgaatccaaagataagtcctctaagaaacataagtctgaggaacataatgacaaagaacattcttctgataaaggaagagagcgactaaattcatctgaaaatggtgaggacaggcacaaacgcaaggaaagaaagtcatcaagaggcagaagtcactcaagatctaggtctcgtgaaagacgccatcgtagtagaagcagggagcggaagaagtctcgatccaggagtagggagcggnagaaatcgagatccagaagcagagagaggaagaaatcgaagattcagaagcagggaaagaaaacggcgggtnaagtctcgttcccgctcaagatcangacacaggcaatangantagaancaggagtaggacaaggagttaggagtcgagata

SEQ ID NO: 4370 - DNA, 680 bp, Homo sapiens
  misc_feature (450)..(450): "n" may be a, t, c, g, other or unknown
  misc_feature (550)..(550): "n" may be a, t, c, g, other or unknown
  misc_feature (607)..(607): "n" may be a, t, c, g, other or unknown
  misc_feature (612)..(612): "n" may be a, t, c, g, other or unknown
  misc_feature (621)..(621): "n" may be a, t, c, g, other or unknown
  misc_feature (638)..(638): "n" may be a, t, c, g, other or unknown
  misc_feature (662)..(662): "n" may be a, t, c, g, other or unknown
attcgaatcggcggcggcttctagtttgcggttcaggtttggccgctgccggccagcgtcctctggccatggacaccccggaaaatgtccttcagatgcttgaagcccacatgcagagctacaagggcaatgaccctcttggtgaatgggaaagatacatacagtgggtacaagagaattttcctgagaataaagaatacttgataactttactagaacatttaatgaaggaatttttagataagaagaaataccacaatgacccaagattcatcagttattgtttaaaatttgctgagtacaacagtgacctccatcaattttttgagtttctgtacaaccatgggattgggaccctgtcatcccctctgtacattgcctgggcggggcatctggaagcccaaggagagctgcagcatgccagtgctgtccttcagagaggaattcaanaccaggctgaacccagagagttcctgcaacaacaatacaggttatttcaagacacgcctcactgaaacccatttgccagctcaagctagaaacctcaagnacctctgcataatgttcaagttttaaatcaaatgataacatcaaggatcatatccangaacntaacatggnctgcatttctaaagaancagggttcaagaggctttctggangtgatatctcagcttggg

SEQ ID NO: 4371 - DNA, 781 bp, Homo sapiens
  misc_feature (546)..(546): "n" may be a, t, c, g, other or unknown
  misc_feature (634)..(634): "n" may be a, t, c, g, other or unknown
  misc_feature (639)..(639): "n" may be a, t, c, g, other or unknown
  misc_feature (666)..(666): "n" may be a, t, c, g, other or unknown
  misc_feature (672)..(672): "n" may be a, t, c, g, other or unknown
  misc_feature (735)..(735): "n" may be a, t, c, g, other or unknown
  misc_feature (766)..(767): "n" may be a, t, c, g, other or unknown
  misc_feature (769)..(769): "n" may be a, t, c, g, other or unknown
  misc_feature (773)..(773): "n" may be a, t, c, g, other or unknown
atacttacctggcaggggagataccatgatcacgaaggtggttttcccagggcgaggcttatccattgcactccggatgtgctgacccctgcgatttccccaaatgtgggaaactcgactgcataatttgtggtagtgggggactgcgttcgcgctttcccctgccgagagatctgagcccgacagccccctgtccagctgcggccacagccagcctccttgcctccatttcccgaattgcccaggaccccagctctgtgtccccaggaggcactgggggccagaagctggcccagctcccagaacttgcttctgccgagatgagtctccatgtcatctacctgcaccagcttcaccagcagcagcagcagcaggagccgtggggtgaggctgcagcctccatcctgtccaggccctgctccagcccctcacagccaccctcgcctgatgaggagaagccatcctggtcaagtgacggctccagtcctgcctctagccccagacaacagtggggaacccagaaggcccggaatctgttccccgganggtttcaggtgaccacagacacccagaaggagcctgaccgggctcttgcactgactgagacgactcctcaaggccccactcctggcanctgantgctgcaactgccttctcgatcacgancctganaactgcacgggggaacaagcccaaactggcttgggaaaccaatgttttcaaaagtgcaagggncaaagttggcgtcctctgggggaaaattttnnanaaangggaccaa

SEQ ID NO: 4372 - DNA, 818 bp, Homo sapiens
  misc_feature (556)..(556): "n" may be a, t, c, g, other or unknown
  misc_feature (656)..(656): "n" may be a, t, c, g, other or unknown
  misc_feature (757)..(757): "n" may be a, t, c, g, other or unknown
  misc_feature (763)..(763): "n" may be a, t, c, g, other or unknown
  misc_feature (776)..(776): "n" may be a, t, c, g, other or unknown
  misc_feature (784)..(784): "n" may be a, t, c, g, other or unknown
  misc_feature (801)..(801): "n" may be a, t, c, g, other or unknown
gtgcagaccttgaatcgaaacccaggctcctgcaggcactggcacagctacagcgagggcctcggccatccaagggtctcccaggtgaccttccctccaccccaggaagctatgacagaggccgggaagctgcccctaccgctacccccacggctggactggtttgtgcacacccagatgggccagctggcccaagacggggtccccgagtggttccatggtgcaatctcaagagaggatgctgagaacttgctggagtcacagccactgggatcctttctcatcagggtcagtcacagccatgtgggctacacactctcctacaaagcccaaagcagctgctgccatttcatggtgaagctcttggatgatgggactttcatgatccccggggagaaggtggcccacacctcgctggacgccctggtcaccttccaccagcagaagccaattgagccgcgcagggagctgctgacacagccctgcaggcagaaggatcccgcaaacgtggattacgaggatctcttcctctactccaacgcagtggccgaggaanctgcctgcccggtgtctgcccctgaggaggcctccccaaagccagtcctgtgtcaccaatcaaaggaaaggaagccgttcagcagagatgaacagaatanccaccaaggaagccacttcctcctgccccccaaaaatcccctcttggagaagacccgccagaaaactctggaggagcctcaaaaatgctccccgaaaaganggcaanaggggtcccgggnaacaagcntaaaaaggccaacctcngccaactggtgaaactt

SEQ ID NO: 4373 - DNA, 742 bp, Homo sapiens
  misc_feature (554)..(554): "n" may be a, t, c, g, other or unknown
  misc_feature (606)..(606): "n" may be a, t, c, g, other or unknown
  misc_feature (648)..(648): "n" may be a, t, c, g, other or unknown
  misc_feature (673)..(673): "n" may be a, t, c, g, other or unknown
  misc_feature (719)..(719): "n" may be a, t, c, g, other or unknown
  misc_feature (727)..(727): "n" may be a, t, c, g, other or unknown
  misc_feature (732)..(732): "n" may be a, t, c, g, other or unknown
acgcgcccagggcagcgcgccacgctgccacacatgggccggcggactgctctgaagaggtggccgaggtgaagccaaagccagagacagaagctaaggcagaggaagccagtggggagaaggtgtcaggctccgcggccaagcctaggccctatgcgtgtccgctatgccccaaggcctacaagacggcacccgagctgcgcagccacgggcgcagccacacgggggagaagccctttccgtgccccgagtgcggccgccgcttcatgcagcccgtgtgcctgcgcgtgcgcctggcctcgcacgctggcgaactgcccttccgctgtgcgcactgcccgaaggcctatggcgcgctctccaagctcaagatccaccagcgtggccacacaggcgagcggccttacgcctgcgccgactgcggcaagagctttgctgacccttcagtgttccgcaagcaccggcgtactcacgctggcctgcggccctacagctgtgagcgttgcggtaaagcctatgcggagctcaaggacctccgcaaccatgagcggtcncacaccggcgaacgccccttcctctgctccgagttgcgggaagagcttctcncgctcatcctcgctcacgtgccaacagcgcatccaacgcggnacaaaaagccctaacgctgcccggnctggcggcaagggctttacgcaagctcagttcctaaccagagccantagcgcangtaantccgggggga

SEQ ID NO: 4374 - DNA, 664 bp, Homo sapiens
  misc_feature (337)..(337): "n" may be a, t, c, g, other or unknown
  misc_feature (476)..(476): "n" may be a, t, c, g, other or unknown
  misc_feature (495)..(495): "n" may be a, t, c, g, other or unknown
  misc_feature (530)..(530): "n" may be a, t, c, g, other or unknown
  misc_feature (596)..(596): "n" may be a, t, c, g, other or unknown
  misc_feature (637)..(637): "n" may be a, t, c, g, other or unknown
  misc_feature (639)..(639): "n" may be a, t, c, g, other or unknown
  misc_feature (643)..(643): "n" may be a, t, c, g, other or unknown
  misc_feature (663)..(663): "n" may be a, t, c, g, other or unknown
tttttaaatcaagagtgtatttaaagttattttttcatttgtatataattttaaaccatgttttcttacagtttgtcatcatcctgctcttggtttttgtcacagaagttgttgtagtggttttgggatatgtttacagagcaaaggtatgttgtctactgtaattcacataatgccttaaaaggtggtttaagtgtttcaagtaaaatagaacacattcattttatcagagtaaacattttcttttgccttacttgtttaatctgtatttcaaatatctaaagttaattggcaaatatttacatgtcaagactccttacctcatttaatatagcanagtgttatatatgtattgttcttgattataggtatttatagctgcaaatgaataattagctgagaagtttgttcaagatttcctcagcacacagattgcctatatgaggggaggcataattttctgatttccgctttanaaagaaccaaactcagaantgcgttttccaatgtccccttaaaaaatgctttgngcctaaacataaaaaaagggggtgtgagttgtgattccaccttcaaccccggtcctgaggaacaanggggcctgccaacttaaacaacaagggagctgggggccagnantccnttcttggccttcatcctttna

SEQ ID NO: 4375 - DNA, 699 bp, Homo sapiens
  misc_feature (319)..(319): "n" may be a, t, c, g, other or unknown
  misc_feature (515)..(515): "n" may be a, t, c, g, other or unknown
  misc_feature (523)..(523): "n" may be a, t, c, g, other or unknown
  misc_feature (551)..(551): "n" may be a, t, c, g, other or unknown
  misc_feature (558)..(558): "n" may be a, t, c, g, other or unknown
  misc_feature (631)..(631): "n" may be a, t, c, g, other or unknown
  misc_feature (659)..(659): "n" may be a, t, c, g, other or unknown
  misc_feature (680)..(680): "n" may be a, t, c, g, other or unknown
  misc_feature (687)..(687): "n" may be a, t, c, g, other or unknown
  misc_feature (699)..(699): "n" may be a, t, c, g, other or unknown
gttgccatggatcctggggacgactggctggtggaatccttgcgcttgtaccaggatttctatgcattcgacctgtcaggagccactcgagtccttgaatggattgatgacaaaggagtctttgttgctggctatgaaagcctgaaaaagaatgaaattcttcatctgaaattacctctcagactttctgtaaaggaaaacaagggcttattcccagaaagagatttcaaagtgcgccatggaggattttcagacaggtctatctttgatctaaagcatgtgccacataccagattgctggttaccagtggccttccangttgttatctgcaggtgtggcaggttgcagaggacagtgatgtcattaaagctgtcagcaccattgctgtgcatgagaaagaggagagtctctggcctaaggtggccgtcttctccacattggcacccggagtcctccatggggccaagctccgaagtctgcaagtcgttgatctggagtcccggaagaccacgtncacctcanatgtcagtgacagtgaggagctgagtancctgcangtcctaaatgcaagacacctttgccttctgctgtgcttcgggccggctggggcttgtttgacaccccggcaanaagtggggcaccgttggagaatcgcaanccctgggccctgggtcctggnggaaaanaaaatgggggtn

SEQ ID NO: 4376 - DNA, 729 bp, Homo sapiens
  misc_feature (485)..(485): "n" may be a, t, c, g, other or unknown
  misc_feature (606)..(606): "n" may be a, t, c, g, other or unknown
  misc_feature (644)..(644): "n" may be a, t, c, g, other or unknown
  misc_feature (693)..(693): "n" may be a, t, c, g, other or unknown
  misc_feature (699)..(699): "n" may be a, t, c, g, other or unknown
  misc_feature (720)..(720): "n" may be a, t, c, g, other or unknown
  misc_feature (722)..(722): "n" may be a, t, c, g, other or unknown
tgcatttctaacagcaatgaatgagagttcctgttgctccacatccccaccagcatttggtggtgtagtgttttgaattttggctattctaataggtgtgtagtgctaccgcattgttttaatttgctgtccctaatggtatatgatgttggtcatcttttcctatgcatatttgctatctgtatatattttttggtaaggtgtctgttaagattttttccctttttaaaataggatttttttttattgttgaatttaaagagttctttgtatattttggatacatgtcctctatcagatatatgttatgcagtattttttcccagtgtgtggcttgtcttttcattctcttaacaatgtcttttgcagagcagaagtttttaattttaatgatgtccagcttatcagttttttctttcatgagtcatgcctttggtgttgtatctaaaaactcaatgctaagaccatggtcacttagattttcntgtatgttatcttctagaagttttatgttttgcattttacatttatgtctgtgatccattttgaggtaatttttgtaaaagatgtgaggtccatgtctagatttttatattttattttaantttgttttgcacgtcaatgtacagttgttccaagtacnatttgttgaaaagaccgtccttttccccattgggatcgcctttgcttcnttgttnaaaagattaagttggaataananttggtgg

SEQ ID NO: 4377 - DNA, 793 bp, Homo sapiens
  misc_feature (698)..(698): "n" may be a, t, c, g, other or unknown
  misc_feature (704)..(704): "n" may be a, t, c, g, other or unknown
  misc_feature (765)..(765): "n" may be a, t, c, g, other or unknown
  misc_feature (772)..(772): "n" may be a, t, c, g, other or unknown
  misc_feature (791)..(791): "n" may be a, t, c, g, other or unknown
ttatatgttgatttttctttctctctgatttcccagtttcagattgaatgtctgtcttgcaggcagttatttcaaaatccatagtcttttgcctttctcactggcaaaatttgaagcaatctctctcttcaatgtatgatttcaaaactaaaattttaaaagagaagaataaatatcttatccaagacttcattgcatatctagagcaagagtggcaaactttttctgtaaaggactatatagaaaatattttccacaaggtctatgttgcaacttctcaactttgccattctgctaatgcaatcttagtaaataaaagaatgaacataactgttttcctatataacttcccttacaaaaacagccagtaggccacctttgcaggtcatattttgctgacccctggtctggatgttttttaatgctagctctccatggtgtcatctttcgttttcattcatttttcaaaggtgagaatttacagtcattacatttcccactgtatcagaagtagctgtattttctacagatgtagccctgggaatggcacagtggaacaatatttaactaactcagcaagacttcttgcaaatgaaaagaaaactcaaaaggtgccattaaaaagcaataccattttcaggcaacattattgcaacaacctttgtgagagaggacactagcttttcaaggatatttgnaaaatnatataactaacatgctattttaaccttaaacaagctgtgttcctgtaaaagtgttttgggnttagaangggaatttttacccttcanac

SEQ ID NO: 4378 - DNA, 809 bp, Homo sapiens
  misc_feature (667)..(667): "n" may be a, t, c, g, other or unknown
  misc_feature (736)..(736): "n" may be a, t, c, g, other or unknown
  misc_feature (758)..(758): "n" may be a, t, c, g, other or unknown
  misc_feature (782)..(782): "n" may be a, t, c, g, other or unknown
  misc_feature (784)..(784): "n" may be a, t, c, g, other or unknown
  misc_feature (790)..(790): "n" may be a, t, c, g, other or unknown
ctgaaacggaccccaacaacacccaaatgatattaggggcaatgttaaatattgttcaagattcagcacttttggaagccattggttgccagatggagatgggtggtggagaaaataacctgaagagtcatagtcgcaccaatagtggtattagttcagcaagtggtggaagcacggagcccacgactcccgatagtgagagacctgctcaagctctcttaagagattatgctcttaatacagattcagctgctgggctcctgattcgcagcattcatctcgtcacccaaagactcaactcccagtggcgccaagacatgagcatatcactggcagctctagagctcctctctggccttgcaaaggtaaaagtgatggttgactcaggagaccggaagcgagccatcagttctgtgtgcacctacattgtttatcagtgtagtcggccagctcctttacactccagggatctgcactccatgatagtggcagcttttcagtgtctctgtgtctggctgacagagcaccctgatatgcttgatgaaaaggactgccttaaggaagtactggagattgtggaactgggtatctcaggaagtaagtccaagaacaatgagcaagaggtcaagtacaaaggagataaggagccaaaccctgcatctatganggtaaaggatgctgctgaagccaccctaacatgcattatgcagttgctcggggcatttccttcacccantgggcctgcctctcccttgtantcctggtgaatgagaccactttgntnaatacnccagggtggcaaaccataa

SEQ ID NO: 4379 - DNA, 762 bp, Homo sapiens
  misc_feature (31)..(31): "n" may be a, t, c, g, other or unknown
  misc_feature (504)..(504): "n" may be a, t, c, g, other or unknown
  misc_feature (638)..(638): "n" may be a, t, c, g, other or unknown
  misc_feature (697)..(697): "n" may be a, t, c, g, other or unknown
  misc_feature (715)..(715): "n" may be a, t, c, g, other or unknown
  misc_feature (723)..(723): "n" may be a, t, c, g, other or unknown
  misc_feature (743)..(743): "n" may be a, t, c, g, other or unknown
  misc_feature (762)..(762): "n" may be a, t, c, g, other or unknown
gaaaatgagggttatattaaaaagctcctgngagctttttcatgtgtgtgaagatttggaaaatattgaaggactgcaccacttgtatgaaattatcaaaggcatctttctcttgaatcgaactgccctttttgaagttatgttctctgaagaatgtataatggacgtcattggatgtttagaatatgatcctgctttatcacaaccacgaaaacacagggaatttctaacaaaaacagccaagtttaaagaagtgattcccatatcagatcctgagctgaaacaaaaaattcatcagacatacagagttcagtatatacaagatatggttctaccaactccttcggtctttgaagaaaacatgttatcaacacttcactcttttatctttttcaataaggtagagattgttggcatgttgcaggaagatgaaaaatttctgacagatttgtttgcacaactaacagatgaagcaacagatgaggaaaaaagacaggaattggntaactttttaaaagaattttgtgcgttttcccaaacgctacagcctcaaaacagagatgcttttttcaagactttgtcaaacatgggcatattaccagctttagaagtcatccttgggcatggatgatacacangtgcgaagtgctgctaccgatatattctcaaacctgggtgaatataatccatccatggnacgagagtttgcatgcangaggcacnacagaatgatgatgtaagtnaggaagtttacagagcaan

SEQ ID NO: 4380 - DNA, 853 bp, Homo sapiens
  misc_feature (570)..(570): "n" may be a, t, c, g, other or unknown
  misc_feature (621)..(621): "n" may be a, t, c, g, other or unknown
  misc_feature (644)..(644): "n" may be a, t, c, g, other or unknown
  misc_feature (713)..(713): "n" may be a, t, c, g, other or unknown
  misc_feature (727)..(727): "n" may be a, t, c, g, other or unknown
  misc_feature (780)..(780): "n" may be a, t, c, g, other or unknown
  misc_feature (789)..(789): "n" may be a, t, c, g, other or unknown
  misc_feature (810)..(810): "n" may be a, t, c, g, other or unknown
  misc_feature (836)..(836): "n" may be a, t, c, g, other or unknown
  misc_feature (842)..(842): "n" may be a, t, c, g, other or unknown
ctgagggcagctggggctacttctgcccttggctatgccaggctttgcatctcgggctatggctcactgcagagtttcgtgggggaagggcaggggaagccaggtgggggccagctgaatttcagtgtggaagaaactttttacggtctcatctcggcccagtcggtcaggtgggtggcactcggcctttctgaggcttctctctctaaaccatccctgagcagcaattcagaagacaagctagaaagccctttgatggcatcacagtgtccctttaacccctgagcacgccccagtcctctgtagctgcccactcagcacagccgttcctggaggctgagcggcacgggccctcggggcagctgcccggtgcctgccacccacacatctctccaccggtcctctcctttctcctcacctcacttgtctgccaggccctgcgtgtgggcccagccatcccaggcaggacaggcagggctctccagctgcctcacagactcaccgtcagccatgcgggagaagaaccgcagcacccaggcaaggtctttctggctctttccccaaggccancaggtcttagaaatcgtcaagacttgccagattctctgagtaggaaacggnaccctggggtctccccactcggnctcctggcctatctctccctgagccttgtggaggctcaatgaaggaaaagtcttgctggggatcttggnagtgtccctctcanctaccacaacaagatttcttctggtacgggtcacttcaagccaacctaaaaancctgcgttnaaagggacttcttggttgganaaggtgccctccctggggggctggcngggggnttgcctctggc

SEQ ID NO: 4381 - DNA, 736 bp, Homo sapiens
  misc_feature (667)..(667): "n" may be a, t, c, g, other or unknown
  misc_feature (689)..(689): "n" may be a, t, c, g, other or unknown
  misc_feature (694)..(694): "n" may be a, t, c, g, other or unknown
  misc_feature (723)..(723): "n" may be a, t, c, g, other or unknown
  misc_feature (732)..(732): "n" may be a, t, c, g, other or unknown
actaaaaaaagaaggatatcatcgtccctgtaggcaaagaagcattcactctgcccaggaaggcagacttcctagggtacgtgcttgttttttagcttgcccttgagtctgaaaggacagttatctcttttggaatttacttagagcagtaacttaataagcatatcctagggactgaatccttcaaactcctcatgtaaaaatagggctggactactgtttttttgcctatggaaaaagtaattgcccggactcaccttcaaagcctactcatttgttgaaattccagcaagggcatgaagtaaagatgataggcctttgaacctgccaggttagctgggtttgagagggtacctgggagtttagagacccatcttgcctttttctttttcttttggaagtctctactgaaatgggatgaaacctggcctcatttccagctcctctttcaaaattagagccagccccaggcctggcagtgtcttggttggggcaagccagggactgactatcggagagttgagatctgaatcccagctctgcccctgaacagctgtgtggctctgggcaagtaattgcctctctgcacttctccacctatagaggggacttcctaatgcctggggcctcagattggtcataaggtgaggaacatcaacactggtancggttcaagcaatgtgacacanggagncttttcaacgaaaccctgggccaaagggngggaggggnaaaa

SEQ ID NO: 4382 - DNA, 805 bp, Homo sapiens
  misc_feature (674)..(674): "n" may be a, t, c, g, other or unknown
  misc_feature (728)..(728): "n" may be a, t, c, g, other or unknown
  misc_feature (750)..(750): "n" may be a, t, c, g, other or unknown
  misc_feature (768)..(768): "n" may be a, t, c, g, other or unknown
  misc_feature (782)..(782): "n" may be a, t, c, g, other or unknown
  misc_feature (805)..(805): "n" may be a, t, c, g, other or unknown
agctttgaaataatgactatattagtaacataagaccatgagagcaactaacagaattataactaaggaaccctgttacaggcaatagaataacgattgacttctatctaaaacatcaccatttatctttgaatatttatcactggggatgattcttagagcattcatcagaaccacagcttaatatcatcaaattattccatttccacattcttttaaaactgtaacagaaaaaaaaaaaaccctttcaattcctagagaactcacccgtttgagagatttcttaggtcttctctattcattcaccatcattcactattatgagatttttgtgaattgttgcacctgcgttctccctacccgttaaatatgcaatatcctttgtcatccagctcaatccttagaaaaaggtacacacccccctcacatacacaaactctgttctgtttcaagatacatccaatggagcaccttaccctcacatgtacaaagagggcaatgggaacttgatagcatatggtattgtgagaatcactgaggcaagagcaagcaactccttctggttggtaattggaaaatcctcctcttacattgggcagaaatcatttttaacgcctactccatatctttaagcgagaagctgttatctcctctgcaggctctgtcatactatnggatgtggcttcatttctaaacctagcaatcctgacatcctcatcactcctggngagagcacagtcattcactcanggcaaatccgggcactgnccaaagggcaaagngactgttctgaagccgccttgan

SEQ ID NO: 4383 - DNA, 574 bp, Homo sapiens
  misc_feature (487)..(487): "n" may be a, t, c, g, other or unknown
  misc_feature (499)..(499): "n" may be a, t, c, g, other or unknown
  misc_feature (507)..(508): "n" may be a, t, c, g, other or unknown
  misc_feature (536)..(536): "n" may be a, t, c, g, other or unknown
tgtgagtgaatcaaattgggtttatgacattattagatcacaaggatgctagagttttctgttggcgtttcaccgtaaactgacatggttttagtgccagcccatacaatgttgagatacaatctggccacatacgctaagagtaaatctcaattgtattgcaaacaaatgtattttgcgcacgcacacacgtgcacacacacacacatacgtcctacatcctgactcctttgaaaaactttattttgcttttttttctatatagccctttcaatttctcagatctcctcaaatatatatatatatatatatatatatatgagagaaagagagtccaaatacaaacctttccaaagggacatgtatagttttgactgcactcaaatcagagctcagaacactatttcactattacttttgaataactctatttccaactgaaacactcaatttcccaggtaaactggtaattcccaggagctttcanagcattttcagnaaacctanntgaccagttcttttatatgaaggataantatatcatgtgtatatgttcaaagtatagcagctgtgt

SEQ ID NO: 4384 - DNA, 788 bp, Homo sapiens
  misc_feature (617)..(617): "n" may be a, t, c, g, other or unknown
  misc_feature (699)..(699): "n" may be a, t, c, g, other or unknown
  misc_feature (706)..(706): "n" may be a, t, c, g, other or unknown
  misc_feature (723)..(723): "n" may be a, t, c, g, other or unknown
  misc_feature (740)..(740): "n" may be a, t, c, g, other or unknown
  misc_feature (757)..(757): "n" may be a, t, c, g, other or unknown
acagtgtgatttattctaacttgacaagagaacaggcccctggacatcagtcctaaatctgacaccttaacggattctcagatagacagagaccttcacaaattatctttactagctcaagccagtgttattacgttcccatccgattcacctcagaactcatcgcagctgcaaaggaaagtaaaagaagataaaagatgtttcacagctaaccaaaataatgttggagatacctcccgtggacaggttattattatttcagattctgatgatgatgatgatgaaagaatcctgagtcttgagaaactcactaaacaggacaaaatatgccttgagagggaacatccagagcagcacgtttcaacagttaatagtaaggaggaaaagaatccagtaaaggaagaaaagacagagactctttttcagtttgaggaatctgattctcagtgttttgagtttgaaagttcatctgaagtgttttcaagtttggcaagatcatccagacgataataattcagttcaagatggtgagaaaaaatgtttggctcctatagccaatactacaaatggtcagggttgtacagattatgtatctgaagttgttaaaaaaggagcanagggcattgaagaacacacaagaccacggagtattctgttgaagaatgttgtgaaattgaagtaaaaaaagcctaagagaanaacgatntgaaaaaaccaatgggntgaaagattcctgtganggccttcaatctttccngtcaagaaattgagggggccaagtcctggat

SEQ ID NO: 4385 - DNA, 709 bp, Homo sapiens
  misc_feature (475)..(475): "n" may be a, t, c, g, other or unknown
  misc_feature (521)..(521): "n" may be a, t, c, g, other or unknown
  misc_feature (562)..(562): "n" may be a, t, c, g, other or unknown
  misc_feature (619)..(620): "n" may be a, t, c, g, other or unknown
  misc_feature (627)..(627): "n" may be a, t, c, g, other or unknown
  misc_feature (675)..(675): "n" may be a, t, c, g, other or unknown
  misc_feature (677)..(677): "n" may be a, t, c, g, other or unknown
acgcaatggaattctactcagcattaaaaaggaatgaatcactgatgcaggcagcaacaaggaagaatcccaaatagccaaggccacagcctagaaacttctccttggaggctaagcctgcagcacccagctgagcacagaggacaatctgaggagctaagtgaccggctggacactccattcacagaagaaaggccatgtgaagataagatgagaagacagccatctaccagccaggaagagaggcttcaccagacaccaaccctaaaggcaccttgaccttggacttccagcttccaggactgtgagaacgcaaatgtctgtggtttaggccatccagtctgtgataccttgttatggcagtccaagccccagtgaagtcagacagtccggctgggttctaatctctactctatattacaggagttatacggccttgggaaagtcacttaactgctctgaaccttaactttcntatctgttgaaaggggcccgcttcacagggctgctgtgaagatggnatgccctatggcagggaccctgcatagtgtccagcacaganggcaccacagagggctcaacaaccacatggggccctctgaaaggacttattcattannaagatgnccactctgcactttgggaaggccgaggcgggtgggcagatcacctgangncaggagttccagacaagcttgggcaacgtggg

SEQ ID NO: 4386 - DNA, 788 bp, Homo sapiens
  misc_feature (605)..(605): "n" may be a, t, c, g, other or unknown
  misc_feature (701)..(701): "n" may be a, t, c, g, other or unknown
  misc_feature (733)..(733): "n" may be a, t, c, g, other or unknown
  misc_feature (738)..(738): "n" may be a, t, c, g, other or unknown
  misc_feature (762)..(763): "n" may be a, t, c, g, other or unknown
gaaagagatgtctgcaaacaccgtgctggacagccagcgtcaacaaaagcattatggaattacctccccaattagtttggcatctcctaaagaaattgatcatatttacacacagaaattaattgacgccatgaaaccatttggagtgtttgaagatgaggaagaattgaaccacaggctggtggttcttggtaaattgaacaatttagtaaaagaatggatttctgatgtcagcgagagtaagaacctcccaccttctgttgtggctactgttggtggtaaaattttcacatttggatcctataggcttggagtacacaccaaaggagctgacattgatgcactttgtgtagctccaagacatgtggaaagatctgatttttttcagtctttttttgaaaaattgaaacatcaagatggcattagaaacttaagagctgtagaagatgcctttgtacctgttataaaatttgaatttgatggtattgaaattgatctagtctttgcaagactggcaatacaaaccatatcaagataatttagatctaagagacgactctcgcctgagaagccttgatataaggtgtattcccagcttaaatggntgtagagttactgatgaaattttgcatttagtgccaaataaagaaacttttagactcaccctaagagctgtcaaattatgggcaaaacgacgtggnatttaattccaacaatgctaggattccttggnggggncccctgggcaatgctaagttcaannaacttgccaattgtatccaaatgca

SEQ ID NO: 4387 - DNA, 850 bp, Homo sapiens
  misc_feature (574)..(574): "n" may be a, t, c, g, other or unknown
  misc_feature (577)..(577): "n" may be a, t, c, g, other or unknown
  misc_feature (660)..(660): "n" may be a, t, c, g, other or unknown
  misc_feature (721)..(721): "n" may be a, t, c, g, other or unknown
  misc_feature (780)..(780): "n" may be a, t, c, g, other or unknown
  misc_feature (801)..(801): "n" may be a, t, c, g, other or unknown
  misc_feature (806)..(806): "n" may be a, t, c, g, other or unknown
  misc_feature (817)..(817): "n" may be a, t, c, g, other or unknown
  misc_feature (844)..(844): "n" may be a, t, c, g, other or unknown
aagttcggtgggctccaggcgtcgcgatggaggagagcgggtacgagtcggtgctctgtgtcaagcctgacgtccacgtctaccgcatccctccgcgggctaccaaccgtggctacagggctgcggagtggcagctggaccagccatcatggagtggccggctgaggatcactgcaaagggacagatggcctacatcaagctggaggacaggacgtcaggggagctctttgctcaggccccggtggatcagtttcctggcacagctgtggagagtgtgacggattccagcaggtacttcgtgatccgcatcgaagatggaaatgggcgacgggcgtttattggaattggcttcggggaccgaggtgatgcctttgacttcaatgttgcattgcaggaccatttcaagtgggtgaaacagcagtgtgaatttgcaaaacaagcccagaacccagaccaaggccctaaactggacctgggcttcaaggagggccaagaccatcaagctcaacatcgcaaacatgaagaagaaggaaggagcagctgggaatccccgagtccggcctgccagcacanganggctgagcctgcttccccctcccccaaggggggaaaacctccaccctgatccctccccctgggggagcagttggcttgttggnggggatccctcgtccaagccagcaagttgctcccaagttcaagattaaacttccaagccanggacccaagccaaggcaacaagggcttggggtcccaagttcctgaaccttgaagcaaangggttttttccctcaatggtngaacntttcttggggnaaaaaggggggcttccccctccaatcnctgggg

SEQ ID NO: 4388 - DNA, 863 bp, Homo sapiens
  misc_feature (735)..(735): "n" may be a, t, c, g, other or unknown
  misc_feature (798)..(798): "n" may be a, t, c, g, other or unknown
  misc_feature (814)..(814): "n" may be a, t, c, g, other or unknown
  misc_feature (825)..(825): "n" may be a, t, c, g, other or unknown
  misc_feature (829)..(829): "n" may be a, t, c, g, other or unknown
  misc_feature (841)..(841): "n" may be a, t, c, g, other or unknown
gaaattattcacaaatatgaaccatccaaagagggtcaggaaaagggctggctctccatagacgggttcactaattaccttatgtcacctgactgttatatattcgatccagaacataagaaggtctgtcaggatatgaagcaacctctgtctcattactttataaactcatctcataatacatacttaatagaggatcagttccgaggtccctccgacatcacaggatatattcgagctcttaaaatgggttgccggagtgttgaattagatgtatgggatgggccggacaatgaacctgtaatttacacaggccacaccatgacctctcagatagttttccgcagtgtcattgatattattaacaagtatgcattctttgcttcagagtatcctcttatcttgtgtttagaaaaccactgttccattaaacaacagaaggtaatggttcagcacatgaagaaacttttaggagacaagctctatacaacatcacccaatgttgaggaatcttatctaccatccccagatgtcctgaaagggaaaatactaattaaagcaaagaagctgtcctcaaattgctctggggtagaaggagatgttactgacgaagatgaaggagcagaaatgtctcagaggatgggaaaagagaacatggagcaacccaataatgtgcctgtgaagcgatttcagctttgtaaagaaactgtctgaactgggtcagcatctgcaaancagttcaagttcaaagaatttcaaggggtcgtttcaagttcaagaagtaccgggggaagtccngtccctttaaatgaantgcttgccaancaangtacgcccaatngaaaaatccaaggggactttgg

SEQ ID NO: 4389 - DNA, 638 bp, Homo sapiens
  misc_feature (563)..(563): "n" may be a, t, c, g, other or unknown
  misc_feature (615)..(615): "n" may be a, t, c, g, other or unknown
  misc_feature (625)..(625): "n" may be a, t, c, g, other or unknown
cgaacatgctatcaaataaatgtggaacacctttagcaaactatcaacagctcatgaaggcatgaaatgtgaaaatgatgaatatttgagtgctttttcttaataagtataaccttaaacatcagctaatacacctggtgtgcattttcagtcaggataccttaatcctcatttctagttgccttgccaatgattccataatatactgtctcattactgtttatttttactgttgtgtaaaattgtggtataatgagaaatacatttggtctttgttcctggttcctggcatagagctcctaaaacgcttagaatttcatgagtgataagagttttttggttttgttttgtttttgctgttgttgttattcatagcactgcccttttaattacacctgattatactactgaagtgacttatggttgctcccctagacagcctcagaatggggctgttctctaggaagatcaagtaactagaggatggagactttgtgccccatttctcccacctcctggaaggggaagggtgctggagattagattagacaatgagattaagngaactccaaatagcccaaagagggtggtgcacccccaactttataggggtanaggccctganattaggagaaccc

SEQ ID NO: 4390 - DNA, 848 bp, Homo sapiens
  misc_feature (633)..(633): "n" may be a, t, c, g, other or unknown
  misc_feature (723)..(723): "n" may be a, t, c, g, other or unknown
  misc_feature (750)..(750): "n" may be a, t, c, g, other or unknown
  misc_feature (824)..(824): "n" may be a, t, c, g, other or unknown
  misc_feature (826)..(826): "n" may be a, t, c, g, other or unknown
  misc_feature (834)..(835): "n" may be a, t, c, g, other or unknown
aatgcacacgagcagacagagaagcaacatctttaaggtactgagggcaggagaagttaatgtagaatactatgccagaaaaaataaattcccaaaagtggaagtgaaataaggacatttagagatgtacaaaagctgaccgaattcactaccagtcaacccacactacaagaaacatcaaatgagtcctccaagcagaaggaatccaataccagatgaaaatccagatctccacgaggaaatgaagaacaccagaaatgggtaactatactagatcggccctttcttcaaataagagcagttggaataacaaagctgttcagttgtacccttggaatccactgaaatcctgggtagggaagctccagtaccaccaactggaaagactgggaatgcctaatagctggtactggccattgtcgtaggctttgtccactctgacaaactgaagatggggactcgactcaccttcgccagccacaggaggacctccagacgaggacaggactcgctgcctttctttcccgtcagaaagggatcccttgcggacaggacctaagcaccacgcacctgccccccgggatgccgaacgaagtggtccctaaagctcctctgcaggcccaaccgaaacangcctgaagctccaaggatgggcgagaggatcctctttgagcgaaaccagccttctgcctggctgggccctggtcaacaccctgggaagangccgatttggcgggcaagaacgggagnaaaaggacctaaaggtagaatcccatgatgtccaagatgtttaaaacactcaaatttttaagggtcgaactgtnanggggggannataagggggtctc

SEQ ID NO: 4391 - DNA, 786 bp, Homo sapiens
  misc_feature (508)..(508): "n" may be a, t, c, g, other or unknown
  misc_feature (653)..(653): "n" may be a, t, c, g, other or unknown
  misc_feature (716)..(716): "n" may be a, t, c, g, other or unknown
  misc_feature (756)..(756): "n" may be a, t, c, g, other or unknown
  misc_feature (769)..(769): "n" may be a, t, c, g, other or unknown
  misc_feature (779)..(779): "n" may be a, t, c, g, other or unknown
  misc_feature (784)..(784): "n" may be a, t, c, g, other or unknown
aaaaggcaggcattctctttccttttccttctctcctgagcgctcctgcagttcctggggcgtagtaggggatccacaagcgtttgtgaccagtgaagttctttacaagggtgagatctgcacgggaggacccgagcgagggtctcggcttgccaggaagccggggttccccgggaagcgtggagttcacccgcgcactcgaagtgcctttgcaaaattatatctgggtgttggcacccagccactattctgccaatgaagtacatcctggtcacgggtggggtcatctcaggcattggtaaagggatcattgccagcagcattggaacgattctaaaatcatgtggactccgagttactgccataaaaatcgacccctatattaacatcgatgctggcactttttcaccttatgaacacggtgaagtcttcgtcttaaatgatggtggagaagttgatttagaccttggaaattatgaaagatttttggatattaatctttataaangacaacaatatcaccacggggaagatatatcagcatgtgatcaataaagagaggcgtggtgattacctggggaaaacagtgcaaagttgtccctcacattactgatgctgtccaagagtgggttatgaatcaagccaaggtgccngtggatgggaaataaaggaagagccccaaatatgcgttattgagctgggaaggcacaatgggngacatcgaaaggaaatgcccgtttgtggaaggcgttttanacaaattccaagntttaaggggnaaaanag

SEQ ID NO: 4392 - DNA, 694 bp, Homo sapiens
  misc_feature (637)..(637): "n" may be a, t, c, g, other or unknown
  misc_feature (652)..(652): "n" may be a, t, c, g, other or unknown
  misc_feature (655)..(655): "n" may be a, t, c, g, other or unknown
  misc_feature (658)..(658): "n" may be a, t, c, g, other or unknown
  misc_feature (663)..(663): "n" may be a, t, c, g, other or unknown
acttccgtagaggtggacatggcgtgcggctttcgccgcgctattgcttgccagctttccagagtgttgaatcttccaccagaaaacttgatcacatcaatatctgcagttccaatttcccaaaaagaagaagtagctgattttcagctttctgtggatcctttattggaaaaagacaatgaccattcaagaccagatattcaagttcaagccaagagactagcagagaagctaagatgtgatacagtggtgagtgaaatcagtactggtcaaaggactgtaaatttcaaaataaacagagagctcttaacaaagacagtgctacaacaagtaattgaagatggctcaaaatatggattaaaaagtgaacttttctctggacttccccagaagaagattgtggttgaattcagttcacctaatgttgccaaaaaatttcatgttggacatttgcgttctaccgtcataggaaattttatagcaaatctcaaagaagctttaggacatcaagtaataagaataaattaccttggcgattggggcatgcagtttggtcctccgggaactggcttccagctgtttggctatgaggaaaaactgcagtccaatcctctaaaagcatctccttggagtttangtacaagttataaangancancgggntgataaaagtgtagcaaaagcaagcacaagg

SEQ ID NO: 4393 - DNA, 816 bp, Homo sapiens
  misc_feature (680)..(680): "n" may be a, t, c, g, other or unknown
  misc_feature (737)..(737): "n" may be a, t, c, g, other or unknown
  misc_feature (740)..(740): "n" may be a, t, c, g, other or unknown
  misc_feature (749)..(749): "n" may be a, t, c, g, other or unknown
  misc_feature (780)..(780): "n" may be a, t, c, g, other or unknown
  misc_feature (790)..(790): "n" may be a, t, c, g, other or unknown
gaaaaaagagagagtatgtttgtcttctcttcagatgatgaagaagttacaccagcaagagctgtatctcgtcattttgaggatactagttatggctataaagatttctctagacatgggatgcatgttccaacatttcgtgtccaggactattgctgggaagatcatggttattctttggtaaatcgcctttatccagatgtgggacagttgattgatgaaaaatttcacattgcttacaatcttacttataatacaatggcaatgcacaaagatgttgatacctcaatgcttagacgggcaatttggaactatattcactgcatgtttggaataagatatgatgattatgactatggtgaaattaaccagctattggatcgtagctttaaagtttatatcaaaactgttgtttgcactcctgaaaaggttaccaaaagaatgtatgatagcttctggaggcagttcaagcactctgagaaggttcatgttaatctgcttcttatagaagctaggatgcaagcagaactcctttatgctctgagagccattacccgctatatgacctgatgcctttccttcattaaagatgattctggaatgatcagcagatatagtctacaagggggaaggtactaagccccaggaccaatggtagacaaaataattcagaaatccantgggccatgattcccttaatttccggctatttttcctggggggaaaaccactggctnggnacaagcaantgactggtttgggaagcttcaaagttttaanagctgttaangacagggctggccaattcaaaaagta

SEQ ID NO: 4394 - DNA, 845 bp, Homo sapiens
  misc_feature (675)..(675): "n" may be a, t, c, g, other or unknown
  misc_feature (747)..(747): "n" may be a, t, c, g, other or unknown
  misc_feature (767)..(767): "n" may be a, t, c, g, other or unknown
  misc_feature (792)..(792): "n" may be a, t, c, g, other or unknown
  misc_feature (821)..(821): "n" may be a, t, c, g, other or unknown
  misc_feature (835)..(835): "n" may be a, t, c, g, other or unknown
tgataactctaaaatcccttttctgggaaggaattctcttttctcattcatttcagtaagtttttaaaagttcatgaaggagttatattaataatgcttttctcctagatctgtagcattagttgttaccttggagcttggagggttagattctcatcagtcttattgacgctttcagtattgaaaggattttttaaagttgtattcacttaggatctcagtgttgagcaagattttatcagaattttaagtgccaaatcagtttttatttcctttgtgagaagtatctggcatgacttttcagatataagaaataggaatgtgaaatttggataatgttctacttgcatgattataaaataatactgcttataaaattttaagtgcttctatgttccttgctctgtagatcattttttcttttctattttattactcttggctattatgctaatgcaataccttatctttggtcatatgccatcacattaggtgtagttaatttaaactagaactatttggcaagaaaaagtaaaaagctttctgcttgctttatcactatgaagtaatgcagattcacaattccttgacataagaactgtgttcaagtttacattttaaaggacgctgtcaaaagggttgtgtaccaaatatttttttcctacaaagaatgtngatgatctaaaaccaaaactcaacggtgaaaaaccaagtttaatcccaagggacatggttagaaaagtttanttacaccagggtgaagtggntacccaatttgggagaaacggatanacctgaaaatttaccaaagcaaccaaggngtggcaatttggcncaagggggaa

SEQ ID NO: 4395 - DNA, 665 bp, Homo sapiens
  misc_feature (89)..(89): "n" may be a, t, c, g, other or unknown
  misc_feature (644)..(645): "n" may be a, t, c, g, other or unknown
  misc_feature (652)..(652): "n" may be a, t, c, g, other or unknown
  misc_feature (655)..(655): "n" may be a, t, c, g, other or unknown
  misc_feature (661)..(661): "n" may be a, t, c, g, other or unknown
ctttaaatggtggacattacaaagacaggaaaaagaattcttgtctttgtttgctcttttaacaatccaaaggtttaggaatttacttngctctaacaaccctctcgatcctcttgtgaccccgttatactcagtgttgctgaaaaagtccattttaaaataatggcacctaccacatccatttttccgtctttaggccagaccctctgatggttggtggattttagtattaaagcttgtgttgaaagtggagggggtgttactactgttgtgtctgaaacaagagttaaggttatattttatgaagcagttttggctttttcaacagatgttggccactcacttttatggatttcacattgagtagtaatgagtcataatcactacttaattttcccaaaccagagggaatatacattttattattggaccctccaggctgtcaatgaagagagaaaacctttctttggaatcaagttgaaaacctgttgttaacacctctctctgggccttctttgctctccttagcacgttcattgctaggggctgccacttccatcttctctgccttggaaagcatagagtcgtttctcaagcctcattctcaacctttaatgagttcatttaaataaatggtgattaannacatatnaanggtatngcaa

SEQ ID NO: 4396 - DNA, 735 bp, Homo sapiens
  misc_feature (642)..(642): "n" may be a, t, c, g, other or unknown
  misc_feature (673)..(673): "n" may be a, t, c, g, other or unknown
  misc_feature (724)..(724): "n" may be a, t, c, g, other or unknown
  misc_feature (731)..(731): "n" may be a, t, c, g, other or unknown
  misc_feature (734)..(734): "n" may be a, t, c, g, other or unknown
aggcccctcctcccggcggcgcggcagagccaggccccagcgctcggccggccgcgagcccgccggccggggacgagcgtcgcagctcatgctgatcgctgtcctcctcctccccctcaggcggcgctggcggcggccctgggacccgcggaagccggcatgctggagaagctggagttcgaggacgaagcagtagaagactcagaaagtggtgtttacatgcgattcatgaggtcacacaagtgttatgacatcgttccaaccagttcaaagcttgttgtctttgatactacattacaagttaaaaaggccttctttgctttggtagccaacggtgtccgagcagcgccactgtgggagagtaaaaaacaaagttttgtaggaatgctaacaattacagatttcataaatatactacatagatactataaatcacctatggtacagatttatgaattagaggaacataaaattgaaacatggagggagctttatttacaagaaacatttaagcctttagtgaatatatctccagatgcaagcctcttcgatgctgtatactccttgatcaaaaataaaatccacagattgcccgttattgaccctatcagtgggaatgcactttatatacttacccacaangagaatcctcaagttcctccaagctttttangtccggatatgccaaaagcctgccttcatgaaagcaagaacctggattganccttggnatna

SEQ ID NO: 4397 - DNA, 701 bp, Homo sapiens
  misc_feature (515)..(515): "n" may be a, t, c, g, other or unknown
  misc_feature (648)..(648): "n" may be a, t, c, g, other or unknown
  misc_feature (671)..(671): "n" may be a, t, c, g, other or unknown
  misc_feature (679)..(679): "n" may be a, t, c, g, other or unknown
  misc_feature (684)..(684): "n" may be a, t, c, g, other or unknown
  misc_feature (692)..(692): "n" may be a, t, c, g, other or unknown
taaatgatggcgactggaacgccagagtctcaagcgcggttcggtcagtccgtgaaggggcttctcacggagaaggtgaccacctgtggtactgacgtaatcgcgctcaccaagcaggtgctgaaaggctcccggagctccgagctgctaggtcaggcagctcgaaacatggtactccaggaagatgccatcttgcactcagaagatagtttaaggaagatggcaataataacaacacatcttcaataccagcaagaagctattcagaagaatgttgaacagtcatcggatctacaggaccagtcgaatcatctgttgaaatagaatgacatgtaagagtgctgtaggactcctttgcctaatgctgaggagtaaataccttacacagctgtcctctgggtttggttttctattttcttctccaaaagttaagttagaaaagttctgtgttagggccgggcgcggtagctcacgcctgtaatcgcagcactttgggaggccgaggcgggtggatnacgaggtcaggagttcgagaccagcctggccaagatggtgaaaccccgtctctactaaaaatacaaagaattagctgggcgttggtggcgggcgcctgtaatcccaagctactccgggaagctgagggaagangaatccccttgaaacccaagganggtggganggttnccaattgnaggccaaag

SEQ ID NO: 4398 - DNA, 720 bp, Homo sapiens
  misc_feature (567)..(567): "n" may be a, t, c, g, other or unknown
  misc_feature (661)..(661): "n" may be a, t, c, g, other or unknown
  misc_feature (687)..(687): "n" may be a, t, c, g, other or unknown
  misc_feature (690)..(690): "n" may be a, t, c, g, other or unknown
  misc_feature (707)..(707): "n" may be a, t, c, g, other or unknown
  misc_feature (714)..(714): "n" may be a, t, c, g, other or unknown
aaaaagtaaattttcgcaagaaggacttagaaatgctattccatggaatgagtgctgattttacaagtgagaatttctcagcagcctggtatcttatagagaatcactcaaacaccagttttgagcagctcaaaatggcagtcaccaacctaaagagacaggctaacaagaagagtgagggcagcctggcctatgtgaaaggcggtctcagtacattcttcgaagcacaggatgccctctcagccatccatcaaaaactagaagcagatggaacggaaaaagtagaaggatccatgacgcagaaactggagaatgttctgaacagagcaagtaatactgcagacacattgtttcaagaagtattaggtcggaaagacaaggcagattccactagaaatgcactcaatgtgcttcagcgatttaagtttcttttcaaccttcctctaaatattgaaaggaatattcaaaagggtgattatgatgtggttattaatgattatgaaaaggccaagtcactttttgggaaaacggaggtgcaagttttcaagaaatattatgctgaagtanaaacaaggattgaagctttaagagaattacttctggataaattgcttgagacacccatcaacttttacatgaccaaaaaacgttacataagggnacctgtctgaccttcatgcgtctggngancctgcttgggaaatcanttggggnccaaca

SEQ ID NO: 4399 - DNA, 802 bp, Homo sapiens
  misc_feature (610)..(610): "n" may be a, t, c, g, other or unknown
  misc_feature (641)..(641): "n" may be a, t, c, g, other or unknown
  misc_feature (681)..(681): "n" may be a, t, c, g, other or unknown
  misc_feature (706)..(706): "n" may be a, t, c, g, other or unknown
  misc_feature (733)..(733): "n" may be a, t, c, g, other or unknown
  misc_feature (736)..(736): "n" may be a, t, c, g, other or unknown
  misc_feature (743)..(743): "n" may be a, t, c, g, other or unknown
  misc_feature (787)..(787): "n" may be a, t, c, g, other or unknown
aagaaatgaaattattcatcaacaataactttgggcactgcaaaagactgagtcaaaggttaaatcagtcacacagatatccaaggccaagttgaagatcacaagtatatcccatttagagatttgcatacttagagattaagcccatgttcattaattatttagttaattcaaaagccattaataaatccatgcccagcctacgcaacatagtaagacccagtctctacaaaaattttaaaaattagccagccatggtgacacgtacctgtagtcctacacacttgggaagctgaagccagaggattgcttgagcccaggaggtcgaggctgcagtgaaccgtgattgtgtcactgcactccagcctgggtgagagagcaagaccttgtctcaataaataaacccaagttacttcgatgactagatactggaggtctgaaggagaagctttaaaaatacagattgattgcttcagagaaatcctatttataattatgatctgaacttattctatgattagcaaatatatcatctgaaaataaaacaggagttctctccccagacttttgtttttcaggatggtgagttttggtctgggaccctcatggnacccattttggtaaaaggaaaaagatagtanaacagggaataggaagtttccagagatttgggcatctcanggatccatgaaatgctgagactaanccactaaatccaaattttattggctanggnaaatccnaaatccggtcagtgttccggacaagattttaggagtttaggccnaaggatttaggtcta

SEQ ID NO: 4400 - DNA, 683 bp, Homo sapiens
  misc_feature (626)..(626): "n" may be a, t, c, g, other or unknown
  misc_feature (660)..(660): "n" may be a, t, c, g, other or unknown
  misc_feature (663)..(664): "n" may be a, t, c, g, other or unknown
  misc_feature (680)..(680): "n" may be a, t, c, g, other or unknown
attttccacgctgtaccggcggaaattcaagcactggaagagaggttccggggctgggctggcctgactgaaggcggcggaatggagacgcggaccgaggacgggggcctcacccgccgccccacgctggcctcttcttgggatgttgcaggcggggccctgacccacagcctcctcctcacccgggccggtctcggccccggtgacttcgactgggaggagctgctggcaccgcctgctccaggtcaggatctggtgattttgaagagaaaccacaacgacaaagatgaaaacccctgcttcctttacctgaggtgtggccctgatggaggtgaagaaatcgcttctattggcattttaagttcagcaagaaatatggaagtgtacttaggagaggagtactgtggaaccagtaggggcaagaatgtttgtactgtcctggatgacagtgaacatgaaaagatcattttgtataaaaaaaatctaaaattggagtcctccacacatgcttgtaaaataaagttgctctcctttggcgaaaggcaatgtgtgttcatcagtaaagttgtggtacacatgagatcagtttttgcaaattcttcaacaagctctcctgctctaggatnaaggatagaccttgacaaggtccaaaccataatnggnntcaatggggtcaaagntac

SEQ ID NO: 4401 - DNA, 687 bp, Homo sapiens
  misc_feature (611)..(611): "n" may be a, t, c, g, other or unknown
  misc_feature (669)..(669): "n" may be a, t, c, g, other or unknown
  misc_feature (682)..(682): "n" may be a, t, c, g, other or unknown
  misc_feature (684)..(684): "n" may be a, t, c, g, other or unknown
  misc_feature (686)..(686): "n" may be a, t, c, g, other or unknown
acgtccccgccgggcccgcgcgcctcgtgcctcgcgcctcgcgcctccagccacgtccccgccccggctccggcgcgccgcggagttggctgctgggaggtgcgggactgggtgtggccggcggctctggtctcggctgtgagctgcgctctccacgccggctccgcgctccaggggctgctgagcgcccagcggacaccggcagcgcgcggtcgacgcgggcctgagctccctccagctgttttcactcattagctcctgaggtaaacaaattgaaaaaatgagcgaactggaacagttgaggcaagaagcagaacaactgcggaatcagattcaggatgctcggaaagcatgtaatgatgcaacgcttgttcagattacatcaaatatggactccgtgggtcgaatacaaatgcgaacaagacgtacactgaggggccacctagctaaaatctatgctatgcattggggatacgattccaggctgctagtcagtgcttctcaagatggaaaattaattatttgggatagctatacaacaaataagatgcatgctattcctttgaggtcctcctgggtgatgacctgtgcttatgctccctcctggtaantatgttgcctgtggaaggcttggcaacatctgctctatatataacttaaaggaccaanagagggaaaatgntnana

SEQ ID NO: 4402 - DNA, 741 bp, Homo sapiens
  misc_feature (474)..(474): "n" may be a, t, c, g, other or unknown
  misc_feature (596)..(596): "n" may be a, t, c, g, other or unknown
  misc_feature (624)..(624): "n" may be a, t, c, g, other or unknown
  misc_feature (698)..(698): "n" may be a, t, c, g, other or unknown
  misc_feature (701)..(701): "n" may be a, t, c, g, other or unknown
  misc_feature (708)..(708): "n" may be a, t, c, g, other or unknown
  misc_feature (728)..(728): "n" may be a, t, c, g, other or unknown
  misc_feature (735)..(735): "n" may be a, t, c, g, other or unknown
aggaaggagggtggccctaccccagcgggctcggctcggggcctccgcggcagttcggggtccttcacccgccggctccagtcctgtgccgttttccgtccgcgactcttccggcccagagctttcggagtgcggttgctcaggggaagccgtcgccgcccccgcctcggggccgagtgagagtgcccgtcgcgtcgcgccgcgtcgccccccgggccgcctccttgccgccagtggcgggctccgttctccctcgaagcactccccccagctccatgaatggaaatcggctccgcaggacccgctggggcccagcccctactcatggtgcccagaagacctggctatggcaccatgggcaaacccattaaactgctggctaactgttttcaagttgaaatcccaaagattgatgtctacctctatgaggtagatattaaaccagacaagtgtcctaagagagtgaacagggangtggttgactcaatggttcaacattttaaagtaactatatttggagaccgtaagaccaatttatgatggaaaaagaagtctttacaccgccaatccacttcctgtggcaactacaggggtanattttagacgttactttacctggggaangtgggaaaaggattgacctttcaagggtgtcaatcaaatttgtctcccgggttaagttgggaacctactgcaanaantactganaaggacggaccttgcctganccaattngaattt

SEQ ID NO: 4403 - DNA, 765 bp, Homo sapiens
  misc_feature (633)..(633): "n" may be a, t, c, g, other or unknown
  misc_feature (691)..(691): "n" may be a, t, c, g, other or unknown
  misc_feature (725)..(725): "n" may be a, t, c, g, other or unknown
  misc_feature (748)..(748): "n" may be a, t, c, g, other or unknown
  misc_feature (753)..(753): "n" may be a, t, c, g, other or unknown
  misc_feature (760)..(760): "n" may be a, t, c, g, other or unknown
ctttatggcgtgggagaggccacagcccggactccatcgactcccccggctcttagactaaaatcatgcccaagttcaaacaacgaagacgaaagctaaaagccaaagccgaaagattattcaaaaaaaaagaagcctctcactttcagtccaagctaattacacctcctcctccaccaccctcaccagaaagagtcggtatttcttcaatagatatatctcaaagcagaagctggctaacatcatcctggaacttcaattttcctaacatcagagatgcaataaaactttggacaaatagagtatggtctatatacagctggtgccagaactgcataacccagagtttagaagtattgaaagacaccatctttccatctcgtatctgccaccgagaactttacagtgtaaaacaacagttttgcattttggaaagtaaattatgcaagcttcaggaagcactgaagaccatctcagaaagttcttcctgtccaagctgtggtcaaacatgtcacatgagtggtaaacttacaaatgtgcctgcctgcgttctgatcacccctggagactccaaagctgtgcttcctcccacactgccacagccagccaagcattttcctcctcctcctccanctccaactctgccacctcctccaccaccactagcacctgtgttgctcagaaaacccantctcgctaaagcaacttcaagctggaccattaanaaaaagatgggcccatggcaggntaacngtttaangattc

SEQ ID NO: 4404 - DNA, 617 bp, Homo sapiens
  misc_feature (530)..(530): "n" may be a, t, c, g, other or unknown
  misc_feature (535)..(535): "n" may be a, t, c, g, other or unknown
  misc_feature (545)..(545): "n" may be a, t, c, g, other or unknown
  misc_feature (577)..(577): "n" may be a, t, c, g, other or unknown
  misc_feature (593)..(593): "n" may be a, t, c, g, other or unknown
tcaccaaagttaccgcacaatgggtccacaggttccaccccactgctgaggaattctcactccaactctctaatttccgaatgcatggatagtgaagctgagaccgtcatgcagctccgaaatgagttaagagacaaggagatgaagctgacggatatccgcttagaagctctcagttctgcccaccagctggaccagctccgggaggccatgaacaggatgcagagtgaaatagagaagctgaaagctgagaatgatcggctgaagtcagagtctcaaggcagtggctgcagccgggctccttcccaagtgtccatctctgcctccccgaggcagtccatgggcctctcccagcacagcttgaacctcactgagtcaaccaagcctggacatgttgctggatgacactggtgaatgctcggctcggaagggaggaggcaggcatgttaagatagttgtcagctttcaggaggaaatgaagtggaaggaggattccagaccacacctctttcttattggctgcattgggngttantggcaagacnaagtggggatgtgctccaatgggggtggttanaccggctgttcaaagnatacatcattcatgtcgaaccaat

SEQ ID NO: 4405 - DNA, 823 bp, Homo sapiens
  misc_feature (736)..(736): "n" may be a, t, c, g, other or unknown
  misc_feature (741)..(741): "n" may be a, t, c, g, other or unknown
  misc_feature (759)..(759): "n" may be a, t, c, g, other or unknown
  misc_feature (768)..(768): "n" may be a, t, c, g, other or unknown
  misc_feature (823)..(823): "n" may be a, t, c, g, other or unknown
agagcccgggaagcgctcgggcgaagaggaggagccaagggtaccgagcgggtggagtcgggagccggagagcggtggaggcggatttcctgggcccggccctctggcgctaccatggcgtttggcaagagtcaccgggatccctacgcgacctccgtgggccacctcatagaaaaggctacatttgctggagttcagactgaagattggggccagttcatgcacatctgtgacataattaacactacccaggatgggccaaaagatgcagtgaaagctttgaagaaaaggatttccaaaaactacaatcataaagaaatccaacttaccttgtcacttattgacatgtgtgtgcagaactgcggtccaagcttccagtctctgattgtgaagaaggaatttgttaaagagaatttagttaagctactgaatcccagatacaacttgccattagacattcagaatagaatcttgaatttcattaagacttggtcacagggcttcccaggaggtgtggatgtaagcgaagtcaaagaagtatacctcgacctggttaagaaaggcgttcagtttcctccctcagaagcagaggctgaaacagcaagacaagagactgcccaaatctcatcaaatcctccaacatctgtccctactgcaccaactctttcttctgtattgctccaaagaactcgactgttacaattgggcccaagaacaaattgggaaaactgcacantgaanttggattggtgaaaatgnaatgtgcgnagtgatgtccgccaatattgatggggaaatacccctggggcctgaaaaaccatgn

SEQ ID NO: 4406 - DNA, 784 bp, Homo sapiens
  misc_feature (575)..(575): "n" may be a, t, c, g, other or unknown
  misc_feature (700)..(700): "n" may be a, t, c, g, other or unknown
  misc_feature (735)..(735): "n" may be a, t, c, g, other or unknown
  misc_feature (752)..(752): "n" may be a, t, c, g, other or unknown
  misc_feature (762)..(762): "n" may be a, t, c, g, other or unknown
  misc_feature (767)..(767): "n" may be a, t, c, g, other or unknown
gaacattattcaatttgtgcatggagaggaagacctgaaggttcagcatagtagctacagacagagggcccggctgttgaaggaccagctctccctgggaaatgctgcacttcagatcacagatgtgaaattgcaggatgcaggggtgtaccgctgcatgatcagctatggtggtgccgactacaagcgaattactgtgaaagtcaatgccccatacaacaaaatcaaccaaagaattttggttgtggatccagtcacctctgaacatgaactgacatgtcaggctgagggctaccccaaggccgaagtcatctggacaagcagtgaccatcaagtcctgagtggtaagaccaccaccaccaattccaagagagaggagaagcttttcaatgtgaccagcacactgagaatcaacacaacaactaatgagattttctactgcacttttaggagattagatcctgaggaaaaccatacagctgaattggtcatcccagaactacctctggcacatcctccaaatgaaaggactcacttggtaattctgggagccatcttattatgccttggtgtancactgacattcatcttccgtttaagaaaagggagaatgatggatgtgaaaaaatgtggcatccaagatacaaactcaaagaagcaaagtgatacacatttggaggagacgtaatccaacattggnacttctgatcttcaagcaaggattctcaacctgtnggttaaggggtcaaccngggctgaccntgacnaagagggaagggaatgg

SEQ ID NO: 4407 - DNA, 728 bp, Homo sapiens
  misc_feature (438)..(438): "n" may be a, t, c, g, other or unknown
  misc_feature (575)..(575): "n" may be a, t, c, g, other or unknown
  misc_feature (604)..(604): "n" may be a, t, c, g, other or unknown
  misc_feature (684)..(684): "n" may be a, t, c, g, other or unknown
  misc_feature (705)..(706): "n" may be a, t, c, g, other or unknown
  misc_feature (717)..(718): "n" may be a, t, c, g, other or unknown
atctactacttcttccgagaggacaatcctgacaagaatcctgaggctcctctcaatgtgtcccgtgtggccagttgtgcaggggggaccagggtggggaaagttcactgtcagtctccaagtggaacacttttctgaaagccatgctggtatgcagtgatgctgccaccaacaagaacttcaacaggctgcaagacgtcttcctgctccctgaccccagcggccagtggagggacaccagggtctatggtgttttctccaacccctggaactactcagccgtctgtgtgtattccctcggtgacattgacaaggtcttccgtacctcctcactcaagggctaccactcaagccttcccaacccgcggcctggcaagtgcctcccagaccagcagccgatacccacagagaccttccaggtggctgaccgtcacccanaggtggcgcagagggtggagcccatggggcctctgaagacgccattgttccactctaaataccactaccagaaagtggccgtccaccgcatgcaagccaagccacggggagacctttcatgtgctttacctaactanagacaggggcactatccacaaggtggtgngaaccggggggagcaggagcacagcttcgccttcaacatcatgggagatccaagcccttccgccgcgcgggttgccaatncagaaccatgttcgctggganncctgaagcggnnggaaactgta

SEQ ID NO: 4408 - DNA, 774 bp, Homo sapiens
  misc_feature (647)..(647): "n" may be a, t, c, g, other or unknown
  misc_feature (678)..(678): "n" may be a, t, c, g, other or unknown
  misc_feature (729)..(729): "n" may be a, t, c, g, other or unknown
  misc_feature (733)..(733): "n" may be a, t, c, g, other or unknown
  misc_feature (755)..(755): "n" may be a, t, c, g, other or unknown
  misc_feature (764)..(764): "n" may be a, t, c, g, other or unknown
tttaaagcataacttcctctctgcatcttgcttcccctctttctgtcccttctcctctcccacccccacagttttggcttcactttgctcaggctgtgacaactgtctttaagggagctaacttttatctgactgtagagccaagcaaactaatcttgcaaaactgttctgccacataggttggtctcttcctgtttggaattcatctatatattagcaacttggaaagcctttgagctgagctagtgcgcaaagctgcaccttagactgtggttcacagtgctgcttaattgtcacaacggtgtcactcaccttgtcctcacctaacctgcaagttagacatttaggctgctttcttcatcagtgtaaggtgaaatagcagattggtgtgtaaaaagtgtggcttggagtgtggtggtatgaactgtgggattatttactatagggtctcattgcaaatcctttagaacacttgcctcttacaccttttgtctgtctgctcttaaatattttctgtccttccagcatgctatctctacctaacagaaggggtcatatctgtctcaactaaaagtcattccatttgggtcattcgtctggaggctgagacagtggaagagtcaaacttgccctgaagcttcactcanccagtacctgtctcctctgcccaatgtccancaacttacccctgacccaatccttttaagggaactttgccaaagagaagancaanaatactctttctttcctcaacnctcccctcnctttttttgg

SEQ ID NO: 4409 - DNA, 830 bp, Homo sapiens
  misc_feature (625)..(625): "n" may be a, t, c, g, other or unknown
  misc_feature (657)..(657): "n" may be a, t, c, g, other or unknown
  misc_feature (741)..(741): "n" may be a, t, c, g, other or unknown
  misc_feature (748)..(748): "n" may be a, t, c, g, other or unknown
  misc_feature (795)..(795): "n" may be a, t, c, g, other or unknown
  misc_feature (808)..(808): "n" may be a, t, c, g, other or unknown
  misc_feature (817)..(817): "n" may be a, t, c, g, other or unknown
atttaaaattatagagcttttcatcactacggagatgctcttgcctatgataggaacgatggctacatctgaagctgagcaaatttatcttttctcttcgtctgcatcagggtgacctctggaaggtctgaaaattgaacaagatggacgggtccaggaaagaggaggaggaagacagcacactcaccaacatttctcttgcagatgacatagaccattcctcaagaattttgtatccaaggcccaaaagtttgttacccaagatgatgaatgctgacatggatgcagttgatgctgaaaatcaagtggaactggaggaaaaaacaagacttattaatcaagtgttggaactccaacacacacttgaagatctctctgcaagagtagatgcagttaaggaagaaaatctgaagctaaaatcagaaaaccaagttcttggacaatatatagaaaatctcatgtcagcttctagtgtttttcaaacaactgacacaaaaagcaaaagaaagtaagggattgacacccttctgttttatggaattgctgctgaacattttttctttaaaacttggataagattccaaaagttacagtacctttgtggcttcattgggatatttatgangataatgtcagatgtagacaaaattaacacantaacaggagacttccataagtttgtgtattatgttagtctatgaaaacgtgcaaatgtattgtagagacttttatgattagaantgcatanatttatgaaacttaaagatgaatggttttaattgaaatttgtagggnttaacactggccntttaataanagggtttaagtaa

SEQ ID NO: 4410 - DNA, 808 bp, Homo sapiens
  misc_feature (746)..(746): "n" may be a, t, c, g, other or unknown
  misc_feature (756)..(756): "n" may be a, t, c, g, other or unknown
  misc_feature (778)..(779): "n" may be a, t, c, g, other or unknown
  misc_feature (798)..(798): "n" may be a, t, c, g, other or unknown
aaatacttagtatagtggctgagattatgaagtaaatttcactattagcattattcactcaaagtcacatatgagtctatacttgtgggacaaatcaaattcagatttttgttcagattagaatgtgctagaagcactctcagaaaagaagtctgccaggggaggactagggtccaaagagaatctacatggttggtaggtaggcatgaaaaaaggaaggagagagagagagaatatggtactattcatgaaaataaagctatttacaacttagaaaagcaattccatttcctgcaacaaacataacttagggaaaaataaatattattttcattagcaaacatattaatattttataagctttgcagttatccaacacccataaatatattccgggaaattaagccagtcttttcagttcacaattgagtgtacctgggagtctccttgccctttctcagaagacattaaaaagaaaagctgtaaatcagtcataagaaaaagaacatatataatctggagtagaattttgcttccacttggctaattttcatcagtgctatgctcctgtggtcccccggatccaaatatttcctaacctttaccttttcattttgttgagaagtagtagtaatccacatgtatttttagctaacaaaacacgtccatgaattagattatttccttgaagccttttcatcaaatattttgtgggccttttttttttttaaattttagccaatggntaaatcaaanctttaaggctttaaaaattgtnntccacatagctaaaccaanggttccacca

SEQ ID NO: 4411 - DNA, 841 bp, Homo sapiens
  misc_feature (466)..(466): "n" may be a, t, c, g, other or unknown
  misc_feature (562)..(562): "n" may be a, t, c, g, other or unknown
  misc_feature (598)..(598): "n" may be a, t, c, g, other or unknown
  misc_feature (602)..(602): "n" may be a, t, c, g, other or unknown
  misc_feature (622)..(622): "n" may be a, t, c, g, other or unknown
  misc_feature (636)..(636): "n" may be a, t, c, g, other or unknown
  misc_feature (666)..(666): "n" may be a, t, c, g, other or unknown
  misc_feature (722)..(722): "n" may be a, t, c, g, other or unknown
  misc_feature (758)..(758): "n" may be a, t, c, g, other or unknown
  misc_feature (767)..(767): "n" may be a, t, c, g, other or unknown
  misc_feature (824)..(825): "n" may be a, t, c, g, other or unknown
  misc_feature (827)..(827): "n" may be a, t, c, g, other or unknown
ctcccgttctccaccgtgccggctggccaggtgggctgagggtgaccgagagaccagaacctgcttgctggagcttagtgctcagagctggggagggaggttccgccgctcctctgctgtcagcgccggcagcccctcccggcttcacttcctcccgcagcccctgctactgagaagctccgggatcccagcagccgccacgccctggcctcagcctgcggggctccagtcaggccaacaccgacgcgcagctgggaggaagacagggcccttgacatctccatctgcacagaggtcctggctggaccgagcagcctcctcctcctaggatgacctcaccctccagctctccagttttcaggttggagacattagatggaggccaagaagatggctctgaggcggacagaggaaagctggattttgggagcgggctgcctcccatggagtcacagttccaagggcnaggaccggaaattcgcccctcaaataagagtcaacctcaactaccgaaagggaacaagtgccagtcaaccggatccaaaccgatttgaccgagatnggctcttcaatgcgggtctcccggggtgtccccgangatntggctggacttcaagagtanctgagcaagaccancaagtacctcaccgactcgggaatacacangaggggctccaaaaggtaagacgttgcctgaataaaggctgttgctgaaccttaanggacggagtcaatggcctgcaattctgccactggcntgcaaattngacaagggactctgggaaatcctcaagccccctgggtaaaatgcccaattgcacaanntnaactaattaaccga

SEQ ID NO: 4412 - DNA, 852 bp, Homo sapiens
  misc_feature (663)..(663): "n" may be a, t, c, g, other or unknown
  misc_feature (678)..(678): "n" may be a, t, c, g, other or unknown
  misc_feature (730)..(730): "n" may be a, t, c, g, other or unknown
  misc_feature (769)..(770): "n" may be a, t, c, g, other or unknown
  misc_feature (789)..(789): "n" may be a, t, c, g, other or unknown
  misc_feature (834)..(834): "n" may be a, t, c, g, other or unknown
  misc_feature (843)..(843): "n" may be a, t, c, g, other or unknown
ctttaccctacatgcctgagaagccaggggccaagatggatcttctcctcgacatcagctaagcctggaggactcttcccctcagagaccatggagagggacagccacgggaatgcatctccagcaagaacaccttcagctggagcatctccagcccaggcatctccagctgggacacctccaggccgggcatctccagcccaggcatctccagcccaggcatctccagctgggacacctccgggccgggcatctccagcccaggcatctccagctggtacacctccaggccgggcatctccaggccgggcatctccagcccaggcatctccagcccaggcatctccagcccgggcatctccggctctggcatcactttccaggtcctcatccggcaggtcatcatccgccaggtcagcctcggtgacaacctccccaaccagagtgtaccttgttagagcaacaccagtgggggctgtacccatccgatcatctcctgccaggtcagcaccaagcaaccagggccaccagggagagcccaggtacgaagcctgcccaagttcacctggcgggagggccaagaagcagctaccgctcatcgggtgcgtgctcctcctcattgccctggtggtttcgctcatcatcctcttccagttctggcanggccacacagggatnaggtacaagggagcaaaggggagagctgtcccaaagcacgctgtttcgctgntgaacggggtgggtggactgcaagctggaagagttgacnnaacctggggctgcctttanggttttgactggggaaaaagttctccggcttaaaatcctaatccnggggtcccncccaatcaa

SEQ ID NO: 4413 - DNA, 799 bp, Homo sapiens
  misc_feature (735)..(736): "n" may be a, t, c, g, other or unknown
  misc_feature (749)..(749): "n" may be a, t, c, g, other or unknown
  misc_feature (784)..(784): "n" may be a, t, c, g, other or unknown
  misc_feature (790)..(790): "n" may be a, t, c, g, other or unknown
gtacagggctggatgattgaagcaccagcgggaactagtcggacctccgagctctttaaactgtcctcagctcggctggttctccacgagctccgggcagacggcggggggtgggtcggcgtttaagtcaaaggccttggggctccgagtcccttcctctccccgtcctgtgaaggcacgacccagttcagctgtctgtaaagtggagccattagtccctgcctcgtagtgggaaaactgggaggcggaacgaggaggccgccggtcccaacccggcccaggagcatctttctccgcagaccgtttcctggcgagatcctgcgcagccgaggctgtgttagcgccaaggacttccagcagctgttagcagaggctgctgccagggctgctgccccgctccctcctcctccttcccctggagtcagtggtgggaagcttcccaggagagtcctcagcaacctctggaacacaggacttggccatgactgtctcctgtccctgtgtgggcccagatggttgagcttgagcaggaggtggagcggcggcagcggctggggcaggagtcagcagctaggaaagccctcatcgcgaagttcctaacaaccggcacggcctgaggtctacgactcactgcaaggatgcagctctgggcccccgagttcctggccgtgactgagtacagcgtgtcccaagacgcaaaacctcaaggggccttctccaacgggctggagaaanntatcggagggaanaaacgcaatctaccggggtgccctgttttaaaagnggcccnttctggcaa

SEQ ID NO: 4414 - DNA, 868 bp, Homo sapiens
  misc_feature (621)..(621): "n" may be a, t, c, g, other or unknown
  misc_feature (820)..(820): "n" may be a, t, c, g, other or unknown
  misc_feature (825)..(826): "n" may be a, t, c, g, other or unknown
  misc_feature (847)..(847): "n" may be a, t, c, g, other or unknown
  misc_feature (868)..(868): "n" may be a, t, c, g, other or unknown
actccaagaaccgggtgcccaccttggaagaggtgtcacagacactgaggagcaaaggccacgtatcaaggtccccagatgaggaggctgtggcacgggcccctgaagacagctcccctgcccccgaggtgttcatgaaccagctggaccgcatcagcgaggaatgcgagccatgggacgcccaggactaccacccactcatcttccaggacgccagcatcaccttcgtgaacacggaggctggcctctcagacgaggagacctccaagtcctcgctagaggacaacttggcaggggaggagagcccccagcagggggctgaagccaaggcgcccctgaacatgggcgagttcccctcctcctccgagtccaccttcaccagcactgagtctgagctctctgtgccttacgaacagctgatgaatgagtacaacaaggctaacagccccaagggcacatgaggcagggccggctccccaccccacctttgatggcctcttcccccctcaccctagggtgtcccgagatgaccgggacgcctggcccctggtgggggggcagcctcggaactgggagtggggggccaaggggccttcctaaccttccatcatcctcagctanatgtatgcccgggacaagggctctgttctccaactgaaccataccctggctttggggggcatctgtcctgagcttgggcttgggggtatctcacaattgcaaaagacatgctgggctggcggggacaagtgggcaaaggactgacccttaaggaagggccttgccttgcaagggtcttttgtcctcaaccaattttggnggganntatcaacaacgggttttcctnaaggtcttggggggcctcaan

SEQ ID NO: 4415 - DNA, 891 bp, Homo sapiens
  misc_feature (644)..(644): "n" may be a, t, c, g, other or unknown
  misc_feature (704)..(704): "n" may be a, t, c, g, other or unknown
  misc_feature (736)..(736): "n" may be a, t, c, g, other or unknown
  misc_feature (741)..(741): "n" may be a, t, c, g, other or unknown
  misc_feature (805)..(805): "n" may be a, t, c, g, other or unknown
  misc_feature (856)..(856): "n" may be a, t, c, g, other or unknown
  misc_feature (872)..(872): "n" may be a, t, c, g, other or unknown
  misc_feature (886)..(886): "n" may be a, t, c, g, other or unknown
  misc_feature (889)..(889): "n" may be a, t, c, g, other or unknown
ttaaatctatatgtgagactgacaaaaaccttaatgtaatttacttataatgccagaaggaaaacactattttcataccctactttttctgtacctaaattttcttaaaaaaaaatctagtatagcactacattcttttttaagtgatgcagaccttagtttctttagcccctttattttgaatacaatgctacatatgaatgttgaagctgatacattgcacagttctgtagacatcactacaccgatgtagtttctcaaattttagcaatatgctctacataaaatcactacagagatactagtggggaagacgattaacacacctcttacagtaatactgcctgttattggtatagcagtggtatttgcagactgggatcataaggagcccttaaatacttgttattgactggggttatttttatgctgtagcaaatgtgacaggctctttttagcaaaatttttgaaaatttttttggtattactctgaaacaaaatttaagttggagtttcagggatttagggagtagttttcattctacatgaactgaggtaatattatggtaactccaatatttggttaaaaaaactatacaaatcagaataagtactaaaatactgtagaattttagcatttttantttgcactttgtgtggatttgaggtgttcaagaaaataccaaccattaaaaatgtaatcnagttgggcaaaaggtgtgcgcctaaaaacacnggaanccgaacaatgcattgattttgggataaccttttggaggggtttttgtcaaatagcaatgtgaangaggttacaatttttcctaaaaaagaattgggggggccccaaaatgtccanaagttcctggggaaanaggtaaccggaaanganaa

SEQ ID NO: 4416 - DNA, 849 bp, Homo sapiens
  misc_feature (617)..(617): "n" may be a, t, c, g, other or unknown
  misc_feature (619)..(619): "n" may be a, t, c, g, other or unknown
  misc_feature (645)..(645): "n" may be a, t, c, g, other or unknown
  misc_feature (699)..(699): "n" may be a, t, c, g, other or unknown
  misc_feature (772)..(772): "n" may be a, t, c, g, other or unknown
  misc_feature (786)..(786): "n" may be a, t, c, g, other or unknown
  misc_feature (806)..(806): "n" may be a, t, c, g, other or unknown
  misc_feature (811)..(811): "n" may be a, t, c, g, other or unknown
  misc_feature (816)..(816): "n" may be a, t, c, g, other or unknown
atagtctacacagagctccccttgctgcccagacaagctgaaggaccacaggaaaagccatggagacttcagcatcctcctcccagcctcaggacaacagtcaagtccacagagaaacagaagatgtagactatggagagacagatttccacaagcaagacgggaaggctggactcttttcccaagaacaatatgagagaaacaagtcttcttcctcctccttctcttcctcctcatcctcctcatcttcttcatcctcctcctcctcaggtcctgggcatggggagcctgacgttttgaaggatgagcttcaactctatggagatgctcctggagaggtggtaccctctggggaatcaggactccgaaggagaggctctgacccagcaagtggagaagtggaggcctctcagttaagaagactgaatataaagaaagatgatgagtttttccatttcgtcctcctgtgctttgccatcggggccttgctggtgtgttatcactattacgcagactggttcatgtctcttggggtcggcctgctcaccttcgcctccctgggaaaccgttggcatctacttcggactagtgtaccgtatccacaagcgtcctccaangnttcatccccctcttccagaagtttangctgacaggggttcaaggaagactgactgagggcacttccaggtgggcaacaanaggcaaggcccaattgtgaccaacaaatggggaaccctggagcccaaaaaggggaagaagcaacaattctgangaagaacgcacaanggagaaccaaagcccaaganccaantaaancaggaaacaactttttcccttccaatggtgggg

SEQ ID NO: 4417 - DNA, 859 bp, Homo sapiens
  misc_feature (588)..(588): "n" may be a, t, c, g, other or unknown
  misc_feature (680)..(680): "n" may be a, t, c, g, other or unknown
  misc_feature (699)..(699): "n" may be a, t, c, g, other or unknown
  misc_feature (715)..(715): "n" may be a, t, c, g, other or unknown
  misc_feature (740)..(740): "n" may be a, t, c, g, other or unknown
  misc_feature (765)..(765): "n" may be a, t, c, g, other or unknown
  misc_feature (798)..(798): "n" may be a, t, c, g, other or unknown
  misc_feature (819)..(819): "n" may be a, t, c, g, other or unknown
  misc_feature (832)..(832): "n" may be a, t, c, g, other or unknown
  misc_feature (849)..(849): "n" may be a, t, c, g, other or unknown
aaaaagacggaggagatccagttcgggctgacagtgagaggatgcagcccggtgtctgggcgggctcttaccggcgaagcggatcttcacgaggtcgagcggatgcagcgcaaggttggataagacgccgccgctcacgcccgctatcaggttctcataccggacgtggcggaataccgtgctccacgccgacgacccggacgccgactggccctggcccgtcataggctcggggcccgtcgacaccacggcgcccagggccgcggaggtgggacgcgatgcagtggccgccaccgtggcgacggtcgccccttgtgagcgcaaccccacctccgggaccaacgagaggactcttatgcccaaggcgcgtgagcgaagccggagactctagtactgagggggcaagaacggggcacagccactacgtcacgccggcggaaagcgcgatggaggggaggtcccagcctctcccgagtctccgccctgcctcgcccacaaatgctccaagcccacggacgcggaagcgactgcacagctaaagaaccgccccttgctaacgtttgccggcaaaactacggagcggcgcangattcagttgagctaacaagccgccgctccgcgagtcacgtgactggaagcagtctgggaaaagcggaagtcgcctgtgggaagaagtggcngttgggcgggaactcctancgggacactcgtggantccgggccgggaagagcaacccganaattaaaggtgaaagaatgctgaancccggaaatcccgggacaaatttatgttccgcngaaaaccaaagtttgggaccnttaaagaagaagnttccaaagaaaacttanggattctggc

SEQ ID NO: 4418 - DNA, 925 bp, Homo sapiens
  misc_feature (771)..(771): "n" may be a, t, c, g, other or unknown
  misc_feature (808)..(808): "n" may be a, t, c, g, other or unknown
  misc_feature (819)..(819): "n" may be a, t, c, g, other or unknown
  misc_feature (835)..(835): "n" may be a, t, c, g, other or unknown
  misc_feature (862)..(862): "n" may be a, t, c, g, other or unknown
  misc_feature (898)..(898): "n" may be a, t, c, g, other or unknown
  misc_feature (911)..(911): "n" may be a, t, c, g, other or unknown
  misc_feature (921)..(921): "n" may be a, t, c, g, other or unknown
acttgtggtgcgctgccagggctccgcagcgttgccggttgtattcgctggataccagagggcggaagtgcagcagggttcagctccgacctccgcgccggtgctttttgcggctgcgcgggcttcctggagtcctgctaccgcgtccccgcaggacagtgtgtcaggcgggcagcttgccccgccgccccaccggagcgcggaatctgggcgtccccaccagtgcggggagccggaaggaggagccatagcttggagtaggtttggctttggttgaaataagaatttagcctgtatgtactgctttaactcctggaagaatgacagatgacaaagatgtgcttcgagatgtgtggtttggacgaattccaacttgtttcacgctatatcaggatgagataactgaaagggaagcagaaccatactatttgcttttgccaagagtaagttatttgacgttggtaactgacaaagtgaaaaagcactttcagaaggttatgagacaagaagacattagtgagatatggtttgaatatgaaggcacaccactgaaatggcattatccaattggtttgctatttgatcttcttgcatcaagttcagctcttccttggaacatcacagtacattttaagagttttccaaaaaaaaagaccttctgcactgtccatccaaaggatgcaaattgaaagctcaattttaatgtcatgttatgaaaagaagctgatgctttaaaacataaaaagtccaagtaatcaatgaaatgcaagnaaaaaaggatcacaaagcaaactcctggaatgggaantgcaaaaatgncaagattttgaccaantttttggggccaacaaatcgggaaacnccatgggaatatccctgccaaaaataaaaaatgggntttccgttaaaanccccctttanaaat

SEQ ID NO: 4419 - DNA, 787 bp, Homo sapiens
  misc_feature (516)..(516): "n" may be a, t, c, g, other or unknown
  misc_feature (637)..(637): "n" may be a, t, c, g, other or unknown
  misc_feature (660)..(660): "n" may be a, t, c, g, other or unknown
  misc_feature (693)..(693): "n" may be a, t, c, g, other or unknown
  misc_feature (699)..(699): "n" may be a, t, c, g, other or unknown
  misc_feature (704)..(704): "n" may be a, t, c, g, other or unknown
  misc_feature (745)..(745): "n" may be a, t, c, g, other or unknown
  misc_feature (780)..(780): "n" may be a, t, c, g, other or unknown
aaagccccaccccggtgcgcgggtatggcggccagcctgtggatgggcgacgtgagtgagggcagccgtccggggtctgaagacaaggaagcatctcggtttcgcgagagaggaaggatctgagtgggaggggacttgggatcccagaaaggggagacgtgtgacgggggttctttttggtgacacagaagcgggttccagcatctaagtgaagaggctgagtccgtgaggctaggggtcctggggccccacctgggttcgtgggagggaaaggtggtgctttggggacatagaatgggagcaatccaaggactgaggcgcgctgttctgggaccggaggagtggggtttctaggtccaaggggaggctccctaaagcggggcaagcttgaaccaaaagagctggggtttcaggccgctcagtggaggcgaacctcgcccctcgctcccccagcggcgcgtagccagccctgggctgaacgggaggggctctggaacccggagtgggaagcccggncgccggcctgagccgctgtgctcttgtttttacgcagctggaaccctacatggatgagaacttcatctccaagagcctttgccaacatgggggagaccgtaatgagcgtcaaaattatccnaaaccgcctcactgggattccanctggctactgctttgtaaatttgcagatttggncacaanctganaagtgttttgcataaaattaatgggaaaacccttcaagganccaaaacctttacttaaccttacagctgcaccaanctggcaa

SEQ ID NO: 4420 - DNA, 691 bp, Homo sapiens
  misc_feature (470)..(470): "n" may be a, t, c, g, other or unknown
  misc_feature (613)..(613): "n" may be a, t, c, g, other or unknown
  misc_feature (650)..(650): "n" may be a, t, c, g, other or unknown
  misc_feature (677)..(677): "n" may be a, t, c, g, other or unknown
  misc_feature (683)..(684): "n" may be a, t, c, g, other or unknown
gaaaaacaggagctgattcgagctggcagagctgggccatggaaccggtagagacctggacccccggaaaggtggcaacttggctgagaggtcttgacgactccctgcaggactatccctttgaggactggcagctgcctggcaagaacctgctccagctctgcccccaaagcctcgaggctctggctgtgcggtctctgggacaccaggagctcatcctgggcggggtggaacagctccaggccctgagctccaggctacagacagagaacctgcaaagcctgacagagggacttctgggggcaacccatgacttccagagcatagtccaaggctgcctgggggactgtgccaagacccctattgatgtcctctgtgcagctgtggagctgttgcatgaagctgacgccctcctcttctggctcagcaggtacctcttctcccacttaaatgatttctcagcatgccangagatccgagacttgttggaggagctgagccaggtcttgcatgaggatggtccagcggctgagaaggagggcacagtcctgaggatccacgtggctgggatctgccacaacatcctggtctgctgccccaaggagctgctggnacaaaaaggccgtgctcgaacaagtgcaactggacantccaattgggcctaaaaaattcaacancaaccnngcaaatt

SEQ ID NO: 4421 - DNA, 826 bp, Homo sapiens
  misc_feature (705)..(705): "n" may be a, t, c, g, other or unknown
  misc_feature (803)..(804): "n" may be a, t, c, g, other or unknown
  misc_feature (811)..(811): "n" may be a, t, c, g, other or unknown
  misc_feature (814)..(814): "n" may be a, t, c, g, other or unknown
  misc_feature (825)..(825): "n" may be a, t, c, g, other or unknown
aatgagcgactcgctttccgtgcggtgcggcgagtgaggccccggtcttcctcctcgtcctgccgcagggccagaacccctgacggtattcagctgcgcgtaagtctggccggtgccatctgtctccgcaatgccccccaagaaacaggctcaggccgggggcagcaaaaaggcggagcaaaaaaagaaggagaagattatcgaagacaaaactttcggtttgaagaataagaaaggagcaaagcaacagaagtttatcaaggctgtcacacatcaagttaaatttggtcaacaaaatccacgtcaggtagcacagagtgaagctgaaaagaaattgaagaaggatgacaagaagaaagaattgcaggagctaaatgagctgttcaaacctgtagttgctgctcaaaaaataagtaaaggtgcagatcccaagtctgtagtatgtgcattcttcaagcaaggacggtgtactaaaggagataagtgtaagttctcccatgacttgactctggagagaaaatgtgaaaagcgaagtgtttacattgatgcaagagatgaagaacttgaaaaagatactatggataattgggatgagaaaaagctggaagaagtagtgaacaagaagcacggtgaggcggaaaagaaaaaccaaaaactcaaatagtgtgcaaagcatttcctggaaagctattgaaaacaacaagntatgggctgggttttggggtatgccctggagggggtgatattttgcatgtaatcgtcatgcacttcctcctggaatttgggttgaaaaaaagattacnnggaaaanaanaagaaagaagna

SEQ ID NO: 4422 - DNA, 646 bp, Homo sapiens
  misc_feature (553)..(553): "n" may be a, t, c, g, other or unknown
  misc_feature (567)..(567): "n" may be a, t, c, g, other or unknown
  misc_feature (583)..(583): "n" may be a, t, c, g, other or unknown
  misc_feature (611)..(611): "n" may be a, t, c, g, other or unknown
  misc_feature (622)..(622): "n" may be a, t, c, g, other or unknown
tttttgccctgtcttgtacagtcatattaagatttgcaatatgaatatccatatctggaataggactataataccataaatagcttaaaacatagtcttcatgttttcagtaaatgttatgacagtgtattatatattaattataaattaatatgtaatacaaatcttcacaaatctgaaaatgccaaatttagtgaatattcagctttttaaattttgaaatggagtctcactctgtcacctaggctggagtgcaatggcgtgatcttggctcactgcaacctctacctcctgggttcaagtgattctcctgcctcagcctcccaagtagctgggaatacaggcacctgccaccatgcctgtgctattttttttttttttcatagagatggggtttcactgtgttggccaggctggtcttgaactcctgacctcaggtgatctgcccacctcagcctcccaaagtgctgggattacaggtgtgagccactgcacctggccaatattcagcttttaataaaatttttcttttaaaggatgattttactttccnatcagattcctaantgcattgaggacttantttgccttaattttagtgtttttcaaangttttaccaangtacaacttggtctctaagattca

SEQ ID NO: 4423 - DNA, 781 bp, Homo sapiens
  misc_feature (713)..(713): "n" may be a, t, c, g, other or unknown
  misc_feature (756)..(756): "n" may be a, t, c, g, other or unknown
  misc_feature (760)..(760): "n" may be a, t, c, g, other or unknown
  misc_feature (764)..(764): "n" may be a, t, c, g, other or unknown
  misc_feature (773)..(773): "n" may be a, t, c, g, other or unknown
ctattatgaaccaagtatacagaaatagaaacctgtgtggagtgttcagcgaaaaacctgaagaacatatcagagctcttttattacgcacagaaagctgttcttcatcctacagggcccctgtactgcccagaggagaaggagatgaaaccagcttgtataaaagcccttactcgtatatttaaaatatctgatcaagataatgatggtactctcaatgatgctgaactcaacttctttcagaggatttgtttcaacactccattagctcctcaagctctggaggatgtcaagaatgtagtcagaaaacatataagtgatggtgtggctgacagtgggttgaccctgaaaggttttctctttttacacacactttttatccagagagggagacacgaaactacttggactgtgcttcgacgatttggttatgatgatgacctggatttgacacctgaatatttgttccccctgctgaaaatacctcctgattgcactactgaattaaatcatcatgcatatttatttctccaaagcacctttgacaagcatgatttggatagagactgtgctttgtcacctgatgagcttaaaggatttatttaaagttttcccttacataccttgggggccagatgtgaataacacagtttgtaccaatgaaagaggctggataacctaccaagggattcctttcccagtggacgctcacnacttatttagatgtcaacggtgcctgggaataattggggctanccanggcnattcaatantggactgg

SEQ ID NO: 4424 - DNA, 751 bp, Homo sapiens
  misc_feature (658)..(658): "n" may be a, t, c, g, other or unknown
  misc_feature (669)..(669): "n" may be a, t, c, g, other or unknown
  misc_feature (680)..(680): "n" may be a, t, c, g, other or unknown
  misc_feature (728)..(728): "n" may be a, t, c, g, other or unknown
  misc_feature (751)..(751): "n" may be a, t, c, g, other or unknown
tatcatgcatgtgggaaggtgggtgtggtgagaaaagttttaaggcaagagtagatggccatgttcaactttacaaaatttcttggaaaactggcagtattttgaactgcatcttctttggtaccggaacctgcagaaacagtgtgagaaattaagtcctggttcactgcgcagtagcaaagatggtcaaggccatggaaaaagcagaaatttaccaagaaagctgatacccatgtatagttcccactcatctcaaatacatctgctatctttttaagctaagtcctagacatatcggggataacatgggggttgattagtgaccacagttatcagaagcagagaaatgtaattccatattttatttgaaacttattccatattttaattggatattgagtgattgggttatcaaacacccacaaactttaattttgttaaatttatatggctttgaaatagaagtataagttgctaccattttttgataacattgaaagatagtattttaccatctttaatcatcttggaaaatacaagtcctgtgaacaaccactctttcacctagcagcatgaggccaaaagtaaaggctttaaattataacatatgggattcctaagtagtaagtttttttcttgaaactcagtggctctatcnaaccttactanctcctcactcnttctctaagactaaactccaaggctcctaaaaatccgcccacaccaanccttaagaaagcccctgaaaaan

SEQ ID NO: 4425 - DNA, 859 bp, Homo sapiens
  misc_feature (745)..(745): "n" may be a, t, c, g, other or unknown
  misc_feature (777)..(777): "n" may be a, t, c, g, other or unknown
  misc_feature (808)..(808): "n" may be a, t, c, g, other or unknown
  misc_feature (817)..(817): "n" may be a, t, c, g, other or unknown
  misc_feature (822)..(822): "n" may be a, t, c, g, other or unknown
  misc_feature (847)..(847): "n" may be a, t, c, g, other or unknown
tataacagtgccactctcaggaattactaagtgacattttaaattgatattttaaactctttccaactacatagttatggtttatttcattctcatcctgttgggatgagaacttgtttgtgcctttcataacttgtttaaagcagagttttaaaattagtttataggatctgaggtggctattagttacagtggcaagattatttagaaagcaagattttgatgagaattaaaaacaatagaaaatgtagagtgcttaaacaaaaatgttatattttgaaagagtagatacttaatttataaataacagtctgaaggttgatgctattttgggataattgttttgctaatggataattctaacaacgcagaatacctagtcaagactgtcatcaaaaacattcacaaatgtttcattctatttttagtgactctgtttaaagagtttctgaaaggaaagaaattttttatttttattatctttagcagtactgagtgtcatagcagaatattttacagactttctatgagattatttttatggtacaaagtatttacatttccctcatgtttatcattatgccaattttacatggcaagtcatgccactgactctgctatttagctaagtaatttcttttttcggagactgtctcactctgtctcccaggctggactgcagtggtggcgattcccctgcctcagcctcccgaagtagcgggggatttcaggcacgcgctgccangccccgccaagtttttcatatttttagtaaangacaggggtttgccctgttgggccaaggctnggtccttgnaaccncccggaccctcaaggtggattccancccaacctttgg

SEQ ID NO: 4426 - DNA, 876 bp, Homo sapiens
  misc_feature (587)..(587): "n" may be a, t, c, g, other or unknown
  misc_feature (597)..(597): "n" may be a, t, c, g, other or unknown
  misc_feature (612)..(612): "n" may be a, t, c, g, other or unknown
  misc_feature (707)..(707): "n" may be a, t, c, g, other or unknown
  misc_feature (723)..(723): "n" may be a, t, c, g, other or unknown
  misc_feature (729)..(729): "n" may be a, t, c, g, other or unknown
  misc_feature (812)..(812): "n" may be a, t, c, g, other or unknown
  misc_feature (857)..(857): "n" may be a, t, c, g, other or unknown
  misc_feature (862)..(863): "n" may be a, t, c, g, other or unknown
  misc_feature (872)..(872): "n" may be a, t, c, g, other or unknown
gtccgggatgaaaacgggagcttgtacccaggagtcacagctattgatatgatgtacaaggagggtctgcatggtgtggacaatgggatattaatatttgacaaggttcggatacccagggagaacctgctggataagtttggttccgtggctccagatggacagtaccattcgcctattaggaacaagagtgcaagattcaatgccatgctggcagcactgaccccttcgagattagctgtggctttccaagctatgggtgccatgaagcttgggttgacgatagccattcgctatagccacagccggaggcagtttgggcccaaaaccaaggaagaggtgaagatcattgagcaccaaacacagaccctgcggctgatgccccacctggccacagccttggccctgaccttcgtcagcaggtatgctggggccctcctggatgaggatgtcttccagggaaaggagctggtcaacagtcgctcgctgcaggctctggtggcagggctgaaggcctacagcacctgggagaacatccgctgcctgcaggactgccgcgagtgcactggaggcatgggttacatgangggaaaatcnaatctccggcttaangtgtgacacagatgtgtttgccactttttgaaagggtgacgatgttgttaagcttcagggttgtggggggcggggaaactggctgggcccaaatncacccaaaaccagttntgaaangaaaaaaccactcctttgggcctggctccaaaaaactggggcctgaatctgttgggggggaacaaagcctggagaaaccaagnttttccctgggcaatttaaccattgggccaacaagtttgatggantctcnnccttttccnggtt

SEQ ID NO: 4427 - DNA, 850 bp, Homo sapiens
  misc_feature (774)..(774): "n" may be a, t, c, g, other or unknown
  misc_feature (800)..(800): "n" may be a, t, c, g, other or unknown
  misc_feature (804)..(805): "n" may be a, t, c, g, other or unknown
  misc_feature (848)..(848): "n" may be a, t, c, g, other or unknown
aaacatggcggcattgagcggagtccgctggctgacccgagcgctggtctccgccgggaaccctggggcatggagaggtctgagtacctcggccgcggcgcacgctgcatcgcggagccaggccgaggacgtgagggtggagggctcctttcccgtgaccatgcttccgggagacggtgtggggcctgagctgatgcacgccgtcaaggaggtgttcaaggctgccgctgtcccagtggagttccaggagcaccacctgagtgaggtgcagaatatggcatctgaggagaagctggagcaggtgctgagttccatgaaggagaacaaagtggccatcattggaaagattcataccccgatggagtataagggggagctagcctcctatgatatgcggctgaggcgtaagttggacttatttgccaacgtaagtccatgtgaagtcacttcctgggtatatgactcggcacaacaatctagacctggtgatcattcgagagcagacagaaggggagtacagctctctggaacatgaggtgaggccccagaaactgggggagggcaagggatgaagatgggagagaggtggagctccttgtttcccttcccaggtgtcacctagctgctgctttcttcttacccaagagtgcaaaggggtgtgatttgagtgtttgaagattgtcacacgagccaagtctcaacgggatttgcaaaagttccgcctttgactaatgccaaccaaggaaagggggcgggggcaaaggtcaactgctngtccaacaaagggccaacatcaatgnaaannttgggggaatggggttgttccctgcaattgctgttaaggaaantt

SEQ ID NO: 4428 - DNA, 863 bp, Homo sapiens
  misc_feature (698)..(698): "n" may be a, t, c, g, other or unknown
  misc_feature (746)..(746): "n" may be a, t, c, g, other or unknown
  misc_feature (763)..(763): "n" may be a, t, c, g, other or unknown
  misc_feature (803)..(803): "n" may be a, t, c, g, other or unknown
  misc_feature (827)..(827): "n" may be a, t, c, g, other or unknown
  misc_feature (847)..(847): "n" may be a, t, c, g, other or unknown
  misc_feature (849)..(849): "n" may be a, t, c, g, other or unknown
  misc_feature (863)..(863): "n" may be a, t, c, g, other or unknown
tacaacaatgaaaacagaacaatctatttaggagaaacaaaaaacaattgttcatatttttttaacaaaaagaaggagtgggaatattttctttaaaatccctattggccaggggtgctggctcatgcctgtaatctcaacactctgagagactgaggcaggaagatcgcttgaggccaggagtttgagaccagcctgggcaacatagcaagtcctagtctctacaaaaataataataagaagaagaagaagaagaataaatccctttaaactacaataagcagagaccagttattcattggctatatttttaagattgccagcttttcaaatgcagcaaaataaatgaaaaaagaactttcaacagggatctagaagtcagttttcccgttgagtagatcttccagcccaatacatttattagtctataatgaaaatatctactttgatttcttagaggtttcttcaaataaatatattgaaacaattttaaaatgaccacatattatttaattttaaaagcacacttttaagaaccccatttcttatgaaaggtttcatatcgagatcatttgttattgtgagactgtatctggtggaaaggaaagataggagtatttttcatatgtcaaatgagtaagactaaaacatgggaggagagatttatgactttttttttacatcatccagctatgggnttgggacgtggtttgttttacaatttttcttccccaggaatcccctanaccggtttgatccaaangaaagtaatttgggcaaaatccaattggacctagtatggntaaatcaccagtttacctttgtgnaggggaagtgtcaaaattantnggggtccggtttgn

SEQ ID NO: 4429 - DNA, 842 bp, Homo sapiens
  misc_feature (780)..(780): "n" may be a, t, c, g, other or unknown
  misc_feature (791)..(791): "n" may be a, t, c, g, other or unknown
  misc_feature (800)..(800): "n" may be a, t, c, g, other or unknown
  misc_feature (823)..(823): "n" may be a, t, c, g, other or unknown
  misc_feature (837)..(837): "n" may be a, t, c, g, other or unknown
ttataataaggaattgcctgtgcatatctgtaatgtaatatctcctgagaagatttatgttcagtggttgttaactgaaaacttacttaatagtttagaagaaaagatgatagctgcttatgaaaactcaaaatgggaacctgttaaatgggaaaatgatatgcactgtgctgttaagatccaagataaaaatcagtggcgaagaggccagatcatcagaatggttacagacacattggtagaggtcttgctgtatgatgtgggtgttgaactagtagtgaatgttgactgtttaagaaaacttgaagaaaatctaaagacgatgggaagactctctttggaatgttctctggttgacataagaccagctggtgggagtgacaagtggacagcaacagcttgtgactgtctttcattgtacctgactggagctgtagcaactataatcttacaggtggatagtgaggaaaacaacacaacatggccattacctgtgaaaattttctgcagagatgaaaaaggagagcgtgttgatgtttctaaatatttgattaaaaagggtttggctttgagagaaaggagaattaataacttagataacagccattcattatctgagaagtctctggaagtccccctggaacaggaagattcagtagttactaactgtattaaaactaactttgaccctgacaagaaaaactgctgacaataatcagtgaacagaaagtggtcctgaatttcagggagaaaaattctagaaccaaagaaccactaganggggtataagnccaccaagncttattccctaacaatgaaccgntatttttgagggcnaacaa

SEQ ID NO: 4430 - DNA, 702 bp, Homo sapiens
  misc_feature (678)..(678): "n" may be a, t, c, g, other or unknown
  misc_feature (682)..(682): "n" may be a, t, c, g, other or unknown
  misc_feature (688)..(688): "n" may be a, t, c, g, other or unknown
tatcactctcttgctttaatactatatttagtattaaattttgtctcaggacaaaattcaaaccattaagtaccatactagtcccaacccacttttccaacattatttccaattacttgtccgctcaaacctccataatggtctgcaccagccagatttgcctgccctcaaaggcattccacctttgttcaggcctctctccatacctgaaattgccttcctctaccaaattaggaaatatccatccttcaattccaacatcttttgtgaatatttactactactaagttccagagtaataccttttttaaattattatttatttatttttttgagacggagtttcactcttgttgcccaggctggaatgcaatggcatgatctcggctcaccgcgccctccacctcctgggttcaagcgattcagtaataccttttttaaaaacttcctgtaatctttagtgtccactcaaatatatttatacactgtcctgtggtttcttttatattgtaatttaatgtttacagtgcttttatttttgggcagtgctcttgttcctctaactacattgtaagccactcaaaggccaaaatactgtgttacatatttttaacattctcccagtggtttgcagtttgtagggactcaagtaaatatttgtagaataaagggaatggnttancaagtngatattgaaggaaa

SEQ ID NO: 4431 - DNA, 841 bp, Homo sapiens
  misc_feature (638)..(638): "n" may be a, t, c, g, other or unknown
  misc_feature (715)..(715): "n" may be a, t, c, g, other or unknown
  misc_feature (765)..(765): "n" may be a, t, c, g, other or unknown
  misc_feature (770)..(770): "n" may be a, t, c, g, other or unknown
  misc_feature (796)..(797): "n" may be a, t, c, g, other or unknown
  misc_feature (828)..(828): "n" may be a, t, c, g, other or unknown
aagaaaattcacattgaagagaaaccatacagaggtaaggtttgtgacaaggtttttgcatataatacatctggcaaaacatactagaattcacactggagagaaactcattataagtgtaatgagtgtggcaagaccgttggtcaaaattcacaccttgtaattaaaaggtcaaaattcacaccttgtaattcatagtggagagaaaccttacaagcacaatgaatgtgacatggtttttaatcaacaatcacaccttgcaagtcatcatagacttcatactgcatagaaatcctacaaacgtgaacaatatgacaaagttttcattcacaaatccagcttcaaatacataggagaattcacactggagaaaagccatagaaatgtaaggtttgtgacaaggctttcgggaatgattcacacgtggcaccccatactagaattcacactggagagaaaccttacaagtgcaatgagtgtggcaaaccctttagtgggcagtcaccacttattcaccatcaagcaatccatggtatagggaaacttgactaatgtaatgattgtcacaaagttttcagtaatgctacaaccattgcacatcattggagaatccacagtgaagagatcttacaagtgtnataaatgtggcaaatttttcagacatcgttcatgccttgcatttcactgggtgaactccatgctgggagagaaaccntataaatgtcatgattgaggcaaggtcctcagtcaaggcttcatcctaancaaanacataggagggattcatacagggagnngaaaacctcacaaggtggtgaatgaatttgntgggcaaaaagcg

SEQ ID NO: 4432 - DNA, 833 bp, Homo sapiens
  misc_feature (714)..(714): "n" may be a, t, c, g, other or unknown
  misc_feature (751)..(751): "n" may be a, t, c, g, other or unknown
  misc_feature (804)..(804): "n" may be a, t, c, g, other or unknown
  misc_feature (825)..(825): "n" may be a, t, c, g, other or unknown
  misc_feature (827)..(827): "n" may be a, t, c, g, other or unknown
  misc_feature (830)..(830): "n" may be a, t, c, g, other or unknown
aacagcaatggcggaaggagaagatgtgccgccgctgccaacgtcgagcggcgacggctgggaaaaagatcttgaagaagctctggaagcaggaggttgtgatcttgaaacgttgagaaatataattcaaggaagaccgctgcctgctgatctgagggccaaagtttggaagattgctctgaatgttgcaggaaaaggtgattgtttggcatcatgggatggtattttagacttgccagaacagaacactattcacaaagattgcctgcagtttattgaccagctttcagtgccagaggagaaggcagcagaattacttttggatattgaatctgtaattaccttttattgtaaatcacgtaacattaaatatagcacatcccttagctggatacatctactgaaaccattggtgcatcttcaactgccacgcagcgatttatacaactgcttttatgccataatgaataagtacattcccagggattgttcccagaaagggagaccatttcatcccttcaggttgctcatccaataccatgagcctgagctttgttcttatcttgatacaaagaaaattactccagactcctatgcactcaactggcttggaagtctttttgcatgttactgttccactgaagtcactcaggcaatatgggatggatatctacaacaagcagatccattttttatttaattcctaatggttanttatccttgttaaatgcaaaaggaagttattttaacncaagaagtcaagacagcaaagaagaagtttatcaaggttcctgggaaaatacnccatccaagtcctgaaatatngnaanggt

SEQ ID NO: 4433 - DNA, 828 bp, Homo sapiens
  misc_feature (741)..(741): "n" may be a, t, c, g, other or unknown
  misc_feature (746)..(746): "n" may be a, t, c, g, other or unknown
  misc_feature (764)..(764): "n" may be a, t, c, g, other or unknown
  misc_feature (778)..(778): "n" may be a, t, c, g, other or unknown
  misc_feature (789)..(789): "n" may be a, t, c, g, other or unknown
ttaaccataataatcggaaggctttatagaaccctaaaatatccaactatcattcaatttaaaatttatcacacaaaaaatgagttttatagaatgcttcaaaaaaagccattaaaataaccaaaactaaaaccaagagtttgtaggaaaataccaatatgcaaacattccaaaaggagagcctttattttgccagccaaggtggtattatttgctttaaaaaaaaaatcaatgtaacattggttgtcttttgagaaagttccttgctgggattcttttgctggaaaattctcatgctgagggtaaacaactttggtttgctttttagtgcctgagatctgaaggcagaaggaagattcaaatagaaagaataatggcccattcaacagctgactcctacagacattctgactaagatgcctgttgcaattcccctgagcaacttaataactgtgttttcaaggttaaactcaagaaccaatcagttatctgtaaatgaatatccaacttttctgaaaggaaaaaggtaacatgttaatataaacagcaaatacatacatcatttataaaactgcctcaagatcaattaacaagataaacatacttaaaaaaaattcttgccttttgttttaaagggccatagcaaaatactaacctctgtataatggatcaagtaaagagctgtcaaataagattaaaaagactcacaattattggaatgttaaaacaaaaccctaaaantgaangaaaaccgttaaataaangctaattaaggtantaatccctaanttccaattttttaattaaaatcctgagaaactccaacaa

SEQ ID NO: 4434 - DNA, 232 bp, Homo sapiens
  misc_feature (197)..(197): "n" may be a, t, c, g, other or unknown
  misc_feature (200)..(200): "n" may be a, t, c, g, other or unknown
  misc_feature (215)..(215): "n" may be a, t, c, g, other or unknown
agagtcgggtagacggcagcgggagcggtggcgtctccccgccttccctccctcccgggcctgggcgcccagccggacaggtgagcggcagccaggtgagcgcgcccacctgcgcctctccgcgcggcccgccctccccggcgccgggctcctctccgcgcccctgtcggcgcggaaccctggcctcgtccgcggcncanctccctggagcctcncatcagcgggggcgccc

SEQ ID NO: 4435 - DNA, 699 bp, Homo sapiens
  misc_feature (323)..(323): "n" may be a, t, c, g, other or unknown
  misc_feature (603)..(603): "n" may be a, t, c, g, other or unknown
  misc_feature (605)..(605): "n" may be a, t, c, g, other or unknown
  misc_feature (632)..(632): "n" may be a, t, c, g, other or unknown
  misc_feature (663)..(663): "n" may be a, t, c, g, other or unknown
  misc_feature (683)..(683): "n" may be a, t, c, g, other or unknown
tcaacatgttgactaagaacccaccatttactaagaacatggagtctcccttatgcaatgaagccctggtagatcaactttggaaacttatgaattctggtacttcacatgactggaggttacggtgtggtgctgtggacttgtacttcacactttttggcctcagtagaccttcctgtttacccttgccagagcttgggttggttcttaatctaaaggagaaaaaagctgtcttgaatcctaccataattccagagtcagtagcaggcaaccaagaagctgcaaataatccaagcagtcacccacagctagttggatttcanaaccctttttccagttctcaagatgaggaggagattgatatggatactgttcatgatagccaggccttcatttcccatcatttaaacatgcttgaaaggccgtcaactccagggctctcgaaatatcggccagctagctcccgatctgctttaataccccaacactcagcaggctgtgacagcacacccaccacaaaaccccagtggagtttggaacttgcacggaagggaacaggtaaagaacaagcacctttgggagatgagtatgcatccagcgggnangcgctccactcccaagtctttactaanggaatctacagtctccaaacacagtgaccancatcaccaccatcaccatgnggcacaagaaaaagaa

SEQ ID NO: 4436 - DNA, 851 bp, Homo sapiens
  misc_feature (621)..(621): "n" may be a, t, c, g, other or unknown
  misc_feature (687)..(687): "n" may be a, t, c, g, other or unknown
  misc_feature (696)..(696): "n" may be a, t, c, g, other or unknown
  misc_feature (774)..(774): "n" may be a, t, c, g, other or unknown
  misc_feature (787)..(787): "n" may be a, t, c, g, other or unknown
  misc_feature (791)..(791): "n" may be a, t, c, g, other or unknown
  misc_feature (821)..(821): "n" may be a, t, c, g, other or unknown
  misc_feature (839)..(839): "n" may be a, t, c, g, other or unknown
ttgtatggactcatggttttcaatatatagatagatttataagtatctgtaaagtatgtaataaatagctgtaatatgtgtagatatattttgctctttatctgtatatacatagatacagatatatttttttgccattacttttagtggcaaaaaccagaattacttttgcaccaacctaatatagctatatctacatcatctctatctctatttatatagagatagagaaagagtaaaagtaatggcaaaacctgcaattacttttgcaccaacctaatggatttagactctagcttccctcctgagagacagtagcagcagtaacacctagttatggactgaatgtatcccccaacaattcatatgttgaagctctaacccccaaggtaatagtatttggaggtgaggactttgggaggtatttaggtttagatgaggtcttaaggttggagcccacatgatgtgataagtgcccttacaagaagaggaagagacaccagagcattctctcaccctccgtgtgcatgcaccaaaaatggcatgtgaacacagagagaggaggcggctgcctacaagccaggagggagtgctctcaccaggaaccgaagctgtcggcanctttgatactggaccttccagcctccaagaactgtgaagaaataaatgtccaacggcttaaaccanccaagtccnatgggtataatggttatggcaagctcaaactaaagacaaccctaataatggagcacagctatgcccaatatcctgggnttccagatgccantccncactaaaagaacccaaaagttccttgaagnaaatgggctggatttcangggcaaaggaca

SEQ ID NO: 4437 - DNA, 714 bp, Homo sapiens
  misc_feature (519)..(519): "n" may be a, t, c, g, other or unknown
  misc_feature (597)..(597): "n" may be a, t, c, g, other or unknown
  misc_feature (653)..(653): "n" may be a, t, c, g, other or unknown
  misc_feature (661)..(661): "n" may be a, t, c, g, other or unknown
  misc_feature (666)..(666): "n" may be a, t, c, g, other or unknown
  misc_feature (679)..(679): "n" may be a, t, c, g, other or unknown
  misc_feature (699)..(699): "n" may be a, t, c, g, other or unknown
gacatacattattttttcattttactttgtgctaccacggtttccatttgcttatggctgttggttgtgaggtctagtgctttcttaaaatatactactgctttgcacattgtgggcctgggagctccgggtgccaaataaagattaggactaacacaccttcagtgtttgagtgatgtgggttcccggtgagcacctacatgctgcttacctagtacaggctgtgcagccaagacagccctgtgtggcccagaagaccaaacatttcatgtgaacctttccccttcagggtgataaagatcaggtcgcttgtccccagtccttgttacctccatgttattgattcacttcccagttgccatattcgaggtaagcctccatagctttatctttgctttcatgtcaacaatgcatgtctgcatccttggactggcttcaagggtttctggcaaaaaatttgcagtctgttaatagacttgggcacaaataggacctaaccaagtgtgaagggaataatgnattcagactgaggcatttgggagagactgttggggaagttcatccaagtgcagggccttgtcctgttgggtggctcanatatattaaatatgacccttatccaaattaaacaatggttaccgcatttgcccctnaactccanggtgnatcattgaagaangggaaggaatttgccttgcnttggggggcacatta

SEQ ID NO: 4438 - DNA, 838 bp, Homo sapiens
  misc_feature (663)..(663): "n" may be a, t, c, g, other or unknown
  misc_feature (720)..(720): "n" may be a, t, c, g, other or unknown
  misc_feature (795)..(795): "n" may be a, t, c, g, other or unknown
  misc_feature (816)..(816): "n" may be a, t, c, g, other or unknown
  misc_feature (824)..(824): "n" may be a, t, c, g, other or unknown
  misc_feature (833)..(833): "n" may be a, t, c, g, other or unknown
  misc_feature (836)..(836): "n" may be a, t, c, g, other or unknown
tcttgtcagaaactagaactggccaaggccaacatgcagctcctatatgagcgtcttctcagaagaaaacagccacgaacacagaaagacaaccatctagaggaaatggatgtagaagctcgacttactgaactatgtgaagaagttaagaaaatagagaatcctgatgaactggcagaacttataaatatgaatcttgcgcaactttgctcacttttgatggctttatggggacagtttctggaagttataacgctacacgaagaactaagaatattattagcacaagagcaccatactttgagggtaagttaaagagaagtgattttagagcattttaatgagtattatttacctttagaaaatttttatgaaaacaaacctgatttttacctatatattgataaatcagaaaagagacatttgtcatattgttattgtttgacttccaaaattaataatagaatagaacaatacagttaagcatatgacctatttcaatcacaatccctgctgctaagaaaaaccacctaaaagtaagtaaaataggaaaatatatgatacagaatagaataggaacctaagaataggaattaatagccaagcctcattagggacaggaatcaggaactagagagctgtctcaaacttatatctccctcntctccttttccttcccttcctctaccacctggacctaatataggaatgtggtattantaacttagcaaggatgggaggggggcaagtccacacatttcacatataaggtttactggtgacctagtatggggnaatttatgcaaggtaattccnaaggtaantttaatggnatngc

SEQ ID NO: 4439 - DNA, 737 bp, Homo sapiens
  misc_feature (587)..(587): "n" may be a, t, c, g, other or unknown
  misc_feature (653)..(653): "n" may be a, t, c, g, other or unknown
  misc_feature (687)..(687): "n" may be a, t, c, g, other or unknown
  misc_feature (707)..(707): "n" may be a, t, c, g, other or unknown
  misc_feature (709)..(709): "n" may be a, t, c, g, other or unknown
  misc_feature (735)..(735): "n" may be a, t, c, g, other or unknown
gagcgccggcccgatggcggcggcggcggcggcgatggccgagcaggagagcgcccggaacggcggccgcaaccgcggcggcgtccagcgtgtggagggcaagctgcgcgccagcgtcgagaagggcgactactacgaggcgcaccagatgtaccggaccctgttcttcaggtacatgtcccagagcaagcacacggaggcccgggagctcatgtactcgggagccctgctcttcttcagccatggccagcaaaacagtgcagcagacttgtccatgctggtcctggagtccctggagaaggcggaagtggaggtggctgacgagctgctggaaaatctggctaaagtgttcaagcctgatggaccccaactctcctgagcgcgtgacctttgtgtccagagccctgaagtggtccagtgggggctccgggaagctgggccacccccggctgcaccaactgctggccctcaccctgtggaaagaacaaaactattgtgagtcgaggtatcattttctgcactcagcggacggggaagggctgtgccaacatgctggtggagtattccacgtcccgcggcttccgcancgaggtggacatgttcgtggcccgggccgtgctacagtttctctgttttaaaaaacaaaaagtaancgcatccggtggtcctcacgacgttacaccccanaaagcaacccgttcaatccnanggaacggggcctccgtttgttggaancc

SEQ ID NO: 4440 - DNA, 824 bp, Homo sapiens
  misc_feature (602)..(602): "n" may be a, t, c, g, other or unknown
  misc_feature (625)..(625): "n" may be a, t, c, g, other or unknown
  misc_feature (768)..(768): "n" may be a, t, c, g, other or unknown
  misc_feature (802)..(802): "n" may be a, t, c, g, other or unknown
  misc_feature (805)..(805): "n" may be a, t, c, g, other or unknown
  misc_feature (808)..(808): "n" may be a, t, c, g, other or unknown
  misc_feature (810)..(810): "n" may be a, t, c, g, other or unknown
aaaaatggcggctgccactgtggggcttctgccggccggtagtccctggcgctgctgacccagcatcggcttttctacgtcttgaacctggattcgcctaggggttgggaagggctgtggacggcgttgggggaggcctgacgagattaataaagaactcttcagaattcctggtgtttcatcatatatacgactaagatatcaactcttctagcttgctgtttctggaccaaaaaaaatgacgtctattatcaaattaactaccctttctggggtccaagaagaatctgccctttgctatcttctccaagttgatgagtttagatttttattggactgtggctgggatgagcacttttctatggatattattgattccctgaggaagcatgttcaccagattgatgcagtgctgttgtctcaccctgatcctctccaccttggtgccctcccgtatgctgtcggaaagttgggtctgaactgtgctatctatgcaaccattcctgtttataaaatgggacagatgttcatgtatgatctttatcagtctcgacacaatacagaagattttacactctttacattagatgatgtggatgcangattggggtgtttactcattggnactcctaaataatgtcaagttacaatgtggtggagttttcctaagtcccagggtagaatgggatgaagtgataaattgatgagatgttttgaaagacaaaagaaataatcccgtttcaatttccgccaatctcctcctttaangtcaatgggccctttccggacttgggccccgtgntanccnancccctaaagtttgt

SEQ ID NO: 4441 - DNA, 720 bp, Homo sapiens
  misc_feature (559)..(559): "n" may be a, t, c, g, other or unknown
  misc_feature (660)..(660): "n" may be a, t, c, g, other or unknown
  misc_feature (663)..(664): "n" may be a, t, c, g, other or unknown
  misc_feature (669)..(669): "n" may be a, t, c, g, other or unknown
  misc_feature (715)..(715): "n" may be a, t, c, g, other or unknown
ggcgttgccgggctctccgagaaggagacgtggcggcggttgggccggtgatacccgggcgctttatagtcccgccgcctcctcctccacctcctcctcctcctcctctcctcctggagcagaggaggttgtggcggtggctggagaaagcggcggcggaggatggaggaaggaggcggcggcgtacggagtctggtcccgggcgggccggtgttactggtcctctgcggcctcctggaggcgtccggcggcggccgagcccttcctcaactcagcgatgacatccctttccgagtcaactggcccggcaccgagttctctctgcccacaactggagttttatataaagaagataattatgtcatcatgacaactgcacataaagaaaaatataaatgcatacttccccttgtgacaagtggggatgaggaagaagaaaaggattataaaggccctaatccaagagagcttttggagccactatttaaacaaagcagttgttcctacagaattgagtcttattggacttacgaagtatgtcatggaaaacacattcggnagtaccatgaagagaaagaaactggtcaagaaaataaatattcacgagtactaccttgggaatatgttggccaagaaaccttctaattgaaaaagaacganaannaagangaaaaggaaaaaatcaaaattgagaattcccaactaaaaaatatcnaaggt

SEQ ID NO: 4442 - DNA, 886 bp, Homo sapiens
  misc_feature (770)..(770): "n" may be a, t, c, g, other or unknown
  misc_feature (800)..(800): "n" may be a, t, c, g, other or unknown
  misc_feature (803)..(803): "n" may be a, t, c, g, other or unknown
  misc_feature (845)..(845): "n" may be a, t, c, g, other or unknown
  misc_feature (851)..(851): "n" may be a, t, c, g, other or unknown
  misc_feature (879)..(879): "n" may be a, t, c, g, other or unknown
aagtgtcccctcctacttcttgctgcctcacggttgctgttgcagacccaggagtctctgaaggcttccgcggctttggggccggttgtgagatgccaggcagaggccgctgcccggactgcggctccacggagctggtggaagactcgcactattcgcagagccagctggtgtgctccgactgcggctgcgtggtcaccgagggggtccttaccactaccttcagcgacgagggcaatctccgagaggtaacatattcccgaagcacaggggaaaacgaacaagttagtcgcagccagcaacgaggtctccggcgagtgagagacctttgtcgagttctgcagttgccaccaacatttgaggataccgcggttgcctactaccaacaggcatatcggcactctggcatccgagcggccaggctgcaaaagaaggaggtgttggttgggtgctgcgtcttaatcacctgccgacagcataactggcccctaacaatgggggccatctgcacgctgttgtatgcagatttggatgtgttttctagcacttgcatgcagataagtgaagctcctgggactggatgtgccatctctgtgcttggcagaactgggtgaagacctattgcagcagcttcaaactgttccaaagcttcaccttctgtggccaaccaaaattacgtggaaagacaaagagaaagatgctgtctcgaaacaatgcaaattgggttggaactggcaaaattgagaacctgggcttgggtgaccgggganggaatccccttggcccgttaatcaacggcntgngaacttttccctggccttgggaaattcccctgcaaaccttgnaaaatnggggtttcaaaggttccccctttgcccnaattttt

SEQ ID NO: 4443 - DNA, 825 bp, Homo sapiens
  misc_feature (629)..(629): "n" may be a, t, c, g, other or unknown
  misc_feature (639)..(639): "n" may be a, t, c, g, other or unknown
  misc_feature (707)..(707): "n" may be a, t, c, g, other or unknown
  misc_feature (751)..(751): "n" may be a, t, c, g, other or unknown
  misc_feature (758)..(758): "n" may be a, t, c, g, other or unknown
  misc_feature (769)..(769): "n" may be a, t, c, g, other or unknown
  misc_feature (783)..(783): "n" may be a, t, c, g, other or unknown
  misc_feature (815)..(815): "n" may be a, t, c, g, other or unknown
aaggagaatcagttcttgctgtaggtaaggggaatgctgtgtttataaagcaaatgacatggcaactggatcttgaaggatgagttagttttcaaaaggtacatgggaaatactcctcagaaaaaagccgtctttgggcagtgtcggggtctgccatgtgttgcaccgctgctgaccacagtggaagaggctccacggggcatctctgctcgagtctggggacattttcctaagtggctcaatggctctctacttcgaattggacctgggaaattcgagtttgggaaggataagtacaatcattggtttgatgggatggcgctgcttcaccagttcagaatggcaaagggcacagtgacatacaggagcaagtttctacagagtgatacatataaggccaacagtgctaaaaaccgaattgtgatctcagaatttggcacactggctctcccggatccatgcaagaatgtttttgaacgtttcatgtccaggtttgagctgcctggtaaagctgcagccatgactgacaatactaatgtcaactatgtgcggtacaagggtgattactacctctgcactgagaccaactttatgaataaagtggacattgaaactctggaaaaaacagnaaaggtagantgggagcaaatttattgctgtgaaatggagcaactgcacatcctcaattatgacccgggatgggacancatacaatatggggggaactccctttggggcaatatgggttccnccctaanaagggttaatncggggttccctccnaaaagaaaaggttggaccctttgggggaaaancaaatccaat

SEQ ID NO: 4444 - DNA, 741 bp, Homo sapiens
  misc_feature (513)..(513): "n" may be a, t, c, g, other or unknown
  misc_feature (535)..(535): "n" may be a, t, c, g, other or unknown
  misc_feature (595)..(595): "n" may be a, t, c, g, other or unknown
  misc_feature (651)..(651): "n" may be a, t, c, g, other or unknown
  misc_feature (660)..(660): "n" may be a, t, c, g, other or unknown
  misc_feature (713)..(713): "n" may be a, t, c, g, other or unknown
  misc_feature (733)..(733): "n" may be a, t, c, g, other or unknown
  misc_feature (736)..(736): "n" may be a, t, c, g, other or unknown
acaggcgctcccgcccctgtgccgcggcagggtgacgtctccgcagcgcactagaggtgccgctacttccgggtcggccgagcacacctggcggcgtggcggacgcctgaagtgtgacagtggcgcgcgcccccgccccagaacggggactcgagggactttgcccacccctgcaacagccctcccgcgctgtctcccgggcagggagaaggctgggctcccccacctgcccctggccgtcaggtggctgtggagaagcggaggcgcgggcgctcggccttaacgtcccgggctctggggccatccgtgactcccacacgcggagcacctgcagtttggggagggagggatctgggagcgatcggccaaagcctggggctgccgaggaaatggctcttcggaattagggatctgagagtgtgagatttgacctttgtaggctggtggcggctgtgcaatctctagctccacccactccctccaaaaactttgtcctctgacagctctgcgaangttttagctgagtatttgtgancacgtatttcttttgcagtatttttaaaaaatcctcttgatctgaggcaacttcgctggnttcctccccattcccttgggcaagttgagagtgttggttcctggccttgacctcanaaactcatnaacacaggattgggcaataaaactaacttttatccaaaaaggcaagaactttncaaaacaaaagtccgtatcngcngtgtc

SEQ ID NO: 4445 - DNA, 878 bp, Homo sapiens
  misc_feature (649)..(649): "n" may be a, t, c, g, other or unknown
  misc_feature (685)..(685): "n" may be a, t, c, g, other or unknown
  misc_feature (689)..(689): "n" may be a, t, c, g, other or unknown
  misc_feature (747)..(747): "n" may be a, t, c, g, other or unknown
  misc_feature (845)..(845): "n" may be a, t, c, g, other or unknown
  misc_feature (847)..(848): "n" may be a, t, c, g, other or unknown
  misc_feature (861)..(861): "n" may be a, t, c, g, other or unknown
  misc_feature (868)..(868): "n" may be a, t, c, g, other or unknown
attacagggtgtcctcttccgccgccagaagccggaagttgtgtcccggacgtgtcaaccggggtctgagtgctcagagtacagctgcaaccgcgaccaagggcgggaagaacaagcagcgaactaaagggaacctgaggccttcaaacagtggccgagctgcagaactccttgccaaagaacagggaacagtgcctggatttattggttttggaacatctcagagtgacctaggctatgttcctgctattcaaggagctgaagaaattgacagtcttgtagattctgatttccgaatggtgctgcggaaactttcaaagaaagatgtcaccacaaaattaaaagctatgcaggaatttggaaccatgtgtacagagagagacacagaaactgtgaaaggagttcttccatattggccaagaattttttgcaaaatttcacttgatcatgaccgtcgcgtccgagaagccacacaacaagcttttgaaaaacttacccttaaagtaaagaaacagttggctccctacttaaaaagtttaatgggatattggctaatggctcagtgtgatacttacacaccagctgcgtttgcagcaaaagatgcatttgaagcggcttttcctccaaagcaagcaacctgaagccatancattttgttagggatgaaattacaagtgtgctgcangatnatcttataaaaaggaaaacacctgatacactcaagtggaccccgcaaaactgttccanaaggaaagaaaggagaaagctaaaatttctaccggggtttgtaaccttggttccctaattgggcaattaaaagagatttacttttgcccttttacctnannaaatgaagccttnaattccnccgggaggga

SEQ ID NO: 4446 - DNA, 781 bp, Homo sapiens
  misc_feature (647)..(647): "n" may be a, t, c, g, other or unknown
  misc_feature (659)..(659): "n" may be a, t, c, g, other or unknown
  misc_feature (695)..(695): "n" may be a, t, c, g, other or unknown
  misc_feature (722)..(722): "n" may be a, t, c, g, other or unknown
  misc_feature (756)..(756): "n" may be a, t, c, g, other or unknown
  misc_feature (775)..(775): "n" may be a, t, c, g, other or unknown
  misc_feature (777)..(777): "n" may be a, t, c, g, other or unknown
gcgcaactcattggcgccaagatggcgatggagatgaggcttccagtggctcgcaagcctcttagcgagagactgggccgcgacactaagaaacatctagtggtgccgggggatacaatcactacggacacaggattcatgcggggccatggaacgtatatgggagaagagaagctcattgcatctgttgctggctctgtggagagagtaaacaagttgatctgtgtgaaagctttgaaaaccagatacattggtgaagtaggagacatcgtagtgggacgaatcacagaggttcaacagaagaggtggaaggtggagaccaactccaggctggattcggtcttgctgctctcgtccatgaaccttcctggaggagagctgaggagaagatctgcagaagatgagcttgcaatgagaggtttcttacaggaaggggaccttatcagtgctgaggtccaggcagtgttctctgacggagctgtctctttgcacacgaggagcctgaaatatggaaaactaggtcagggggttttggtccaaggtttccccctccctgggtgaaacggcagaagacccactttcatgatttgccatgtggtgcctcagtgattctcggtaacaacggcttcatctgggatttacccaanacctgagcacanagaagaggaacaggggggcttcattgcaaacctggngcctgtcccctccttgcctgattcaanaagtggatatccccggcttcgggaactgcatcantctcgccgggtaactccananggat

SEQ ID NO: 4447 - DNA, 633 bp, Homo sapiens
  misc_feature (412)..(412): "n" may be a, t, c, g, other or unknown
  misc_feature (464)..(464): "n" may be a, t, c, g, other or unknown
  misc_feature (505)..(505): "n" may be a, t, c, g, other or unknown
  misc_feature (561)..(561): "n" may be a, t, c, g, other or unknown
  misc_feature (563)..(563): "n" may be a, t, c, g, other or unknown
  misc_feature (593)..(593): "n" may be a, t, c, g, other or unknown
  misc_feature (613)..(613): "n" may be a, t, c, g, other or unknown
  misc_feature (618)..(618): "n" may be a, t, c, g, other or unknown
ggagtcggcctgagaggtctctcgtcgctgcaggcgcctcagcccagccgcgtgccttggcccatggccgcctactcttaccgccccggccctgggcctgctgcaggcgcggcgctgccggaccagagcttcctgtggaacgttttccagagggtcgataaagacaggagtggagtgatatcagacaccgagcttcagcaagctctctccaacggcacgtggactccctttaatccagtgactgtcaggtcgatcatatccatgtttgaccgtgagaacaaggccggcgtgaacttcagcgagttcacgggtgtgtggaagtacatcacggactggcagaacgtcttccgcacgtacgaccgggacaactccgggatgatcgataagaacgagctgaagcaggccctctcangctaccggctctctgaccagttccacgacatcctcattcgaaagtttgacangcagggacggggggcagattgccttcgacgacttcatccanggctgcatcgtcctgcaaaaggttgacggatatattcagacgttacgacacggatnangacggctggattcaagtgtcgtacgaacantacctgtccatggtcctcantatcntatgaacctgggact

SEQ ID NO: 4448 - DNA, 764 bp, Homo sapiens
  misc_feature (534)..(534): "n" may be a, t, c, g, other or unknown
  misc_feature (668)..(668): "n" may be a, t, c, g, other or unknown
  misc_feature (722)..(722): "n" may be a, t, c, g, other or unknown
  misc_feature (729)..(729): "n" may be a, t, c, g, other or unknown
  misc_feature (737)..(737): "n" may be a, t, c, g, other or unknown
  misc_feature (745)..(745): "n" may be a, t, c, g, other or unknown
ataattacgttgctatggacaccgagtttccaggtgtggttgcaagacccattggagaattcaggagcaatgctgactatcaataccaactattgcggtgtaatgtagacttgttaaagataattcagctaggactgacatttatgaatgagcaaggagaataccctccaggaacttcaacttggcagtttaattttaaatttaatttgacgtaagtgggaaataactgtataacccagactttttttttttttctttaatcttaggaattgattttcctcaagtatggtgacatgctaggtgaatttggtgtagttatcctggaaatatataaaacgtaacatttcaaaagcatggttttcttttttactatgggaccaaaaaaaatactttgatgttaaagatgttatatttaaaatatgactgcagctttttttgtatttggaagactgggtattgaaagtacttctgatagaaaaaataatcctacattagttttactttcaaaaattttgtgtgcaatttgaaatatanccttttataatatttatccttcttgtgaagatttttgttgcattcatattccagtttatgagtagattacatgtcaaatgcagtaagacgttttctggaaccttgggtacgttttcctttcaagtcagtattancattaggttgccacttcagcccacaaaaagctccccttaatttacatatagggngaaagtnatagtaanccttgaancctgggggtttaaccaaaa

SEQ ID NO: 4449 - DNA, 722 bp, Homo sapiens
  misc_feature (525)..(525): "n" may be a, t, c, g, other or unknown
  misc_feature (704)..(705): "n" may be a, t, c, g, other or unknown
  misc_feature (719)..(719): "n" may be a, t, c, g, other or unknown
ttttttttttttttttttttttacggagattaggtcttgttatgttgcccaggctggtctcaaactcctgggcgcaataaatccttccacatcagccttccaaagtgttgggattacatgctgcacccccagtgtatcagcacttcttaaattaaaataatcttgccaactaatgtcttgttttacatccttcccctttagtctactacttgccattctatccttagtagcctcgatgacggctccccttttaccccatacctctctcccccaaaaaagcttggacagcaaccaaattggcttgtatcagtattgtcaactggaggcctacatgaggactcagcttactgtttttcttctggttaattgtggacataatcaagttcattgcttttactccccatctgctaccactcttgtgcagctatttatggtgatggctttgttacgtatatacacatagaccattgttaatcccctccttttcctttggctgccaaacagtattcatttgaacatcatcanaaggtgtgcaaagcactttgggaggccgaggcgggtggatcacgaggtccagagattgagaccatcctggccaacatggtgaaaccccgtctacactgaaaaatacaaaaattagctgggcaattggtggctccgtgccctgtgggtcccgggctacttggggaagctgaagggaaggnngaataaccttggancca

SEQ ID NO: 4450 - DNA, 726 bp, Homo sapiens
  misc_feature (543)..(543): "n" may be a, t, c, g, other or unknown
  misc_feature (546)..(546): "n" may be a, t, c, g, other or unknown
  misc_feature (581)..(581): "n" may be a, t, c, g, other or unknown
  misc_feature (585)..(585): "n" may be a, t, c, g, other or unknown
  misc_feature (648)..(648): "n" may be a, t, c, g, other or unknown
  misc_feature (664)..(664): "n" may be a, t, c, g, other or unknown
  misc_feature (686)..(686): "n" may be a, t, c, g, other or unknown
  misc_feature (695)..(695): "n" may be a, t, c, g, other or unknown
  misc_feature (720)..(720): "n" may be a, t, c, g, other or unknown
gatgaagcatgagccctgcccttgcggactccaaggccaaggccagttgaggacaggagagccagccccagggtccggagtggtggtgaagactctggaaccagctcacccactccaagaacttccctagcctcctcatacctcactctcctcctctgtggaatggacatggagaaggctacttcatcaggtgactggtggtgaagttaggccgatctatttaaggtagttagaacagtgcccagcctatggtgagctcttgttacctgcctggtgcaggctctagaaattcagaaaggaagccaagaagagtaggaaagtcttttgttaggaggtgggctttgcagaatggatctgcagagatgggggaaggcgactctgtcctgtaggtgggggaactgcgtgagcaaaggcacagaggccggatgcactgaacctgtttgttcccccagaggttctgaggccacaggaagtggctggcgtgggagtggctggtccaaggggagctgcactattaagtgtggagggggagggggacatgancangaccacagggaccttgaccgccaagctgggggaangaantgtgaataaagccccaatgccaccaaggcatctctgtactgccctcctctccctccccaatcnaagccaaggcaacctngccccttgttttcctggggaancccctgaanggagggacatccctttagcgtccanaaaatg

SEQ ID NO: 4451 - DNA, 833 bp, Homo sapiens
  misc_feature (656)..(656): "n" may be a, t, c, g, other or unknown
  misc_feature (674)..(674): "n" may be a, t, c, g, other or unknown
  misc_feature (746)..(746): "n" may be a, t, c, g, other or unknown
  misc_feature (770)..(770): "n" may be a, t, c, g, other or unknown
  misc_feature (778)..(778): "n" may be a, t, c, g, other or unknown
  misc_feature (798)..(798): "n" may be a, t, c, g, other or unknown
  misc_feature (828)..(828): "n" may be a, t, c, g, other or unknown
aaggtctgaaaaataaatcatatttagaacgccattggtagcttaaaaatggttttaaacctgaatttgaagaaaatgttgagaccacgatgtaaccaaaaagaaataattgggttatttctattccaaatgtctttggtgactgtgtgattttaaaccaaattggtttatctatctaggcatttaaacaagttctcagtgttctaaagaagtacatgtactgaccctgacaatcatgttcttttaagcctttagattattgactatccaggttgttccacagagtctctttttttcccccttctttcttgaagatctgtgagtaatggactaattgctattaaatttgggagctttacatatgccacaacagaaaaagtcagaagaaggtaagtcttgaatcttgtttggatgaaatgtagatacatgtgatatgtgtatatgtttaggaataggatcagactcagttatggtggtaatataggtaaaagggctttgccacttcccacatcaagggcaggattctttgtgtatttatacatagagaatgatttgacttctgattgaatagaaccttactgccctgcagtttaagtcatacggtttcctataattaatactcctgagctccctgttgacaaagaaagtaatgtggntcccatgggcaagatggnctgcaaggctgaagttcttgttacgaccaaaaaaaattatgaaggggatgccaatcctaatggatgggagantttcctaaggattccaaaaatggnaacaagtncctaaagccaaccctggaancttcccaaaggggaaaagaagtgaccaaancaata

SEQ ID NO: 4452 - DNA, 798 bp, Homo sapiens
  misc_feature (716)..(716): "n" may be a, t, c, g, other or unknown
  misc_feature (718)..(718): "n" may be a, t, c, g, other or unknown
  misc_feature (749)..(749): "n" may be a, t, c, g, other or unknown
  misc_feature (757)..(757): "n" may be a, t, c, g, other or unknown
  misc_feature (765)..(765): "n" may be a, t, c, g, other or unknown
tttaaaaaaaatgtgccatttggcttagaattaataattttttttaaagcaaaaatggaagcttagtcttcaaggactgataacagctggtaatatttaccattgtttggtgggaatggggttctcatattaggctagcacgctaaacattttcaattacgaaaatgtattaggctcgtgtgctaccctaatataaaaaccccatatttcctcagttgaaatagtcagctgactatcctgaaaagcattgaccctcttttatattttatctgactttcagttcatttttttaatgctagtgggaacttctccaatcagtgtatttttttagtttccttttttggggaacaggaggagctcagtaatttttatgaaatgctttgacctcatatccattaactaattatggtcctagtcagaagaagctagcacccttccctggtgaagttgatacaaatccattgtatgttcctgtcctgcaatgatttacattcagttacagtactagtcaaaactatatatatatgaattctacttaggatccaattttgatatatttaaaaagcaattgagactcatgatagactttatgagcaggtttaacttgtgtgggcgaataaaaagcctttaatttaaatgggaaaagtaaaaagtaacttttttcaaggacttgattttttttttttgggtttaaaccattttgggttcacgtcagntnaaccggtaacaaaaaggtgggaacctttcancctttgtnaaaagaancccccttaaccaaagttcaattcccctcaaaat

SEQ ID NO: 4453 - DNA, 719 bp, Homo sapiens
  misc_feature (549)..(549): "n" may be a, t, c, g, other or unknown
  misc_feature (640)..(641): "n" may be a, t, c, g, other or unknown
  misc_feature (703)..(703): "n" may be a, t, c, g, other or unknown
  misc_feature (706)..(706): "n" may be a, t, c, g, other or unknown
  misc_feature (715)..(715): "n" may be a, t, c, g, other or unknown
acttgagctcagaagatcaaagctgtagggtgcatgactgtgctctcaatagccactgcattcaaaccggggcaacacagcacaacccagtctcttaaaagagattcagcatcctggagaagccattggaaagagtagagaaaatgccacggatgaaatatccctgctgctcagactccactgacccaagtgaagttggccacagtctaacaaatgggatactgcagcggggttctggttctgaaacagatctggtgaatggtgctcgaagtgatcggctgttgaccaggtgtggcttctctgttgatgttccaaggacctcatcagcagaggaagaagcattattactaaccatctttggcaggatgaccttttgttgttgtcgttcaaccaggtctcctttattactctgcaatctctcccttttgttccctttccacctaaaactcggatgtctctgccaccgataagcacccagtggctttcccagattggaaacagcagaatcatttttcttcctcttgcttttcactgggaccacaccatggntaactccttaaacttgttcctaactctgaatctgcataagcaggttctgacaaagatctcgatagcttggagggacaaaggtgatgtttgnntcttaaaagatgctcaatcttccctgactccaagtctttaacaagtctctctaaactttaangantcctccaanctgg

SEQ ID NO: 4454 - DNA, 758 bp, Homo sapiens
  misc_feature (596)..(596): "n" may be a, t, c, g, other or unknown
  misc_feature (673)..(673): "n" may be a, t, c, g, other or unknown
  misc_feature (688)..(688): "n" may be a, t, c, g, other or unknown
  misc_feature (693)..(693): "n" may be a, t, c, g, other or unknown
  misc_feature (697)..(697): "n" may be a, t, c, g, other or unknown
  misc_feature (758)..(758): "n" may be a, t, c, g, other or unknown
taactttgatgtcccaatggaaacaacccacggtgctccattggattctgtgggatctgatgtctggagcacagaggagccgatgccaactaaagagacgggctgggcttctttttcagagttcacgtcttccctgagcacaaaagattctttaaggagtaattctccagtggaaatggaaaccagcactgaacccatggaccctctgactcccagtgcggctgccctggcagtgcagccagaagcggcaggcagtgtggccatggaagccagctctgacggagaggaggatgcagaaagtacagacaaggtaactgagacagtgatgaatggcggcatgaaggaaacgctcagcctcactgtagatgccaagacagagactgcggtcttcaaaagtgaggaagggaaactgtctacctctcaagatgctgcttgtaaagacgcagaggagtgtcccgagactgcagaggcgaagtgcgcggcgcccaggcctcccagcagcagtcccgagcagaggactggccaaccaagcgcaccaggtgacacttcagtgaatggccctgtatgacgggtgacgtctgctgctgctgactgangactgcagaccgccaccactcaggggctctggaggggtcaacctggagcccaacaagctgtcaactgctgcactcantcctgcaaagggatnaaggnccancaaaccttttaaattccaagattcctaaagacatttgtacaaggatgaaaattcaagaaan

SEQ ID NO: 4455 - DNA, 720 bp, Homo sapiens
  misc_feature (358)..(358): "n" may be a, t, c, g, other or unknown
  misc_feature (490)..(490): "n" may be a, t, c, g, other or unknown
  misc_feature (648)..(648): "n" may be a, t, c, g, other or unknown
  misc_feature (701)..(701): "n" may be a, t, c, g, other or unknown
  misc_feature (703)..(703): "n" may be a, t, c, g, other or unknown
ctctactaacaatacaaaaaaaaaaaaaaatagctgggcgtagaggtacacgcctgtaatcccagctactcaggaggctgaggcaggagaatcacttgaacccgggaggcggagggtgcagagccgagatcgcaccactgctctctagcctgggcaacaagagcaaagactccgtctcggaaaaaaaaaatgtggttccggggcctcccaggggacagcgtgtcataggttgctcaggcctccaagcacggtcggtgggcctccgactgcagccttggtgcccactccaccaaccggcagaagagccggccctgagtgctgatggggggatgtgtgtctgatggaggggtctcctganaggtcagtgattgcctacgatggggcttccctcccaagtcatcaagttcatgggaggctgcatcccatgggtctctttcaacaccagccctgactgaagagctgctctcttcagcagtgtattgttggagcnagtgctggaattgagtcattgtcactggaacagctggtcaccgcccaaagacgggggagcctgggtcccagagaccagtccccaacatgggtgctgggtctggggaaatggccgtgacaaggctggggtgggattccctgacactggggccctttgtngtgacaatcccctctggtgctgacgcccgcttctcaacggtggggattggctnanggcctctgactcctggg

SEQ ID NO: 4456 - DNA, 712 bp, Homo sapiens
  misc_feature (648)..(648): "n" may be a, t, c, g, other or unknown
  misc_feature (651)..(652): "n" may be a, t, c, g, other or unknown
  misc_feature (658)..(658): "n" may be a, t, c, g, other or unknown
  misc_feature (712)..(712): "n" may be a, t, c, g, other or unknown
atcatgaacctgggaagagcaggtactataaaagagaattcacgctgtccgttgaatgaagaggtaattgtccaagccaggaaaatatttccttcagtgataaaatatgccgtagaaatgactatatgggaagaggaaaaagaactgcctcctgaactccagataagggagaaaaatgaaagatactattgtgtccttttcaatgatgaacaccattcatatgaccacgtcatatacagcctacaaagagctcttgactgtgagctcgcagaggcccagttgcataccactgccattgacaaagagggtcgtcgggctgttaaagcgggagcttatgctgcttgccaggaagcaaaggaagatataaagagtcattcagaaaatgtctctcaacatccacttcatgtagaagtattacactcagagattatggctcatcagaaatttgctttgcgtcttggttcctggatgaacaaaattatgagctattcaagtgactttaggcagatcttttgccaagcatgccttagagaagaacctgactcggagaatccctgtctcataagcaggttaatgctttgggatgcaaagctttataaaggtgccccgtaagatccttcatgaattgatcttcagcagtttttttanggnngatggnatacaaaaaactctttgctatggaattttgtgaaagtatttataacaactgcan

SEQ ID NO: 4457 - DNA, 769 bp, Homo sapiens
  misc_feature (545)..(545): "n" may be a, t, c, g, other or unknown
  misc_feature (671)..(671): "n" may be a, t, c, g, other or unknown
  misc_feature (688)..(688): "n" may be a, t, c, g, other or unknown
  misc_feature (699)..(699): "n" may be a, t, c, g, other or unknown
  misc_feature (760)..(761): "n" may be a, t, c, g, other or unknown
ttttcctcgtccctcccttcgcggtgattttccggtcccggcgcccggcgagggcgcgcggctggtgtccgccccgcccgaaaggtgagccagccatgagagggtatcttgtggccatattcctgagtgctgtcttcctctattatgtactgcattgcatattatggggaacgaatgtctattgggtggcacctgtggaaatgaaacggagaaataagatccagccttgtttatcaaagccagcttttgcctctctgctgagtcagagctctgcatatattttaagaaaaggcattgaggaactcaatcaaaccagtattcttttcacacaggtttcatcagtttcacccttttctgtgtgcggctgattttagaaagattgcttccttgtatggtagcgataagtttgatttgccctatgggatgagaacatcagcggaatattttcgacttgctctttcaaaactgcagagttgtgatctctttgatgagtttgacaaaatgaataatggtcctgttttaggacatgaagaagaagttggganaaggacaaccttccgacttttttatccaaaatccgttttttcagatcctattcacaatgaccctaatacgacagtgattcccactgcttttaagccacatgatttaaagggggctgttggaattgntgattgggtgacaaaantaaacactaangggttttgggaagaaaaccaagcccttaaacctgaatttataaaaccttaatcaaatcccnnaataatta

SEQ ID NO: 4458 - DNA, 860 bp, Homo sapiens
  misc_feature (791)..(791): "n" may be a, t, c, g, other or unknown
  misc_feature (815)..(815): "n" may be a, t, c, g, other or unknown
  misc_feature (832)..(832): "n" may be a, t, c, g, other or unknown
  misc_feature (848)..(848): "n" may be a, t, c, g, other or unknown
  misc_feature (856)..(856): "n" may be a, t, c, g, other or unknown
ccatctgacagccaaggagccacacctttgcactatgctgctcagagtaactttgctgaaacggttaaagtgtttttaaaacatccttcagtgaaagatgattcagacctggaaggaagaacatcctttatgtgggcagctggcaaaggcagtgatgatgtccttagaactatgctgagcttaaaatcggacatagatattaacatggctgacaaatatggaggtacagctttgcatgctgctgctctttctggccatgtcagcaccgtgaagttattactggaaaataatgctcaagtagatgctactgatgttatgaaacatactccacttttccgagcctgtgagatgtgacacaaagatgtgattcagacactcattaaaggtggagcaagggtagatctagttgaccaagatggacattctcttctacattgggcagcactgggaggaaatgctgatgtttgccagatattaatagaaaataagatcaatccaaatgtccaggattatgcaggaagaacccctttgcagtgtgcagcatatggaggctatatcaactgcatggcagttctcatggaaaacaatgcagaccctaacattcaagacaaagagggaagaacagctttgcattggtcctgcaacaatggataccttgatgccattaaattactgctagactttgctgctttccctaatcagatggaaaacaaatgaaagagagatacacaccccttgattaagccttgccttggtgaaccccatgaaagtgatcaaattcaaggttgggncacggtgccctgtccaatcccaancaatacaaggacaatcnccggccttcaaaaatnccaagctngtct

SEQ ID NO: 4459 - DNA, 763 bp, Homo sapiens
  misc_feature (647)..(647): "n" may be a, t, c, g, other or unknown
  misc_feature (690)..(690): "n" may be a, t, c, g, other or unknown
  misc_feature (705)..(705): "n" may be a, t, c, g, other or unknown
  misc_feature (731)..(731): "n" may be a, t, c, g, other or unknown
  misc_feature (744)..(744): "n" may be a, t, c, g, other or unknown
  misc_feature (760)..(760): "n" may be a, t, c, g, other or unknown
aaagaaaagaaggaaaaaggaaactgatttggtggaagaacacaatggtcacatctttaaagccacccaatatagcatccctacatactgtgaatactgttcttctttgatatggataatggaccgagcctctgtttgcaaattatgcaagtatgcttgccataagaagtgctgtctgaaaaccacagccaagtgctctaaaaagtatgatccagagctgtcatctcgacaatttggggttgaactgtcccgtttgaccagtgaagaccgaactgttcctttagtagtggaaaagctcataaactacattgaaatgcatggactgtatacagaaggtatttatcgaaagtctggttcgactaataaaatcaaggagcttcggcagggtctagatacagatgctgagagtgtaaatctagatgactataacatacacgtcattgcaagtgtattcaaacaatggcttcgagatttgcccaatcctctcatgacctttgaactctatgaggaatttcttcgagctatgggccttcaggagaggaaggagacaatccgtggtgtatactctgtgattgatcaactctcccgaactcatctcaatacactggaacgcctcatctttcatctaagtcaggattgctctgcangaagacactaatcgaatgtctgctaatgctttgggccattggngtttgcgccctgcantccccgctggcctgacaccaacttgncccactaacaaangtttcaagggcatcantta

SEQ ID NO: 4460 - DNA, 808 bp, Homo sapiens
  misc_feature (654)..(654): "n" may be a, t, c, g, other or unknown
  misc_feature (662)..(662): "n" may be a, t, c, g, other or unknown
  misc_feature (779)..(779): "n" may be a, t, c, g, other or unknown
  misc_feature (783)..(784): "n" may be a, t, c, g, other or unknown
  misc_feature (791)..(791): "n" may be a, t, c, g, other or unknown
  misc_feature (807)..(807): "n" may be a, t, c, g, other or unknown
gattccgtgttcttggccatgttagccataatatcctgtgcagtatgtttttcctgtgcagaggcaaaaacatattgggcatatgttcccaagcccccagcagtatgacccatactttggagtgacactcctcctaagatttatcatgattaaggagcatgggctccaggacccctaactccacctgacatagaacagttagactctcagaataatgtcattaattataccgctccattggaaggacttcctttgtgtgtcaccacaaagacatcactcagccatagctgtcttacagttcaagctcacacatggttgagtcactatgggaaaatcatgtacttattaagtcttggttatattaatgtaaccggtgtgctaaccaaccattcctggcccaatcgccttcattgtgctgactatacagaatggattcccttcaatagttcctacccccctccatagacccagtgtcttggcccactggctagaaaacaatctatgttaactggagacattgtggattggggacctaaaggccaattagatggaaaagaagaaaatcagaaatcgtggcacaaactttgctggcattggtggcaagcttttaatgcttcttctttatataacactggggattcaatcccagtcggncgcccaanattgcttggcatggagcaagctttagcccgcctcttcctcagtggcattatctaagggaggaaagggaccaattcaaaaaggatggataatggaaagggaagcaattcccattttangaannggcaaanatcctggggtttgccna

SEQ ID NO: 4461 - DNA, 762 bp, Homo sapiens
  misc_feature (648)..(648): "n" may be a, t, c, g, other or unknown
  misc_feature (670)..(670): "n" may be a, t, c, g, other or unknown
  misc_feature (694)..(694): "n" may be a, t, c, g, other or unknown
  misc_feature (718)..(718): "n" may be a, t, c, g, other or unknown
  misc_feature (728)..(728): "n" may be a, t, c, g, other or unknown
  misc_feature (748)..(748): "n" may be a, t, c, g, other or unknown
tgactacctcttccaactgggatttggggagctgtggagggtgcaggaggaaggcatggactcggagattggctgcctcatccgcttctatgcaggaaaacctcacagcacgggtagctctgaacggattcagctctcaggaatgtataatgtccgtaaaggcaagatgcagttgccagtgaaccgatggacaagacgccaagtcatcctatgtgggacctgcctgatagtatcatctgtgaaagacagcttgaccggaaagatgcatgttctgccactaattggtggaaaagtagaagaagtgaaaaagcaccaacactgtttagcatttagctcctctggaccccaaagccagacttactacatttgctttgatactttcacagaatacttaaggtggctgcgacaagtctccaaggttgcatcccagcgcattagctcagtggacctctcgtgttgtagcctggaacatctgcctgccaacctcttctacagccaagacctcactcatctcaatttaaaacaaaacttcctaaggcagaaccctagccttccagctgccagggggcttaatgaactgcaaaggttcgccaagttgaagagtcctaaccttttccaataatcatttaggggacttccctctggcantctgcagtattccaaccctggnaaaagctgaacgtgtcctgcaatngccctgcgatcaatccccgggaanccgtttggangttgatgcacaactttacangacatttttgttgg

SEQ ID NO: 4462 - DNA, 676 bp, Homo sapiens
  misc_feature (620)..(620): "n" may be a, t, c, g, other or unknown
  misc_feature (626)..(627): "n" may be a, t, c, g, other or unknown
  misc_feature (629)..(629): "n" may be a, t, c, g, other or unknown
  misc_feature (637)..(637): "n" may be a, t, c, g, other or unknown
gtattctttaatgatattaaatatgccgaagccaagcacacagtctttctaaagtgtgtgtatgtttgtgtgaatgtgaatgatactgatcttatatctgttaaaagttgttttaaaaagctgtggcatcccattgttcatatttgccaagtcttctgtaaagatgtctaggacgaaatattttatgtgctaatgcatgtatttgtaaaccagatttgtttaccactcaaaattaacttgttttcttcatccaaaaaagtttatttcttccacgtacttaaattttctgtgtgggtataatatagctttctaatttttttctttcacaaaggcaggttcaaaattctgttgaaagaaaaatgctttctgaaactgaggtataacaccagagcttgctgtttaaaggattatatgatgtacatcagttctataaatgtgctcagcagtttaacatgtgaatcctgttttaaagtgctcagatttcaactgtgtaagccattgatataacgctgtaattaaaaatgtttatatgaaataacttaatgttttaaatttatttatgtagatcacatcatttttaacgtatgcagtgcaaatatgtgaaaagtcttttggtttantcccannanttatttantttaagaaaagtaagtttaaaagaccttaaggacattca

SEQ ID NO: 4463 - DNA, 714 bp, Homo sapiens
  misc_feature (667)..(667): "n" may be a, t, c, g, other or unknown
  misc_feature (677)..(677): "n" may be a, t, c, g, other or unknown
  misc_feature (702)..(702): "n" may be a, t, c, g, other or unknown
  misc_feature (709)..(710): "n" may be a, t, c, g, other or unknown
atttcggcctgagagcgggccgaggagattggcgacggtgtcgcccgtgttttcgttggcgggtgcctgggctggtgggaacagccgcccgaaggaagcaccatgatttcggccgcgcagttgttggatgagttaatgggccgggaccgaaacctagccccggacgagaagcgcagcaacgtgcggtgggaccacgagagcgtttgtaaatattatctctgtggtttttgtcctgcggaattgttcacaaatacacgttctgatcttggtccgtgtgaaaaaattcatgatgaaaatctacgaaaacagtatgagaagagctctcgtttcatgaaagttggctatgagagagattttttgcgatacttacagagcttacttgcagaagtagaacgtaggatcagacgaggccatgctcgtttggcattatctcaaaaccagcagtcttctggggccgctggcccaacaggcaaaaatgaagaaaaaattcaggttctaacagacaaaattgatgtacttctgcaacaagattgaagaattagggtctgaaggaaaagtagaagaagcccaagggatgatgaaattaagttgagcaattaaaaagaaagagagaagaactgctaaggtccacaacgtcgacaattgaaaagctttgctgcacaagaanaacaaatggnagtttgtgaagtaatgtgggagccnttttaannatta

SEQ ID NO: 4464 - DNA, 742 bp, Homo sapiens
  misc_feature (543)..(543): "n" may be a, t, c, g, other or unknown
  misc_feature (651)..(651): "n" may be a, t, c, g, other or unknown
  misc_feature (658)..(658): "n" may be a, t, c, g, other or unknown
  misc_feature (702)..(702): "n" may be a, t, c, g, other or unknown
  misc_feature (707)..(707): "n" may be a, t, c, g, other or unknown
  misc_feature (728)..(728): "n" may be a, t, c, g, other or unknown
atatagcaaatagaagagaactaatttgtctcagatttcttaaatgtgaagccttttctttcaaaataaatgtttagatgaggctggttgtagactttcataaagtacctgtgaaactatttttgttttcagaaagtgattactattaatataaaccaagatttacttgtaaaaagcagtgttctcagggtttatattatggaacagtagcttcaaatactttgtcttatgacagtaattcacttcctttctttttcacagagtaagttcctctcagtttatacagagtgattttacttattttatttggtggtagtggtggaaggtgggagtattataaataagcctggaaaaatatatagtgccacattaatagtggttatctctggataaaatttataactctttctcttacttacagtgaatatattttgtaataaacaaatcaagcttataagattacaggtcttcagaataagaccatagatacattggtaaaagattaataatttctctaaactaggctattgagaaaattaatanacataaaagacaaaagcattcagctcttcgaagtatattaagctgattagaaaaatctgaaataggtggcgccaagatggccgaataggaacaagctccagtctgcanctcccancaatgaacgatgcagaaagatggggcgaattctgcatttccaanctganggaccaagttcaacctcaccnggggggcttggcaa

SEQ ID NO: 4465 - DNA, 797 bp, Homo sapiens
  misc_feature (504)..(504): "n" may be a, t, c, g, other or unknown
  misc_feature (660)..(660): "n" may be a, t, c, g, other or unknown
  misc_feature (714)..(714): "n" may be a, t, c, g, other or unknown
  misc_feature (729)..(729): "n" may be a, t, c, g, other or unknown
  misc_feature (732)..(732): "n" may be a, t, c, g, other or unknown
  misc_feature (764)..(764): "n" may be a, t, c, g, other or unknown
  misc_feature (797)..(797): "n" may be a, t, c, g, other or unknown
attcctgctgtggatcccaactttcctaacaaaccaccccttacatttgacataattaggaagaatgttgaaaataatcgctaccgtcggcttgatttatttcaagagcatatgtttgaagtattggaacgagcaagaaggatgaatcggacagattcagaaatatatgaagatgcagtagaacttcagcagttttttattaaaattcgtgatgaactctgcaaaaatggagagattcttctttcaccggcactcagctataccacaaaacatttgcataatgatgtggagaaagagagaaaggaaaaattgccaaaagaaatagaggaagataaactaaaacgagaagaagaaaaaagagaagctgaaaagagtgaagattcctctggtgctgcaggcctctcaggcttacatcgcacatacagccaggactgtagctttaaaaacagcatgtaccatgttggagattacgtctatgtggaacctgcagaggccaacctacanccacatatcgtctgtattgaaagactgtgggaggattcagctggtgaaaaatggttgtatggctgttggttttaccgaccaaatgaaacattccacctggctacacgaaaatttctagaaaaagaagtttttaaagagtgactattacaacaaagntccagttaagaaaattctaggcaagtgtgtgggcatgtttggcaaaggaatacnttaagttatgcccanaanacttccggagatgagggaggttttggcccggngaaatccaccgggaattccggccaaaaaccaan

SEQ ID NO: 4466 - DNA, 774 bp, Homo sapiens
  misc_feature (563)..(563): "n" may be a, t, c, g, other or unknown
  misc_feature (683)..(683): "n" may be a, t, c, g, other or unknown
  misc_feature (685)..(685): "n" may be a, t, c, g, other or unknown
  misc_feature (702)..(702): "n" may be a, t, c, g, other or unknown
  misc_feature (720)..(720): "n" may be a, t, c, g, other or unknown
  misc_feature (733)..(733): "n" may be a, t, c, g, other or unknown
gctctttagcagcttttcagcaattacaaagacaatatatgagtttttgcgtgttttgcatatgcttgtgaaaattatgtagtaaataggtgccaagtaaggtatgtagatagcaagtgctagtgcaatttataggtgccataatccctatggactgagtcagaaatggcctaatagaaggcagaagagaggccagttccaagcaggggcatagaacagaacaatctgcaagggagttgggagcatataccgctgggttaagacagtgagtgagaaaaggctggaaggcagacagtgctgggcaaaggagctggagcttgatcattgctgcatacgaaaatggaggcatttaaactgggactgagatgggactgagtgattaaattgctaccagtgttagttttaagagttgaaaagcttaatagtaaattttaataagcccatgaacttgattatggctacctttattttaaacaaggagaccttaatggacagaatcaagaaacagctacgtgaatgggatgaaaatctaaaagatgattctcttccttcaaatccaatangtatgaaaagttagtttcctgcctggagcctgggatgtcctgctataaaaaaatagctttttcaagggatgccgattcaatcatatcctccaaggtttaagaccggattaaaacattttnantcctgaaaaagcataanttccctttgagcaagttngaaaaaaaatgangtaattttaaaaatttaaattgccaataaaaatcccccaaa

SEQ ID NO: 4467 - DNA, 809 bp, Homo sapiens
  misc_feature (522)..(522): "n" may be a, t, c, g, other or unknown
  misc_feature (573)..(573): "n" may be a, t, c, g, other or unknown
  misc_feature (612)..(612): "n" may be a, t, c, g, other or unknown
  misc_feature (649)..(649): "n" may be a, t, c, g, other or unknown
  misc_feature (653)..(653): "n" may be a, t, c, g, other or unknown
  misc_feature (680)..(680): "n" may be a, t, c, g, other or unknown
  misc_feature (683)..(683): "n" may be a, t, c, g, other or unknown
  misc_feature (725)..(725): "n" may be a, t, c, g, other or unknown
  misc_feature (759)..(759): "n" may be a, t, c, g, other or unknown
  misc_feature (778)..(778): "n" may be a, t, c, g, other or unknown
  misc_feature (797)..(797): "n" may be a, t, c, g, other or unknown
  misc_feature (799)..(799): "n" may be a, t, c, g, other or unknown
tttagcttgtgctcaagtcctcttgctgtgttttcagaagcactcacatgttctttcttttcctgagtgaaaagcaaaggtcccacggtgtgtgctgtggtgcaccgcctggctttgggggtcccggaggcaggctgcctagactcacagcctcgggaccgttgccacggcctgtcttctcgttcaggcctgcctctgacagcactcaccatgaggacattccatccttcaccccctcctctggcacaggccaccactgcggtgctgtgccttcagatgggaggtgggcgcggtggccgcctccttccctccaggacctgcccgtgtgaagaccccccggagtgctgagcttcagggctgcgtggaaagagtttttactctctttttctagcctgtataccaggcttttccccacattgtcaggtagagcaccagcttccctgaccgctgctgctcggggagggctggggctggccgggggtcctgtggaggagtacatggaggactccaggtacagcgcangagtcacggcttttgttttttgacattggcccccggttctaccaatgacanggtgccctggctggagctgtcaatcacacacaccctcanctccggaggctgttgggctcctcaaagctgggagaanaganggcaaagatttttctgcacacggagtnttngggaataagaacccgggccaaacgctgggccctcaacggtgnagccctgcccaatccttaacgggcaaaggtgggntgggtcctgggaaagaagntccccccaaggggggaaancnatgggtttcc

SEQ ID NO: 4468 - DNA, 840 bp, Homo sapiens
  misc_feature (549)..(549): "n" may be a, t, c, g, other or unknown
  misc_feature (623)..(623): "n" may be a, t, c, g, other or unknown
  misc_feature (628)..(628): "n" may be a, t, c, g, other or unknown
  misc_feature (758)..(758): "n" may be a, t, c, g, other or unknown
  misc_feature (774)..(774): "n" may be a, t, c, g, other or unknown
  misc_feature (804)..(804): "n" may be a, t, c, g, other or unknown
  misc_feature (820)..(821): "n" may be a, t, c, g, other or unknown
ttcaaaatcttctcaggcacactgatacacatacctcagatttttaattctccggttgtgttcaccaggtgcttggtcatgattaagaattccgtgatgtgtaccccatgtgtttaaatttgctgctgagttaactttgtggcggcctgtggactagacctctgcacatgcaatgcagaacggcagggccagatttgaaatcctgctatcttttcggctgccttgtaaaaataacatcaggcgatggggatacgatgccagaggtcacctgtgataagttctgtttatggccattttacttctaggaagacaggaagtgtcaggatctcagggatctaggaagccaaaatgtttttccactctgaaataaagtgactgaccaggagttcccggccacgcagccctgtgggaactgccgcacggccacttttatgaagtggacacgtgttggtcccactgaaaagaaactccccacccatggctccctcacgctgcagcagaggccctgccacagcacctgtcagcccctgccagcttgcaggggcgcangcgcagagcggtttgtgcccttgctggagccagggaagggcacaaggtccctcctggagtcatgggaagtgcanccgangttctatattaaaaatacagaggctaagcacatgtgcttggggaatgcagctacagtagtggaatgaaagtgctgtccgttccttacccccccagcttctcaactgtcctccaaacgcatatccctgggntcccttttccctaatnaaggggactgaaattgaaattgggggcttngccccaagggttcaannacctggggccctttcggaa

SEQ ID NO: 4469 - DNA, 797 bp, Homo sapiens
  misc_feature (595)..(595): "n" may be a, t, c, g, other or unknown
  misc_feature (684)..(684): "n" may be a, t, c, g, other or unknown
  misc_feature (748)..(748): "n" may be a, t, c, g, other or unknown
  misc_feature (782)..(782): "n" may be a, t, c, g, other or unknown
  misc_feature (784)..(784): "n" may be a, t, c, g, other or unknown
  misc_feature (788)..(788): "n" may be a, t, c, g, other or unknown
  misc_feature (791)..(791): "n" may be a, t, c, g, other or unknown
ttgtactaatttacactcatgagatatttttaatggttacattattttagtatacagattgtcataggttagaattaacttaaaatttgcatttctaaaagctatcttttaaaatgtattgaactggcttgagttggtttgaaatgaccattcccttcttactaataagcttatgcagattcattcacctttcttttctcttttctgtttttctacagagaaagagaattgggcttatcccgccagaaaagcacagaagccacagtgcttcttgttgaaagacagaccctcataatgttacctctagtagaaagatagcatatgcttgttttgcttgtttgggttcatcatactctattgcttgggcagaagagcacatatgaagagaagagaaatgggaaatggggaagacaacgcagagcaccatatcttggggtgtatatagaagctacaggacaagtgtaatttttatcattgcatggggagcattgacataatttctactgcagctgagcattttttaatatggataataggattctgcaagtgatacatttggtcagagaacttaataaactaagtcaagtggggatangtcctgtgacagaattgtgtgatacagggcaaacaggagttgggttatgggggaaaatgccaagttgaaatatgttttgatcctttggngaaacctattttttcatttaaacctggtccttaaatcccagttatgttcccagaacaatacaanaaatgtttaaaatgttccaatttgtaagaagganancaangtnatttta

SEQ ID NO: 4470 - DNA, 679 bp, Homo sapiens
  misc_feature (458)..(458): "n" may be a, t, c, g, other or unknown
  misc_feature (632)..(632): "n" may be a, t, c, g, other or unknown
  misc_feature (646)..(646): "n" may be a, t, c, g, other or unknown
  misc_feature (651)..(652): "n" may be a, t, c, g, other or unknown
  misc_feature (677)..(677): "n" may be a, t, c, g, other or unknown
ggttaaatttttctgctacattgtctgctcagctcgtattctggtcatagaggaacctgaagccagagaaactagacaaaaaggaacctctttcaggagctataaaagaaagggaggaatcatgtccacaattgcagctttctatggcggcaagtccattctcatcacgggggccacaggctttctgggcaaagtgctaatggagaagctgtttcgcaccagcccagacctgaaagtcatttacatccttgtgaggcccaaggctggccagacactgcagcagggggttttccagatcctagacagtaagctatttgagaaagtcaaagaagtttgtccaaatgtgcatgagaagatcagagctatttatgcagatctcaatcagaatgactttgccatcagcaaagaggacatgcaggagcttctctcctgtacaaacataatatttcactgtgcanccactgtacgctttgacgacactctcagacatgctgtgcaacttaacgtcactgccacccggcagctcttgcttatggctagtcagatgccaaagctggaagcctttatacatatctctactgcctattcaaattgtaacctgaagcacatcgatgaagtttatctatccgtgncctgtgggagccanaaaanntcattgattcccttgaggtgggtanac

SEQ ID NO: 4471 - DNA, 683 bp, Homo sapiens
  misc_feature (623)..(623): "n" may be a, t, c, g, other or unknown
  misc_feature (629)..(629): "n" may be a, t, c, g, other or unknown
  misc_feature (661)..(661): "n" may be a, t, c, g, other or unknown
  misc_feature (673)..(673): "n" may be a, t, c, g, other or unknown
  misc_feature (677)..(677): "n" may be a, t, c, g, other or unknown
gtcacacatggacagcctcatctattttattgacccatttccagatgctgggattaccgagttacattaatacacagctttttatggtatacagtaatgtaatatattagcctaatgtgttaggactccttaaacaagggatactgtaatcattaatacagttgatccattaggcttggcacagtgtttattttatggaaacactctaaaagaaaaacagacctgaagttcatcatgtgtaaggttacacaaatctatctttcaaatgagttcattactctaaataattgtcagaagttacatttttgtttaatataatctttgcagtaaccttccaaattagggcaatttttctgtccagatctgcctactgaactagaatatttaatgagcaacaacttctgttgtgaattaacggactgatattggggtttgataaatcagtttcctaaggtttggataagccaagagttagactctaagaatataaaaaggcctagataacatcataaaagtaaggttctagatccacaaagcagagaactagacccagattataagtcactccagaggtcccatttttctggatttgagggaagaagtgtttgatgacaagtatttgnagtgantttatatccattttcttttaaaaagtaatagnttgggaattagntacntgttta

SEQ ID NO: 4472 - DNA, 751 bp, Homo sapiens
  misc_feature (436)..(436): "n" may be a, t, c, g, other or unknown
  misc_feature (496)..(496): "n" may be a, t, c, g, other or unknown
  misc_feature (558)..(558): "n" may be a, t, c, g, other or unknown
  misc_feature (595)..(595): "n" may be a, t, c, g, other or unknown
  misc_feature (691)..(691): "n" may be a, t, c, g, other or unknown
  misc_feature (732)..(732): "n" may be a, t, c, g, other or unknown
  misc_feature (736)..(737): "n" may be a, t, c, g, other or unknown
  misc_feature (751)..(751): "n" may be a, t, c, g, other or unknown
aagaatagtgttccacagacatctcagagtctacacataatcaacaaactgaccctggtcttctacatcccatgcttgataatgccacatcaactcagttgtccaggccagggacctggtaatatttgaagagttctccttgttcttcagccagttgtctcaagtgccaattctacctctcaagtgtgtatctaattgtttccttccttgctactgctactactttagccattgccactccccatgagattactgcattgatatgatggggctctcctggttactaatcttaaactccttcagtcaacttccccactactctctgagtagaaagtctaaaatacagataatcatgacctcccaccatccaccaccctgaaagtcattttatgtctccttatattattgaacacaatgtctcaattcaacgtcgtanacaaagccatccataatttgaacagcatcctttctctccattctcccacatttaggttangtcctggcccacgctaccctttcataagtctaccaacactccacatcctttcacatccccanagtttgggatgtgctatttaaatttgtcctccccaancatttgtacttcctggcaaacacacatactttcttctccaggataactcatattcaattcttgaagacttgattcaagttttttccccccgggggnccttccaaaaaccttcttccccgggcccaattttgggaaantggnngttccccccaaaan

SEQ ID NO: 4473 - DNA, 516 bp, Homo sapiens
  misc_feature (441)..(441): "n" may be a, t, c, g, other or unknown
  misc_feature (483)..(483): "n" may be a, t, c, g, other or unknown
  misc_feature (496)..(496): "n" may be a, t, c, g, other or unknown
  misc_feature (503)..(503): "n" may be a, t, c, g, other or unknown
  misc_feature (513)..(513): "n" may be a, t, c, g, other or unknown
gtttaagttcagcgcagcgactcggggacctggagctgacgcctagacacttgtattagctttaatagaagagaaatggaggagccatagaatattaaggatgaattcaggaaggcctgagaccatggaaaacttgcctgctctctacactattttccaaggagaggttgctatggtgacagactatggggcctttatcaaaatcccaggctgtcggaagcaaggtctggtccatcgaactcatatgtcatcctgtcgggtggataagccctctgagatagtagatgttggagataaagtgtgggtgaagcttattggccgagagatgaaaaatgatagaataaaagtatccctctccatgaaggttgtcaatcaagggactgggaaagaccttgatcccaacaatgttatcattgagcaagaagaaaggcggaggcgatncttccaggattacactgggcaaaaagattacccttgaggctntcttgaacactanctgcaanaaagtgtggntgt

SEQ ID NO: 4474 - DNA, 820 bp, Homo sapiens
  misc_feature (559)..(559): "n" may be a, t, c, g, other or unknown
  misc_feature (642)..(642): "n" may be a, t, c, g, other or unknown
  misc_feature (646)..(646): "n" may be a, t, c, g, other or unknown
  misc_feature (651)..(651): "n" may be a, t, c, g, other or unknown
  misc_feature (796)..(797): "n" may be a, t, c, g, other or unknown
  misc_feature (806)..(806): "n" may be a, t, c, g, other or unknown
  misc_feature (818)..(818): "n" may be a, t, c, g, other or unknown
  misc_feature (820)..(820): "n" may be a, t, c, g, other or unknown
aaggatgaaagcctgaactagagcagtggaaatgcgaatgtggagcagaggaacgattcaagaaattctgcggtaaaactcatcagacttcatcactgattaaagattgtcttctcctccaaggtctacatgattacctgaagtttaataataatgcaagaagtgtttgtgggaagcagagaagcaagcaactgtatttcttgttctcacctaagcattactggaggataagccacatcagtctacaaagaggttttcatacaaacataataagatgtaaatggaccaaaagtgaagcacattcttgcagtaagcactgttactctccgagcaaccatggtttacatattgggattttgaaacttagcacttctgctcccaagggacttacaaaagtgaacatttgtatgtcccgtattaaaagtactttgaactctgtttcaaaggctgtttttggcaatcaaaatgaaatgatttcacgtttagctcaatttaagccaagttcccaaattttaagaaaagtatcggatagtggctggttaaaacagaaaaacatcanacaagccatcaaatctctgaaaaaatatagtgacaaatcagcagaaaagagtccttttccagaagagaaaagtcacattatanacanagaanaagatataggtaaacgcagtccttttcaatacacaagttctataaccacaaaatttggggactcaatctactttttatcaaaatcatattaattcacatttcaaaacgtaaggggaaaaatgtctcaacaaaaaggggaaatggnncattttccngggcaaatcaanan

SEQ ID NO: 4475 - DNA, 679 bp, Homo sapiens
  misc_feature (424)..(424): "n" may be a, t, c, g, other or unknown
  misc_feature (479)..(479): "n" may be a, t, c, g, other or unknown
  misc_feature (545)..(545): "n" may be a, t, c, g, other or unknown
  misc_feature (587)..(587): "n" may be a, t, c, g, other or unknown
  misc_feature (589)..(589): "n" may be a, t, c, g, other or unknown
  misc_feature (611)..(611): "n" may be a, t, c, g, other or unknown
  misc_feature (628)..(628): "n" may be a, t, c, g, other or unknown
  misc_feature (669)..(669): "n" may be a, t, c, g, other or unknown
gaagtgaatgagccgtgccaaaaagacggttggatcctgcatagtggtgagaggggtgatccattctgcctcatcatttaagctgtctggagtacaagttcagggacctaactgtggaagaactaaggaatgtaaatgtatttttcccacatttcaaatattccatggacacctatgtttttaaagatagttctcagaaagacctgctgaattttactggcacaattcctgtgatgtatcagggtaatacatataacataccaattcgtttctggattttggattctcaccctttcgctccccctatttgcttcttgaagccaactgcaaatatgggaatcttagtcggaaaacatgtggatgctcaaggcagaatatatttgccctatctccaaaactggagccatcctaaatctgtcattgntggattaattaaagaaatgattgccaagtttcaagaggaacttcccatgtattcnctatcatcatctgatgaggcacggcaggtagacttgctaacctatattgcaaaaatcactgaaggngtttcaagatacaaattcaaaagagctggggcaaatcatganantaaaccagtcaataaaattacngtggttggagggtgganaaactccggtattgcctgcacatttagcaatttcagcaaangggtattgca

SEQ ID NO: 4476 - DNA, 587 bp, Homo sapiens
  misc_feature (408)..(408): "n" may be a, t, c, g, other or unknown
  misc_feature (450)..(450): "n" may be a, t, c, g, other or unknown
  misc_feature (516)..(516): "n" may be a, t, c, g, other or unknown
  misc_feature (538)..(538): "n" may be a, t, c, g, other or unknown
  misc_feature (543)..(544): "n" may be a, t, c, g, other or unknown
  misc_feature (555)..(555): "n" may be a, t, c, g, other or unknown
cttttctcccgccggctctaacccgcgcttggctaaggtccgcgggaacccgtgagccaccgagagagcagagaactcggcgccgccaaacagcccagctcgcgcttcagcgtcccggcgccgtcgcgccactcctccgatggccacagatgtctttaattccaaaaacctggccgttcaggcacaaaagaagatcttgggtaaaatggtgtccaaatccatcgccaccaccttaatagacgacacaagtagtgaggtgctggatgagctctacagagtgaccagggagtacacccaaaacaagaaggaggcagagaagatcatcaagaacctcatcaagacagtcatcaagctggccattctttataggaataatcagtttaatcaagatgagctagcattgatggngaaatttaagaagaaagttcatcagcttgctatgaccgtggncagtttccaacaagggggttatacctttgaccggaatgtgttatccaagctgttaaatgaatgcanaagaaatgctgcaccaaaacanttaannggccaactcantggcaaagtcaaaatggaccgggttaaaaagg

SEQ ID NO: 4477 - DNA, 628 bp, Homo sapiens
  misc_feature (513)..(513): "n" may be a, t, c, g, other or unknown
  misc_feature (572)..(572): "n" may be a, t, c, g, other or unknown
  misc_feature (587)..(587): "n" may be a, t, c, g, other or unknown
  misc_feature (593)..(593): "n" may be a, t, c, g, other or unknown
  misc_feature (595)..(595): "n" may be a, t, c, g, other or unknown
  misc_feature (627)..(627): "n" may be a, t, c, g, other or unknown
gttagatatagttgttatgatttgtatcaatccattttcacactgctataaggaactacctgagactgggtaatctatgaagaaaagaggtttaattgactcacagttctgcatggctgggagtcctcaggaacttacaatcatggcagaaggggaagcaagacatttcttatatggcagcaggacagaaagagagagagtgaagggggaagtgccacacacttccaaacaaccatatcttgtggttaattaaaaagtactcattggtgtgccttgtatagaaaaaatatacactcactatcatgagaacagcaaggagggagtctgcccccaagattcaatcacctcccagtagacccctcccctgacatgtggggattacaattcaagatgagatttgggtggggaaacagagtcaaaccatatcgtgattgttctataataaagagatgcccacatgtgtttcatcagggacagtgctcattaaccagttgtcctgccgtaatttattantagtatccccctttgctttcaaaaagtgtcctaagtttacaaaaagtatagaaattggnggacagaatagtggntgcccnangattggaaaaagggtaagggtaaagggtgcana

SEQ ID NO: 4478 - DNA, 764 bp, Homo sapiens
  misc_feature (685)..(685): "n" may be a, t, c, g, other or unknown
  misc_feature (696)..(696): "n" may be a, t, c, g, other or unknown
  misc_feature (703)..(703): "n" may be a, t, c, g, other or unknown
  misc_feature (744)..(744): "n" may be a, t, c, g, other or unknown
  misc_feature (747)..(747): "n" may be a, t, c, g, other or unknown
atatattgtcagagactgccaagcagccggacacacgggggcacagaatcactgaaggggaaaaatacagaaaatatgggtttctacggcacattaaaaatgattttttacaaaatgaaaagaaagttggaccatggttctgaggtccgctctttttctttgggaaagaaaccatgcaaagtctcagaatatacaagtaccactgggcttgtaccatgttcagcaacaccaacaacttttggggacctcagagcagccaatggccaagggcaacaacgacgccgaattacatctgtccagccacctacaggcctccaggaatggctaaaaatgtttcagagctggagtggaccagagaaattgcttgctttagatgaactcattgatagttgtgaaccaacacaagtaaaacatatgatgcaagtgatagaaccccagtttcaacgagacttcatttcattgctccctaaagagttggcactctatgtgctttcattcctggaacccaaagacctgctacaagcagctcagacatgtcgctactggagaattttggctgaagacaaccttctctggagagagaaatgcaaagaagaggggattgatgaaccattgcacatcaagagaagaaaagttataaaaaccaggtttcatacacaagtccatgggaaagtgcatacatcangacaagcacangatttgntaccaacctgggaggcgaaggagaactcaaatctccctaanggngctgaaaggggcattat

SEQ ID NO: 4479 - DNA, 666 bp, Homo sapiens
  misc_feature (574)..(574): "n" may be a, t, c, g, other or unknown
  misc_feature (619)..(619): "n" may be a, t, c, g, other or unknown
  misc_feature (637)..(637): "n" may be a, t, c, g, other or unknown
  misc_feature (650)..(650): "n" may be a, t, c, g, other or unknown
  misc_feature (663)..(663): "n" may be a, t, c, g, other or unknown
gttgcctaccacatcagcatcatgttctatataataggaggtgtggccactctcctcctcatccttgtcatcattgtgttcaaggagaaacctaaatatccccccagcagggcccaatccctgagctatgccttgacctctcctgatgcctcatacttaggttccatcgcccggctcttcaaaaatctcaactttgtgctgcttgtcatcacctatggtctgaatgctggtgctttttatgccttgtccactcttctgaatcgcatggtgatctggcactacccgggggaagaagtgaatgctggaagaattggcctgacgatcgtcattgcaggaatgcttggggctgtgatctcaggaatctggctggataggtccaaaacctacaaagagacaaccctggtagtctatatcatgacactggtgggcatggtggtgtacacgtttaccttgaacctgggacacctgtgggtagtgttcatcactgctggcacaatgggcttctttatgactggctatcacccactgggatttgagtttgctgtggagctcacgtacccaagaatcagaaggnatctcctccgggctcctcaacatatctgcgcaagtatttgggatnatctttaccatctcccangggcaaattattngcaactatgggancaa

SEQ ID NO: 4480 - DNA, 717 bp, Homo sapiens
  misc_feature (478)..(478): "n" may be a, t, c, g, other or unknown
  misc_feature (631)..(631): "n" may be a, t, c, g, other or unknown
  misc_feature (649)..(649): "n" may be a, t, c, g, other or unknown
  misc_feature (669)..(669): "n" may be a, t, c, g, other or unknown
  misc_feature (686)..(686): "n" may be a, t, c, g, other or unknown
  misc_feature (709)..(709): "n" may be a, t, c, g, other or unknown
tgtttcttgttgctttggttggttcttcatctacctttctctgtttaaatataaaaatcaggtggaaaatatggaggactttgattaatcaaactagttaagagatcatttagtggtgcgtccacacaatagtcatttctgttttttttctttactttcaacctttctttaggctaaagagaagcttgtttgttttcttttctttttccactcatgtgcacaatgaagtttttagggggttgcaagtgtatagttcatttattttctttcttgtttaacaattaattacactattccaggctatgaagaaaaacacaaatggaagtatcaaccttactggtagagtgcatttctaattctgctttcacagtggtaacgtcttgttctccaaaacgtgtcttcctgtgaacatagctgtctgggtcaggactgctctagagaaatgctatcatgtgtcatgaaagttatacttaactanggttaggccagacaaatactcaatgtcattttaaagaatcagagtgctataattttagctaatcccttttaattccgatgtcattttggtcataagtttctagaccaaactggggagatccccgttaaaaaagtatgtatacctggaacatanattttaagattacccaantttccaaaaattgtgtaaanaggattttggcaacaangtaaggttgaacaagtttaaaantccggtca

SEQ ID NO: 4481 - DNA, 795 bp, Homo sapiens
  misc_feature (593)..(593): "n" may be a, t, c, g, other or unknown
  misc_feature (629)..(629): "n" may be a, t, c, g, other or unknown
  misc_feature (678)..(678): "n" may be a, t, c, g, other or unknown
  misc_feature (758)..(758): "n" may be a, t, c, g, other or unknown
  misc_feature (770)..(770): "n" may be a, t, c, g, other or unknown
  misc_feature (779)..(779): "n" may be a, t, c, g, other or unknown
  misc_feature (782)..(782): "n" may be a, t, c, g, other or unknown
  misc_feature (785)..(785): "n" may be a, t, c, g, other or unknown
gttttctaagacctccctggcccgccatacgccgatcctgaacctacgaaaacccaagactgcgggcacggtggctcatgcctgtaatcccagcactttgggaggccgaggcgggcagatcacgaggtcaagaagtcgagaccagccttgctaacatggcgaaaccctgactctactgaaaatacaaaaattagctgggcgtgatggcgtgcgcgcctgtagtcccagctgctcgggaggctgaggtaggagaatcgcttcaatccgggaggtggaggttgcggtaagcagagattgcgccactgcactctagcctggcgacagagactccttcaaaaacaacaacaacaacaacaacaaaacaaaacctcccaagaccctagtgggcagacacacagccagccaagacatggagaggagcacattagcagaagaagacgcaagtggctggtcctcgagaggacgttgagaggagcatgccaagcaagaagagcacacaacgacaggcaccgacacaccaccggcaggccatgcaccagcagaatgatgcggagtttgacggggcagtcaagagaagagcctgggccgccaangggcccgactccaggggaaaacatctcccttctggntcccccatctgctgagaagctacttctactcaataaaacttgcactcantctccaagcccacgtgttaatccgattctttaagtgtcacctcccaaatgtggaaaatgcattgtctttcttctttcccnaggccaattggncctcaaaanttnagncaaggtttaa

SEQ ID NO: 4482 - DNA, 414 bp, Homo sapiens
  misc_feature (327)..(327): "n" may be a, t, c, g, other or unknown
  misc_feature (369)..(369): "n" may be a, t, c, g, other or unknown
  misc_feature (396)..(396): "n" may be a, t, c, g, other or unknown
gcgccggtggcgggactctggggaaaatggctgcgtcttcgagtggtgagaaggagaaggagcggctgggaggcggtttgggagtggcgggtggtaacagcacacgagagcggctgctgtctgcgcttgaggacttggaggtcctgtctagggaacttatagaaatgctggcaatttcaagaaaccaaaagttgttacaggctggagaggaaaaccaggtcctggagttgttaattcaccgagatggggaatttcaagaactaatgaaattggcacttaatcagggaaaaattcatcatgaaatgcaagttttagaaaaagaagtanagaagagagacagtgatattcagcagctacaaaaacagctanagggagcagaacaaatactggcaacanctgtttaccaagccaagg

SEQ ID NO: 4483 - DNA, 701 bp, Homo sapiens
  misc_feature (631)..(631): "n" may be a, t, c, g, other or unknown
  misc_feature (660)..(660): "n" may be a, t, c, g, other or unknown
  misc_feature (693)..(693): "n" may be a, t, c, g, other or unknown
cgggttttagcatgtataggagattccaaagcagagttacctatatcaattttagtactattattttcatattctactggataagaaattacttatttggaactaagaattattcttgcaacagaagcttatcagtaacactatttgattgctttttgctgtgtgcacaggtgaggacctgtctagacttctatactatgtacattgtattaattttgttcataaattaggtaattgagttatagatactaatttaatatttaaaaaatttagattgttgattttaaatatcagaataaccaaactgtaacaacagtgctgggattttggtatttaaaaagggcagagtataccaagaatattgaaaactggtattgaaatcactacatataattgaattatgaaaaagtacctttaagataataaagcactacataaatatgagctcatatcatatatttgacagtagggcattatttttacaggttaacattcaattaatctgactatgaattagaaaaatcttgaatttgtagagttcatttaactttattaaagcaatttgccaactcagctacagaaatacagaaaatattactatctggagaactacccagtcgtaagtttatcntcgttgaaattgcctaagcagaggattangtggccaatcctcaaggaatagtatacgaaggnttcccgca

SEQ ID NO: 4484 - DNA, 854 bp, Homo sapiens
  misc_feature (661)..(661): "n" may be a, t, c, g, other or unknown
  misc_feature (773)..(773): "n" may be a, t, c, g, other or unknown
  misc_feature (787)..(787): "n" may be a, t, c, g, other or unknown
  misc_feature (820)..(820): "n" may be a, t, c, g, other or unknown
  misc_feature (853)..(854): "n" may be a, t, c, g, other or unknown
tattgtttttttaagcttcttcatctacaagcagagatggtaaaccttgcatatttttgaaagcatttgaagacctcaaatcaactgtttatgtttatgtcaaatctttaagagatttttctacagaatcaatgtctttggttccagcaacaaattatatatatacacccctgaatcaacttaagggtggtacaattgtcaatgtctatggtgttgtgaagttctttaagcccccatatctaagcaaaggaactgattattgctcagttgtaactattgtggaccagacaaatgtaaaactaacttgcctgctctttagtggaaactatgaagcccttccaataatttataaaaatggagatattgttcgctttcacaggctgaagattcaagtatataaaaaggagactcagggtatcaccagctctggctttgcatctttgacgtttgagggaactttgggagcccctatcatacctcgcacttcaagcaagtattttaacttcactactgaggaccacaaaatggtagaagccttacgtgtttgggcatctactcatatgtcaccgtcttggacattactaaaattgtgtgatgttcagccaaatgcagtattttgacctgacttgtcaactcttgggcaaagcagaagtggacgggngcatcatttcttctaaagggtatgggaatgggcaaccaggacaccaatttccaatccttgggagaagtcctaaatacaaggacctttgttccttgaaagggggattttaagncacatccatccggnttacaaaaatcctgacaattagacaattttagnccaacggataaccaatggttcaaagtgggcaann

SEQ ID NO: 4485 - DNA, 749 bp, Homo sapiens
  misc_feature (683)..(683): "n" may be a, t, c, g, other or unknown
  misc_feature (701)..(701): "n" may be a, t, c, g, other or unknown
  misc_feature (734)..(734): "n" may be a, t, c, g, other or unknown
  misc_feature (736)..(736): "n" may be a, t, c, g, other or unknown
  misc_feature (745)..(745): "n" may be a, t, c, g, other or unknown
ctccaagatgtgcatagccaaactgggatagaaggcaaactccccaaagctacctgctggttttgagaggggtggtaagacatggcaattcccaggagtagtagaaaataatatgcctgactaccaacagctcaagtatgcttatttgcacatcctagacttggtgtctgtaagactcagttaccacttttattttcctgtagctaggagttagcaaaaggaactggggccttccagccgagccactaaacctgtcttatttggaatggggattgtccagcgaagggagcaaacatgaattagatgttaagctattgagctgaagaaaagaaagcagttcacatttaggtgaaatagatgatgttatcaggaagccaggttcccaccagagtcggtgcttggtacctggtctctccagtctcaacagactcaggtcaggtctctcacccaggaagcaaccactcaataaaatagagaacatctgagaattacaaatgtctatgcttgattgctcctctaaatccagtgcataggttaaccctgcatgcccatttcttcctgggcttcttgatggcaatgtgttctaataactggtcttgtgttcatgctaaagacaaacttacatgaagtttttcagtttaagacattccagtgaatggctgctatgtgtttctggcactcantcctaaaccaagtcttanaagatttcagaatgacctttaaagatgccaaananctttttccnttcc

SEQ ID NO: 4486 - DNA, 670 bp, Homo sapiens
  misc_feature (528)..(528): "n" may be a, t, c, g, other or unknown
  misc_feature (595)..(595): "n" may be a, t, c, g, other or unknown
  misc_feature (600)..(600): "n" may be a, t, c, g, other or unknown
  misc_feature (614)..(614): "n" may be a, t, c, g, other or unknown
  misc_feature (628)..(628): "n" may be a, t, c, g, other or unknown
  misc_feature (656)..(656): "n" may be a, t, c, g, other or unknown
gttgcaggcacccaggtgttgactgcgtgtccattgttgttatagttggttgaatctgtcccattaattctccttccccaggcaagactcgtggctgtgacccatgggcctctgaggaggcgttgtaagtccgcccagctccccacttgctgtgctctcactcaatgcgaagggaaccaaggtaccagggccaagtgggtccagacatccacacggattctgaaagggcaggtcaagcaggcacgtggggcccaggttaccccttattccccgctgtggcatgggaagctgggaagggctgggggttggggtatcatgggatgtgcttccttaacggttcctttgtgtcactgccagactttgtccagccatcagccacggcctctcgacagcaccaagatggaagtcaaaggtcagctgatcagctctcctaccttcaatgccccagctgccctgttcggagaggctgccccccaggtgaagtcagagcgtctgcgggggctgcttgaccggcagcggaccctgcangaggccctgagcctgaaacttcaggagctccgcaaagtgtgtctccaggaggcggtgagggcctggncctangggtatcaggcggngaggttgggaggangtgaggatctgggggcccctaggtacanagactttgggtggg

SEQ ID NO: 4487 - DNA, 679 bp, Homo sapiens
  misc_feature (542)..(542): "n" may be a, t, c, g, other or unknown
  misc_feature (615)..(615): "n" may be a, t, c, g, other or unknown
  misc_feature (654)..(654): "n" may be a, t, c, g, other or unknown
  misc_feature (663)..(663): "n" may be a, t, c, g, other or unknown
  misc_feature (669)..(670): "n" may be a, t, c, g, other or unknown
aagagcagtaacacaaacagggctgaaacacgccctcctcccgtccccacacccccgcgacttgccatgttgcgggtgatgtgaaggagagaagtgctgtggcccttcagggagcacagacctaggggctccctgagccagggctgtgacaccctctttggggctctgcggtttctggtatcttcaaacttccgggcaccactgcattccccttgtccagacacaggtgcccacagcagaagccgcttgtggttcatcagatccagctgcagacttgcatagaaccggcgcctttgccggcgcctggagctgcctgcccagctgcagcagctggtgtgtccggctctgcgcagtggccaaaccctgcgttcgctcgcctgcacacccctcgctgttccgtgcctggctcaccctcggcaggcgtggaatcctggctggtagcatgagctgagcacagcctgccaggccacgtcagtggaacaagtctggcggggcctgatcaaaactcaggcaaaggcaccactggtcacagagctttctanctggaaaagcaacacctgaaggatcccgtgacacaatcaacctgctaaggagatccctggccaaccctgaaangctgcaggaaactgcctccatccaaggcctctttaaaanaagggaganttgcannagaaccgtt

SEQ ID NO: 4488 - DNA, 771 bp, Homo sapiens
  misc_feature (711)..(711): "n" may be a, t, c, g, other or unknown
  misc_feature (743)..(743): "n" may be a, t, c, g, other or unknown
  misc_feature (750)..(750): "n" may be a, t, c, g, other or unknown
  misc_feature (759)..(759): "n" may be a, t, c, g, other or unknown
  misc_feature (763)..(763): "n" may be a, t, c, g, other or unknown
ctgtacaagtttactgctagtgcctcacatacagagagaaaactgaaacaggcaataaactattcaaaaagtttagacatggagaaaggagttgagaatgacctaagctatcagaatatagaggaagaaattgttgagcttccagatttggattacctgcgaaccatgactcatatagtctttgtagattttgataactggtcaaacttttttggtcatctaccagggcatctaaaccaaggaacatttatttggggctttcaaggaggaaacaccaattggaagcctccgctcaactgtaagatttataactacctgaacaggattggatgcttcttccttcatcctcgctgtagtaaaagaaaagatgctgctgattttgccatatgtatgcatgctggccgtctagatgaacaactacccaagcaaattcctttcaccatcctctcaggagatcaaggttttctggagctagagaatcaatttaagaagactcaagaggccagctcatatactaaaccctcaccacttagagggagatatgatgtgtgccttgttaaatagcatatctgataccaccaaagaatgtgacagtgatgataacatgggtgccaaaaatacttcaataggagaagaatttatatccacagaagatgtggaattagaagaagctattagaagaagtcctgagggaaatggtaattaaagatntttaccacacaacatcaagtgggccttgaaanaagaccngagataacnaaantccttgag

SEQ ID NO: 4489 - DNA, 764 bp, Homo sapiens
  misc_feature (633)..(633): "n" may be a, t, c, g, other or unknown
  misc_feature (706)..(707): "n" may be a, t, c, g, other or unknown
  misc_feature (719)..(719): "n" may be a, t, c, g, other or unknown
  misc_feature (743)..(743): "n" may be a, t, c, g, other or unknown
  misc_feature (757)..(757): "n" may be a, t, c, g, other or unknown
gtgtcttggaattcgttcttttgctgatgcccaaggttgtacagatttgcataaagtggctcacaattatactatggagcatttcatggaagtaatcagaaaccaggaatttgtattattaccagccagcgaaattgcaaagctcttggctagtgatgacatgaacattcctaatgaggagacaatattgaatgcacttcttacttgggtccgtcatgatttggaacagagacggaaagatctaagtaaacttttggcttatattaggctacctcttcttgcaccacagttcctggcagacatggaaaataatgtactttttcgggatgatatagaatgtcagaaactcattatggaagcaatgaagtaccatttattaccagagagacgacccatgttacaaagtcctcggacaaaacctaggaagtcaactgttggtacattatttgcagttgggggaatggattcaacaaaaggagcaacaagcattgaaaagtatgatctccgtacaaatgtgtggactccagtagcaaatatgaatgggaggaggctacagttcggtgttgcagtgctagatgacaaaactgtatgtggttggaggaagagatggactgaagactttgaatactgtanaggtgctacaaccccaaaacaaaaacttggagtgtgatgccacctatgtccacacatagacaatggccttggnngtggctgtaccnggaagggcccatgtatgcccgtanggaaggacatgatnggctgga

SEQ ID NO: 4490 - DNA, 693 bp, Homo sapiens
  misc_feature (547)..(547): "n" may be a, t, c, g, other or unknown
  misc_feature (595)..(595): "n" may be a, t, c, g, other or unknown
  misc_feature (654)..(654): "n" may be a, t, c, g, other or unknown
  misc_feature (662)..(662): "n" may be a, t, c, g, other or unknown
  misc_feature (689)..(690): "n" may be a, t, c, g, other or unknown
tacaaagcaaaccaggagaattttcataatacctgataactatgtaagacttggaatatttgaatttctaggacatgggattgtgcaaccattcattttatcccataatattgaaatctccctcagataagcctctcggcacctaatagagttttcttagtgaagggctacctttctgtgggtaacagggaagggcaaaataaacaaccaaataatatcataatcacgagtgtcaatgattgctggaacaggtgggggttggtcattaaattctagttgtttccactattccagtaggagttgtgtgaatgttagcaaaagaccagggtgttacgatctgactgtgtttcatcaattgccttgacttttggatgaaatgcgatttgaggacatatcattattagatttgccacagattccaatttttttctctaatatgaggctaaccatgatgtcctttcccaggaaggacaatctctcctttatcagggaaaaatcggtaagggcttcctcaattttctccttcatccccaccacagagtcatanaggtcaagtccttttcttgggaaacctaaaaaatgcaaattccaaggntgctgctaaggtgtactaattttggcacagtgacatgccctgtcacagggcgtatgtgntctgttanacaagttgaaaatattgggttaaaccnnatt

SEQ ID NO: 4491 - DNA, 725 bp, Homo sapiens
  misc_feature (543)..(543): "n" may be a, t, c, g, other or unknown
  misc_feature (587)..(587): "n" may be a, t, c, g, other or unknown
  misc_feature (667)..(667): "n" may be a, t, c, g, other or unknown
  misc_feature (688)..(688): "n" may be a, t, c, g, other or unknown
  misc_feature (699)..(699): "n" may be a, t, c, g, other or unknown
  misc_feature (701)..(701): "n" may be a, t, c, g, other or unknown
  misc_feature (707)..(707): "n" may be a, t, c, g, other or unknown
tttattttctgatctcagaagaattgtatattgggataagtttttaattctataacttaaaagtaaaaatcctttgtaattttatgttctaatagttttagcagtttggtgtgattacacagagcacatgcatattaaccaaaataagatcatattatataccattgtataattttttctttttattaccaaattggtacattgaatactacttcacctttttatggctgcttagtgttccattttattactgattttaataactcccaattgatgaacattggggttgttcccaaatttcccctattatgggtaaagttatgttcataatgtctagctatatttctgtgtacatttataatctttaggctaaattcctggaggtagaattgctagatccacatgtatgcacagtttaaaggtgctttttcatagcaatttatggccccaagaaagtgagagtgagtgtctttgtttatgttgctatgaaaggacacctggagctgggtaatttataaagaaaagaggtttatttggctcacngttctgtgggctatgaaagaagcatggtgccggcatctgtttcnagtgagggcttcaggctgtttccactcaaggtggaaggggaaggggggagcctgtgtgtgcaagatcacctggcaagagnaggaagaaggaaagagggganggagggagganangaggtnagtgggctttttttttaa

SEQ ID NO: 4492 - DNA, 830 bp, Homo sapiens
  misc_feature (569)..(569): "n" may be a, t, c, g, other or unknown
  misc_feature (658)..(658): "n" may be a, t, c, g, other or unknown
  misc_feature (781)..(781): "n" may be a, t, c, g, other or unknown
  misc_feature (797)..(797): "n" may be a, t, c, g, other or unknown
  misc_feature (804)..(804): "n" may be a, t, c, g, other or unknown
  misc_feature (812)..(812): "n" may be a, t, c, g, other or unknown
  misc_feature (814)..(814): "n" may be a, t, c, g, other or unknown
aaaagcgctagggttgcaagtggcaccaagagacgtgcccttgtcccggggtccatttgagggtgagcgtgttggtgccgagctgtttttttgttttgttttgttttgttttgtttttgagaccgaatctcgttctgtcgcccaggctggaatgcagtggtgtgatcttggctcactgcaacctccaccttccgggttcaagtgaatctcctgcctcagcctcctgagtagctgggattactggcacccaccaccacgaccagctaatttttgtatttttagtagagacgggttttcaccatgttggccaggatggtctcaatctcctgacctcaggcggtctgccttcctcagcttcccaaagtgctgggattacaggtgtgagccaccgcacccggccagtgctgagctgttttgacaacttggaccccgggtcctctgtgggtaggaaaatcagctccctctttgctcctctggggcagctgcacctcgggccagctttctgcctgtctgcctgccggcactgctgggtcgctgtacccaaacgcacagccggtgccccgtgctanaaggtcttcaagtttccagaagaaccaaagcatctttggacctacctaagggaaggacctgcctgtgaacctttgccctgtcctggganggtccagctttggggctgaaatgggcaagcacccaacgctggggccgtctgggtgcctggaccccaccttgctgggtgggcccctttttggcaatggggcctccctgggggcctggcctgttnaaccgggggaattctngggggtnggaagctngncctggtggggtggggt

SEQ ID NO: 4493 - DNA, 768 bp, Homo sapiens
  misc_feature (692)..(692): "n" may be a, t, c, g, other or unknown
  misc_feature (717)..(717): "n" may be a, t, c, g, other or unknown
  misc_feature (736)..(736): "n" may be a, t, c, g, other or unknown
  misc_feature (754)..(754): "n" may be a, t, c, g, other or unknown
  misc_feature (764)..(764): "n" may be a, t, c, g, other or unknown
aaagcaaacctaggaagtagctttccaacataaagtggaggtttcaacacaggagactttaagcaagttccagtgtgtctatatttggtctggctgatcggctggactctggccttccccgctcacgttagcagacagctctgccctagtgggcgcttagcctgcgacggcagcccgagaggatgtctaacaagcttctttctccccacccccattcagttgttctcaggtctgaattcaaaatggcctcatctcctgctgtccttcgagcgtcccggctgtaccaatggagcctgaagagttcggcgcagttcctggggtctccacagctgaggcaggttggtcagatcattagggttcctgctcggatggcggcgacgctgatcctggagcctgcgggccgctgctgctgggacgaaccggtgcgaatcgccgtgcgcggcctagccccggagcagccggtcacgctgcgcgcgtccctgcgcgacgagaagggcgcgcttttccaggcccacgcgcgctaccgcgccgacactcttggcgagctggacctggagcgcgcgcccgcgctgggcggcagcttcgcggggcttgagcccatggggctgctctgggcccttggagcccgagaaaacctttggtgcggctggtgaaaccgcgacgttgcgaacgccctttgggcgttggtgctnggaggtgctgggatgggccaagaancccgaaccccggggcgggntgctggtgccaaaacgcngggaagaagnggcc

SEQ ID NO: 4494 - DNA, 541 bp, Homo sapiens
  misc_feature (444)..(444): "n" may be a, t, c, g, other or unknown
  misc_feature (500)..(500): "n" may be a, t, c, g, other or unknown
  misc_feature (504)..(504): "n" may be a, t, c, g, other or unknown
  misc_feature (517)..(517): "n" may be a, t, c, g, other or unknown
  misc_feature (539)..(539): "n" may be a, t, c, g, other or unknown
actcgaacgcgcgacggcggggggaagatggcggagtccggcggtagcagcggtggtgctggtggcggcggcgctttcggcgcgggcccgggccccgagcgcccgaacagcacggccgacaagaacggggccctcaagtgcaccttctcggcacccagccacagcaccagcctcctgcagggcctggccaccctccgcgctcagggccagctcctcgatgttgtgctgactattaacagagaggcctttcctgcacacaaggtcgtcctggctgcctgcagcgactacttcagggccatgttcaccggcggcatgcgggaggcaagccaggacgtcatcgagctgaagggcgtgtcggcccgtggcctgcggcacatcatcgacttcgcctacagcgccgaggtgacactggacctggactgcgtgcaggacgtgctgggcgcngccgtgttcttgcagatgctgccccgttgtggaagctgtgcgaagagttcctgaanggcnggcatgaagcgtngagaccttgcctcaacatcggnca

SEQ ID NO: 4495 - DNA, 714 bp, Homo sapiens
  misc_feature (548)..(548): "n" may be a, t, c, g, other or unknown
  misc_feature (566)..(566): "n" may be a, t, c, g, other or unknown
  misc_feature (677)..(677): "n" may be a, t, c, g, other or unknown
  misc_feature (684)..(684): "n" may be a, t, c, g, other or unknown
  misc_feature (702)..(703): "n" may be a, t, c, g, other or unknown
  misc_feature (707)..(707): "n" may be a, t, c, g, other or unknown
ttagcccttccctttctgcttccatttctatcccaaaatatgagccacaaagagaaatttggggaattagaaggaagagacttaagggaaaatgtatatgtcattggtgtatgtgtcagttttcagtcataacttgggttgggggaagtcagtgtaccctttactcttgctgaggaaatttcttctgagccttagccacatcccacttgcccagggcatcattcttttcttttttttttctggcatatatctctacttcagattcaaacttggccattacctctggccagccaagcagctgtcccctgagaggggggccaactctcctgcccctcactgcctgcctcccaaggctgccctagggctcagctgaagaaggcggttgtgctttgctgccccctgttgctcaagtcctgcttttccataggagctgccgggctgtatgtctggatgtgacttctccaggcaggtcctcctctcctgcccgcagtgctctggctcctcagggtaggtttctgtccaggacatggcccctgaaagggcttggnaaaagcccccttgcgtantactgggctgagcttctaacttgctgccccaagaactccagagagtgacccaaacatctggtatagcctctaatcttaactagtcaagtcatggtttctccttcaaggccnccttccnaagaacagtttccctggnngaancagaata

SEQ ID NO: 4496 - DNA, 776 bp, Homo sapiens
  misc_feature (626)..(626): "n" may be a, t, c, g, other or unknown
  misc_feature (702)..(702): "n" may be a, t, c, g, other or unknown
  misc_feature (706)..(706): "n" may be a, t, c, g, other or unknown
  misc_feature (751)..(751): "n" may be a, t, c, g, other or unknown
  misc_feature (763)..(763): "n" may be a, t, c, g, other or unknown
  misc_feature (772)..(772): "n" may be a, t, c, g, other or unknown
gagaccaagccctgagacacagtgttgagagccaagacataaagttgtggagattcagacccagagcccagcagggcacaggctggaggggtgatgtgagtgatcagtaacactatgaagactctgctcctggatcaggaatgcttttttgtccctgtttttggattttccaccatgatcagccaatgcagaaagaaatctaaaggtgaaggaaaggcagcgttcagcactgagcaagtccatgttggagaaagttcacagggaattggaaatccttgtcttcgtggttcctggctcagcaggacccctgtggggcctctccctctcttgggaaagagattgctctagaaggtttactacaccagtgaggagaagatgagcgcaggggggattggccggctgagggcgaaatcaagactggagccaagtgcgctgagctctcacatgaggtcctttgctcctgttccctggaggcataagtggctggggtagagagaagcaggggtatttcttctgtcctttcttgcttagggattgggggtggaaatctccccgcatctaaggaaatttgaaaaagacaaactatggctgcttcttcaagcaaaccacctcaacacactatccangggataaaacccgcttgctgctgctaaattatgccaagagagaacattctgatatttctccccaaattctaggcangcancgttaacttggggcttaaaaggcatggagtttttgagttgcaaanctaaggttgaantgctgaaanctac

SEQ ID NO: 4497 - DNA, 355 bp, Homo sapiens
  misc_feature (346)..(346): "n" may be a, t, c, g, other or unknown
  misc_feature (348)..(349): "n" may be a, t, c, g, other or unknown
gttttgccggcagcccccgggcagcgttcatagctcctgcccgggcgggcgcgcggcggcggcggcagaggcggctgagcctgagcggggatgtagaggcggcggcagcagaggcggcactggcggcaagagcagacgcccgagccgagcgagaagagcggcagagccttatcccctgaagccgggccccgcgtcccagccctgcccagcccgcgcccagccatgcgcgccgcctgctgagtccgggcgccgcacgctgagccctccgcccgcgagccgcgctcagctcgggggtgattagttgctttttgttgttttttaatttgggccgcggggagggggtttngnngtggtc

SEQ ID NO: 4498 - DNA, 717 bp, Homo sapiens
  misc_feature (557)..(557): "n" may be a, t, c, g, other or unknown
  misc_feature (632)..(632): "n" may be a, t, c, g, other or unknown
  misc_feature (660)..(660): "n" may be a, t, c, g, other or unknown
  misc_feature (684)..(684): "n" may be a, t, c, g, other or unknown
  misc_feature (690)..(690): "n" may be a, t, c, g, other or unknown
  misc_feature (693)..(693): "n" may be a, t, c, g, other or unknown
caactcactgatgaaaaggaataaaccacaaatgcctgcaacgccatgatgaatctcaaaacatgctgagtgtagagaagccagacacaagagtagatactcctatacaattccacttacatggaaatctagaaaagacaattcgaatatatagtggcaaaaagcagaagagtggttgcctggaaccagggtgggaatgaagattaactgcccagaggcataaaaaatggggtggtgggggcggtgatggaaaagtgctatgccttcactgtacctttgtcaaaacttgttgaactgtatacttcaaatgggtgtgtgttttattgaaggtaaatttgaccccaataacatttatttttaaaaattaagagcaaacagaaaaagcttagactaggaatctttaatttgaactataattctgtctactgtttccactgaggtggtctttcagcaaatgactcagtagttttaagcctcagtttcttcaactgtaaagtgggaataacaacaggcaccccatggggttgcctatgaaatgcaatgatgaatgacctaanccttaatgagcgccctatgtgccaagcactgtgctgaatgctttgcagaaaacgaaattcatccttatcagatangttcctggaacactggaaaagcactatncaaatgttagttacagggaatccntgcacnttngaaggggcctgttaaattggtgaa

SEQ ID NO: 4499 - DNA, 685 bp, Homo sapiens
  misc_feature (383)..(383): "n" may be a, t, c, g, other or unknown
  misc_feature (474)..(474): "n" may be a, t, c, g, other or unknown
  misc_feature (479)..(479): "n" may be a, t, c, g, other or unknown
  misc_feature (499)..(499): "n" may be a, t, c, g, other or unknown
  misc_feature (509)..(509): "n" may be a, t, c, g, other or unknown
  misc_feature (544)..(544): "n" may be a, t, c, g, other or unknown
  misc_feature (642)..(642): "n" may be a, t, c, g, other or unknown
  misc_feature (653)..(653): "n" may be a, t, c, g, other or unknown
  misc_feature (658)..(659): "n" may be a, t, c, g, other or unknown
  misc_feature (678)..(678): "n" may be a, t, c, g, other or unknown
tttttaaccacctttactctcttctacatgaagagttggtggcttaatatgaaaatccaggttattttgtggccttatcccctaaaatattttaggcattaccatatcagtttttatttttatgtttatttattattattattttttgagacagagtctcactgtcttgcccaggctggagtgcagtggcctgaacttagctcaccgcaacctccacctcccgggttcaagcaattctcctgcctaagcctctcgagtagctgggactacaggcgtgcgccaccatgcccggctaatttttgtatttttagtagagtcgggggtttcactatgttggccaggctggtctcaaactcctgaccttgtggtccacccgcctcagnctcccaaagtgctgggattacagtcatgagccaccatgcccagcctaccatatcagtttttaataacttgaactgaaattattggcttggnaatanttgggcaggccattaattcncattagaaanttacttaatatttcaaaaaattgactaaaactggnaatctttggggaggcccattttgcaagtggaaacctgtatttatcattaagtttgtctttaactatttgttaacagattttaacagttcaaatgaaanatgttaacganatgcnntttgagtccggggataccncaggtta

SEQ ID NO: 4500 - DNA, 692 bp, Homo sapiens
  misc_feature (298)..(298): "n" may be a, t, c, g, other or unknown
  misc_feature (305)..(305): "n" may be a, t, c, g, other or unknown
  misc_feature (455)..(455): "n" may be a, t, c, g, other or unknown
  misc_feature (598)..(598): "n" may be a, t, c, g, other or unknown
  misc_feature (604)..(604): "n" may be a, t, c, g, other or unknown
  misc_feature (628)..(628): "n" may be a, t, c, g, other or unknown
  misc_feature (656)..(656): "n" may be a, t, c, g, other or unknown
  misc_feature (688)..(688): "n" may be a, t, c, g, other or unknown
aagtaggcggagaaagcagaggaggaccggcgggccaagctttcctagcctgacagcagccatttcggaacgtacgtcccagccctctttagctacttagcgcctctgggcccgagaacacctgctccttggctcagtctggcgccaccggcatcacggaactgtacttcccagagacgtcacaccgggagacttccgattcccgctcttgagattggactctcacgtgcaggagccagtcctcgctgggctctagcgggcttctgatggaggagctactcctctgggaggacagaanttagcancagcctctgtcaccatccaaagattacaacccatgaaaccattgaatttgtgccttgtatcagaaagcaaaggagaatgaaaaagcacagctaacattgcttgaggatctaggcgattaattctttagactgtcatcatgggtatccgangactaatgagttttgtggaagatcataagcaatgaattcttcactgatttgaagttgcgggacacaaaaaattgtcaatgatggggtatgctccttttccaccgtctttgcttcaagttcaaacttggatttccggtatggangggacnatgattcctttgcagaatgttggncaaaaaattctttgaatcactgtttgcnttgtaaaaaaatgcccaaaatgttggattaanatgg

SEQ ID NO: 4501 - DNA, 678 bp, Homo sapiens
  misc_feature (607)..(607): "n" may be a, t, c, g, other or unknown
  misc_feature (633)..(633): "n" may be a, t, c, g, other or unknown
  misc_feature (651)..(651): "n" may be a, t, c, g, other or unknown
  misc_feature (655)..(655): "n" may be a, t, c, g, other or unknown
  misc_feature (672)..(672): "n" may be a, t, c, g, other or unknown
aagtcatgctggaaactccggagtacagaagtaggtttacgagtgaagagaccctgatgttctgcatgagggtgatggtgggagtcatcatcctctatgaccatgtccaccctatgggagctttctgcaagacatccaagatcgatatgaaaggctgcataaaagttttgaaggagcaggccccagacagtgtggaggggctgctaaatgccctcaggttcactacaaagcacttgaacgatgaatcaacttccaaacagattcgagcaatgcttcagtagagctctgctcaaagaagaggatctatgtgctgacctcagaagatgtatatgtttacataatttaatacagattgatgttaatacttgtgtatttacataaccgtttccttcttgtcactgaaatatatggaccttaatttgtatcctgactgactcaacccagcagagcataaattgacttgagagccttacctttgatgtctgaaatgaaacccccttctccaaaggcaaaattcggagactttgatctttgctactggagtcctttaacaacacctataacgataaaaaattcctaattgtttgtggtagtattttaattctanatgtgttatctctccgggaagtatangtttataggaaacacaanatanttgatttcccggtgtcngttcag

SEQ ID NO: 4502 - DNA, 788 bp, Homo sapiens
  misc_feature (645)..(645): "n" may be a, t, c, g, other or unknown
  misc_feature (648)..(648): "n" may be a, t, c, g, other or unknown
  misc_feature (684)..(684): "n" may be a, t, c, g, other or unknown
  misc_feature (730)..(730): "n" may be a, t, c, g, other or unknown
  misc_feature (758)..(758): "n" may be a, t, c, g, other or unknown
  misc_feature (762)..(762): "n" may be a, t, c, g, other or unknown
  misc_feature (776)..(776): "n" may be a, t, c, g, other or unknown
  misc_feature (784)..(784): "n" may be a, t, c, g, other or unknown
ctgcaccgggccaggcaagatggcggccatggagaccgagacggcgccgctgaccctagagtcgctgcccaccgatcccctgctcctcatcttatcctttttggactatcgggatctaatcaactgttgttatgtcagtcgaagacttagccagctatcaagtcatgatccgctgtggagaagacattgcaaaaaatactggctgatatctgaggaagagaaaacacagaagaatcagtgttggaaatctctcttcatagatacttactctgatgtaggaagatacattgaccattatgctgctattaaaaaggcctgggatgatctcaagaaatatttggagcccaggtgtcctcggatggttttatctctgaaagagggtgctcgagaggaagacctcgatgctgtggaagcgcagattggctgcaagcttcctgacgattatcgatgttcataccgaattcacaatggacagaagttagtggttcctgggttattgggaagcatgacactgtctaatcactatcgttctgaagatttgttagacgtcgatacagctgccggaggattccagcaagagacagggactgaaatactgtctccctttaactttttgcatacatactgggttgagtcagtacatancantgggaagctgcaaaaggggccgaaacaaaaaatggnagtttttctaaccaaatgtccaaaccaaatgggctccaaatccaanctgctatttgacatgggtttaataatangggngctactttttaccngacggggnttta

SEQ ID NO: 4503 - DNA, 857 bp, Homo sapiens
  misc_feature (766)..(766): "n" may be a, t, c, g, other or unknown
  misc_feature (789)..(789): "n" may be a, t, c, g, other or unknown
  misc_feature (800)..(800): "n" may be a, t, c, g, other or unknown
  misc_feature (820)..(820): "n" may be a, t, c, g, other or unknown
  misc_feature (832)..(832): "n" may be a, t, c, g, other or unknown
agtgtaataaggtcccggagaagtgtcactggccctgagtgggacccggtagcccgttcgctccgcgccggcggcctgtccccgcggcttggcgggctagggcaggggaaatgttgcaggaggagtcggacctctctctcattattgcccagatagtccaaaagctcaagggctccaatttgtactctcagctggaacggcaggcctgggccagtcttcagagacctgagattaaacttgaatcactgaaagaagatattaaggaattctttaaaatatcaggttgggagaagaaacttcagaatgctgtttatagtgaactgagtgtgtttcctttacctagtcatcctgctgcacctcctgaacatcttaaagaacctttggtatacatgaggaaagcacagggaagttgggaaaaaagaattttgaagagtttaaatagtatgtgcactgaactgagtatcccactggcacgaaagaggccagttggagaacagaaagaacttcttaataaatggaatgaaatgggaactgatgaaccagatttaagccttttcagacctgtttatgcacctaaggattttcttgaggtattaattaatcttcgcaacccaaattatgaaaacggtgattctccctagtttcagggactcatttggggtttaattcaagttccactgaaaagtaaaagacatcccctgaaatttgaaaagaatgcctttgtgggaacttgggcttaaaattattagggacaaactggggtatnagaatgaattcctacacaaagtngccctcctggnaaacttttttgaaaaattgngcaatgttacgntttttggggccaaaaaaaggttcct

SEQ ID NO: 4504 - DNA, 411 bp, Homo sapiens
  misc_feature (375)..(375): "n" may be a, t, c, g, other or unknown
  misc_feature (400)..(400): "n" may be a, t, c, g, other or unknown
  misc_feature (411)..(411): "n" may be a, t, c, g, other or unknown
attaatatatgaagaaaactgaacagtccttaatctgtgtaggcattacatccatttgtaggaggtatttggtgacttggtacaggtttctttgttttgtgtggtttgttgaagatgcaatgaccgggatgaatgagtgaacagctgggtgaggcaggggatgggcattatgaagttgggggatatattgtagatgaaacagatgaccctaaggaggtaatgagggggtggactaaagaatgacgaatgggagaagggaaaatattgaattcatcttagcacaagtatatcatcctttgaagaataatccaaaacacattccagacattaattgtgaaattcctgaaaaatgtgggtgtgcttaacatctcccangctatggtgcaagcagagatgatantgttgctttan

SEQ ID NO: 4505 - DNA, 855 bp, Homo sapiens
  misc_feature (590)..(591): "n" may be a, t, c, g, other or unknown
  misc_feature (626)..(626): "n" may be a, t, c, g, other or unknown
  misc_feature (710)..(710): "n" may be a, t, c, g, other or unknown
  misc_feature (782)..(782): "n" may be a, t, c, g, other or unknown
  misc_feature (790)..(790): "n" may be a, t, c, g, other or unknown
  misc_feature (843)..(843): "n" may be a, t, c, g, other or unknown
  misc_feature (845)..(845): "n" may be a, t, c, g, other or unknown
  misc_feature (849)..(849): "n" may be a, t, c, g, other or unknown
gtgatccggggccccgggaacccgagctggagctgaagcgcaggctgcggggcgcggagtcgggagtgcaggcctgagtgttccttccagcatgtcggagggggagtcccagacagtacttagcagtggctcagacccaaaggtagaatcctcatcttcagctcctggcctgacatcagtgtcacctcctgtgacctccacaacctcagctgcttccccagaggaagaagaagaaagtgaagatgagtctgagattttggaagagtcgccctgtgggcgctggcagaagaggcgagaagaggtgaatcaacggaatgtaccaggtattgacagtgcatacctggccatggatacagaggaaggtgtagaggttgtgtggaatgaggtacagttctctgaacgcaagaactacaagctgcaggaggaaaaggttcgtgctgtgtttgataatctgattcaattggagcatcttaacattgttaagtttcacaaatattgggctgacattaaagagaacaaggccagggtcatttttatcacagaatacatgtcatctgggagtctgaagcaatttctgaagaagaccaaanngaaccacaagacgatttaatgaaaaggcatggaancgttgggtgcacacaaatcctctctgcccctaaagctacctgcactccctgtggacccccccatcaatccaatggggaaacctngaccctgttgacaaccaatcttcaatccaagccacaaacgggactcatcaaagaattggggtcctgttgggntccctggncaaccaattcaaacaaatcaatggtgtaagaacctttttccaagaaagagccncnaggnaaatcc

SEQ ID NO: 4506 - DNA, 768 bp, Homo sapiens
  misc_feature (663)..(663): "n" may be a, t, c, g, other or unknown
  misc_feature (692)..(692): "n" may be a, t, c, g, other or unknown
  misc_feature (720)..(720): "n" may be a, t, c, g, other or unknown
  misc_feature (745)..(745): "n" may be a, t, c, g, other or unknown
  misc_feature (751)..(751): "n" may be a, t, c, g, other or unknown
  misc_feature (765)..(765): "n" may be a, t, c, g, other or unknown
atgtgactgcactgaaatctaaggatcggaaagaatctgtggttcaggaggaaaattccttttcagaaaatcagccatttccttctcttaagatggttttagagtctttgccagaagatgtagggtttaacattgaaataaaatggatctgccagcaaagggatggaatgtgggatggtaacttatcaacatattttgacatgaatctgtttttggatataattttaaaaactgttttagaaaattctgggaagaggagaatagtgttttcttcatttgatgcagatatttgcacaatggttcggcaaaagcagaacaaatatccgatactatttttaactcaaggaaaatctgagatttatcctgaactcatggacctcagatctcggacaacccccattgcaatgagctttgcacagtttgaaaatctactggggataaatgtacatactgaagacttgctcagaaacccatcctatattcaagaggcaaaagctaagggactagtcatattctgctggggtgatgataccaatgatcctgaaaacagaaggaaattgaaggaacttggagttaatggtctaatttaagataggatatatgattggatgcctgaacaaccaaatatattccaaagtgggagcaattgggaacgcctgaaancaaggaattgcccaaaagccttaaagaancctgttttggggtccccaactggttaanccgccttttggtcccctccaaaccnttttgnggttgggggggaantcc

SEQ ID NO: 4507 - DNA, 652 bp, Homo sapiens
  misc_feature (455)..(455): "n" may be a, t, c, g, other or unknown
  misc_feature (537)..(537): "n" may be a, t, c, g, other or unknown
  misc_feature (562)..(562): "n" may be a, t, c, g, other or unknown
  misc_feature (565)..(565): "n" may be a, t, c, g, other or unknown
  misc_feature (622)..(622): "n" may be a, t, c, g, other or unknown
  misc_feature (643)..(643): "n" may be a, t, c, g, other or unknown
  misc_feature (647)..(647): "n" may be a, t, c, g, other or unknown
attaaaaatgtactcattttaggaaaattctcctaagatacttgagttataattgctatagaggacatgtacatattctcagttgatagagaatacttgtcctgaaagtgcttcatgtcctggagggactcagaggtctcatggttcaaagattcaggtggttctgagacatgatctgtttattctcttctatcccattatcgctttaactttattgtatttttactttttggaaatgagaatagtgggtctttgttactggacccgtgactttaaaaaaggaagttctttttatttattattattattatttaattcaatcctccaagacatcagaaaaaagagggagttcttgaatatcttttggcttagttattatttgatttcatatatcatctcagatttacctaaacttggataaatgtaattcatatacttatttgataaaaatgtcntttaaaaaattttaattcaccaaactacttcaggaaataaaatgtttccttaagaaaaaatatgtttagtaatgcgttttcncctgaaaataacagggtaaaaaagntcnccttaatggatgccagggtaataaggcaagtttaagctcctttcaaaacccctaaanttggggggaaagaaatttggncccnttggg

SEQ ID NO: 4508 - DNA, 779 bp, Homo sapiens
  misc_feature (583)..(583): "n" may be a, t, c, g, other or unknown
  misc_feature (616)..(616): "n" may be a, t, c, g, other or unknown
  misc_feature (662)..(662): "n" may be a, t, c, g, other or unknown
  misc_feature (700)..(700): "n" may be a, t, c, g, other or unknown
  misc_feature (711)..(711): "n" may be a, t, c, g, other or unknown
  misc_feature (722)..(722): "n" may be a, t, c, g, other or unknown
  misc_feature (765)..(766): "n" may be a, t, c, g, other or unknown
agggagctctcgaggcaacgccggggcgcccgaggtctggaaggcgcagaaatggagcaagagccacaaaatggagaacctgctgaaattaagatcatcagagaagcatataagaaggcctttttatttgttaacaaaggtctgaatacagatgaattaggtcagaaggaagaagcaaagaactactataagcaaggaataggacacctgctcagagggatcagcatttcatcaaaagagtctgaacacacaggtcctgggtgggaatctgctagacagatgcaacagaaaatgaaagaaactctacagaatgtacgcaccaggctggaaattctagagaagggtcttgccacttctctgcagaatgatcttcaggaggtgcccaagttatatccagaatttccacctaaagacatgtgtgaaaaattaccagagcctcagtcttttagttcagctcctcagcatgctgaagtaaatggaaacacctcaactccaagtgcaggggcagttgctgcacctgcttctctgtctttaccatcacaaagttgtccagcagaagctcctcctgcttatactcctcaanctgctgaaggtcactacactgtatcctaagggnacagattctgggggagttttcatcagttggagaaggagttttatanggaatcattctcaagccaccgcctccttgagaccttanggctgggaatnccagattgaantgatttttgatacccaaaatgggagtacaagatttttttttgnnaaatccctggcaa

SEQ ID NO: 4509 - DNA, 840 bp, Homo sapiens
  misc_feature (663)..(663): "n" may be a, t, c, g, other or unknown
  misc_feature (776)..(776): "n" may be a, t, c, g, other or unknown
  misc_feature (785)..(785): "n" may be a, t, c, g, other or unknown
  misc_feature (818)..(818): "n" may be a, t, c, g, other or unknown
  misc_feature (822)..(822): "n" may be a, t, c, g, other or unknown
  misc_feature (834)..(834): "n" may be a, t, c, g, other or unknown
aatgtcttagaaaaaggctttctaaaagaaaaagagcaagaggccatttcttttcaagatagatacaaagaacttcaggaaaaacataaacaagaattggaagacatgaggaaagctggtcacgaagccctcagcattattgtggatgaatataaggcactactgcagtcttcagttaagcaacaagtagaagctattgaaaaacagtacatttctgcaattgagaaacaggcacacaagtgtgaggagttgctaaatgctcagcatcagaggctccttgaaatgctagatacagagaaggaactgttaaaagaaaaaataaaggaagctttgattcagcaatctcaagaacagaaggaaatattggaaaagtgtttggaggaagaaaggcaaagaaataaagaggcattagtatccgctgcaaagcttgaaaaagaagcagtgaaggatgcagttttaaaagtcgtagaagaagaaagaaaaaatttagaaaaagcgcatgctgaagaaagggaattatggaagacagaacatgcaaaagatcaagaaaaagtatctcaggaaattcaaaaagctatacaagaacaaagaaaaataagtcaggaaactgttaaggcagcaataatagaagagcagaaacgaagtgaaaaggctgtggaagangcaatgaaaaagaacaagagatgaatttgatagagtatataaaagaacagaaaaggctcgattaagtcatcccgccaaagaagcctgtccagtttggaactggtcctcccccngtgcacagnaaacagttaagtgcctttaatagcctacgggancaanttgacattggantaaaaa

SEQ ID NO: 4510 - DNA, 803 bp, Homo sapiens
  misc_feature (754)..(754): "n" may be a, t, c, g, other or unknown
  misc_feature (775)..(775): "n" may be a, t, c, g, other or unknown
  misc_feature (784)..(784): "n" may be a, t, c, g, other or unknown
  misc_feature (786)..(786): "n" may be a, t, c, g, other or unknown
  misc_feature (789)..(789): "n" may be a, t, c, g, other or unknown
agccgcctgctagtggcgctgctagccggccggcgcaggctgccgagcgggtgagcgcgcaggccaggccaaagccctggtacccgcgcggtgcgggcctcagtctgcggccatgggggcgtccgcgcggctgctgcgagcggtgatcatgggggccccgggctcgggcaagggcaccgtgtcgtcgcgcatcactacacacttcgagctgaagcacctctccagcggggacctgctccgggacaacatgctgcggggcacagaaattggcgtgttagccaaggctttcattgaccaagggaaactcatcccagatgatgtcatgactcggctggcccttcatgagctgaaaaatctcacccagtatagctggctgttggatggttttccaaggacacttccacaggcagaagccctagatagagcttatcagatcgacacagtgattaacctgaatgtgccctttgaggtcattaaacaacgccttactgctcgctggattcatcccgccagtggccgagtctataacattgaattcaaccctcccaaaactgtgggcattgatgacctgactggggagcctctcattcaagcgtgaggattgataaaccagagacggttatcaagagactaaaggcttatgaagaccaaacaaagccagtcctgggatattaccaagaaaaaaagggggtgcttggaaaacaattctcccgggaacaagaaaaccaaacaaggattttgggccctaaggttntaatggctttccctaacaaanacctaaaangnttnccaacaaaagggaa

SEQ ID NO: 4511 - DNA, 713 bp, Homo sapiens
  misc_feature (353)..(353): "n" may be a, t, c, g, other or unknown
  misc_feature (535)..(535): "n" may be a, t, c, g, other or unknown
  misc_feature (552)..(552): "n" may be a, t, c, g, other or unknown
  misc_feature (616)..(616): "n" may be a, t, c, g, other or unknown
  misc_feature (669)..(670): "n" may be a, t, c, g, other or unknown
  misc_feature (691)..(691): "n" may be a, t, c, g, other or unknown
  misc_feature (695)..(695): "n" may be a, t, c, g, other or unknown
atccgaggcaggcgttggttctgtgcgcctcaggagtataatgtctcaggaaggcgattatgggaggtggaccatatctagtagtgatgaaagtgaggaagaaaagccaaaaccagacaagccatctacctcttctcttctctgtgccaggcaaggagcagcaaatgagcccaggtacacctgttccgaggcccagaaagctgcacacaagaggaaaatatcacctgtgaaattcagcaatacagattcagttttacctcccaaaaggcagaaaagcggttcccaggaggacctcggctggtgtctgtccagcagtgatgatgagctgcaaccaagaaatgccgcagaagcangctgagaaagtggtgatcaaaaaggagaaagacatctctgctcccaatgacggcactgcccaaagaactgaaaatcatggcgctcccgcctgccacaggctcaaagaggaggaagacgagtatgagacatcaggggagggccaaggacatttgggacatgctggataaagggaaccccttcnaagttttacctcactanagtctctgggagttaagccaaagtataactctgggagccctccacatcaagggatattttatcncctttatttgggacgcttgtttcttcaagctcagtttaactactgctttgacnntggactggctcgttaaaacantatncaccaagagttcaaggaa

SEQ ID NO: 4512 - DNA, 778 bp, Homo sapiens
  misc_feature (513)..(513): "n" may be a, t, c, g, other or unknown
  misc_feature (523)..(523): "n" may be a, t, c, g, other or unknown
  misc_feature (615)..(615): "n" may be a, t, c, g, other or unknown
  misc_feature (637)..(637): "n" may be a, t, c, g, other or unknown
  misc_feature (725)..(726): "n" may be a, t, c, g, other or unknown
  misc_feature (728)..(728): "n" may be a, t, c, g, other or unknown
  misc_feature (736)..(736): "n" may be a, t, c, g, other or unknown
  misc_feature (741)..(741): "n" may be a, t, c, g, other or unknown
tatatatgatccccttggcattgttgctgatctttgtctacaatttcatcagacctgtgaaaggcaaggtcagcagcatccaggacagccaggagagcacagacatagatgacgaggaggatgaagatgacaaggaatctgagaaaaaggggttgattgaaagaatctatatggtacaggatattgtttcaactgttcaaaacgtcttggaggaaatagcttcttttggagaaaggattaagaacacatttaactggacggtccccttcctttcatctctggcctgtttgattctggcagcagccaccatcattttgtatttcattccactgcggtacatcattttaatctggggcataaataaatttactaagaagcttcgaaatccctattccatcgacaataatgagctactagacttcctctctagggtaccgtctgatgttcaaaaggtgcagtatgcaagaattgaaactctgcaagcagccacagccccctgcggaagaagcgcancgctctctanggcacacaccgactttggacagcagcacccaatattgggtttggttgagtagaccaatgttatggctgtttcagtgggacccaaggtgtccntctgaaatgcatgccctgtggnacccctctgtatacttcctcctccttcacgtgcacaagacatacacacatgttgcacacaccctcaagcatgggtgtcctaaattgcnnanaggggcancccancgaaaaagcaacaaaccccaaagactgtgaaaagact

SEQ ID NO: 4513 - DNA, 824 bp, Homo sapiens
  misc_feature (502)..(502): "n" may be a, t, c, g, other or unknown
  misc_feature (662)..(662): "n" may be a, t, c, g, other or unknown
  misc_feature (680)..(680): "n" may be a, t, c, g, other or unknown
  misc_feature (733)..(733): "n" may be a, t, c, g, other or unknown
  misc_feature (753)..(753): "n" may be a, t, c, g, other or unknown
  misc_feature (771)..(771): "n" may be a, t, c, g, other or unknown
  misc_feature (786)..(786): "n" may be a, t, c, g, other or unknown
  misc_feature (818)..(818): "n" may be a, t, c, g, other or unknown
ctccctccacctaccacgtctgccctcgccgctctagccctgcgccccagcccggccgcggcacctccgcctcgccgccgctaggtcggccggctccgcccggctgccgcctaggatgaatatcatggacttcaacgtgaagaagctggcggccgacgcaggcaccttcctcagtcgcgccgtgcagttcacagaagaaaagcttggccaggctgagaagacagaattggatgctcacttagagaacctccttagcaaagctgaatgtaccaaaatatggacagaaaaaataatgaaacaaactgaagtgttattgcagccaaatccaaatgccaggatagaagaatttgtttatgagaaactggatagaaaagctccaagtcgtataaacaacccagaacttttgggacaatatatgattgatgcagggactgagtttggcccaggaacagcttatggtaatgcccttattaaatgtggagaaacccaaaaaagaattggnacagcagacagagaactgattcaaacgtcaagccttaaatttccttactcctttaagaaactttatagaaggagattacaaaacaattgctaaagaaaggaaactattgcaaaataagagactggatttggatgctgcaaaaacgagactaaaaaagggnaaaagctgcagaaactangaaattcatctggaacaaggaattaagaataactcaaaaggtggaatttgatnggtcaaagcaagaggattancaagactttctgcctaanagggggaaatcaagnaagttacaacaatggcccaatcaaaccttcgnctggtc

SEQ ID NO: 4514 - DNA, 832 bp, Homo sapiens
  misc_feature (559)..(559): "n" may be a, t, c, g, other or unknown
  misc_feature (565)..(565): "n" may be a, t, c, g, other or unknown
  misc_feature (571)..(571): "n" may be a, t, c, g, other or unknown
  misc_feature (663)..(663): "n" may be a, t, c, g, other or unknown
  misc_feature (690)..(690): "n" may be a, t, c, g, other or unknown
  misc_feature (716)..(716): "n" may be a, t, c, g, other or unknown
  misc_feature (727)..(727): "n" may be a, t, c, g, other or unknown
  misc_feature (769)..(769): "n" may be a, t, c, g, other or unknown
  misc_feature (789)..(789): "n" may be a, t, c, g, other or unknown
  misc_feature (796)..(796): "n" may be a, t, c, g, other or unknown
  misc_feature (823)..(823): "n" may be a, t, c, g, other or unknown
  misc_feature (827)..(827): "n" may be a, t, c, g, other or unknown
atggcccgggaccccccaaacagagttccccccaccactgagggcacccgagggctcctcagctgcctgccagatgtggaaagggccacgctgacgcttctcctggaccacctgcgcctcgtctcctccttccatgcctacaaccgcatgaccccacagaacttggccgtgtgcttcgggcctgtgctgctgccggcacgccaggcgcccacaaggcctcgtgcccgcagctccggcccaggccttgccagtgcagtggacttcaagcaccacatcgaggtgctgcactacctgctgcagtcttggccagatccccgcctgccccgacaatctccagatgtcgcgccttacttgcgacccaaacgacagccacctctgcacctgccgctggcagaccccgaagtggtgactcggccccgcggtcgaggaggccccgaaagccccccgaagcaaccgctacgccggcgactggagcgtttgcgggcgggacttcctgccctgtgggcgggatttcctgtccggggccaagactacgaccacgtgacgggcagtgacagcnaggacnaggacnaggaggtcggcgagccgagggtcaccggtgacttcgaaagacgacttcgatgcgcccttcaaaccggcaacctgaatctcaaagactttganggccctcatcctgggatctgggagaanagaagctctccaaagcaaattcaaanttgtgcctccngaagccaagattgaaccgggggtggggaacccccggggttangtaaaggggacccgggccgncccaaantggggttaaaggggggggtgccccctngggntggga

SEQ ID NO: 4515 - DNA, 645 bp, Homo sapiens
  misc_feature (584)..(584): "n" may be a, t, c, g, other or unknown
  misc_feature (593)..(593): "n" may be a, t, c, g, other or unknown
  misc_feature (612)..(612): "n" may be a, t, c, g, other or unknown
  misc_feature (640)..(640): "n" may be a, t, c, g, other or unknown
  misc_feature (643)..(643): "n" may be a, t, c, g, other or unknown
gacatgcattaccgggtaaaggagaagattatcaagaagtttgagtgcaacctcctggtggtgtgtgccaatcacatcatcctgtgccaggagaaacggctgcagtgcctgtccttcagcggagtgaaggagcgggagtggcagatggagtctctcattcgttacatcaaggtgatcggtggccctcctggaagagaaggcctcttagtggggctgaagaatggacagatcctgaagatcttcgtggacaatctctttgctatcgtcctgctgaagcaggccacagctgtgcgctgcttggacatgagtgcctcccgtaagaagctggccgtggtagatgaaaatgacacttgcctggtgtatgacatcgacaccaaggagctgctttttcaggaaccaaacgccaacagtgtagcttggaacacccaagtgtgaggacatgctctgcttctcgggaggaggctacctcaacatcaaagccagcaccttccctgtgcaccggcagaagctgcagggctttgtggtcggctacaatggctccaagatcttctgcctccatgtcttctccatttctgccgtgggangtgccgcantccgctcccatgtaccaanttacctggataagaaactgttcaagggnaancc

SEQ ID NO: 4516 - DNA, 777 bp, Homo sapiens
  misc_feature (574)..(574): "n" may be a, t, c, g, other or unknown
  misc_feature (611)..(611): "n" may be a, t, c, g, other or unknown
  misc_feature (651)..(651): "n" may be a, t, c, g, other or unknown
  misc_feature (721)..(721): "n" may be a, t, c, g, other or unknown
  misc_feature (728)..(728): "n" may be a, t, c, g, other or unknown
  misc_feature (745)..(745): "n" may be a, t, c, g, other or unknown
  misc_feature (749)..(749): "n" may be a, t, c, g, other or unknown
  misc_feature (756)..(756): "n" may be a, t, c, g, other or unknown
gatcttcaagtatggggtctgctgggcttgtcgcggctgcatgggcttttcgcggtctataagcccccggggctaaaatggaagcacctgcgggatacagtggagctacaacttctgaagggtctcaatgccaggaagcctcccgctcctaaacagcgtgttcgcttcttgctgggccccatggaaggcagcgaagagaaggagctgaccctcacagccaccagcgtaccctctttcatcaaccatccactggtatgtggaccagcattcgcccatctcaaggttggcgtgggacatcggttggatgcccaggcttctggagtacttgtgctcggcgtgggacatggatgcaggctcctcaccgatatgtacaatgctcatcttaccaaggattacacagtgcgtggcctcctgggcaaagctacagatgacttccgtgaggacgggaggctggtagagaagacaacctatgaccacgtgaccagagagaagctggaccgcattctggccgttatccaaggctcccatcagaaggccctggtgatgtactccaacctcgacctgaaagacccanggaggcctatgaagatggccgttgaagaggcctgatncggcccaatgaacaaagtcccccgatgctgataactgggnaatcccgatgcctctactttgcaactccgggaaattcctcttaaaagggtgcaattgcaatggcattganaacccanaaaaggaacttccgggnaaantttgggntcaaaggaaaaatcccggcct

SEQ ID NO: 4517 - DNA, 916 bp, Homo sapiens
  misc_feature (423)..(423): "n" may be a, t, c, g, other or unknown
  misc_feature (456)..(456): "n" may be a, t, c, g, other or unknown
  misc_feature (482)..(482): "n" may be a, t, c, g, other or unknown
  misc_feature (523)..(523): "n" may be a, t, c, g, other or unknown
  misc_feature (559)..(559): "n" may be a, t, c, g, other or unknown
  misc_feature (569)..(570): "n" may be a, t, c, g, other or unknown
  misc_feature (604)..(604): "n" may be a, t, c, g, other or unknown
  misc_feature (703)..(703): "n" may be a, t, c, g, other or unknown
  misc_feature (707)..(707): "n" may be a, t, c, g, other or unknown
  misc_feature (712)..(712): "n" may be a, t, c, g, other or unknown
  misc_feature (750)..(750): "n" may be a, t, c, g, other or unknown
  misc_feature (810)..(811): "n" may be a, t, c, g, other or unknown
  misc_feature (855)..(855): "n" may be a, t, c, g, other or unknown
  misc_feature (882)..(882): "n" may be a, t, c, g, other or unknown
tcttaaaatgatttctgtctgtgctgcgaaacaaagacaaggtgaggtgtttttcttttttgtaataatataaagctgtgtgtttctgattggatgattcactatgtgcattgttttctcctaagtgcttttagtaggtagcaatcaaatggtgtaaataaggatgttcttttcctgttccttttatttttttctctctttattattcttttattgacaccactagatagctggccactggtcatgccattgccaagatgaagaaaaagcaaactacactttggcctctggttctgaattgcagaaatcaaaggatgcagtaggtgtctatgtcagaattatggatcagaggcagacaatgacgagtgaagatggttgtgaagccctcttcattcctggaggagcctgcatctcatctctcangccctctttctctgtgggtctcaagaacagcantggggaccattgagcacttgaatggnctgtttgtccaagggcttgcaaaggacaagcaagagttcanagagctcaaggatagaaacatcagagcctcctccanggggcttcanntgaaaactccgatgaactggtacctgaagggaantttttcttaaatcaaaccccttggggtgggattaaatacaagggaaacaaccaaaacctttgtggtaccgtaatgaaaaagtccaatggttgtttaaancaantttangaatttaaaggagggttttaaagtccagaaggggaatnaatctgggaagggcccgggcttttggtggcaaagcctttttaacaagcccttcctgcaanntggtccccttaacccctgggccttgttacaattggggggaaaangggcctaatggtttttaaaacaaaagntggcttttaaaaagggccctcctgaaaaagtttt

SEQ ID NO: 4518 - DNA, 760 bp, Homo sapiens
  misc_feature (621)..(621): "n" may be a, t, c, g, other or unknown
  misc_feature (714)..(714): "n" may be a, t, c, g, other or unknown
  misc_feature (719)..(719): "n" may be a, t, c, g, other or unknown
  misc_feature (721)..(721): "n" may be a, t, c, g, other or unknown
  misc_feature (748)..(749): "n" may be a, t, c, g, other or unknown
atttacaattgattaaaagtatccatgtcttggatacatacgtatctatagagctggcatgtaattcttcctctataaagaataggtataggaaagactgaataaaaatggagggatatccccttggatttcacttgcattgtgcaataagcaaagaagggttgataaaagttcttgatcaaaaagttcaaagaaaccagaattttagacagcaagctaaataaatattgtaaaattgcactatattaggttaagtattatttaggtattataatatgctttgtaaattttatattccaaatattgctcaatatttttcatctattaaattaatttctagtgtaaataagtagcttctatatctgtcttagtctattataattgtaaggagtaaaattaaatgaatagtctgcaggtataaatttgaacaatgcatagatgatcgaaaattacggaaaatcatagggcagagaggtgtgaagattcatcattatgtgaaatttggatctttctcaaatccttgctgaaatttaggatggttctcactgtttttccgtgctgatagtaccctttccaaggtgaccttcagggggattaaccttcctagctcaagcaatgagnctaaaaggagccttatgcatgatcttcccacatatcaaaattaactaaaagggcactggaagtttggcaatttttcctgccctgctcctgccnaagancnttttttttttttttaactttcaattannaaccatattat

SEQ ID NO: 4519 - DNA, 710 bp, Homo sapiens
  misc_feature (598)..(598): "n" may be a, t, c, g, other or unknown
  misc_feature (645)..(645): "n" may be a, t, c, g, other or unknown
  misc_feature (647)..(647): "n" may be a, t, c, g, other or unknown
  misc_feature (649)..(649): "n" may be a, t, c, g, other or unknown
  misc_feature (657)..(657): "n" may be a, t, c, g, other or unknown
  misc_feature (708)..(708): "n" may be a, t, c, g, other or unknown
taagctttggtaaataagacatatctgctacaaaagatggtggatgtttcatataccttctcttcttcacattttaaaatattttgttttctttttttgtaaaatttagtccaagcgtgcagcaccatgagaatacaatagaatggtagagtgactgacttaagctaataataacattctaagattaattgaaacataaatgacccccagaacaaatatctgagtgacaaaaattctggtctttaaaaatgttatctatagttagataaagtttggggcagtggaggctatcttaaaattaatcatccaatgaatatcagcaatggatttacagttttccctctgactttctaggttgtcctggaaaagacctaagtgtttctgtagatctgggctcctaaaactctctccgaaaaataataaactagaagggtgctagatatatgttcagtgatgattagaatcttaacattaaacaattattgtttaaaagcaataaatctgggctatattctgtccatggctcatatgtatttaaaaagaatggaaagaattttgagagtaaattttttgaatgttattttccttttaaattggnaacttaaattgggttatccttaaagacatgggtggggaaccactggnananggaaatcnaataccccaatggcctttggagaaaatttgttaagcctacattaattgggntc

SEQ ID NO: 4520 - DNA, 208 bp, Homo sapiens
  misc_feature (151)..(151): "n" may be a, t, c, g, other or unknown
  misc_feature (199)..(199): "n" may be a, t, c, g, other or unknown
  misc_feature (202)..(202): "n" may be a, t, c, g, other or unknown
agtgcgtgagtttggtggcggccggctgtgcagagacgccatgtaccggctcctgtcagcagtgactgcccgggctgccgcccccgggggcttggcctcaagctgcggacgacgcggggtccatcagcgcgccgggctgccgcctctcggncacggctgggtcgggggcctcgggctggggctgaggctggcgctctangtnaaactg

SEQ ID NO: 4521 - DNA, 621 bp, Homo sapiens
  misc_feature (452)..(452): "n" may be a, t, c, g, other or unknown
  misc_feature (569)..(569): "n" may be a, t, c, g, other or unknown
  misc_feature (577)..(577): "n" may be a, t, c, g, other or unknown
  misc_feature (583)..(583): "n" may be a, t, c, g, other or unknown
agatttacccatatatttatcattttttggtatctcttctatacctccaaacttccatttggaataatttaccttctgcctgaaaggactttgtcatttcttttaataaaggtctgctgataagaaattcattcaagtttttgtctacttggaagtatttatttcatgatcactcttaaaggatattttgactgggtgtataactctagcctgttaattatttttttcaagcactacaacgatctcatttccattggtatctgttttcccatgtttctgttgagtagttggctgtcaaactaacaaatggtcatttaaagttaatctaccacttttcctttggctgctcttgatatttctccttgtctttggtttttgcagttttattttttgttgacttttttttttaatcttgcttgggttctgcaggacttcttagatctgtattgatngtctgtatcattttgggaaatatctcaaccattatctctttaaatatcatttttgcctatctctcttcttttgttgaggaccccaacttcccatatgatgaaatttctcacaattcnaatttccngtatcncttggctgccctaagcctggggttgcctgggaaagcaa

SEQ ID NO: 4522 - DNA, 828 bp, Homo sapiens
  misc_feature (789)..(789): "n" may be a, t, c, g, other or unknown
  misc_feature (817)..(818): "n" may be a, t, c, g, other or unknown
  misc_feature (821)..(821): "n" may be a, t, c, g, other or unknown
  misc_feature (828)..(828): "n" may be a, t, c, g, other or unknown
ggagaacttccccaacctagcaagacaggccaatattcaaatcagtaaatacagagaacaccacaaagatactcctcgagaagagcaaccccaagacacataatcatcagattcaccaaggatgaaatgaagaaaaaaatgttaagggcagccagagagaaaggtcggtttactcacaaagggaagcccattaaactaatagcagatttgtctgctgaaaccctacaagccagaatagagtggggggccaatatttaacattcttaaagaaaagaattttcagcccagaatttcatatccagccaaactaagcttcattagcaaagaagaaataaaatcctgagagacaagcaaatgctgagcgattttgtcactaccaggcctgccttacaagagctccagaaggcagcactaaacacataaaggaaaaaccagtaccaagccactgcaaaaacataacaaactataaagaccaccgacactatgaagaaactgcatcaactaacaggcaaaataaccaactagcatcataatgacaggatcagattaacacataacaatattaaccttaaatgcaaacgggctaaatgccacaattaaaagacacagactggcaaattggatagagtcaaaatccatcattgtgctgtattcaggagacccatctcacggtgcaaagacacacatagggctcaaaataaagggatggagggaatatttaccaagcaaaatgggaaagggaaaggaaaaaaaagcaagggggttgcaatcctaaggtctcctcattanagcaggaccttttaaaacccaaacaaannggnttaaaan

SEQ ID NO: 4523 - DNA, 575 bp, Homo sapiens
  misc_feature (416)..(416): "n" may be a, t, c, g, other or unknown
  misc_feature (483)..(483): "n" may be a, t, c, g, other or unknown
  misc_feature (494)..(494): "n" may be a, t, c, g, other or unknown
  misc_feature (540)..(540): "n" may be a, t, c, g, other or unknown
  misc_feature (549)..(549): "n" may be a, t, c, g, other or unknown
  misc_feature (551)..(551): "n" may be a, t, c, g, other or unknown
attttgtatgcgatcgtggcaggattgcggacgggcagcactctttctgcagaaggtaaaaatcaccttgctgaggaagcttttcgtctgctgattcttctttgtgacatcggggaataaggatttatttctaacagtcttgggggctcgtctgggatcacccagtctccttcgggtcggggtctctgattcccgcccccccaccaaggggaggcgccccactgccttactgcggtggcctcagggactgggaatccggacttacctgttgtgatgaataaacccggaccctcagcaacgtggaaaacggcgaataggcttgcattgcactgcctcggggaccaagataaactctgttcacagagcaaagtaaagaaacgtcccaagggtgcgacaaagtacttgcttggtggtcnggatattctggaggttaaaagtgtgtgtgaatagtcacaagcctcactgcagctgggtgttgcttgngtaaatcatgntaaagtcctactgctgggacccgagccgaagtgagtcctgcctgcngttccgttngntaccctcatacggcttaagggcgg

SEQ ID NO: 4524 - DNA, 774 bp, Homo sapiens
  misc_feature (642)..(642): "n" may be a, t, c, g, other or unknown
  misc_feature (659)..(659): "n" may be a, t, c, g, other or unknown
  misc_feature (710)..(711): "n" may be a, t, c, g, other or unknown
  misc_feature (735)..(735): "n" may be a, t, c, g, other or unknown
  misc_feature (758)..(758): "n" may be a, t, c, g, other or unknown
  misc_feature (762)..(762): "n" may be a, t, c, g, other or unknown
ttggtgatgtgcacgtttctgaatttcaagattttttttctgtgtccttcagggagaataaatttctatatagtgtcaagatgctacataatgggataaagaattatagttaagtgggtgaatctcattgtgctttttgtactgtgtagcataataccaaattcctctattcactaaataaacattgtgtgaatactgtcctaaaacagcctgttgaaggatacaaaaggatatctagaaaaagcagttgaggattggtttggattgtttcaagtgataccaaaatatttattttgaggtaaatagccacagtagtatagagccaagaggtaagcacagatcaaacatatttaagggctatctaaaaataataaggaatttggacatttttctgtaggcaacagagcaggcttttcacttaggatgctgtcattgaagaatttggccatgatcaaagtagccctttatgtagttaaatgggggtctctttaggcttcatagattttgcatgtttgggtttctatttagtttgttttctctgatggacaaaggcaggggaccagattctgtattatcctggaaggactgtgggaatgtgtcaaaggagaaccgaatttgaacactgaccttgtcattaactanctgcatggcttgagccntatcacctgtcagggatttcaagcttcccctatttgcaaaatgggaagtannaaggctgttggaaataaggtaaanggttaaaagccttcctaaaaatngggncaccctttttaa

SEQ ID NO: 4525 - DNA, 777 bp, Homo sapiens
  misc_feature (610)..(610): "n" may be a, t, c, g, other or unknown
  misc_feature (620)..(620): "n" may be a, t, c, g, other or unknown
  misc_feature (632)..(632): "n" may be a, t, c, g, other or unknown
  misc_feature (649)..(649): "n" may be a, t, c, g, other or unknown
  misc_feature (703)..(703): "n" may be a, t, c, g, other or unknown
  misc_feature (739)..(739): "n" may be a, t, c, g, other or unknown
  misc_feature (744)..(744): "n" may be a, t, c, g, other or unknown
  misc_feature (764)..(764): "n" may be a, t, c, g, other or unknown
  misc_feature (767)..(767): "n" may be a, t, c, g, other or unknown
tgacaaaaaacaggttgggcacaataaacaaccaagtataaggagctcagaagatttccatctaaatagtttcaataatcctccaagacaatatcagaaaataatgaaaaggctcattaaaagatatgtactgcaggcccagatagataaggagagtgatgaagtgaacgaaggggaactgaaggaaattaagcaggacatctcaagtctccgctatgaactccttgaagaaaaatctcaaaatacagaagacctagcagaacttattagagaacttggagagaaattatccatggaaccaaatcaagaggaaaccaatagataatgcgaagacttccttagaaattcatatttatttgtccacttgaagccatattattttctgatttattttcttaagtgccaatgggcccaccttttaaacaagaaaacgttaaataacttgggccatcctatcatctggagccctagtatctaatttttttggtgattaaactccattgttcaaggtaaaggctgtagataatgagggaaaattatgcccagttgtttggtgcttgttttaaaaactggctttcttggatataactaactcctgtgatgatgtcantgccatgtantgtccggcctgnaaaatgggtcccaagcnggacagggggcttgacccacgtttacctcccccatggcgggttttttccctccngaaggttttattttcaagggttcccttccttgcccntggcnccggggtgggattccccccngcntgggggggaa

SEQ ID NO: 4526 - DNA, 541 bp, Homo sapiens
  misc_feature (436)..(436): "n" may be a, t, c, g, other or unknown
  misc_feature (456)..(456): "n" may be a, t, c, g, other or unknown
  misc_feature (481)..(481): "n" may be a, t, c, g, other or unknown
  misc_feature (495)..(495): "n" may be a, t, c, g, other or unknown
  misc_feature (517)..(517): "n" may be a, t, c, g, other or unknown
  misc_feature (541)..(541): "n" may be a, t, c, g, other or unknown
gattatttcctttctcatgaaacaaagtaacaactctgttaggtatgttgttagtctgtctcatagttgagatccagttttgaagatgtaaagcaaaaagcacaccgctgatttttctcccctcttgcatgtcaaaatactatgtacataccacataaacactagggtatctgttaaatatattttatgttgataccgtttttacttggcaaagttggatgcacaaagaatagtagtctcatattttaacaatgctgtggatttcttctgtagacatttatttcctgttacctgcaaggtgtttaggatttggatttttttttgatgttttggtctttttggatagttgctaaagttcttcactattttacctaggctatccttataaataaataccatgaatttttaaaaccacacaggtcacttaaaggtcccnccttcctggggggtacccanggcgttaaaatgaaatttggggagntatcctagaggtangtaatcccctccaaggtggtantccggtcctttaacctccctgaan

SEQ ID NO: 4527 - DNA, 418 bp, Homo sapiens
  misc_feature (359)..(359): "n" may be a, t, c, g, other or unknown
  misc_feature (377)..(377): "n" may be a, t, c, g, other or unknown
  misc_feature (400)..(400): "n" may be a, t, c, g, other or unknown
ttgcgcggctgctcctcggcggggccggcttcgcggggagccttccccggggaccggaagcgcgagagcagccgcggccagctcagagctgccctggccccgccctcttccggccgccgcgcctcttgccgccgcagcagcagcagtaccggcatcctcggctcgcgctcgctaccttcgcccgctccgcgcaatctgggtgccgccggggagcccagcccagcgccggacgcgtagtcaatccgttgcccagcgttggccagcggctgccgcttgtccagggggagaatcagcacgatcctggtctgggggtggaacaggggcgtgaggcgggagagcgcgctagggccgagcccacnacccggggccgctccgcncttctcctgggaacctcgtccanccgggtcctgtcgtccaa

SEQ ID NO: 4528 - DNA, 590 bp, Homo sapiens
  misc_feature (348)..(348): "n" may be a, t, c, g, other or unknown
  misc_feature (417)..(417): "n" may be a, t, c, g, other or unknown
  misc_feature (547)..(547): "n" may be a, t, c, g, other or unknown
  misc_feature (553)..(553): "n" may be a, t, c, g, other or unknown
  misc_feature (558)..(558): "n" may be a, t, c, g, other or unknown
  misc_feature (573)..(573): "n" may be a, t, c, g, other or unknown
  misc_feature (582)..(582): "n" may be a, t, c, g, other or unknown
tttaaatttttgaagggaccaaggccacttctcttatagactgtcctatattctagactggtctgtatgtttcctcatagcattgtttaacttgttctttgatccatttcttgtaaactggaatttaggtctgaaggcttaattagatttaagttaaacttttttttttttcttccccaagaataatttatacaggatgctgtttcatactgcttaaaagcacatgacaaatgttagactgtccccactattagcaatgttaagattgatcttgcagtaaaggttctcagaactttatctctccattgtaaatatttccttttcccaagtaatctgggacatcataanagtatcttattcttggttgggcacagtggctcacacctgtaatcccagcactttgggaggccgaggcancggaccacttgaagtcaggaattcgagaccagcctggctcacaatgatgaaactccatctctactaaaaatacaacaaattagttgggcatggtggcgcatacctgtaatcccagctactcacgaagctnatgcangagantcacttgaaccctgnggaggcaanagattgca

SEQ ID NO: 4529 - DNA, 690 bp, Homo sapiens
  misc_feature (596)..(596): "n" may be a, t, c, g, other or unknown
  misc_feature (633)..(633): "n" may be a, t, c, g, other or unknown
  misc_feature (663)..(663): "n" may be a, t, c, g, other or unknown
  misc_feature (669)..(669): "n" may be a, t, c, g, other or unknown
  misc_feature (674)..(674): "n" may be a, t, c, g, other or unknown
tattattcaagatcaaaccaagaagatgccatggactttggcatctcccttctcttctatggcctctactatggagttctggaacgggactttgcagaaatgtgtgcagactacatggcatctaccatagggttctacagcgagtcgggcatgcctaccaaacatctttcagacagtgtgtgtgctgtgtgtgggcagcagatctttgtggacgtcagtgaagaggggatcattgagaacacgtataggctgtcctgcaatcatgtcttccacgagttctgcatccgtggctggtgcatcgtgggaaagaagcaaacgtgtccctactgcaaagagaaggtagacctcaagaggatgttcagcaatccctgggagaggcctcacgtcatgtatgggcaactgctggactggcttcgatacttgggtagcctggcagcctgtcatcattggtgtagtccaaggcatcaactacatcctgggcctggaatagtgatgaagagcatcagtggaaaacccaccccacacgccatggacctcagggcactctcctccctgcccacaaaagacctcctgggtgggaaagactcaaaggggcncttgggccactcaaggaccccctccgggctgttttcnggacctggggggaaggggatatgatggganaaccangccanttggggggctggtcaa

SEQ ID NO: 4530 - DNA, 549 bp, Homo sapiens
  misc_feature (467)..(467): "n" may be a, t, c, g, other or unknown
  misc_feature (471)..(471): "n" may be a, t, c, g, other or unknown
  misc_feature (509)..(509): "n" may be a, t, c, g, other or unknown
  misc_feature (535)..(535): "n" may be a, t, c, g, other or unknown
  misc_feature (542)..(542): "n" may be a, t, c, g, other or unknown
gaggccaagagcgcgggcggcgaggcaagatggcggcaaccaagaggaaacggcgtggaggctttgcagttcaggcgaagaagccaaaaagaaacgaaatagatgcggagccgccagctaagcggcacgccacagcagaggaggtggaggaagaagagagggaccggatcccaggccccgtttgcaagggaaagtggaaaaataaggaacggattctcatcttttcttccagaggaataaattttagaacaagacatttaatgcaggacttgagaatgttgatgcctcattctaaagcagatactaaaatggatcgtaaggataagctatttgtgattaacgaggtttgtgaaatgaagaactgtaataaatgcatctattttgaagctaagaaaaaacaggatctctatatgtggtaagagaatgtattaagattttggttaaactcatttaagtggatttgttcnttgnaccttttatgttatagactcctaatgtttcatgttaanggttgagaatgaagcaaacttttggntttcacnaaacttg

SEQ ID NO: 4531 - DNA, 619 bp, Homo sapiens
  misc_feature (378)..(378): "n" may be a, t, c, g, other or unknown
  misc_feature (438)..(438): "n" may be a, t, c, g, other or unknown
  misc_feature (451)..(451): "n" may be a, t, c, g, other or unknown
  misc_feature (534)..(534): "n" may be a, t, c, g, other or unknown
  misc_feature (537)..(537): "n" may be a, t, c, g, other or unknown
  misc_feature (552)..(552): "n" may be a, t, c, g, other or unknown
  misc_feature (568)..(568): "n" may be a, t, c, g, other or unknown
  misc_feature (616)..(616): "n" may be a, t, c, g, other or unknown
tatcatttttaatttcaagtacatatttttgaagtaaatcaattgtatatattaactattcaactgtctcttggtcagtccattataataaccctattttaatttttctttcctttttaatgcacccaaagtcttttatttacttttttaactacagccacactttgagcaggtatggaacacaatcattgattaatctaatatatacaatagggagaaccgtaactacagatttacagattgtggagctgcagcagtttttcagtaacatgttggaggaacaccagaggatcagagttcatgccaacttacagacaataaagaatgaaaatctgaaaaacaagaagctaagtgccaggatagctgcgtggctaaggngaaacacatagcttggggctatctttcagcactcctcctgcatattaaaatgtagtttgntcacaagttttgncctccaatactttgtgagtccgggaaaccacacattttatttggatttcaagtcacatttattactcagagtgccaatcctcncanaatgtcatgtttggncctgaaggtgggtgantgctgacaattttgccaatgctgctgtatttctgggaaagatgtcacntca

SEQ ID NO: 4532 - DNA, 742 bp, Homo sapiens
  misc_feature (540)..(540): "n" may be a, t, c, g, other or unknown
  misc_feature (658)..(658): "n" may be a, t, c, g, other or unknown
  misc_feature (692)..(692): "n" may be a, t, c, g, other or unknown
  misc_feature (698)..(698): "n" may be a, t, c, g, other or unknown
  misc_feature (705)..(705): "n" may be a, t, c, g, other or unknown
  misc_feature (709)..(709): "n" may be a, t, c, g, other or unknown
gtgatcgaaagcatggcgtcggtggtgttggcgctgaggacccggacagccgttacatccttgctaagccccactccggctacagctcttgctgtcagatacgcatccaagaagtcgggtggtagctccaaaaacctcggtggaaagtcatcaggcagacgccaaggcattaagaaaatggaaggtcactatgttcatgctgggaacatcattgcaacacagcgccatttccgctggcacccaggtgcccatgtgagttgctccgttgctgcccccctttttccttttctaggttgacctctccttgcccctaagcatggtaataacagttgcatgtattgagtgcttaccaaatggcaagcattgtgctgattcccatgcctacacgatctcatttcttccttaccacatccctgtaagtaaggtgaaatgccaagagacctagacggggtggaaggagcaagtgactgctgggatttgcaccaggtctgcctaactcccagatcactatgatttgccctggtgttgcattggcctggnattcttggttctcctttctaaccctcagttcttggaggacaagataccctggtgatttaaaatattattttagtcttggggaaactaaatttcaatttattaagtttttcattattcnaagacttcttcctttgtataaacttacttgcaanatgggntgaaaanatancttgaaattttaatgaaaatagaaattcaagtg

SEQ ID NO: 4533 - DNA, 516 bp, Homo sapiens
  misc_feature (387)..(387): "n" may be a, t, c, g, other or unknown
  misc_feature (432)..(432): "n" may be a, t, c, g, other or unknown
  misc_feature (454)..(454): "n" may be a, t, c, g, other or unknown
  misc_feature (471)..(471): "n" may be a, t, c, g, other or unknown
  misc_feature (481)..(481): "n" may be a, t, c, g, other or unknown
  misc_feature (506)..(506): "n" may be a, t, c, g, other or unknown
gaataatttggtatttgctaattcagtatttgccacactttatagaacacaactacctcaaatacaagaattgactataaatcaaaaacttttttttttaatggtttccagtggatagaggaataaaaacagggtggaggggacaggaatggatttttgacaaatttaactttggtatcatataaatgtataattataaataaatgaataagaagtaatctctaaaaatcaaaagcacagtgaagtaaatgaacctaactatatattaaataggtaaatttctagtgggatgtatatgaaggacaaaaagaattgtaaaattttcctaaactgtaatagtaattatattatttgtaataaaagtattaatctgaaagtattaatgtntaatacaggatgaaacaaataagtaactggtaatgtcatgggaancaagattttcagcaaagaaagntaaaatattaattgtangggtttgcanaacttatttaaaaccaaatttggantgggaatatc

SEQ ID NO: 4534 - DNA, 368 bp, Homo sapiens
  misc_feature (316)..(316): "n" may be a, t, c, g, other or unknown
  misc_feature (329)..(329): "n" may be a, t, c, g, other or unknown
  misc_feature (366)..(366): "n" may be a, t, c, g, other or unknown
agacgctggtagctcctgggccagctcaaggtgtttccttttgcctggtaaccaggaggagtggctgaggcagggcatggagcggagcaacgcagctacaaagtgcggagaggagccccgctctggatcccgccggctccccaaggctgaaggagacaagtctggatccgcaggagcccccagtaagaacagcagccgcctggggggccgaccatgtatgtgtacagctggccgccgcccaaacagggcgtctggccgccgccgccgcagctgctcacctgcacctacctggccgcccctctgctgctacccccantccaggcccacancttccgcagccggcccgggagcctgcatgcgggcgantg

SEQ ID NO: 4535 - DNA, 717 bp, Homo sapiens
  misc_feature (512)..(512): "n" may be a, t, c, g, other or unknown
  misc_feature (559)..(559): "n" may be a, t, c, g, other or unknown
  misc_feature (580)..(580): "n" may be a, t, c, g, other or unknown
  misc_feature (599)..(599): "n" may be a, t, c, g, other or unknown
  misc_feature (640)..(640): "n" may be a, t, c, g, other or unknown
  misc_feature (690)..(690): "n" may be a, t, c, g, other or unknown
  misc_feature (704)..(704): "n" may be a, t, c, g, other or unknown
  misc_feature (713)..(713): "n" may be a, t, c, g, other or unknown
  misc_feature (715)..(715): "n" may be a, t, c, g, other or unknown
cactcgccccgtcacgtggcaagctggagtacccaggccaggcccctgaagcagagaaggacaaaatggtgtgggaaatcctggtgtctgagcgggacatcagagcccttatcccactggccaaggctgaggagctggtgaatacagcaccactgactggagtgccccagcatgtccccgtgcgccttgtcactgtggacggcgggggggccttggtggaggtgacagagcatgtcggctgcgagtctgccaacacacaggtcctgcaggtgtctgaggcctgtgatgccgtgttcgtggctggcaaggagagccggggcgcccggggggtgcgagtggacttctggtggcgccggctccgcgcctcgctgcggctgaccgtgtgggcccccctgctaccgctgcgtatcgagctcaccgacaccaccctcgagcaggtccgcggctggagggtacctggccctgctgaagggcctgcggaacccgctgcagaggcgtcggatgaggccganaggcgcgcccgtggctgccacctgcagtaccaacgggccggtgtgcncttcctcgcccccttcgcggnccaaccgctggacggcggncgccgcctcacgcacctgcttgggccccgactggctgctanaacgtgtccaactccgtggcgccacacgcccgcgttgctggactcccgtntaacctctctggangggtggccntntc

SEQ ID NO: 4536 - DNA, 732 bp, Homo sapiens
  misc_feature (673)..(673): "n" may be a, t, c, g, other or unknown
  misc_feature (681)..(681): "n" may be a, t, c, g, other or unknown
  misc_feature (695)..(695): "n" may be a, t, c, g, other or unknown
  misc_feature (702)..(702): "n" may be a, t, c, g, other or unknown
  misc_feature (705)..(705): "n" may be a, t, c, g, other or unknown
ttagggcgggagcccggcgagggcgccggtgctttgttctgtctgaggccaggaagtttgaccgcgctgccatgccgaaccgtaaggccagccggaatgcttactatttcttcgtgcaggagaagatccccgaactacggcgacgaggcctgcctgtggctcgcgttgctgatgccatcccttactgctcctcagactgggcgcttctgagggaggaagaaaaggagaaatacgcagaaatggctcgagaatggagggccgctcagggaaaggaccctgggccctcagagaagcagaaacctgttttcacaccactgaggaggccaggcatgcttgtaccaaagcagaatgtttcacctccagatatgtcagctttgtctttaaaaggtgatcaagctctccttggaggcattttttattttttgaacatttttagccatggcgagctacctcctcattgtgaacagcgcttcctcccttgtgaaattggctgtgttaagtattctctccaagaaggtattatggcagatttccacagttttataaatcctgggtgaaattccacgatgatttcgatttcattgtcaggctgcaagtgattctagtcacaagattcctatttcaaattttgaacgtgggcataaccaaagcaactgtgttacaaaacctttanagatttantcatcccaaccaanggaactnggncacctatccactggaagtctgatgata

SEQ ID NO: 4537 - DNA, 767 bp, Homo sapiens
  misc_feature (631)..(631): "n" may be a, t, c, g, other or unknown
  misc_feature (700)..(702): "n" may be a, t, c, g, other or unknown
  misc_feature (741)..(741): "n" may be a, t, c, g, other or unknown
  misc_feature (762)..(762): "n" may be a, t, c, g, other or unknown
aaaaattactatgaagtacttggagttacgaaagatgctggtgatgaagatttgaaaaaagcttatagaaagcttgctttgaagtttcatccagacaaaaaccatgcacttggagcaacagatgcttttaaaaagattggaaatgcttatgctgttttaagtaatccagaaaagcgaaaacagtatgacctcacgggcaatgaagaacaagcatgtaaccaccaaaacaatggcagatttaatttccattgaggttgtgaagctgatataactccagaagacttgtttaatatattttttgggggtggatttccttcaggtagtgtacattctttttcaaatggaagagctggttatagccaacaacatcagcatcgacatagtggacatgaaagagaagaggaaagaggagatggaggtttttctgtgtttatccagctgatgcccataattgtattgatcctcgtgtcattattaagccagttgatggtctctaatcctccttattccttatatcccagatctggaactgggcaaactattaaaatgcaaacagaaaacttgggtgttgtttattatgtcaacaaggacttcaaaaatgaatataaaggaatgttattacaaaaggtanaaaagaagtgtgggaggaagattatgtgactaatattcgaaataactgctggaaaagaaaggcaacaannnacagatatgcagtatgcagcaaaaggtataccggtgaangatcgactccgaagggaaggnaaatg

SEQ ID NO: 4538 - DNA, 645 bp, Homo sapiens
  misc_feature (552)..(552): "n" may be a, t, c, g, other or unknown
  misc_feature (559)..(559): "n" may be a, t, c, g, other or unknown
  misc_feature (608)..(608): "n" may be a, t, c, g, other or unknown
  misc_feature (620)..(620): "n" may be a, t, c, g, other or unknown
  misc_feature (634)..(634): "n" may be a, t, c, g, other or unknown
atggaacagcggttagctgagtttcgggcggcgcggaaacgggcgggtctggcggcccaaccccctgctgccagtcagggcgcacaaaccccaggagagaaggcggaagcagcagcgactctaaaggcagccccaggctggctaaagcggttcctggtatggaaacctaggcccgcgagtgcccgggcccagcccggcctagttcaggaagcggctcagccccagggcagcacatcagagacaccatggaacacagccattcctctgccgtcgtgctgggaccagtctttcctgaccaatatcaccttcttgaaggttcttctctggttggtcctgctgggactgtttgtggaactggaatttggcctggcatattttgtcctgtccttgttctattggatgtacgtcgggacacgaggccctgaagagaagaaagagggagagaagagcgcctactctgtgttcaatccaggctgtgaagccatccagggcaccctgactgcagagcagttggagcgcgagttacagttgagacccctggcagggagatangacccanctgtgctgtcatgcagctaacctctgatgtggtcttcctcaacattggntatggattttgntttcaagtgtatangactaaaggca

SEQ ID NO: 4539 - DNA, 507 bp, Homo sapiens
  misc_feature (57)..(57): "n" may be a, t, c, g, other or unknown
  misc_feature (101)..(101): "n" may be a, t, c, g, other or unknown
  misc_feature (234)..(234): "n" may be a, t, c, g, other or unknown
  misc_feature (353)..(353): "n" may be a, t, c, g, other or unknown
  misc_feature (372)..(372): "n" may be a, t, c, g, other or unknown
  misc_feature (442)..(442): "n" may be a, t, c, g, other or unknown
  misc_feature (450)..(450): "n" may be a, t, c, g, other or unknown
  misc_feature (463)..(463): "n" may be a, t, c, g, other or unknown
  misc_feature (472)..(472): "n" may be a, t, c, g, other or unknown
  misc_feature (501)..(501): "n" may be a, t, c, g, other or unknown
gagaaaagtcggcagcagagggaacagggaagaaacctaaaggctgcaggctgccangtgtgcttggagagcccccttcttccgccgggcctcgcaagcancgtatgactgtggagaagggcggtgggcaaggagggaactcgagagcagcctccatgggcacacaggagggctggtgcctgctgctctgcctggctctatctggagcagcagaaaccaagccccacccagcanaggggcagtggcgggcagtggacgtggtcctagactgcttcctggcgaaggacggtgcgcaccgtggagctctcgccagcagtgaggacagggcaagggcctcccttgtgctgaagcangtgccagtgctggacgatngctccctggaggacttcaccgatttccaagggggcacactggcccaagatgacccacctattatctttgnggcctcantggacctgtccanattccccangccgaggccttgctccatgctgactgcantgggaa

SEQ ID NO: 4540 - DNA, 774 bp, Homo sapiens
  misc_feature (703)..(703): "n" may be a, t, c, g, other or unknown
  misc_feature (717)..(717): "n" may be a, t, c, g, other or unknown
  misc_feature (726)..(726): "n" may be a, t, c, g, other or unknown
  misc_feature (735)..(735): "n" may be a, t, c, g, other or unknown
  misc_feature (743)..(743): "n" may be a, t, c, g, other or unknown
aaacaaggcggtgtgattgaaggtgggtaacgtggtcaagtgacaggggtgggtctgcttagataagatggcctgggaaaccttttctgaggacatggcttttgaatggaggctagaaagatgagagagacccagccatagaatgatttcagttaagagtattctatgaagaaagagcagcaaatgctaattccctaaggtagatataaggttggcatgttggaaagacagaatgggtttgcttctaagattctttccagtggaatttcagaaattttgtgattctatttcattaactcctgaggtttggctacaagaccagaccctactcttgttttatatgtgtagctggcagaatataggtttaatagtgagacaagaccaagaactacatgccagctccattgttcaatttctgtgtggtcttaagcaatttagctaacctctccaagtcttaaaacagcatggcttcaaatacataagagtttgaatttgttgtgtttgatgctgtcatgaacttttgattaagagagtgatatgatcaaaattaagcttaggaaatattgcagctggatgtaggatggattatagcaccaggagggaaagaatctaagaagctattgcactggtccattcaaacattggttagagttgcatgtcctgctgtgaaaagagagatggcagagacctgtgcaagaaaccnttgtaagacagatnagcaggaanctcctgctnccatgganggtcaaagggtcaaatgtgttaagcagttaa

SEQ ID NO: 4541 - DNA, 750 bp, Homo sapiens
  misc_feature (338)..(338): "n" may be a, t, c, g, other or unknown
  misc_feature (460)..(460): "n" may be a, t, c, g, other or unknown
  misc_feature (467)..(467): "n" may be a, t, c, g, other or unknown
  misc_feature (475)..(475): "n" may be a, t, c, g, other or unknown
  misc_feature (718)..(718): "n" may be a, t, c, g, other or unknown
  misc_feature (731)..(731): "n" may be a, t, c, g, other or unknown
  misc_feature (743)..(743): "n" may be a, t, c, g, other or unknown
  misc_feature (746)..(747): "n" may be a, t, c, g, other or unknown
actaaaaaagccaatgctgaagagctagcgaataaccttaaacaggagggtcataatcttgggctgctccatggggatatggatcagagtgagagaaacaaggtcatttcagactttaagaaaaaggacatcccagtcctggtggccacagatgttgcagcccgtggtctggacattccttcaattaagactgtcattaactatgatgtggcacgagacattgatacccacacgcataggattggccgcacaggaagagcgggtgagaaaggtgtggcctataccctactcactcccaaggacagcaattttgctggtgacctggtccggaacttggnaggagccaatcaacacgtttctaaggaactcctagatctggcaatgcagaatgcctggtttcggaaatctcgattcaaaggagggaaaggaaaaaagctgaacattggtggaggaggcctangctacanggagcggnctggcctgggctctgagaacatggatcgaggaaataacaatgtaatgagcaattatgaggcctacaagccttccacaggagctatgggagatcgactaacggcaatgaaagcagctttccaagtcacagtacaagagtcactttgttgcagccaagtttaagtaatcagaaggctgggaaattctgctgctggggcaagttggggtgggactagtgcagggagctttgaattctgtttccaantaaactcaagcanaacaggggccantannagt

SEQ ID NO: 4542 - DNA, 608 bp, Homo sapiens
  misc_feature (549)..(549): "n" may be a, t, c, g, other or unknown
  misc_feature (570)..(570): "n" may be a, t, c, g, other or unknown
  misc_feature (573)..(573): "n" may be a, t, c, g, other or unknown
agttccctcaagcgcccgtagcttcggcggagtctgcgcgatgggcgacccggaaaggccggaagcggccgggctggatcaggatgagagatcatcttcagacaccaacgaaagtgaaataaagtcaaatgaagagccactcctaagaaagagttctcgccggtttgtcatctttccaatccagtaccctgatatttggaaaatgtataaacaggcacaggcttccttctggacagcagaagaggtcgacttatcaaaggatctccctcactggaacaagcttaaagcagatgagaagtacttcatctctcacatcttagccttttttgcagccagtgatggaattgtaaatgaaaatttggtggagcgctttagtcaggaggtgcaggttccagaggctcgctgcttctatggctttcaaattctcatcgagaatgttcactcagagatgtacagtttgctgatagacacttacatcaagagatcccaagaaaagggaatttttatttaatgcaattgaaaccatgccctatgttaagaaaaaagcanattgggccttgcgatggatancangatagaaaatctacttttgggggaaagagtggtgg

SEQ ID NO: 4543 - DNA, 414 bp, Homo sapiens
  misc_feature (388)..(388): "n" may be a, t, c, g, other or unknown
  misc_feature (390)..(390): "n" may be a, t, c, g, other or unknown
  misc_feature (405)..(405): "n" may be a, t, c, g, other or unknown
acggcgagattaagctcagggtcaagttctgagcaaaaagtgtcaaggagcctttttgcaacctcctataatattgaaacagattctgtgccctttaaaggagataataactaacatctggggagcgctttacaatttagaaaaggcctttcacacacaggcctgtttcatcttcacaacaatcttataaaacagatatattgttcccatttcccaaataatgaaacggaagcgccgaaaatatctcctatagggctcttcaaactgtggtcaacttagtaaatgatgttgacagtggaagtgtgatcattttattttcctgcctttggaattgaagattgtaattttgcaaaaattttgttgaagatgatgtacctttgggtcagananctggagtacaatggnaccatctca

SEQ ID NO: 4544 - DNA, 553 bp, Homo sapiens
  misc_feature (459)..(459): "n" may be a, t, c, g, other or unknown
  misc_feature (501)..(501): "n" may be a, t, c, g, other or unknown
  misc_feature (525)..(525): "n" may be a, t, c, g, other or unknown
  misc_feature (535)..(535): "n" may be a, t, c, g, other or unknown
  misc_feature (547)..(547): "n" may be a, t, c, g, other or unknown
aataaaagctgtggtccccaggagtcctgaacatctggggacagcgggaaaacatgagtgactccaaggaaccaagggtgcagcagctgggcctcctggaagaagatccaacaaccagtggcatcagactttttccaagagactttcaattccagcagatacatggccacaagagctctacagggtgtcttggccatggcgccctggtgctgcaactcctctccttcatgctcttggctggggtcctggtggccatccttgtccaagtgtccaaggtccccagctccctaagtcaggaacaatccgagcaagacgcaatctaccagaacctgacccagcttaaagctgcagtgggtgagctctcagagaaatccaagctgcaggagatctaccaggagctgacccagctgaaggctgcagtgggtgagttgccaagagaaatccaagctgcaggagatntaccaaggagctgacccggctgaaaggctgcaattgggtganttgccaaagaaatccaagctgcanggagatttancaaggagctgancccggt

SEQ ID NO: 4545 - DNA, 882 bp, Homo sapiens
  misc_feature (787)..(787): "n" may be a, t, c, g, other or unknown
  misc_feature (814)..(814): "n" may be a, t, c, g, other or unknown
  misc_feature (832)..(832): "n" may be a, t, c, g, other or unknown
  misc_feature (858)..(858): "n" may be a, t, c, g, other or unknown
  misc_feature (881)..(881): "n" may be a, t, c, g, other or unknown
atgttcatgtagggaagtcgggccccgggccgccaccgtcacctcggccgctgccgctgtcgccatcgccttgtttccccatcccccgccatggccgaggacctctctgcggccacgtcctacaccgaagatgatttctactgccccgtctgtcaggaggtgctcaaaacgcccgtgcggaccacggcctgtcagcacgtcaataggagtgaaacatccacatctgataacacagaaacttaccaagagaatacaagttcttctggtcatcctacttttaagtgtcccctgtgtcaagaatcaaattttaccagacagcgtttactggatcactgtaacagtaatcacctatttcagatagttcctgtgacatgtcctatttgtgtgtctcttccttggggagatcctagccagattaccagaaatttcgttagtcatctaaatcagagacatcaatttgattatggagaatttgtgaatcttcagctagatgaagaaacccaataccaaactgctgttgaagaatcttttcaagtaaacatctgaaggctgtagacatctctgcatctttgtacctgcaagtgccatctttaagggggaaactacatgaagtcaccgttacaagtaacttgatgtgtatattaataaaagtaattcagtcattttagtttttgattgaaaaataaaggtagggcttctaaaaacttcatcatcttgataagttaaaaaatgaaaagttatgacattagctttaaaggtgtaaaaaagatgtttcactaatgtaacngtgaaaagagaatccctggttggaacnttaacctttttggtaatnataaattttggaatttttcaataatnaagttgccttttgaaaatttggng

SEQ ID NO: 4546 - DNA, 737 bp, Homo sapiens
  misc_feature (271)..(271): "n" may be a, t, c, g, other or unknown
  misc_feature (327)..(327): "n" may be a, t, c, g, other or unknown
  misc_feature (459)..(459): "n" may be a, t, c, g, other or unknown
  misc_feature (476)..(476): "n" may be a, t, c, g, other or unknown
  misc_feature (480)..(480): "n" may be a, t, c, g, other or unknown
  misc_feature (496)..(496): "n" may be a, t, c, g, other or unknown
  misc_feature (547)..(547): "n" may be a, t, c, g, other or unknown
  misc_feature (563)..(563): "n" may be a, t, c, g, other or unknown
  misc_feature (614)..(614): "n" may be a, t, c, g, other or unknown
  misc_feature (636)..(636): "n" may be a, t, c, g, other or unknown
  misc_feature (668)..(668): "n" may be a, t, c, g, other or unknown
  misc_feature (714)..(714): "n" may be a, t, c, g, other or unknown
  misc_feature (728)..(729): "n" may be a, t, c, g, other or unknown
  misc_feature (737)..(737): "n" may be a, t, c, g, other or unknown
agcaatgcacacgaagcagacagagaagcaacatctttaaggtactgagggcaggagaagttaatgtagaatactatgccagaaaaaataaattcccaaaagtggaagtgaaataaggacatttagagatgtacaaaagctgaccgaattcactaccagtcaacccacactacaagaaacatcaaatgagtcctccaagcagaaggaatccaataccagatgaaaatccagatctccacgaggaaatgaagaacaccagaaatggatcggncctttcttcaaataagagcagttgggataacaaagctgttcagttgtacccttggnatccactgaaatcctgggtagggaagctccagtaccaccaactggaaagactgggaatgcctaatagctggtactggccattgtcgtaggctttgtccactctgacaaactgaagatggggactccactcancttcgccagccacaggngganctccaaacgaggttangtcgacttcccgataactttagattctgaaacctcacgggatttttcctcncttccctttgatctcncctccgcttgctcaacaaggacaggactcgctggcctttctttcccgtcanaaaagggatcccttgcggacangacctaaagttgagtaactgggttccccctantttgtccttccggggcctggggtgtccccgggggctcaagggtgancggggagaccctanntaccgggn

SEQ ID NO: 4547 - DNA, 740 bp, Homo sapiens
  misc_feature (561)..(561): "n" may be a, t, c, g, other or unknown
  misc_feature (669)..(669): "n" may be a, t, c, g, other or unknown
  misc_feature (679)..(679): "n" may be a, t, c, g, other or unknown
  misc_feature (683)..(683): "n" may be a, t, c, g, other or unknown
  misc_feature (731)..(731): "n" may be a, t, c, g, other or unknown
  misc_feature (738)..(738): "n" may be a, t, c, g, other or unknown
aagagccgctaggctgccctgcccgaagggctcaactgtcagtgagcctgcgcaggaggccaataggctgccaatactccttggactccccgccagggccctgctgtcagtgcgcctgcgcgcgggtccggcgccgaggttcttgactgctgtgccggacgccaggtgtagccatgcagcgagccgattccgagcagccctccaagcgtccccgttgcgatgacagcccgagaaccccctcaaacaccccttccgcagaggcagactggtccccgggcctggaactccatcccgactacaagacatggggtccggagcaggtgtgctccttcctcaggcgcggtggctttgaagagccggtgctgctgaagaacatccgagaaaatgaaatcacaggcgcattactgccttgtcttgatgagtctcgttttgaaaatcttggagtaagttccttgggggagaggaagaagctgcttagttatatccaagcgattggttcaaatccacgttgatacaatgaaggtaattaatgatcctatccatggccacattgagctccancctctcctcgtccgaatcattgatacacctcaatttcaacgtcttcgatacatcaaacagctgggaagtggttactaagtttttccaaggaagcttcacacaatcganttgagcatantccnagggttggggtatcctaacaaggatgtccaattcaaggcactggggtngaaaaanaa

SEQ ID NO: 4548 - DNA, 734 bp, Homo sapiens
  misc_feature (580)..(580): "n" may be a, t, c, g, other or unknown
  misc_feature (650)..(650): "n" may be a, t, c, g, other or unknown
  misc_feature (652)..(652): "n" may be a, t, c, g, other or unknown
  misc_feature (669)..(669): "n" may be a, t, c, g, other or unknown
  misc_feature (717)..(717): "n" may be a, t, c, g, other or unknown
  misc_feature (728)..(728): "n" may be a, t, c, g, other or unknown
gtgcgctggtgaggtggcgtccgttctacccggtcgctcccgttccgcgccatgcagagcccagtctctggcacctggctgctctgatctggtctcagcgcggagggagcagagggagtccatggaggatccctccgagcccgaccggttggcgtccgcggacggcgggagcccggaggaggaggaggatggggagcgggagccgctgctaccgcggatcgcctgggcccacccgcggagaggcgccccaggcagcgccgtgaggctgctggacgctgccggggaggagggcgaggccggcgacgaggagctgcccctcccgcccggggacgtgggggtctcccggagttcgcccgccgagctggaccggagccgccccgcggtttcagtaactattggtacttcagagatgaatgcattcttggatgacccagaatttgctgatattatgctgagagcagagcaagcaatagaagttggaatttttccagaaagaatctctcaaggttcaagtggaagttactttgtgaaggatcctaagaggaaaattattggtgtgtttaaacccaaatcagaaganccttatggtcaactcaatccaaaatggaccaaatatgtccataaggtctgctgcccttgctgctttggcnanggtgcctgattcctaancaagggtacctttccgaaaccgggtgcctatccttgtgggacaacaancttcatctgancattgt

SEQ ID NO: 4549 - DNA, 847 bp, Homo sapiens
  misc_feature (22)..(22): "n" may be a, t, c, g, other or unknown
  misc_feature (556)..(556): "n" may be a, t, c, g, other or unknown
  misc_feature (584)..(584): "n" may be a, t, c, g, other or unknown
  misc_feature (593)..(593): "n" may be a, t, c, g, other or unknown
  misc_feature (695)..(695): "n" may be a, t, c, g, other or unknown
  misc_feature (714)..(714): "n" may be a, t, c, g, other or unknown
  misc_feature (735)..(735): "n" may be a, t, c, g, other or unknown
  misc_feature (761)..(761): "n" may be a, t, c, g, other or unknown
  misc_feature (783)..(783): "n" may be a, t, c, g, other or unknown
  misc_feature (816)..(816): "n" may be a, t, c, g, other or unknown
  misc_feature (824)..(824): "n" may be a, t, c, g, other or unknown
  misc_feature (842)..(842): "n" may be a, t, c, g, other or unknown
gagagttcatctcaaagcctgngcaaggattggagaggtcaataagagtcagcgcctttaaaaagaaatctactcactcttctgtgtgcataaggccgagcagaggttcttcgtctcaagaggaactgacttctgttgagcactcaacacgccacagagaccagccatcttgcaacctcacctcacagcatggagagaggagaccaacctaagagaaccaggaatgaaaacattttcaactgcttatacaaaaaccctgaggcaacttttaagctgatttgctttccctggatgggaggtggctccactcattttgccaaatggggccaagatactcatgatttgctggaagagacagcatctcaccatgttgccaaggctggtctcaaactccggcgctcaagtgatcctcctgcttcagcctacccatgtgctggcgtgagccaccgtaggcgtgagccaccgtgcctggccaaaattcttggtctattctggattctaattttttttatgcactccttaaggcttcctggaagagaaagcagagttgaagaanctcttgaaaatgacatctcccagttagnttgatgaanttgtttgtgctctgcagccaagtcatccaaggataaaccatttgcattttttgggcacaagtatgggattctacattgctttttaaggactgcactaaggtnctaaaagaaaacaatcaancaagaaccaattgcatttaanttttggcaaggggcaactccctgtanaattcaaagggcctggcatcgnaatcccaaaagatgatgaattgtcagaaggacnaattaagnccataaccctaagggaantttgg

SEQ ID NO: 4550 - DNA, 783 bp, Homo sapiens
  misc_feature (603)..(603): "n" may be a, t, c, g, other or unknown
  misc_feature (616)..(616): "n" may be a, t, c, g, other or unknown
  misc_feature (687)..(687): "n" may be a, t, c, g, other or unknown
  misc_feature (707)..(707): "n" may be a, t, c, g, other or unknown
  misc_feature (711)..(711): "n" may be a, t, c, g, other or unknown
  misc_feature (723)..(723): "n" may be a, t, c, g, other or unknown
  misc_feature (725)..(725): "n" may be a, t, c, g, other or unknown
acagcaagatccgagccttcatcctccccaaggcagaggtgtgcgtgcggaaccatgtccagccctacatcccatccatcctggaggccctgatggtccccaccagccagggcttcactgaggtgcgagatgtcttcttcaaggaggtcacggacatgaacctgaacgtcatcaacgagggcggcattgacaagctgggcgagtacatggagaagctgtcccggctggcgtaccaccccctgaagatgcagagctgctatgagaagatggagtcgctgcgactggacgggctgcagcaacgatttgatgtgtccagcacgtccgtgttcaagcagcgagcccagatccacatgcgggagcaaatggacaatgccgtgtatacgttcgagaccctcctgcaccaggagctggggaaggggcccaccaaggaggagctgtgcaagtccatccagcgggtcctggagcgggtgctgaagaaatacgactacgacagcagctctgtgcggaagaggttcttccgggaggcgctgctgcagatcagcatcccgttcctgctcaagaagctgggccctacctgcaagtcggagctgccccggttccaangagctgatcttcnaggactttgccaagttcatcctgggtgggaaacacgtacgaaggaagtggtgctgcaaaaccgtcatgaanggacaccctgcaagcctgtnaaanggaaggcccccngntgcaaaaggaaagcacaaacctctaaccgggaacaacaatggggcatgcacaaacaag

SEQ ID NO: 4551 - DNA, 534 bp, Homo sapiens
  misc_feature (430)..(430): "n" may be a, t, c, g, other or unknown
  misc_feature (452)..(452): "n" may be a, t, c, g, other or unknown
  misc_feature (457)..(457): "n" may be a, t, c, g, other or unknown
  misc_feature (505)..(505): "n" may be a, t, c, g, other or unknown
  misc_feature (519)..(519): "n" may be a, t, c, g, other or unknown
  misc_feature (534)..(534): "n" may be a, t, c, g, other or unknown
tttgtttgtcaaattccaagcatatgtcttaaaaggcatttttgactatcacctccaagggaatagcttgagaaacccaaagtactatgctgcagtcgggggagaggtggattgcagcagtatcctcaactacctcttctcactgtcagtgacaccatcttggaatacctttgggaagcagcaggaaatgtgcatgtgggtagagatcaaaggaggcaatggctccaagccttgccatagggctgcctccaaggacacagaaggatgccagttgccacaggtccctgccctgtgtcacctgtctgcccttcattaaggtgagaaatctgcagatagcatcattaagatcagttttaaggggtatagggagggtgagggaagtggggggtgttaggtaagggttgggggtaaaggttttgggatgtcttanttagaaaccagattaatagaanagtangcctgatatattacatcatgagccatagtggtggggaaagaactttancaatataaccctanctcctcatttttagn

SEQ ID NO: 4552 - DNA, 764 bp, Homo sapiens
  misc_feature (623)..(623): "n" may be a, t, c, g, other or unknown
  misc_feature (674)..(674): "n" may be a, t, c, g, other or unknown
  misc_feature (692)..(692): "n" may be a, t, c, g, other or unknown
  misc_feature (715)..(715): "n" may be a, t, c, g, other or unknown
  misc_feature (733)..(733): "n" may be a, t, c, g, other or unknown
  misc_feature (764)..(764): "n" may be a, t, c, g, other or unknown
agaggggctaggctctgggattcaagatggaggcgctgagtcgagctgggcaggagatgagcctagcggccctgaagcaacacgacccctatatcaccagcatcgcagacctcacgggccaggtcgctctgtacaccttctgccccaaggccaaccagtgggagaagactgatatagaagggaccttattcgtatatcgaaggtcagcttccccttaccatggttttaccattgtgaatcgactaaatatgcacaatctagttgaaccagtgaataaagatttggaatttcagctccatgaaccatttcttctgtatagaaatgcaagcttgtcgatatatagtatctggttttatgacaagaatgactgtcaccgcatagcaaaactcatggctgatgtggtagaagaggagacacggcgatcccagcaagctgctcgggacaaacagagtcccagccaggccaatggctgcagcgaccacaggcccatcgacatcctggagatgctgagcagagccaaggatgagtatgagaggaatcagatgggtgactcaaatatctccaagccctgggttacagccaagcactcagctctccaatctggggaagcaccgagactctanaagaaaagcctccgggtcacaggataagtctgctccatctggacacaaagnatctgacggtagaagagntatttgggaactccttgccaaanggaacaaaccagcaattnttggggtcctgggttcaaaaagaaaattggn

SEQ ID NO: 4553 - DNA, 636 bp, Homo sapiens
  misc_feature (509)..(509): "n" may be a, t, c, g, other or unknown
  misc_feature (512)..(512): "n" may be a, t, c, g, other or unknown
  misc_feature (515)..(515): "n" may be a, t, c, g, other or unknown
  misc_feature (549)..(549): "n" may be a, t, c, g, other or unknown
  misc_feature (609)..(609): "n" may be a, t, c, g, other or unknown
  misc_feature (614)..(614): "n" may be a, t, c, g, other or unknown
  misc_feature (619)..(619): "n" may be a, t, c, g, other or unknown
  misc_feature (624)..(624): "n" may be a, t, c, g, other or unknown
acattcgatttattgggaggcctacttgcagcatattacctatcaggagaggagatattcaagattaaagcagtgcaattggctgagaaactccttcctgcctttaacacacctactgggattccttgggcaatggtgaatttgaaaagtggagtagggcgaaactggggctgggcatctgcaggtagcagcattctggctgaatttggtacactacatatggagttcatccacctcagctacttgacaggggacctgacttactacaaaaaggttatgcacattcggaaactacttcagaaaatggatcgtccaaatggtctttatccaaattatttgaaccccagaacagggcgctggggtcagtatcatacatctgtcggtggcctggggagacagtttttatgaatacttactgaaagcatgggttgatgtcagataaaacagaccatgaggcaagaaagatgtatgatgatgctattgaggctatagaaaaacatcttattaanaantcncgtggagggcttacctttattggggaatgggaanaatgggcacttggaaaaaaagatggggcatttggcctgcttttgctgggggaatttttancaccnaggcncaatntgggttcccaag

SEQ ID NO: 4554 - DNA, 757 bp, Homo sapiens
  misc_feature (603)..(603): "n" may be a, t, c, g, other or unknown
  misc_feature (642)..(642): "n" may be a, t, c, g, other or unknown
  misc_feature (681)..(681): "n" may be a, t, c, g, other or unknown
  misc_feature (730)..(730): "n" may be a, t, c, g, other or unknown
  misc_feature (739)..(739): "n" may be a, t, c, g, other or unknown
  misc_feature (749)..(749): "n" may be a, t, c, g, other or unknown
  misc_feature (752)..(752): "n" may be a, t, c, g, other or unknown
gaggcccagctcgcgcagtcgttcgggtgagcgaagatggcggccgagagggaacctcctccgctgggggacgggaagcccaccgactttgaggatctggaggacggagaggacctgttcaccagcactgtctccaccctagagtcaagtccatcatctccagaaccagctagtcttcctgcagaagatattagtgcaaactccaatggcccaaaacccacagaagttgtattagatgatgacagagaagatctttttgcagaagccacagaagaagtttctttggacagccctgaaagggaacctatcctatcctcggaaccttctcctgcagtcacacctgtcactcctactacactcattgctcctagaattgaatcaaagagtatgtctgctcccgtgatctttgatagatccagggaagagattgaagaagaagcaaatggagacatttttgacatagaaattggtgtatcagatccagaaaaagttggtgatggcatgaatgcctatatggcatatagagtaacaacaaagacatctctttccatgttcagtaagagtgaattttcagtgaaaagaagattcagcgactttcttggnttgcacagcaaattagcaagcaaatatttacatgttggntatattgtgccaccaagctccaagaaaagagtatagtangggatggaccaagggcaaaagtgggtaaaagaagactcatcatccactngagtttgtnagaaaaaacnggngagca

SEQ ID NO: 4555 - DNA, 837 bp, Homo sapiens
  misc_feature (591)..(591): "n" may be a, t, c, g, other or unknown
  misc_feature (646)..(646): "n" may be a, t, c, g, other or unknown
  misc_feature (697)..(697): "n" may be a, t, c, g, other or unknown
  misc_feature (740)..(740): "n" may be a, t, c, g, other or unknown
  misc_feature (748)..(748): "n" may be a, t, c, g, other or unknown
  misc_feature (755)..(755): "n" may be a, t, c, g, other or unknown
  misc_feature (814)..(814): "n" may be a, t, c, g, other or unknown
  misc_feature (820)..(820): "n" may be a, t, c, g, other or unknown
gtcaacaacccccgaggaaatttccaccccaatagaaacaacatatagaacggaacattcaggtccaccagagtgggcaacttaaatcctggagctaaaatatgggtacagtgtccatcagatcctgcccctaagactgctgaccttgtagctattggagcagaatatgaaggcacagtacaatttcctaaagatgaaaaacagtatcatgttcccctccatttttgttactacagagaataacctgtctgctagtaatcagcacctggatcaccatgtctgaggctgagaatgagttcatcaactgggtagccactgctgcaatagaagccaactgcagtcagtgctggctctgtgttgagttgccagaggccgctgggaatgggctaccttggagaattgtccctgctaacatttctgaatggatatgccaataccaatgggagtgggataacacttggttttgttttgattttttgagccagagtgtctctctgtcgcccaggctggagtgcagtggcacgatcttggctcagtgcaacctctgcctcctgggttcaagcgattctcctgcctcagcctcccaagtanctgggattataggtgcatgtcgccacgcctggctaattttttgtatttttagtanagacggggtttcaccgtattgcccaggctgatgtcaaactcctgagttcangtgatctgccctcctcgggctcccaaaggtgcctgggattcangtgttganccaacgngcctggcccggggataacactttgaaatccaaacctgggccttcttttaaccaaaacantccaanttttgcccttgccccaa

SEQ ID NO: 4556 - DNA, 671 bp, Homo sapiens
  misc_feature (658)..(658): "n" may be a, t, c, g, other or unknown
  misc_feature (662)..(662): "n" may be a, t, c, g, other or unknown
  misc_feature (668)..(668): "n" may be a, t, c, g, other or unknown
  misc_feature (670)..(671): "n" may be a, t, c, g, other or unknown
tctaaaaatgtattttactgtggtgcttaacttcttattaattaaatcccgtatcagaaaccttgcctgtgactttagaaagggcttttgattattgttttttcttcttgctcttgaaagtaatctggtcccagggaattactggtttaactgaacatctccagaattatttaaggtgtcaaaatatataaccttcacattgaaagataaaatttatgggcataataaaaatttgaatcattcaggtaattttcaaaaaatggagaccatttgtctttaactgaaggtatatgtttaagatcatagtctaccctagtatggtgctttgccacaaagtgatttctgaagaatggttctttttaagataatgacttcatatgatcattgtttcatgttacttgccacaaataactttaatttaggttgaaactggaactgtttgtttctcatattagctacttctctattaggagcacaagaaccatagttaaatgcaacatgagctactttagtcctgtttgtttaaatttgtgttgtccatgtattatgatttattaacttgttgatgcatgtaaattgggtgcattttgttgccatgtatgttaaatggtgaccaatgtttttacaaaggaattgaacaaaaaaagtatcttttaanaaanaacganann

SEQ ID NO: 4557 - DNA, 882 bp, Homo sapiens
  misc_feature (683)..(683): "n" may be a, t, c, g, other or unknown
  misc_feature (714)..(714): "n" may be a, t, c, g, other or unknown
  misc_feature (742)..(742): "n" may be a, t, c, g, other or unknown
  misc_feature (771)..(771): "n" may be a, t, c, g, other or unknown
  misc_feature (811)..(811): "n" may be a, t, c, g, other or unknown
  misc_feature (842)..(842): "n" may be a, t, c, g, other or unknown
  misc_feature (849)..(849): "n" may be a, t, c, g, other or unknown
  misc_feature (865)..(865): "n" may be a, t, c, g, other or unknown
  misc_feature (875)..(875): "n" may be a, t, c, g, other or unknown
gtaactgaaagagttgaaatgtcagtgaatgacaaagcagaagcaagtggctgcagaagatggtaaacgtagagaagaattggttctcaggtgtctgtatagatggcctaatagttctctataccaactgtagttctttttctgttctttcaattcagtagagtaaaaataaaaaacagtgtcattttcattcagaaactgagcagtttctaacttagctggtttgggagctttgctttccaagtttttttttgttttaaggcaaacttaaaattttaatggaaacatttcatatgaagccaagtctcactgagatcaccctactgcttaataattcagaaaattttcacatgcaaagtgtttggaattttatgtatgttatgaaagccatcttttacaattcttaatcacatctctgcctaaactgattcatgatgtttatgttttcctgtttgtagtgtacaaaatgaagctgaaggctcacatgttaaaatgaccctgaatagaataggaagaacaatgttcttacaggtcataatgtatttcacaattaaaaaactaaaatatgtacccatttttaagaaatcatacttctctccacattgatcttttcatttcttactagcttttaagaaattaaatacttgcctgagatagaaatactttaattttggaaccttaanggccaaatggactaaacttcaaagtaaagantttgtcagaataaattgagaccattaanccaatataatacttggtcaagagcactgnaatcccggaagaggagaaaatttgggtaaaaattaaaaanggttggggtgatcttaaatgcctcagttaangcacgtncaagtatcaatttggntgggtggacnaacctcc

SEQ ID NO: 4558 - DNA, 721 bp, Homo sapiens
  misc_feature (583)..(583): "n" may be a, t, c, g, other or unknown
  misc_feature (607)..(607): "n" may be a, t, c, g, other or unknown
  misc_feature (643)..(644): "n" may be a, t, c, g, other or unknown
  misc_feature (686)..(686): "n" may be a, t, c, g, other or unknown
  misc_feature (695)..(695): "n" may be a, t, c, g, other or unknown
  misc_feature (715)..(715): "n" may be a, t, c, g, other or unknown
cagcagaaggcaaagggaaagcaagcccatcttacatggcaggagcaagaggaagagagcaaagggggaggggttacacacttttctttccttttttttttttaagatggagtctcactgtcacccaggctggagtgcagtgatgagatctcagctcactgcaacctctgcctcccgagttcaagcgattcttctgcctcagcctcccaagtagctgggactacaggcatgtgccactatacccgggtaatttttgtattttcagtagatacaaagttttctcatattggccaagctggtctggaactcctgacttcaggtgcctcagcctcccaaagtgctgggattacaggcaagagccaccttgctcggctggggttacacacttttaaacaaccagatctcgtgagaactcagtcatgaggcagtactagggggatggtgcttaaccacctatgatgcaatcacctcccaccaggccccacctccaacactggggattacaattcaacatgggatttgggtggagacacagagccaaaccgtatcagtcatttttcctttactgaaggaaaattttggntgtggggttaagtactaaagatancccatgtagactttttctgaagataccccaagtggnnaagatttttaattaggcatttatttggcacctattgcattcnaggcattgngataaggagcttgggggatnaaaagg

SEQ ID NO: 4559 - DNA, 851 bp, Homo sapiens
  misc_feature (653)..(653): "n" may be a, t, c, g, other or unknown
  misc_feature (663)..(663): "n" may be a, t, c, g, other or unknown
  misc_feature (726)..(726): "n" may be a, t, c, g, other or unknown
  misc_feature (770)..(770): "n" may be a, t, c, g, other or unknown
  misc_feature (774)..(774): "n" may be a, t, c, g, other or unknown
  misc_feature (777)..(777): "n" may be a, t, c, g, other or unknown
  misc_feature (808)..(808): "n" may be a, t, c, g, other or unknown
  misc_feature (844)..(844): "n" may be a, t, c, g, other or unknown
atgccaccctgtcatgaacatatttataatcagcgtagatacatgagatccgagctgacagccttctggagagccacttcagaagaagacatggctcaggatacgatcatctacactgacgaaagctttactcctgatttgaatatttttcaagatgtcttacacagagacactctagtgaaagccttcctggatcaggtctttcagctgaaacctggcttatctctcagaagtactttccttgcacagtttctacttgtccttcacagaaaagccttgacactaataaaatatatagaagacgatacgcagaagggaaaaaagccctttaaatctcttcggaacctgaagatagaccttgatttaacagcagagggcgatcttaacataataatggctctggctgagaaaattaaaccaggcctacactcttttatctttggaagacctttctacactagtgtgcaagaacgagatgttctaatgactttttaaatgtgtaacttaataagcctattccatcacaatcatgatcgctggtaaagtagctcagtggtgtggggaaacgttcccctggatcatactccagaattctgctctcagcaattgcaagttaagtaagttacactacagttctcacaagagcctgtgangggatgtcangggcatcattacattgggtgtcccctttcccaagatttaagccttttgggatacaagacctangtttacaatataataaatattaatggctaaccttttaaaggatntaanaantagggtggtaaaccttgaccacaaactaacnggttttttttgaaataacaatgattcaaggggttanaaggggt

SEQ ID NO: 4560 - DNA, 707 bp, Homo sapiens
  misc_feature (263)..(263): "n" may be a, t, c, g, other or unknown
  misc_feature (498)..(498): "n" may be a, t, c, g, other or unknown
  misc_feature (520)..(520): "n" may be a, t, c, g, other or unknown
  misc_feature (530)..(530): "n" may be a, t, c, g, other or unknown
  misc_feature (553)..(553): "n" may be a, t, c, g, other or unknown
  misc_feature (643)..(643): "n" may be a, t, c, g, other or unknown
  misc_feature (650)..(650): "n" may be a, t, c, g, other or unknown
  misc_feature (653)..(653): "n" may be a, t, c, g, other or unknown
  misc_feature (656)..(656): "n" may be a, t, c, g, other or unknown
  misc_feature (694)..(694): "n" may be a, t, c, g, other or unknown
tcaccaagattgatgcagtgctgttgtctcaccctgatcctctccaccttggtgccctcccgtatgctgtcggaaagttgggtctgaactgtgctatctatgcaaccattcctgtttataaaatgggacagatgttcatgtatgatctttatcagtctcgacacaatacagaagattttacactctttacattagatgatgtggatgcagcctttgataaaatacagcagctaaaattctctcagattgtgaatttgaaaggnaaaggacatggcctgtctatcacacctctgccagctggtcatatgataggtggaacaatatggaaaatagtcaaagatggggaagaagaaattgtttatgcagttgacttcaaccacaagagggagatccatttaaatggatgttccctggaaatgctaagcaggccttccctacttatcacaagattcattcaatgctacatatgtacagcctagaagaaaacagagagatgancaacttctgacaaatgtcctgnaaacacttcnaggggatggaaatgtgttaatancagtggacacagcaggcagagttttgggacttgctcaacttcttgatcaagatttggaggactaaagatgcagggattgggtggtttacncattggnacnccnaaataatgtcaagttacaaaaggtggggggagttttcnaaggtcccaggta

SEQ ID NO: 4561 - DNA, 692 bp, Homo sapiens
  misc_feature (294)..(294): "n" may be a, t, c, g, other or unknown
  misc_feature (432)..(432): "n" may be a, t, c, g, other or unknown
  misc_feature (513)..(513): "n" may be a, t, c, g, other or unknown
  misc_feature (621)..(621): "n" may be a, t, c, g, other or unknown
  misc_feature (626)..(626): "n" may be a, t, c, g, other or unknown
  misc_feature (642)..(642): "n" may be a, t, c, g, other or unknown
  misc_feature (668)..(668): "n" may be a, t, c, g, other or unknown
  misc_feature (692)..(692): "n" may be a, t, c, g, other or unknown
ttaatatcctaaccttgttatctcttgcctcctcctctctgtttttatttgttttcaaggtttttcataaaaacaaatactagttttgaaggattttttcttacatttaactgctcaaacataatatttttggggacaccttcttatggaggagtttgaaaactttttatgttcttgagtttgtccaatatcagctgcttttgggaaaggaaacaaaaaagtgaaggaaatattttcaggaagtttttctcaacctacaaaagctttaaaaataagaaattgacaagtaactanactatgatatgcctttgctttcatcacaaaagttcatcagcaaacaggaaaaaaaaagacccctaaaaagcctaaagctttaaattgtctccaaattcttaaaattagtcatccgtcctaaatggtacatttaattgncaagcaaccctgtccggatttgaaatagatgatatgataaaacatgcattaacatgagtagtttattttggtgggctccanagtgtaagaatattttattttttgtttgacataaaaagtgaagttgacttgcgggaataacaatccagcaatgctttcaatctttctgaataacacaagaataacggngctanaagcttccgggattanttgtccaattccagttaaaggagtgngttacatttaaggtttgggaatan

SEQ ID NO: 4562 - DNA, 682 bp, Homo sapiens
  misc_feature (416)..(416): "n" may be a, t, c, g, other or unknown
  misc_feature (446)..(446): "n" may be a, t, c, g, other or unknown
  misc_feature (487)..(487): "n" may be a, t, c, g, other or unknown
  misc_feature (511)..(511): "n" may be a, t, c, g, other or unknown
  misc_feature (555)..(555): "n" may be a, t, c, g, other or unknown
  misc_feature (584)..(584): "n" may be a, t, c, g, other or unknown
  misc_feature (633)..(633): "n" may be a, t, c, g, other or unknown
  misc_feature (645)..(646): "n" may be a, t, c, g, other or unknown
  misc_feature (663)..(663): "n" may be a, t, c, g, other or unknown
caaagatggaatacgtctgaatcttattttgatacgatacactggagacaattcaccctattccccaactataatttattttcatgggaatgcaggcaacataggtcacaggttgccaaatgcattacttatgttggttaacctcaaagttaaccttttgctggttgattatcgaggatatggaaaaagtgaaggagaagcaagtgaagaaggactctacttagattctgaagctgtgttagactacgtgatgactagacctgaccttgataaaacaaaaatttttctttttggccgttccttgggtggagcagtggctattcatttggcttctgaaaattcacataggatttcagccattatggtggagaacacatttttaagcataccacatatggccagcactttattttcantctttccgatgcgttaccttcctttatggngctacaaaaataaatttttgtcctacagaaaaatctctcantgtagaaatgccttcacttttcanctctgggctcctcagatcaattaattccaccagtaatgatgaancaactttatgaactctccccatctccggnctaagagattagccatttttccagaatgggactcacaatgacacatggnaagtgccaaggnnatttcactgcaccttgngacaagttcatcaaaggaa

SEQ ID NO: 4563 - DNA, 631 bp, Homo sapiens
  misc_feature (461)..(461): "n" may be a, t, c, g, other or unknown
  misc_feature (464)..(464): "n" may be a, t, c, g, other or unknown
  misc_feature (468)..(468): "n" may be a, t, c, g, other or unknown
  misc_feature (519)..(519): "n" may be a, t, c, g, other or unknown
  misc_feature (584)..(584): "n" may be a, t, c, g, other or unknown
  misc_feature (586)..(586): "n" may be a, t, c, g, other or unknown
  misc_feature (599)..(599): "n" may be a, t, c, g, other or unknown
  misc_feature (601)..(601): "n" may be a, t, c, g, other or unknown
  misc_feature (621)..(621): "n" may be a, t, c, g, other or unknown
tatataactaagaacccccctgggctgtatttttggtcaaaggagtctccaaggcggcttacaaaagcttcctttttcacttgaccacccttgctcattggttacttgtgaagggaattggtcagtttccacctcagcactttgccttatcaacatgcggtcgccatctagtggccaaaggttgtctccaccaagctacccagatggaaggcaaataaatcctttcggccaccctgctgtccatcgtgaactttgggaatgaaatataatggcctgaacgaactgcctttgtgttcagagatcagtgcaacactagggtcagaagactccagaagcagccacttagtagactctcacgcagaactgagaaatgcactaactgtcctgtgggcaaaagagacaggagtgggccaagagaagtccaagtgccggggaaagggttactgtactgcaatactggnaanccanctgctgaccttgtaaagtaaacctttgctgggtggcccaaattctggcccncaaggcaagataagaaattgggtgtaaaggattttgttgggggggcctggccaatgatctttganangaatccccgaatnanccaatagttttttttggtcnaatttttggg

SEQ ID NO: 4564 - DNA, 818 bp, Homo sapiens
  misc_feature (522)..(522): "n" may be a, t, c, g, other or unknown
  misc_feature (627)..(627): "n" may be a, t, c, g, other or unknown
  misc_feature (642)..(642): "n" may be a, t, c, g, other or unknown
  misc_feature (676)..(676): "n" may be a, t, c, g, other or unknown
  misc_feature (680)..(680): "n" may be a, t, c, g, other or unknown
  misc_feature (731)..(731): "n" may be a, t, c, g, other or unknown
  misc_feature (739)..(739): "n" may be a, t, c, g, other or unknown
  misc_feature (796)..(796): "n" may be a, t, c, g, other or unknown
  misc_feature (804)..(804): "n" may be a, t, c, g, other or unknown
  misc_feature (814)..(814): "n" may be a, t, c, g, other or unknown
agagaggggtgcaagatcctgatttttcaggagttcaagcgacaatggcagcccaatacggcagtatgagcttcaaccccagcacaccaggggccagttatgggcctggaaggcaagagcccagaaattcccaattgagaattgtgttagtgggtaaaaccggagcaggaaaaagtgcaacaggaaacagcatccttggccggaaagtgtttcattctggcactgcagcaaaatccattaccaagaagtgtgagaaacgcagcagctcatggaaggaaacagaacttgtcgtagttgacacaccaggcattttcgacacagaggtgcccaatgctgaaacgtccaaggagattattcgctgcattcttctgacctccccagggcctcatgctctgcttctggtggttccactgggccgttacactgaggaagagcacaaagccacagagaagatcctgaaaatgtttggagagagggctagaagtttcatgattctcatattcacccggaaagatgacttangtgacaccaatttgcatgactacttaagggaagctccagaagacattcaagacttgatggacattttcggtgaccgctactgtgcgttaaacaacaaggcaacangcgcctgagcaaganggccaaagggcacaattgctgggcctgattcaancgcnttggtgagggaagaacaaggaaggctgctacactaataggatgttccaaanggccggangaaggagatcagaagcaaacacaagcaatgcaagaactccacaaaatgggagctggngaaaaaanaaagccccgnttaa

SEQ ID NO: 4565 - DNA, 765 bp, Homo sapiens
  misc_feature (609)..(609): "n" may be a, t, c, g, other or unknown
  misc_feature (630)..(630): "n" may be a, t, c, g, other or unknown
  misc_feature (674)..(674): "n" may be a, t, c, g, other or unknown
  misc_feature (684)..(684): "n" may be a, t, c, g, other or unknown
  misc_feature (735)..(735): "n" may be a, t, c, g, other or unknown
  misc_feature (760)..(760): "n" may be a, t, c, g, other or unknown
  misc_feature (763)..(763): "n" may be a, t, c, g, other or unknown
actttgttcgctcctcagtcgtccaggcggattcctttttcgccaggcaccaaggcacagcttagagtagacccgagtcctgctctgcggagttcgtcttcccagcgaaggtacagaggcggatgaactgctgagacttgattgacgtattttaagatttttttaacttctgaagtctagcaggcctgtaagaacaaaaatcattctgtaggaattaaaaacagaatccagtcttgacaacatatccacaatgtctgatgtatctactagtgtacaatcaaaatttgctagacttgcaaagaaaaaggaaaatatcacctatatgaaaagagagcagttaacagaaactgataaggacatagctccggtattagatttaaaatgcaaggacgtatcagcaattatgaataagtttaaggtcttaatggaaattcaagacctgatgtttgaggagatgagggaaactcttaaaaatgacctaaaagcagttttaggaggaaaagctacaatacctgaggtaaagaattcagagaactccagtagtaggacaagagtttcagcaaataatcaatttagcattacaaaaaacagggatggtagggaaaatanaaggagaaaactctaaaatangtgatgataatgaaaatttaacctttaaattagaagtaaatganctgagtgggnaaattagacaacactaacgaatacaattagtaatgatgggaaggaaatttncccaagggtgaaatcaccaaagttnccnaa

SEQ ID NO: 4566 - DNA, 790 bp, Homo sapiens
  misc_feature (686)..(686): "n" may be a, t, c, g, other or unknown
  misc_feature (737)..(737): "n" may be a, t, c, g, other or unknown
  misc_feature (757)..(757): "n" may be a, t, c, g, other or unknown
  misc_feature (772)..(772): "n" may be a, t, c, g, other or unknown
  misc_feature (779)..(779): "n" may be a, t, c, g, other or unknown
  misc_feature (788)..(788): "n" may be a, t, c, g, other or unknown
agactgaaaactaaagcctgcagagacctctgaaggaaaacctgtcccgggctctgtcacttcacacccatggctaaccctggaggtggtgctgtttgcaacgggaaacttcacaatcacaagaaacagagcaatggctcacaaagcagaaactgcacaaagaatggaatagtgaaggaagcccagcaaaatgggaagccacatttttatgataagctcattgttgaatcgtttgaggaagcaccccttcatgttatggttttcacttacatgggatatggaattggaaccctgtttggctatctcagagactttttaagaaactggggaatagaaaaatgcaacgcagctgtggaacgaaaagaacaaaaagtacgtatgcgcacctccctggatctttgtcaatgcctactcctctctaaagtgttctcagaagtggtgatgcaggtgcagattctagaaagcatgaggtgctcaggaactattcagggcaaatttcattcatctccacctgctaaaccccattacccatgggcttatggacctgtttttacaaacatctcatgggcaactactatttgccacataccaaactaaggcttttcccataccttgtaatatttaatttttgtaacaaccccatgatatagatattaaactataattttgaagataaaaacatcaanatataaaagcaagtgctcccgggtgggactgtactttgggcctctaattgnaattgggtattatttatgcnccatccctgaaaaanggaaaantgcaatttnag

SEQ ID NO: 4567 - DNA, 531 bp, Homo sapiens
  misc_feature (102)..(102): "n" may be a, t, c, g, other or unknown
  misc_feature (167)..(167): "n" may be a, t, c, g, other or unknown
  misc_feature (248)..(248): "n" may be a, t, c, g, other or unknown
  misc_feature (258)..(258): "n" may be a, t, c, g, other or unknown
  misc_feature (353)..(353): "n" may be a, t, c, g, other or unknown
  misc_feature (419)..(419): "n" may be a, t, c, g, other or unknown
  misc_feature (448)..(448): "n" may be a, t, c, g, other or unknown
  misc_feature (460)..(460): "n" may be a, t, c, g, other or unknown
  misc_feature (497)..(497): "n" may be a, t, c, g, other or unknown
  misc_feature (525)..(526): "n" may be a, t, c, g, other or unknown
ttgcttttgggtttttttttcctgtttccacccctccccgttattttttcctttggatggttaaaagcattgcaggcacccgggaaggtgagcagagggtangtgggtgggcttgtcccctccccggtcccccgccctgctcacctctactatgaaggtgcccccangtcacctgtgctgcccgccatctgcccacgtggcttgcagtgactcaggagagcaggcccacagcgtttgccatcttgcanagctggggangggcacaagaccctgccctcgtgttccctcccagcccgcagtatttcagggacaggctcttcccctctatccctcaccctgagagcacccctggnggcttggttggggaagggaggggctgcctgtctctggaggtgtcaggcaagcaggtggcaggcagntcacccaaccaccccatgggatcccccanccctttaaccgngcctgccttgtccccatgatagttgacaatcgggggnttcctgcaaggcccgtctgtctgtcaannactcc

SEQ ID NO: 4568 - DNA, 490 bp, Homo sapiens
  misc_feature (455)..(455): "n" may be a, t, c, g, other or unknown
  misc_feature (469)..(469): "n" may be a, t, c, g, other or unknown
  misc_feature (479)..(479): "n" may be a, t, c, g, other or unknown
tagatttgtcggcttgcggggagacttcaggagtcgctgtctctgaacttccagcctcagagaccgccgcccttgtccccgagggccatgggccgggtctcagggcttgtgccctctcgcttcctgacgctcctggcgcatctggtggtcgtcatcaccttattctggtcccgggacagcaacatacaggcctgcctgcctctcacgttcacccccgaggagtatgacaagcaggacattcagctggtggccgcgctctctgtcaccctgggcctctttgcaatggagctggccggtttcctctcaagagtctccaagttcaacagcacccagagcctcatctgtatcctttctgcctggccaactttcccacacgagccacttctatcaggactcccttcaggcacctgacacaatagggtctgctgtagccaatccttccaagttcaaagatnttcaacgatgtgcnaaatcctgcngtttacaaggg

SEQ ID NO: 4569 - DNA, 546 bp, Homo sapiens
  misc_feature (464)..(464): "n" may be a, t, c, g, other or unknown
  misc_feature (494)..(494): "n" may be a, t, c, g, other or unknown
  misc_feature (523)..(523): "n" may be a, t, c, g, other or unknown
  misc_feature (535)..(535): "n" may be a, t, c, g, other or unknown
  misc_feature (537)..(537): "n" may be a, t, c, g, other or unknown
gtagtttactctcagcagcagccaaagcacagctagcaaatcaaaacaaacttgctggtaacaacagtagcagcagtagcaattctggagctgttgccggcagtggcaacactgaaggacatagcactttaaacaccatgttccctcctactgccaacatgcttctcccaacaggtgaagggcaaagtggtcgagcagcactaagagataagctgatgtctcagcaaaaagacgcattgcggaaaagaaaacaaccacctacgacagtgttgagtttgctcagacagtctcaaatggatagttctgcagttcctaaacctggacctgacttgctaaggaagcagggtcagggttcatttcccatcagttcaatgtctcagttactacagtctatgagttgtcaaagctctcacttgagtagcaatagtaccccggggttgtggggcctcaaatactgcttgccntgctccgctaaccagctgcattttacaagnttccagtatgaactccagtggttcctcanaacatacctttnanagggggaaa

SEQ ID NO: 4570 - DNA, 729 bp, Homo sapiens
  misc_feature (355)..(355): "n" may be a, t, c, g, other or unknown
  misc_feature (511)..(511): "n" may be a, t, c, g, other or unknown
  misc_feature (571)..(571): "n" may be a, t, c, g, other or unknown
  misc_feature (636)..(636): "n" may be a, t, c, g, other or unknown
  misc_feature (656)..(656): "n" may be a, t, c, g, other or unknown
  misc_feature (659)..(659): "n" may be a, t, c, g, other or unknown
  misc_feature (690)..(690): "n" may be a, t, c, g, other or unknown
  misc_feature (707)..(707): "n" may be a, t, c, g, other or unknown
gtctgcgagaccgacttggacggagccgagctgaggctcggcttcctgctgatggtcagggttttggcaactccccggtgtgagaggggtagggagtgctcccggcggcgacggggccgagttcaccagccgccggggcagtagtcgaaggcccggcgcggcatgtcctgggtgccgcggtgcgggcagtgaacgcgcgccgggcgggatgggccggcgccgggcgccagagctgtaccgggctccgttcccgttgtacgcgcttcaggtcgaccccagcactgggctgctcatcgctgcgggcggaggaggcgccgccaagacaggcataaagaatggcgtggtgagagcgcanggccactggggctgggtcttgctgcgggctggcggcgattccaaggtggccggggggtcgcggggcgggccacactccagcttcgggccctgcccacttctgttgggaagacccgcttgcctgacgcccaggggcgaatttcagtcgagaactcancgggcggaggagaggcttttaaggtaaagtgaaaactgcacacagctgcagagtcgccangaacgcttcagctccgcctcagagcaactccaaggggtcttatactggccttttccgggaagtcntgccctgccctctaacaacngcnaaagttgtgcaattgggtttaagctaagttncctccctctcctgaacntcaacctgttctgtaaaaataa

SEQ ID NO: 4571 - DNA, 801 bp, Homo sapiens
  misc_feature (44)..(44): "n" may be a, t, c, g, other or unknown
  misc_feature (565)..(565): "n" may be a, t, c, g, other or unknown
  misc_feature (600)..(600): "n" may be a, t, c, g, other or unknown
  misc_feature (653)..(653): "n" may be a, t, c, g, other or unknown
  misc_feature (668)..(668): "n" may be a, t, c, g, other or unknown
  misc_feature (741)..(741): "n" may be a, t, c, g, other or unknown
  misc_feature (760)..(760): "n" may be a, t, c, g, other or unknown
  misc_feature (783)..(783): "n" may be a, t, c, g, other or unknown
  misc_feature (793)..(793): "n" may be a, t, c, g, other or unknown
  misc_feature (796)..(796): "n" may be a, t, c, g, other or unknown
aaactgataggtgcagatggcatcacatttgtatttgtgtttcnttaattatgactcctgagttacttttgatcatccttgcttgcatggaagctttctttttaagtaacgtggacatttaccaaacatcctgcatgtgtcagtagacatgaggcagctgagactatagtgggtagaggaaaaattattggcttggaaataggcatcttggattcaagttccgtatctactgctttaattaagtggctttgaataaattgcacattatccctaaagttaccttcttcaggttttaagttagctgagactaaaatgacttgtaaagattacccaacaagaaagtctgtagtaatgccagcatgtagttcatgctcaatgatgactagctttaatatttattgagcacatactgtgtgctaaactccatgtgttttgcatatatcagtgcatttaataatcacaaaaagtatatgggttttttgaactataatttgtcaccatgttacagaagaggaaactaaaggccagagtgggataaattacttgatcgtgggcaagttagtanagctgagattcaaaccctggcagtcctgaatccanagccttgtgctccaaactactaaaggtcaatcaatcaagttccctaaaaaggngaaagatcccaaaancgggaactgttcaattatgggaacccactagcccacatgtggctgtttgagcaacttgaaaatgtggctaagnccaaactggagaagtgccnaaagtttaaaattacaaacccgnatttttgaanaangtaaa

SEQ ID NO: 4572 - DNA, 739 bp, Homo sapiens
  misc_feature (595)..(595): "n" may be a, t, c, g, other or unknown
  misc_feature (605)..(605): "n" may be a, t, c, g, other or unknown
  misc_feature (608)..(608): "n" may be a, t, c, g, other or unknown
  misc_feature (645)..(645): "n" may be a, t, c, g, other or unknown
  misc_feature (716)..(717): "n" may be a, t, c, g, other or unknown
  misc_feature (730)..(730): "n" may be a, t, c, g, other or unknown
  misc_feature (739)..(739): "n" may be a, t, c, g, other or unknown
aaaaagtgatgaaggcctacgagtgcggcgcggcctgaaggggcacgcgggggacctgcaaagctagtgaggggcggggcaggcggcgcggtgggggcgggccgagcccggaggccagatgagcggacacagccccacgcgcggggccatgcaggtggccatgaacggtaaggcccgcaaagaggcggtgcagactgcggctaaggaactcctcaagttcgtgaaccggagtccctctcctttccatgctgtggctgaatgccgcaaccgccttctccaggctggcttcagtgaactcaaggagactgagaaatggaatattaagcccgagagcaagtacttcatgaccaggaactcctccaccatcatagcttttgctgtagggggccagtacgttcctggcaatggcttcagcctcatcggggcccacacggacagcccctgcctccgggtgaaacgtcggtctcgccgcagccaggtgggcttccagcaagtcggtgtggtgacctatggtggtgggatctgggagcacctggtttgaccgtgacctgactctggctggacgcgtcattgtcaagtgccctaactcaagtcngctaaagcancanctggtgcacgtggagcgggccaatcttcgcatcccanacctgggcatccaatctgcaacgaaaatatcaaacgaagaacttttggggcccaacaacaagagattcatnnaatccccaattcntggcaaaan

SEQ ID NO: 4573 - DNA, 688 bp, Homo sapiens
  misc_feature (378)..(378): "n" may be a, t, c, g, other or unknown
  misc_feature (399)..(399): "n" may be a, t, c, g, other or unknown
  misc_feature (466)..(466): "n" may be a, t, c, g, other or unknown
  misc_feature (473)..(473): "n" may be a, t, c, g, other or unknown
  misc_feature (490)..(490): "n" may be a, t, c, g, other or unknown
  misc_feature (569)..(569): "n" may be a, t, c, g, other or unknown
  misc_feature (577)..(577): "n" may be a, t, c, g, other or unknown
  misc_feature (611)..(611): "n" may be a, t, c, g, other or unknown
  misc_feature (617)..(617): "n" may be a, t, c, g, other or unknown
  misc_feature (647)..(647): "n" may be a, t, c, g, other or unknown
  misc_feature (673)..(673): "n" may be a, t, c, g, other or unknown
  misc_feature (686)..(686): "n" may be a, t, c, g, other or unknown
atacctttgagtcttgcagaagagaaactaccaacaggcattaatcctctcactctacacatcatgagaaggacaaaagaatatgtaagtaatgacgcggcacagtcagatgatgaagagaagttacagtctcagccaacagatactgatggtggaaggttaaaacagaaaacgactcaactaaagaagtttcttggaaaatcagtaaagagagcaaagcaccttgctgaggaatatggtgaacgtgctataaataaagttaaaagtgttagagatgaagtgtttcatactgatcaagatgatccttcatcaagtgatgatgaaggaatgccatacacaagaccagttaaattcaaagcagcacacggtttcaaaggnccttatgattttgatcaagtnaaagtggtgcaagatcttagtggtgaacatatgggagctgtttgggccatgaaattttctcactggnggccgantacttgcctcagctggncaagacaatgtagtgagaatatgggctttaaaaaatgcttttggccatttcaacaatatgcgaatgaaatacaataccnaaaggacntgtgtccccaacaacctcccaaggaaagtctaangttcancaaaatccgggtacaagatacaagggggtntgcactggaacctgatgaagaacccngatgataaaaacnca

SEQ ID NO: 4574 - DNA, 422 bp, Homo sapiens
  misc_feature (380)..(380): "n" may be a, t, c, g, other or unknown
  misc_feature (391)..(391): "n" may be a, t, c, g, other or unknown
  misc_feature (415)..(415): "n" may be a, t, c, g, other or unknown
cagtttcatttcactcattaagctcagcacactgctgcccattcccagggtggacagcccatgcagaggctttgctaggtgaaaaagcttggtttgctaaaagtcacaggcagaatcctgcaggtccatgcccttagatgtgccaaattgtaagttgcatagattttaggggtttggggcaaaaaggaaacttatgtttaagtgctctagggaaagaggcattgtttccaggtggtttcattgtcatatgatctccaggttcagaaggcaagtagtgtctggagaaacgattcctggccctgagaaattgaccattaatttctgacagatagtttaagtgcctcctgtgacatacaaaagagacacacactgtccttgtngaaatcatganctgcaagaggagacactatcaagntatccca

SEQ ID NO: 4575 - DNA, 513 bp, Homo sapiens
  misc_feature (270)..(270): "n" may be a, t, c, g, other or unknown
  misc_feature (397)..(397): "n" may be a, t, c, g, other or unknown
  misc_feature (429)..(429): "n" may be a, t, c, g, other or unknown
  misc_feature (433)..(433): "n" may be a, t, c, g, other or unknown
  misc_feature (435)..(435): "n" may be a, t, c, g, other or unknown
  misc_feature (462)..(462): "n" may be a, t, c, g, other or unknown
  misc_feature (499)..(499): "n" may be a, t, c, g, other or unknown
attatgacacccgtctgtgtcactgctcttgacaatgacagaacctacaaaaggatccagggtcctcagcccccatctgcctcccagcctcacttcctgcacttccatgaaaataacctttgttccccctacaaggaacttcttgcagttatccaaatgttccctgtcctggtgcacactgaggcccctgcatggagccaatccttcacttaaatcactatgcccccatgccttcatctggagaactcacacttctgttcagaccctcanatgtgactgcttccgtgttactgctttctctgccaattcactgggcctggaaaatacttctggaaactccaagggagaagttaccaagctcccccttccctgggggctttgctgatgcctctgtcanagcactcagcacatgacactcggattactggntcanantcccctgcttccaaaggctctgcctgnatgcctccaagggttatttccaaagcacccagctcantgcctgtccattgg

SEQ ID NO: 4576 - DNA, 676 bp, Homo sapiens
  misc_feature (477)..(477): "n" may be a, t, c, g, other or unknown
  misc_feature (524)..(524): "n" may be a, t, c, g, other or unknown
  misc_feature (527)..(527): "n" may be a, t, c, g, other or unknown
  misc_feature (551)..(551): "n" may be a, t, c, g, other or unknown
  misc_feature (616)..(616): "n" may be a, t, c, g, other or unknown
  misc_feature (629)..(629): "n" may be a, t, c, g, other or unknown
  misc_feature (633)..(633): "n" may be a, t, c, g, other or unknown
  misc_feature (639)..(639): "n" may be a, t, c, g, other or unknown
  misc_feature (675)..(675): "n" may be a, t, c, g, other or unknown
cccatgacaatgcagattttggcaaagctgcatctgctggtgagcagctagaactgaactttttgatcatctcaaacaaaaagtctggacgtattaaacaatatctccattcccctccctgccaacccctgatgacctctcttcaactttcggagaagctaaaacttacttatgaggaaaagtgtgaaattgaggaatcccaattgaagtttttgagaaataagaatcacggccgggcgcggtggctcacgcctgtaatcccagcactttgggaggctgaagcgggcgaatcacgaggtcaagagattgagaccatcctggccaacatggtgaaaccccgtttctactaaaaatacaaaaattagctgggcctggtagcacgtgcctgtagtcccagctacttgggaggctgaggcaggagaatcacttgaacctgggaggcggaggttgcagtaagctgagaccacgccactgcantccaacctggcaacagagtgagactccatttcaaaaaagaaaaacanaanaagaaataagaatcactaactgcncttatagaaattatgatattcaagtaaaataatgaaaataaagcactttattttcaaattattangtattttttcccngtanataagncctcaaccaattttaaaattgcaatgataatataana

SEQ ID NO: 4577 - DNA, 713 bp, Homo sapiens
  misc_feature (20)..(20): "n" may be a, t, c, g, other or unknown
  misc_feature (588)..(588): "n" may be a, t, c, g, other or unknown
  misc_feature (598)..(598): "n" may be a, t, c, g, other or unknown
  misc_feature (652)..(652): "n" may be a, t, c, g, other or unknown
  misc_feature (678)..(678): "n" may be a, t, c, g, other or unknown
  misc_feature (683)..(683): "n" may be a, t, c, g, other or unknown
  misc_feature (699)..(699): "n" may be a, t, c, g, other or unknown
  misc_feature (701)..(701): "n" may be a, t, c, g, other or unknown
ttctctctttgtttaggcangatcattatttatttaactgtagttgcattgtgaattatttgtattatgttgttccagatcattttctcatagtggctttgatttggctctgccttggtgtttgagcccaaagttgaatctttttctctttgttttcttgaagtgcaggatataatctgaaattccatttgttgagtctcttacatcaccatgtgtgtgatgtggaatgaagagatgtgaaagatggattcatgagaccaagcgtgggtgataatgaactctgaaaacattttataaaacaattatccccattcttgttctctgttagcactttgtttgcaaaatacttcttaattatttgttagcgatacatgtcagctgaggtcctttttatgcccctggtctagatggtggtgatggattaaatgggtttctgtaggtcccagagattttaaggctaatgataattaagtattgttattgggccaggcagtgttctaggatatttaccgtttttacactgatttgtccctcccaacaaccttctgggatgggttactattaccgtattcattttacaaatgaaantgggattcangatgggtaaataacttatccaagggtacttagccagaagttgtcaaagtccaanatttgaacccaaggctgtcctggctnccaanagtccaaggattccangncaattgcgccaa

SEQ ID NO: 4578 - DNA, 727 bp, Homo sapiens
  misc_feature (577)..(577): "n" may be a, t, c, g, other or unknown
  misc_feature (622)..(622): "n" may be a, t, c, g, other or unknown
  misc_feature (681)..(681): "n" may be a, t, c, g, other or unknown
  misc_feature (697)..(697): "n" may be a, t, c, g, other or unknown
  misc_feature (706)..(706): "n" may be a, t, c, g, other or unknown
  misc_feature (709)..(709): "n" may be a, t, c, g, other or unknown
  misc_feature (724)..(724): "n" may be a, t, c, g, other or unknown
attccatggcggcgcggcggcgacggagcaccggcggcggcagggcgagagcattaaatgaaagcaaaagagttaataatggcaacacggctccagaagactcttcccctgccaagaaaactcgtagatgccagagacaggagtcgaaaaagatgcctgtggctggaggaaaagctaataaggacaggacagaagacaagcaagatggtatgccaggaaggtcatgggccagcaaaagggtctctgaatctgtgaaggccttgctgttaaagggcaaagctcctgtggacccagagtgtacagccaaggtggggaaggctcatgtgtattgtgaaggaaatgatgtctatgatgtcatgctaaatcagaccaatctccagttcaacaacaacaagtactatctgattcagctattagaagatgatgcccagaggaacttcagtgtttggatgagatggggccgagttgggaaaatgggacagcacagcctggtggcttgttcaagcaatctcaacaaggccaaggaaatctttcagaagaaattccttgacaaaacgaaaaacaattgggaagatcnagaaaagtttgagaaaggtgccttggaaaatatgatatgctacanatggactatgccaccaattactcaaggatgaagaggaaacaaaggaaaggaggaatctncttaaatctccccttngaagccaanagnccacagctaagattnttc

SEQ ID NO: 4579 - DNA, 613 bp, Homo sapiens
  misc_feature (520)..(520): "n" may be a, t, c, g, other or unknown
  misc_feature (571)..(571): "n" may be a, t, c, g, other or unknown
  misc_feature (578)..(578): "n" may be a, t, c, g, other or unknown
  misc_feature (611)..(611): "n" may be a, t, c, g, other or unknown
  misc_feature (613)..(613): "n" may be a, t, c, g, other or unknown
gagtttttgtatttttaagtaagagatgggtttcaccatgttggtcaggctggtctcgaactcctgacctcatgatccgcccacctcagcctcccaaagtgctgggattacaggtgtgagctaccacgcctggcctattatgatttttaatgaagtttgtcataaccaagtacttgtcattttctgatgagaacactgaaagtttagggcatgtagtgccaacttttggcagtatttcttcacaggtggtggcgtgttcttccatcaggagtcatgtaatgtttggtgatctctcgtgatgttagcagctgttgctgtttgatgccttatcccttaattcattaagggttgcaaaatggagatatcctaatgctatcattttttcatctgttaggtgaagttttacttacataaaaacttcatctcttcttgcttctgctaatggtaaccattctttttcagtatcataataagcttgttaaacaaatttgatgtgttttaaaagtgccagctaaagtanaaagacatcattaagaacaactatgacatcttcccataaaacttcccttgntaactanactgcatggattattgggtttggatgccggtanan

SEQ ID NO: 4580 - DNA, 662 bp, Homo sapiens
  misc_feature (608)..(608): "n" may be a, t, c, g, other or unknown
  misc_feature (635)..(635): "n" may be a, t, c, g, other or unknown
  misc_feature (641)..(641): "n" may be a, t, c, g, other or unknown
  misc_feature (650)..(650): "n" may be a, t, c, g, other or unknown
  misc_feature (660)..(660): "n" may be a, t, c, g, other or unknown
gaagaaaggcgagcagaacagaggaagtatggagtgttctttgatgacgactatgactacctgcagcacctgaaggaaccatctgggccttcagagcttattccctcaagtaccttcagtgcacacaacaggagagaggagaaagaagaaacgctagtaattccaagcactggaattaagttgccttcatcagtgtttgcttcagagtttgaggaagatgttggattgttaaataaagcagctccagtttcaggacctcgactggattttgatcctgacattgttgcagctcttgatgatgattttgactttgatgatccagataatctgcttgaggatgactttattcttcaggccaataaggcaacaggagaggaagagggaatggatatacagaaatctgagaatgaagatgacagcgagtgggaagatgtggatgatgagaagggagatagcaatgatgactatgactctgcaggcctattgtcagatgaagactgtatgtctgtgcccggaaaaactcacagagctatagcagatcacttgttctggagtgaggaaacaaagagtcccttcacggagtattcgatgacttcctcagtcatgangagaaattgaacagctgaccctacaangatganaaggttganaagttttaanga

SEQ ID NO: 4581 - DNA, 808 bp, Homo sapiens
  misc_feature (540)..(540): "n" may be a, t, c, g, other or unknown
  misc_feature (630)..(630): "n" may be a, t, c, g, other or unknown
  misc_feature (633)..(633): "n" may be a, t, c, g, other or unknown
  misc_feature (654)..(654): "n" may be a, t, c, g, other or unknown
  misc_feature (724)..(724): "n" may be a, t, c, g, other or unknown
  misc_feature (738)..(738): "n" may be a, t, c, g, other or unknown
  misc_feature (800)..(800): "n" may be a, t, c, g, other or unknown
  misc_feature (807)..(808): "n" may be a, t, c, g, other or unknown
attttgactgagcaaccctagtgacaggagccgaagcagcagcgcaggttgtccccgtttcccctcccccttcccttctccggttgccttcccgggccccttacactccacagtcccggtcccgccatgtcccagaaacaagaagaagagaaccctgcggaggagaccggcgaggagaagcaggacacgcaggagaaagaaggtattctgcctgagagagctgaagaggcaaagctaaaggccaaatacccaagcctaggacaaaagcctggaggctccgacttcctcatgaagagactccagaaagggcaaaagtactttgactcaggagactacaacatggccaaagccaagatgaagaataagcagctgccaagtgcaggaccagacaagaacctggtgactggtgatcacatccccaccccacaggatctgccccagagaaagtcctcgctcgtcaccagcaagcttgcgggtggccaagttgaatgatgctgcccggggctctgccagatcctgagacgcttcccctccctgccncaaccggggtcctgtgctggctcctgccccttcctgcttttgcaagccaggggtcaggaggtggctcgggtgttgggctggagaaggcanaanccctttcctgttggtgtccancacatggagccccttgggctgagcaccaaagaccttgaaacctttttgtttttaccttttttttccaaantaacaagttgggangaaattatcaattgaaaattctggggggttggggggttgggggttttaaaagggtggggggntgggaann

SEQ ID NO: 4582 - DNA, 798 bp, Homo sapiens
  misc_feature (607)..(607): "n" may be a, t, c, g, other or unknown
  misc_feature (715)..(715): "n" may be a, t, c, g, other or unknown
  misc_feature (738)..(738): "n" may be a, t, c, g, other or unknown
  misc_feature (744)..(744): "n" may be a, t, c, g, other or unknown
  misc_feature (765)..(765): "n" may be a, t, c, g, other or unknown
  misc_feature (776)..(776): "n" may be a, t, c, g, other or unknown
agattgtgaatatttacctaatgataatttttagagaaggagatatcatagatgagtatgattgggaagttcagaaaactaaaatttgatttttacagccatccaactatagaatcattagaatttagtcatttatggataaattaaaatgaacacctggactcttgttaaaatcagaaagtccaaaccaaagataggcacttcccattcaccattctgttttaaagcagtaaaaattgaggtgcccttggatatccacaagcctaaattgagtacacccttgaaccagagcccctcagttaatggggtgaccgacatggggtagctgatcccagggggcattcccctctcgagctggccctgcactgggtggcctggggattgtgcttccttgcacagtggtgcacatttctatgtgtggatgagatttcttgtcaacttttcctgccaagacactaaatgcttttcagtgctaatactgacctgatagtagagatttctttccctgagtcggatggtagcaggatttacttggtaacccttgattaaaatacctgtttttttgtttgtttgttttcctttgttttttaaggaaataagtcaatangcggagggaaatgttccatatgcactattaaataattttgttaacaacctgccctgggataaaagtgaatggaagtacatgactgagtaacagtaattaaatccttgncctgattgtttaattgggggacngtatangccttccttgactggacaatnagaatgttggnattaagtttttcaattgggtcc

SEQ ID NO: 4583 - DNA, 805 bp, Homo sapiens
  misc_feature (650)..(650): "n" may be a, t, c, g, other or unknown
  misc_feature (712)..(712): "n" may be a, t, c, g, other or unknown
  misc_feature (777)..(777): "n" may be a, t, c, g, other or unknown
  misc_feature (781)..(781): "n" may be a, t, c, g, other or unknown
  misc_feature (796)..(796): "n" may be a, t, c, g, other or unknown
  misc_feature (798)..(798): "n" may be a, t, c, g, other or unknown
aatttgttcaagtaggccatggccaagacagacagtggggattgtgcatatttgatgacatcatagagcactgcagtccaacttcatttaaatatgtagaatattttcggtggccaatgctactaaatatgcgagataacaaccctgaagtcaggcaagctgctgcttatggcctgggtgtcatggcacagtttggtggagatgattatcgttctttatgttcagaagctgttccacttctggtaaaagttattaagtgtgcaaattccaaaaccaaaaaaaatgtcattgctacagagaactgtatctcagcaatagggaagattttgaagtttaagcctaactgtgtaaatgtagatgaagttcttccacactgattatcatggcttccactgcatgaagataaagaggaagctattcagactttgagttttctctgtgacctaattgaaagtaaccacccagttgtaattggtccaaataattccaatcttcccaaaataatcagtataattgcagaaggaaaaattaatgagactattaactatgaggatccttgtgccaaacgcctagctaatgtcgtgcgtcaggtacagacttctgaagatttatgggtggaatgtgtatcacaacttgatgatgaacagcangaagccttacaggagttgctaaattttgcctgaagcactttaatataacttgaataatatcnaatataaagtaactacaaataagtgttgtgaatagattttatataaatcagagaaatggttttcncccngctaagcaatttaananttcctcc

SEQ ID NO: 4584 - DNA, 837 bp, Homo sapiens
  misc_feature (711)..(711): "n" may be a, t, c, g, other or unknown
  misc_feature (794)..(794): "n" may be a, t, c, g, other or unknown
  misc_feature (797)..(797): "n" may be a, t, c, g, other or unknown
  misc_feature (817)..(817): "n" may be a, t, c, g, other or unknown
  misc_feature (829)..(829): "n" may be a, t, c, g, other or unknown
  misc_feature (835)..(835): "n" may be a, t, c, g, other or unknown
aaaaattctaagagcaacctcatgcagttctctttgttgatgaaaaggatgttgtagagataaatgaaaagttcacagagttacttttggcaattaccaattgtgaggagaggttcagcctgtttaaaaacagaaacagactaagtaaaggcctccaaatagacgtgggctgtcctgtgaaagtacagctgagatctggggaagaaaaatttcctggagttgtacgcttcagaggacccctgttagcagagaggacagtctccggaatattctttggagttgaattgctggaagaaggtcgtggtcaaggtttcactgacggggtgtaccaagggaaacagctttttcagtgtgatgaagattgtggcgtgtttgttgcattggacaagctagaactcatagaagatgatgacactgcattggaaagtgattacgcaggtcctggggacacaatgcaggtcgaacttcctcctttggaaataaactccagagtttctttgaaggttggagaaacaatagaatctggaacagttatattctgtgatgttttgccaggaaaagaaagcttaggatattttgttggtgtggacatggataaccctattggcaactgggatggaagatttgatggagtgcaactttgtagttttgcgtgtgttgaaagtacaattctattgcacatcaatgatatcatcccagagagtgtgaccncaaggaaaggaggcctcccaaacttgccttaatgtcaagaagtgttggggacaaagggtcaaccaagtcataataaaccaaanggntacaagggtttaacctcagnccctggaaaatngaaacnag

SEQ ID NO: 4585 - DNA, 704 bp, Homo sapiens
  misc_feature (440)..(440): "n" may be a, t, c, g, other or unknown
  misc_feature (507)..(507): "n" may be a, t, c, g, other or unknown
  misc_feature (564)..(564): "n" may be a, t, c, g, other or unknown
  misc_feature (588)..(588): "n" may be a, t, c, g, other or unknown
  misc_feature (638)..(638): "n" may be a, t, c, g, other or unknown
  misc_feature (645)..(645): "n" may be a, t, c, g, other or unknown
  misc_feature (674)..(674): "n" may be a, t, c, g, other or unknown
  misc_feature (680)..(680): "n" may be a, t, c, g, other or unknown
  misc_feature (694)..(694): "n" may be a, t, c, g, other or unknown
ggactatgtctgcatttctgacaattactggctgggaaagaagaagccctgcatcacctacggcctcaggggcatttgctactttttcatcgaggtggagtgcagcaacaaagacctccattctggggtgtacgggggctcggtgcatgaggccatgactgatctcattttgctgatgggctctttggtggacaagagggggaacatcctgatccccggcattaacgaggccatggccgccgtcacggaaatcaggagcacaagctgtacgacgacatcgactttgacatagaggagtttgccaaggatgtgggggcgcagatcctcctgcacagccacaagaaagacatcctcatgcaccgatggcggtacccgtctctgtccctccatggcatcgaaggcgccttctctgggtctggggccaagaccgtgattcccangaaggtggttggcaagttctccatcaggctcgtgccgaacatgactcctgaagtcgtcggcgagcangtcacaagctacctaactaagaagtttgctgaactacgcagccccaatgagttcaangtgtacatgggccacggtgggaanccctgggtctccgacttcagtcaacctcattacctggctggggaaaaganccatganggacaatttttggggttgagccaaacctnaccaanggaaaggcgggaantattccccgt

SEQ ID NO: 4586 - DNA, 902 bp, Homo sapiens
  misc_feature (711)..(711): "n" may be a, t, c, g, other or unknown
  misc_feature (746)..(746): "n" may be a, t, c, g, other or unknown
  misc_feature (818)..(818): "n" may be a, t, c, g, other or unknown
  misc_feature (820)..(820): "n" may be a, t, c, g, other or unknown
  misc_feature (824)..(824): "n" may be a, t, c, g, other or unknown
  misc_feature (836)..(836): "n" may be a, t, c, g, other or unknown
  misc_feature (865)..(865): "n" may be a, t, c, g, other or unknown
agaaggtgaaatagaccctaccccctgatggaggatccacttgtatgtataaggatgggaagctttgcaggcagccatctttggaagccatccaccacagtggctcaatcaacctggtgatgacacagagtgaagtccccactttccaagaattttccttcacaagaaagttcctttcatttcacccacacaggaatgttgactttaaatgagaccaagacctaaaaggccacattcacagataggtaacagggcatctctttgacaagcctcaatcgctcttgggggcttcaatttcctcatctgtaaaataaagatagcctagagttgagttctacagccttaaacctcaaaggaaaagcctttatacaggtgttctaatttgcaactatcaccagatatttcccataaggccaggtgcagtggctcatgcctgtaatcctatcacttcgggagaccaaggcaggtggattacttgaggttaggagttcgagaccagcctagccaacagggtgaaaccccacctctactaaaaagacaaaaattagccaggtgtggtggtgcactcccataatcccagttactgaggaggctaaggcacaagaatcacttgaacctgggaggcagaggttgcagtgagccaagatcatgccactgcactccagcctgggagacagagagagactctgtctcaacaacaacaacaacaanaaattatttcccgtaggattttccaaaaggagggntaggaatgtgaagtcaataattcacaaatgcactcctactttttcggaggtatattaggaatgcatatcctngntggnacctacacaaangcctcccttggaattttaaacttccagantttttccccctggcttaagggccggcaaccaaggggt

SEQ ID NO: 4587 - DNA, 801 bp, Homo sapiens
  misc_feature (564)..(564): "n" may be a, t, c, g, other or unknown
  misc_feature (602)..(602): "n" may be a, t, c, g, other or unknown
  misc_feature (681)..(681): "n" may be a, t, c, g, other or unknown
  misc_feature (741)..(741): "n" may be a, t, c, g, other or unknown
  misc_feature (749)..(749): "n" may be a, t, c, g, other or unknown
  misc_feature (772)..(772): "n" may be a, t, c, g, other or unknown
  misc_feature (778)..(778): "n" may be a, t, c, g, other or unknown
  misc_feature (792)..(792): "n" may be a, t, c, g, other or unknown
tatgaatgcacagcttgcccatcggggacatacaaacctgaagcctcaccaggaggaatcagcagttgcattccatgtcccgatgaaaatcacacctctccacctggaagcacatcccctgaagactgtgtctgcagagagggatacagggcatctggccagacctgtgaacttgtccactgccctgccctgaagcctcccgaaaatggttactttatccaaaacacttgcaacaaccacttcaatgcagcctgtggggtccgatgtcaccctggatttgatcttgtgggaagcagcatcatcttatgtctacccaatggtttgtggtccggttcagagagctactgcagagtaagaacatgtcctcatctccgccagccgaaacatggccacatcagctgttctacaagggaaatgttatataagacaacatgtttggttgcctgtgatgaagggtacagactagaaggcagtgataagcttacttgtcaaggaaacagccagtgggatgggccagaaccccggtgtgtggagcgccactgttccacctttcagatgcccaanagatgtcatcatatccccccacaactgtgggcaagcanccagccaaatttgggacgatctgctatgttaagttgcccgccaagggttcattttatctggagtcaaagaaatgctganatgtacaacttctgggaaaattggaatgtccgagttcaaggcagctgttgtgtaaagacntggaaggncctcaatcaactggtcctaaggncattanagggttaagactcngggaacagc

SEQ ID NO: 4588 - DNA, 734 bp, Homo sapiens
  misc_feature (605)..(605): "n" may be a, t, c, g, other or unknown
  misc_feature (681)..(681): "n" may be a, t, c, g, other or unknown
  misc_feature (687)..(687): "n" may be a, t, c, g, other or unknown
  misc_feature (709)..(709): "n" may be a, t, c, g, other or unknown
  misc_feature (713)..(713): "n" may be a, t, c, g, other or unknown
  misc_feature (733)..(733): "n" may be a, t, c, g, other or unknown
ctgaaaacagtgaaactgagttagaaaggattttgcgtcgcagaaaggtgacagcagaagcagatagcagtagtccaactgggatattagccacctcagagtccaaatccatgccagtgttgggttctgtatccagtgtaacaaaaacagccttgaacaagaaaactctggaggcagaattcaacagcccgtcccccccaacacctgagccaggtgaagggccccgtaaattggaaggatgcacaagttccaaggttacgtttcagcctcccagtagcattggatgcaggaaaaaatacattgacggtgaaaaacaagccgaaccagttgtagttttagatcctgtttctacacatgaaccccaaaccaaagaccaggttgctgaaaaagatccaactcaacacaaggaggatgaaggcgaaattcaaccagaaaacaaagaagacagcattgaaaacgtgagagagacagacagctccaactgctgatccataaaccagaagcctgacatgtttggaagtccttttcaataagcacatgattagtgttgttatattggcaagggctgtagacattctgctctggtcactgtattcagaatacangttcttttccggtgtcacttttgtaagtagcaactataaacataagttaactgtttagcaaaacacacattcccantaaggntttgggtttttggatcctttanaaangattgagggtttttttcccna

SEQ ID NO: 4589 - DNA, 748 bp, Homo sapiens
  misc_feature (517)..(517): "n" may be a, t, c, g, other or unknown
  misc_feature (674)..(674): "n" may be a, t, c, g, other or unknown
  misc_feature (679)..(679): "n" may be a, t, c, g, other or unknown
  misc_feature (703)..(703): "n" may be a, t, c, g, other or unknown
  misc_feature (707)..(707): "n" may be a, t, c, g, other or unknown
  misc_feature (738)..(738): "n" may be a, t, c, g, other or unknown
aaaattctccgttctatgacaaataccgaggagtgactgaaaaaaaaattaacaaacatatagcaacagttaaaaataagtaaatagaaatctgcatagaccagaaatttacaactattattgaagaaaagaacagtaagaaaccagaaagtagtattttgggggcagctcacgtggagtcaggctcagtgtaggacttgagtgaaagactttcccaagaagccccagggctaatctgggcagccctggatgcttaggtctggaacccagggccagaatctttgacagccagatccagtaaaggccaaaaccaagaatctcctcccacaccagtggattctcaacacacagtgcacttgatcaggctgtcagaattacctagagcagtgcatattctgatggagagaattctctgaacaatcctgaattgcatttaaaagtgtgcgaaatatttgtgtaataaatccttcgtttgtgttcatttgttagaagccaattctaaacattcaaatattcnaatatgtaaacaaaaaaactggaaaaagaatttgcatttaatttgaccggagaatatgtgcttctcttagctgtgaattttttttcactttaatcagtttgctttcagaacataaactgcattctaaaccctgttattttgttcctaatattaacanccccnaaagagaagttagatgtttatatngaangccagggaagttggtaaagtgatattatccngtgggattta

SEQ ID NO: 4590 - DNA, 606 bp, Homo sapiens
  misc_feature (533)..(533): "n" may be a, t, c, g, other or unknown
  misc_feature (556)..(556): "n" may be a, t, c, g, other or unknown
  misc_feature (558)..(558): "n" may be a, t, c, g, other or unknown
  misc_feature (597)..(597): "n" may be a, t, c, g, other or unknown
  misc_feature (601)..(601): "n" may be a, t, c, g, other or unknown
agttggtggaaccgggagcttcgagtccgtccccggtgctgcctgcgcgttcacctgagtctcgctggagctcttctcgcccgcccacctcatctcaacccactttccgcggggagcggcgccaagctgggccttcctcggatcaggcgtcccctgaagtcggcacgcccctctgcgtcccccttcggtcccgctaggaccccgtccgggctgccgtcgcctcgtcgctatggcgcccaccatccagacccaggcccagcgggaggatggccacaggcccaattcccaccggactctgcctgagaggtctggagtggtctgccgagtcaagtactgcaatagcctccctgatatccccttcgaccccaagttcatcacctaccccttcgaccagaacaggatcgtccagtacaaagccacttccttggagaaacagcacaaacatgacctcctgactgagccagacctgggggtcaccatcgatctcatcaatcctgacacctaccgcatcgaccccaatgttcttctagatncaagctgatgagaaacttttggnanaagagattcaagcccccaccaagctccaagagattccancaancacgc

SEQ ID NO: 4591 - DNA, 654 bp, Homo sapiens
  misc_feature (418)..(418): "n" may be a, t, c, g, other or unknown
  misc_feature (493)..(493): "n" may be a, t, c, g, other or unknown
  misc_feature (562)..(562): "n" may be a, t, c, g, other or unknown
  misc_feature (601)..(601): "n" may be a, t, c, g, other or unknown
  misc_feature (610)..(610): "n" may be a, t, c, g, other or unknown
  misc_feature (638)..(638): "n" may be a, t, c, g, other or unknown
  misc_feature (652)..(652): "n" may be a, t, c, g, other or unknown
gctgggaccctgaggcggccgtggttaggcggctccccggcggctcctccgcggcggtgacggcgaccgcactccccgcttcccgctccccgcgctcctccgcccgggtccgccagccgaggccgctcccgagcgtcggaagatgccggccgtgtccaagggggacgggatgcggggcctggcggtcttcatctcggatatccgcaactgtaaaagtaaagaagcagaaataaaaaggataaacaaggaactggcaaatatcagatcaaaatttaaaggtgacaaggctcttgatggctatagtaaaaaaaagtacgtctgcaagttgctcttcatctttctccttggtcatgacattgactttggacacatggaggctgtgaacctgctgagttcaaacagatacacggaaaagcanatcggctaccttttcatctctgtgttggtgaactcaaacagtgagctgatccgcctgatcaacaacgccatcaanaatgacctggccagccgcaaccccaccttcatgggcctggccctgcactgcatcgccaagcgtgggcanccgggagatggccgaggccttcgccggggagatcctaangtcctcgtngcccggagacactatggacagcgtgaancaaaagcgcggccntg

SEQ ID NO: 4592 - DNA, 695 bp, Homo sapiens
  misc_feature (584)..(584): "n" may be a, t, c, g, other or unknown
  misc_feature (609)..(609): "n" may be a, t, c, g, other or unknown
  misc_feature (645)..(645): "n" may be a, t, c, g, other or unknown
  misc_feature (679)..(679): "n" may be a, t, c, g, other or unknown
  misc_feature (688)..(688): "n" may be a, t, c, g, other or unknown
  misc_feature (695)..(695): "n" may be a, t, c, g, other or unknown
gatatgttcatgacaaacattttgaagttctgcattctgacttggaaccacagatgaggtccatacttctagactggcttttagaggtatgtgaagtatacacacttcatagggaaacattgtatcttgcacaagacttttttgatagatttatgttgacacaaaaggatataaataaaaatatgcttcaactcattggaattacctcattattcattgcttccaaacttgaggaaatctatgctcctaaactccaagagtttgcttacgtcactgatggtgcttgcagtgaagaggatatcttaaggatggaactcattatattaaaggctttaaaatgggaactttgtcctgtaacaatcatctcctggctaaatctctttctccaagttgatgctcttaaagatgctcctaaagttcttctacctcagtattctcaggaaacattcattcaaatagctcagcttttagatctgtgtattctagccattgattcattagagttccagtacagaatactgactgctgctgccttgtgccattttacctccattgaagtggttaagaaagcctcaggtttggantgggacagtatttcagaatgtgtanattggatggtaccttttgtcaatgtagtaaaaagtnctagtccagtgaagctgaagacttttaagaagantcctatggnagacagn

SEQ ID NO: 4593 - DNA, 677 bp, Homo sapiens
  misc_feature (518)..(518): "n" may be a, t, c, g, other or unknown
  misc_feature (539)..(539): "n" may be a, t, c, g, other or unknown
  misc_feature (631)..(631): "n" may be a, t, c, g, other or unknown
  misc_feature (634)..(634): "n" may be a, t, c, g, other or unknown
  misc_feature (654)..(654): "n" may be a, t, c, g, other or unknown
  misc_feature (660)..(660): "n" may be a, t, c, g, other or unknown
  misc_feature (670)..(670): "n" may be a, t, c, g, other or unknown
tcaaaagaaaagaatttaataaattcccctttcccctgagccagcttaggggcaatgtccttgtagagatctggggtaggaggagaacgaaaaccaaggtgggtaacatgcctgggtccctctctccaagctgacaccccaaagagccaaagccttggcacctggtcccatcaggaccgctcactgaggggatggcatctgagtggctgctctgcagtcatgaggctgccatgggtggatacggactggttgccaggtaaccatatcctgcatccctcacttttcccttcctggagttcatactggggcttgatcccagcccacacctttcctacaggctttctttccagcccgggccagcccaggaaattcagaaatctgtgggaccctctgagggttctgctagaccaggtttctcaatcttggcacagttggcattggacctggagccttccctgcgcggggctgtcctgggcggtgtgggatgtgcagcagtaattctggcctctacccactangtgccaagtagcacaccccanccccgaattgggacaaccaggaaggtctccagacattgcctcatgttccctgggggggaaaagcgcaccctggttctgaaccatctcttcanggntaaagatttcctgaaggaancctcantccaacaagntcagtaa

SEQ ID NO: 4594 - DNA, 684 bp, Homo sapiens
  misc_feature (588)..(588): "n" may be a, t, c, g, other or unknown
  misc_feature (644)..(644): "n" may be a, t, c, g, other or unknown
  misc_feature (647)..(647): "n" may be a, t, c, g, other or unknown
  misc_feature (662)..(662): "n" may be a, t, c, g, other or unknown
  misc_feature (671)..(671): "n" may be a, t, c, g, other or unknown
gtgctcaccgccgcttccggtccgcgtggggtgcattctcgcgccggtggcgaggttagggcccgcgttgcgacgtggtgcagcgcatactttcacaagtgggtctcccttgtccgggactatggccaccgactcgtgggccctggcggtggacgagcaggaagcggctgtcaagtcgatgaccaatttgcagatcaaggaagagaaagtcaaagcagataccaatggtattatcaaaaccagtaccactgccgagaaaacagatgaagaggagaaagaggacagagctgcccagtccttactcaacaagctgatcagaagcaaccttgttgataacacaaaccaagtggaagtcctgcaacgggatccaaactcccctctgtactcggtgaagtcgtttgaagagcttcggctgaaaccacagcttctccagggagtctatgccatgggcttcaatcgaccctccaagatacaagagaacgcattacccatgatgcttgctgaacccccacagaatctgattgcccagtctcagtctggcactggtaaaacagctgcctttgtcttagccatgctcagccgagtggngccatcagacagatacccccaatgtctgtgcctctccccaaacatatgaagctggngcntcaaacaaggaaatnttgtttgancaagatggggcaa

SEQ ID NO: 4595 - DNA, 739 bp, Homo sapiens
  misc_feature (612)..(612): "n" may be a, t, c, g, other or unknown
  misc_feature (665)..(665): "n" may be a, t, c, g, other or unknown
  misc_feature (704)..(704): "n" may be a, t, c, g, other or unknown
  misc_feature (735)..(735): "n" may be a, t, c, g, other or unknown
gaatatttatatgtatctatttttgtgtactgttttcaagtgtactgagatttaaatgtgttctattattagagtagatcgaagaaaaaattagtctcagaaagagcttttagtctgattgtttccatttcccatgtaattttaagttaagctaaagttttaaagtggcagttttctgtcgatgactttttcaagtgctaacactgtctcttttgtgaaaatctggaaaagtgctcatattcacaggtggctggtgctagtctaacttaattcatgtgtataactagatggatttaaatggtctgagcctatgcctatctttcaaattggtgtggatttcatggccatagtactttacctgttgaactcttgtgatttcacaagattctctacttatgtgataggagggtatggccagttattcatctaactggactcaatcttagaatagtaggaacattatacccagtttgcactaacatgggccatttgtagcccaaccttctcttccatctacctgtccattcattattgggacaaggaaaggtaacttatttctcttctgcacagagcataatgtgaaagttttatacctacttttaaaattctgcnttccagaaacaaaattcctgcagtggtctaatttaatgtctttaaagtttcanattacaattaaaaacctcattttttttttccatttttgnacctaacagtggtgaatactttacgttgggnatcc

SEQ ID NO: 4596 - DNA, 229 bp, Homo sapiens
  misc_feature (221)..(222): "n" may be a, t, c, g, other or unknown
  misc_feature (228)..(228): "n" may be a, t, c, g, other or unknown
gacagggcctctttctttgcttctctccacagctcttcccagccggggggctgagtgccctcccccttctctccctgcccctcccctttctcccccctcaccgcccagcggggcttctaactgacagttgtcgccgggccccgtccgtgcaccgcctccttctgcccgtgtcccccgcaggtagaggggggcgggagggggtgtgagggagaggagagagnnaatgana

SEQ ID NO: 4597 - DNA, 711 bp, Homo sapiens
  misc_feature (630)..(630): "n" may be a, t, c, g, other or unknown
  misc_feature (636)..(636): "n" may be a, t, c, g, other or unknown
  misc_feature (676)..(676): "n" may be a, t, c, g, other or unknown
gcggccgtcgcgtctgacagaccactgcagaccacgggccgaggcccagcgcccgtccgcagcgcggccggcatggcggcgacaaggagccccacgcgggcaagggagcgggagcggtctggcgctcccgccgcaggaagtgaccaagttcactcctggatgctagctacaagccaagccttagacactgtctggagaatggcaaaaggctttgtgatgttggcagtttcatttctggtggctgccatctgctacttccggaggctacatttatattcagggcacaagctgaaatggtggattggatatctgcagagaaaattcaaaaggaacctcagtgtggaggcagaggttgatttactcagttattgtgcaagagaatggaaaggagagacaccccgtaacaagctgatgaggaaggcttatgaggagctattttggcggcatcacattaaatgtgttcgacaagtaaggagagataactatgatgctctcagatcagtgttatttcagatattcagccagggcatctcttttccatcatggatgaaagaaaaggacattgttaagcttcctgaaaaactgctgttttcacaaggttgtaattggattcagcagtacagttttggncctganaagtatacaaggctccaatgttgtttggaaaactacgggnaatatgtgggaattatttgaaaaccacagtggact

SEQ ID NO: 4598 - DNA, 758 bp, Homo sapiens
  misc_feature (688)..(688): "n" may be a, t, c, g, other or unknown
  misc_feature (727)..(727): "n" may be a, t, c, g, other or unknown
  misc_feature (732)..(732): "n" may be a, t, c, g, other or unknown
tgaaagatgtgtcatatcatgtgccctctatgaggagttttggattaaggtaagaaaatcatgtgctcttaaacttgaatatattataaacattgatctagtgactaaccttttttgtacttctgttgaatgttgttcatataactatatctgttgcattaggagatggtctgcttgcaaccagatttgactgctgcatatgccaacctcgttgcctctcttcgtccttccttacagaaactagtctagtggttcaataaaggtgctgaatgggtttaaaaatagaattttatcgttctgtcacaaatttaatggcttgttcaactgtaaattattcagtatttcctcttttctgtatgtagtatgccaagtacatggaaaaccatagcattgaaggagtgaggcatgtcttcagcagagcttgtactatacatctcccaaagaaacccatggtgcatatgctttgggcagcttttgaggaacagcagggtaatattaatgaagccaggaatatcttgaaaacatttgaagaatgtgttctaggattggcaatggttcgtttacgaagagtaagtttagaacgacggcatggaaatctggaagaagctgaacatttgcttcaggatgccattaagaatgccaaatcaaataatgaatcctcattttatgctgtcaaaactagcccggnatcttttcaaaatacaagaaaaaaccttccaaaatcaangaaanggggcttttgggaagcaatcccaaag

SEQ ID NO: 4599 - DNA, 818 bp, Homo sapiens
  misc_feature (753)..(753): "n" may be a, t, c, g, other or unknown
  misc_feature (760)..(760): "n" may be a, t, c, g, other or unknown
  misc_feature (788)..(788): "n" may be a, t, c, g, other or unknown
agttattaatgaccgctgagcaggcagcaccatgtcagtgtgacaactgatcgggtgaacgatgcaccactaaccaccatggaaacaaggaaaaataaagccagctcacagggtctctcttcactggattgagagcctcagcctgccgactgagaaaaagagttccaggaaaaagaaggaatcccggctgcagcctcctgccttcctttatattttaaaatagagagataagattgcgtgcatgtgtgcatatctatagtatatattttgtacactttgttacacagacacacaaatgcacctatttataccgggcaagaacacaaccatgtgattatctcaaccaaggaactgaggaatccagcacgcaaggacatcggaggtgggctagcactgaaactgcttttcaaggaggtgaagcattccacagataatcagctactctattcagggaaggagtgtaaacatcaccactttttgcatgtttgcataaaaaaggcccactgaatcagttaaagacgaggaagaggaggagaaagagaaagaagaggaagatgttgggcaacatttatttaacatgctccacagcccggaccctggcatcatgctgctattcctgcaaatactgaagaagcatgggatttaaatattttacttctaaataaatgaattactcaatctcctatgaccatctatacatactccaccttcaaaaaagtacatcaattattatatcattaagggaaatagtancttctcntctccaaatatgcatgacattttttggncaatgcaaattgtggcaactgggcacctta

SEQ ID NO: 4600 - DNA, 743 bp, Homo sapiens
  misc_feature (721)..(721): "n" may be a, t, c, g, other or unknown
  misc_feature (724)..(724): "n" may be a, t, c, g, other or unknown
  misc_feature (735)..(735): "n" may be a, t, c, g, other or unknown
atttttgtaactgcattccagggcctttcagtggctttcattctgaagttcctggataacatgttccatgtcttgatggcccaggttaccactgtcattatcacaacagtgtctgtcctggtctttgacttcaggccctccctggaatttttcttggaagccccatcagtccttctctctatatttatttataatgccagcaagcctcaagttccggaatacgcacctaggcaagaaaggatccgagatctaagtggcaatctttgggagcgttccagtggggatggagaagaactagaaagacttaccaaacccaagagtgatgagtcagatgaagatactttctaactggtacccacatagtttgcagctctcttgaaccttattttcacattttcagtgtttgtaatatttatcttttcactttgataaaccagaaatgtttctaaatcctaatattctttgcatatatctagctactccctaaatggttccatccaaggcttagagtacccaaaggctaagaaattctaaagaactgatacaggagtaacaatatgaagaattcattaatatctcagtacttgataaatcagaaagttatatgtgcagattattttccttgggcttcaagcttccaaaaaacttgtaataatcatgttagctatagcttgtatatacacatagagatcaatttgccaaatattcacaatcatgtagntcnagtttacatgncaaaagtc

SEQ ID NO: 4601 - DNA, 785 bp, Homo sapiens
  misc_feature (759)..(759): "n" may be a, t, c, g, other or unknown
  misc_feature (765)..(765): "n" may be a, t, c, g, other or unknown
  misc_feature (780)..(780): "n" may be a, t, c, g, other or unknown
aagacaaatgaaaaactgtatacagtatgtgatgtggctctctgtgttataaatagtaaaagtgctttgtgcaatgcagattcaccaaaggacccagtcctcccaatgaaattttttacacaacctgaaaaggacttctgtaacgataagagttatatttcagaagagacaagagtacttctgttaacaggaaagccaaagcctgctggagtactaggtgcagtaaataagcctttatcagcaacgggaaggaaaccctatgttagaagcactggcactgagactggaagcaatattaatgtaaattcagagctgaacccttcaaccggaaatcgatcaagggaacagagttcagaggcagcagaaactggagttagtgaaaatgaagagaaccctgtgaggattatttcagtcacacctgtaaagaatattgacccagtaaagaataaggaaattaattctgatcaggctacccagggcaacatcagcagtgaccgaggaaagaaaagaacagtaacagcagctggtgcagagaatatccaacaaaaaacagatgagaaagtagatgaatcgggacctcccgccccttccaaacccaggagaggacgtcgacccaagtctgaatctcaaggcaatgctaccaaaaatgatgatctaaataaacctattaacaagggaaggaagagagctgcagtggggtcaggagagccctgggggtttggaagcaggtatgccaaagcaccaaactgcaagatttancaaaanggagcacacagaagncaatt

SEQ ID NO: 4602 - DNA, 656 bp, Homo sapiens
  misc_feature (601)..(601): "n" may be a, t, c, g, other or unknown
  misc_feature (622)..(622): "n" may be a, t, c, g, other or unknown
  misc_feature (647)..(647): "n" may be a, t, c, g, other or unknown
ctatctgaagagagaaggggcaagttacaagcggatgaaaaccttcgtgggaagatttctcactgacaggcaattttctaggactaaagaggaaaagatagcattgcatcctcgcatctgcagtgcattacaggggtgcatttagacattctttctcccagtagattgtgagctccgtgatggtgaagaccatataccatgtgtctcttattcaactctcaacacgcatttgttgagcacctactatcttcttggcacccagtaggggttgagcaacacaatagaagtgctctgtaaatatttatggttggaagataggtagatgccccaggagaaaagacatgggagtttctaggcagggccttgggttttaaattgccaaaaaattttctctcctctgttgatttgaatatggtccggtccctagtaaaagcttgatattagcctagtgatgtggtggaaagaactttggattaagattgggaaaaccaggttctagtaccaactgtgctgagaacttacataaagctggccaagtggcttccctagtcttgggctcagtttacctactgtaaatttttaaatgattgggttaagtggncctaactcttaacttaagagncttacctgcacttctgttgtgtgantttttgagg

SEQ ID NO: 4603 - DNA, 810 bp, Homo sapiens
  misc_feature (680)..(680): "n" may be a, t, c, g, other or unknown
  misc_feature (730)..(730): "n" may be a, t, c, g, other or unknown
  misc_feature (748)..(748): "n" may be a, t, c, g, other or unknown
  misc_feature (789)..(789): "n" may be a, t, c, g, other or unknown
actatattttttaaggttttattaaaaagccttagaaagttacatattggtttagaggctaaaattgtgttgatgctgtttactcacctaattacatagttttaatcatttgtacataattttaaaaacttactttgtattgattttgaatacagtgaaaatcttattgcaataaactattttagtaaaatattattttgttgagttaatatttttcagctattaatttacttatcccatagcatttttgttattatttcggaagagagagcatgctagtttaagtttcattttaattggtcgtgtacttggtgcttttttgttgttgttaacttgttcatttagtaaaaagcaaatagctttactttctgaaaaagaaataattcattatctctagtaatacatctgtaattcttcatttagaagggtaattagggcaaaagtaaataaatcattatatatcattagtatgttgacatatattttcagtaacattgttttatgttcctccagcgtaacatgtagctgaacagtagaaggtagaaaataaattatgacatctcttctaaggcctggctaggcctgaagctcactgccagggagtttgtgtctagaatgtttttaaaaataggtagtggagccatagccctcaccatagacacctctgagcccactggcantgtctctgagcagaagatggctgtgccactcacatatgctaatcctgggnaatctgccaagcatgtcntcacaagggatagggatttggcttaataaaacctgatttgnaaacaaaatcctgagaatggg

SEQ ID NO: 4604 - DNA, 718 bp, Homo sapiens
  misc_feature (573)..(573): "n" may be a, t, c, g, other or unknown
  misc_feature (601)..(601): "n" may be a, t, c, g, other or unknown
  misc_feature (630)..(630): "n" may be a, t, c, g, other or unknown
  misc_feature (679)..(679): "n" may be a, t, c, g, other or unknown
  misc_feature (711)..(711): "n" may be a, t, c, g, other or unknown
tttatctacatgtgacagttttctatcattgggttttttaaaaaatctgtgtattcaactagaacttgagctccacggaggcaggaacttttgttttgtttttcttcactgctcttttcctcgcacctgtctgaagcagtgattttagccagaatctagatttcctgattctggtccagtgctctttccatggttctgtgtgacctcatacatcaaccttatttcacaaacgaggtttttaagttccttgagcacagtcgattgtgttttttactgcttctgctccgtccctgcataagacaggactgtgtcatgtacccagtgatggactcctggtaaataccatggcttgactaaatgacctccagtgctccctgtggtcttcaccaacacgcatcagacgacaggctcagccacgggatacttcgctttctgtaggagtaagagacaagttgctatcactgaacagatacacagtggcatttggaaactgcatgcagtttgaaaaaatcgtgatacagcaggagtctagttttcaataaatagcttattcatattctggattttgaacangttcatgtaactgtaactttgggggtantgggataatgagactgaaaattaatgggntcctctgctgggtttcccgtccggttttttttttttttcctccccaagnagggttgggaatttccggcaactttaacccancctggaa

SEQ ID NO: 4605 - DNA, 733 bp, Homo sapiens
  misc_feature (667)..(667): "n" may be a, t, c, g, other or unknown
  misc_feature (677)..(677): "n" may be a, t, c, g, other or unknown
  misc_feature (717)..(717): "n" may be a, t, c, g, other or unknown
gacagactgacgtgtgagctgcatcgcgggaggcgcatggcggggatggcgctggcgcgggcctggaagcagatgtcctggttctactaccagtacctgctggtcacggcgctctacatgctggagccctgggagcggacggtgttcaattccatgctggtttccattgtggggatggcactatacacaggatacgtcttcatgccccagcacatcatggcgatattgcactactttgaaatcggacaatgaccaagatgcgaccaggatcagaggttccttggggaagacccaccctacgaagttggaatgagaccatcagatgtgataagaaactcttctagatgtcaacataaccaaccttataaagactaaaattcatgagtagaacaggaaaatcatcctgactcatgtgttgtgttctttatttttaattttcaaagaggctcttgtatagcagtttttgtctattttaacattgtagtcatttgtactttgatatcagtattttcttaacctttgtgactgtttcaatattacccccgtgaaagcttttcttaatgtaactttgagtacattttaattgccttctatttttaaaactcaaaatcattagttgggctttactggtcctgctattgtatggcataatacatcctgcctgggntaaatttccnactccttggaccaaaaggttttggtaaaaggaaccaaatnataaggattttcgggg

SEQ ID NO: 4606 - DNA, 744 bp, Homo sapiens
  misc_feature (31)..(31): "n" may be a, t, c, g, other or unknown
  misc_feature (570)..(570): "n" may be a, t, c, g, other or unknown
  misc_feature (583)..(583): "n" may be a, t, c, g, other or unknown
  misc_feature (676)..(676): "n" may be a, t, c, g, other or unknown
  misc_feature (697)..(697): "n" may be a, t, c, g, other or unknown
  misc_feature (704)..(704): "n" may be a, t, c, g, other or unknown
ttgcataaaatggttaagaaaatgtgccaangattacctcagtagttctggtctgtgttcccaggagaccctggaaataaacaatgataaggttgctgagtcattaggaatcacagaattcctacggaagaaagaaatacacccagacaaccttggacccaagcacctcagccgagacatggatggggagcagctagagggagctagcagcgagaagagggaacgtgaggctgcggaggagggactggcctcagtgaaaaggcccagaagagaagccctgtccaacgataccactgaatctcttgctgccaacagcagaggccgggagaagcccaggcccttgcatgctttggccgctggtttttcccctccagtaaatgtgactgtctctccccgttctgaagaaagccatacaacgacggtttctggtggcaatgggagcgtgttccaggcgggcccgcagcttcaggcactggctaacttagaagccaggagggggtctataggtgctgctctctcatcccgggatgtcagtgggctgcctgtttgtgctcagtcaggagagcctangaggctgacccangcacaagtggcaacgtttcctggagagaatgctttggaacactcctcagaccaggacacctgggacaacctgaggagcccggggtttctgcanccctttggtcatccgggtggngggagcnaaagtcccttgccgccctgggggggccttggacaatgcaa

SEQ ID NO: 4607 - DNA, 561 bp, Homo sapiens
  misc_feature (525)..(525): "n" may be a, t, c, g, other or unknown
  misc_feature (539)..(539): "n" may be a, t, c, g, other or unknown
  misc_feature (542)..(542): "n" may be a, t, c, g, other or unknown
tttcagattttaccatggaagatttaggtcaggtattatttcctgacaacaagagttgttaaatcaatacctacatacattaccaagagaattatcttttccaaaggtctttaaaaatgtagtacatttttttttctctgtaattgtttaggaagcagtgcttcctgaaagaccaaaccaagatttttgcattatgtggctttgcacactagatgagcatttaataagttcaagcttaatttaaaaccatgatgacacaggtgtgaatgtcatttctctgaggagttaaaaatacaggcattgtcatactatcatacactctggaaaatggtattacatatcataaaatgttatggcttgggtagaaattgtagtttgctcttttaaaagctttagttaaattttgctcatttgttttgcaaatgattctttttaattgagtgaatcagatgcttttcagttcattgaaaatccccctttgacaaatcatgttttgatgagcttacgttctgtttccgggttcancttctcaatttagntgncatacaaagcgttggctta

SEQ ID NO: 4608 - DNA, 722 bp, Homo sapiens
  misc_feature (562)..(562): "n" may be a, t, c, g, other or unknown
  misc_feature (582)..(582): "n" may be a, t, c, g, other or unknown
  misc_feature (685)..(685): "n" may be a, t, c, g, other or unknown
  misc_feature (690)..(690): "n" may be a, t, c, g, other or unknown
  misc_feature (717)..(717): "n" may be a, t, c, g, other or unknown
aacaagagttatttttaaacagaactcctcttaccccccaaaacagataaacctcagtgtacaattttgaaagaagttttgccttgtaatgagtaataatttagaaagtagacagtggttgtgtttggctctcgttttattccttttacatttgttgcttctgggatttaaaaaattactaaattcataagatagttaggtattaaacacttcagaatatcaatgtaaaattggaaaataaggaactgggggcatttgtttaggccatgacttctacaagcagatttcttttcttttagtttagaagacaaaaaatttcaatacagatacttcttttagaagtaaatttttagattttattgtcagtagaaaaaagttaaactcctactaatttaaactaagacagtttaaaaaggaagcctgaaaaagactcatactacaaataatttaattgatggcatataagaatatgcagtttgaaaaagccaaactcttctctccacttagcttttgatccccactgtttgcttatttgtataagtcatactgtgtagaaatttcnattttctttttccccattanaagaggaccaaacaattctttatacaaatggagtaagcaactagttttgtagcactacatttaatggtaatgagatacctttgttcatttttttaaatttggnaatanactttacctgatccactttgatggtanaccaa

SEQ ID NO: 4609 - DNA, 815 bp, Homo sapiens
  misc_feature (582)..(582): "n" may be a, t, c, g, other or unknown
  misc_feature (630)..(630): "n" may be a, t, c, g, other or unknown
  misc_feature (725)..(725): "n" may be a, t, c, g, other or unknown
  misc_feature (731)..(731): "n" may be a, t, c, g, other or unknown
  misc_feature (790)..(790): "n" may be a, t, c, g, other or unknown
cttcagtgaaattggaatatagttcattcaaaacgaatcaggagaaagaattcaacaaactttccgaaagacacatgcatgtacagcttcaattagataatctcaggttagaaaacgaaaagctgcttgagagcaaagcctgcctacaggattcctatgacaacttacgagaaataatgaaatttgagattgaccaactttcaagaaacctccaaaacttcaaaaaagaaaatgaaactctgaaatctgatctgaataatttgatggagcttcttgaggcagaaaaagaacgcaataacaaattatcattacagtttgaagaagataaagaaaacagttctaagccctggtatacagtggtgaacgtagagcttacatccagttgagagacaagcaattgacatttactcatttattcaaacatttattgatatccaacaagccaggcactgatctggtgaattccagaacatttagagttgaaacagtgaacaaaacatccctgtcctcgtgggattttaacttctagcacagggagacagagaaatcttaaaagttcttgaggctgtacgtcaggagaancaggaagagacggccaagtgtgagcagcagatggcaaaagtacagaanctagaagagagcttgcttgctactggaaaaagtgatcagttccctggaaaagtctaagagatctgataagaaagttgtagcctgaccctcatggnccaagntccaaggaggctaggaacatcggtcctgtgagaaaaccaggaacctattgacaaccctngaaacaaagaactgaagggacataa

SEQ ID NO: 4610 - DNA, 713 bp, Homo sapiens
  misc_feature (592)..(592): "n" may be a, t, c, g, other or unknown
  misc_feature (641)..(641): "n" may be a, t, c, g, other or unknown
  misc_feature (666)..(666): "n" may be a, t, c, g, other or unknown
  misc_feature (705)..(705): "n" may be a, t, c, g, other or unknown
gaacatacattttattcgaccatcctcactggttagggattcagaggaaggatgagccgggcaactgtccagaagtaacaatgccctgacgtcctcgtcatgaaatcttagaacattaagttgaaaatgtcggacctcaggaacaaagttttgaaaaaaccattctgaaaacaattctctggtgaaccaaacatctttactgggtttatatatcacaggcaatgtacttgtgtcctctttcacacttttgggcagttttgattttccaataatgattgactttaatttatgagttccgtctgcatttgcacataaaaaggcagacaacctttctttgtttattttcttccctggtaggcagatatctttcctacttgcctgagaattttctggcattgacttccaaaagaggtctgtttcatccccactgtatagctgagctagacacagtttctcctctttgattatcatggacagtttttgtccaaatggctcaacattttcagaaactgaacttaggacttgttccccacatccttttcggttcccaattgcatgccgatttccaaatctaaaaagcaaccagtgctanctttgaaatctgttcgcccaaaacaccgtgcaaatctctctgcagcaanctgaagctccacgcctcttaacggnacaacggggtgaagcgtttctgttgggaccacatgtttnaccgcaat

SEQ ID NO: 4611 - DNA, 737 bp, Homo sapiens
  misc_feature (8)..(8): "n" may be a, t, c, g, other or unknown
  misc_feature (557)..(557): "n" may be a, t, c, g, other or unknown
  misc_feature (572)..(572): "n" may be a, t, c, g, other or unknown
  misc_feature (645)..(645): "n" may be a, t, c, g, other or unknown
  misc_feature (665)..(665): "n" may be a, t, c, g, other or unknown
  misc_feature (725)..(725): "n" may be a, t, c, g, other or unknown
tttcccangttccctttgctcatgcttacttagaggaagaaagaaaggggggtacctcttccaagtaccttctaaatgaaacactcaagagagtgctactcaggaaactttgcttggatcctaaaatggactggtcttgggtgtgtaaccccggtgaagttatagcctccccaaattgaggtgacagaaggaagacaagaggtgtaagctggagagggaagggaagaaatcagtggctttggccagcctctgtgccacccagtacgacagaggagtgggaactggccctctggggctctgcttggccataggcactgcacattgtgccacctgctcatcacctcctctagtctcacactgagcatcggagtacctgttgtgcagacaggaaaactgaggagctctgagaggctgagcatggagctcaccccatgccatagggtgtgggaagagggcacaggaggcctcatccatgggggaaagggttgaggatggacatgggtggggagagggcatagacatcccttcctaatctctgttcccaccacatttcatangagatgagttagganatgacagctaactctcttaaggacattttgaccccagtttatgttggggatggccataaaggaaaatgtctanagataggaaggtaaatcaantctgccaacccctaccatcaggtctggggccaccccaaactttgggctgcctccccttanacatagggttac

SEQ ID NO: 4612 - DNA, 706 bp, Homo sapiens
  misc_feature (666)..(666): "n" may be a, t, c, g, other or unknown
  misc_feature (681)..(681): "n" may be a, t, c, g, other or unknown
  misc_feature (687)..(687): "n" may be a, t, c, g, other or unknown
atggcttccagcttttcgaatctgaggctccaaaggaggaaatgaccattcagggatcttactccagcttgattacggagactgaaccttcatagggtgcgcacttaccaaggacaggaaggtttctctgtttgaagggctttaaacttataacaaagaaaataaaaatgacgacttcgtctatcagacggcagatgaaaaacatcgtgaacaattactcagaggcagaaatcaaagtccgggaagccacctccaatgacccgtggggcccgtccagttctctgatgaccgagattgccgacctgacctacaacgtggtggccttctcggagatcatgagcatggtgtggaagcggctgaatgaccatggcaagaactggcggcatgtgtacaaggcgctgaccctgctggactacctcatcaagacaggctccgaacgtgtggcccagcagtgccgggagaacatcttcgccatccagaccctgaaggacttccagtacattgaccgagatggcaaggaccagggcatcaatgtgcgtgagaagtcaaagcaactggtggctctcctcaaggacgaggaacggttgaaggctgagagggcccaagctctcaaaaccaaagagcgcatgggccaagtttccactgggcatgggcagcaaccagatnacctttgggcgaagntccaancaagcccaaactctccaac

SEQ ID NO: 4613 - DNA, 771 bp, Homo sapiens
  misc_feature (698)..(698): "n" may be a, t, c, g, other or unknown
  misc_feature (721)..(721): "n" may be a, t, c, g, other or unknown
  misc_feature (755)..(755): "n" may be a, t, c, g, other or unknown
aacaaaatatgcacaagatttatgtgagaaaaactataaaactctgctgaaagaaatcaaataactaaataaaatggagatatattccatagtcattcataggaagatccgatattgtcaatatattggttcttgctaacttgatctataatttcaatgcaatcccaatggtataagttggatgtttgtctcctttaaatctcatgctaaaatactattcccagtgttggaggtggggcctgggaggtgattggattgtgggggcggatgtctcaagaatgttttatcactttcccattggtgagaattgaattcttgctcaagatctggttgcttaaaaatctaggccctcccccactggctcacttgctgttactctagtcatgttacatgcctgctcccacttcgccttatgccatgattgtaagcttcctgaagtcctcaccagaagccaagcagatgttggtgccatgcttttatagcctgcagaactgtgagccaattaaacctcttttcttcataaattactcagtctgaggtattcctttacaccaaagcaagaatggccaagtacacccaaccaatatcccagcaagttattttctgcatattgccaaactgattctaaaatttatatggagaggcaagagacaggatagccaacacaatattgaagggagggagaacatagttggaanactgacattacccaacttcaagnactaattattaaagctacactaaatcaagacagntatggtattggtgaaa

SEQ ID NO: 4614 - DNA, 549 bp, Homo sapiens
  misc_feature (400)..(400): "n" may be a, t, c, g, other or unknown
  misc_feature (519)..(519): "n" may be a, t, c, g, other or unknown
  misc_feature (529)..(529): "n" may be a, t, c, g, other or unknown
  misc_feature (541)..(541): "n" may be a, t, c, g, other or unknown
tcaaggaacgaaggggccactgactcagagcggcaagtacagcgagtagtccgagagcgcccaccggcgggcggggcggctggtacggccgatcatgggcagtttctgcacgtagcgcgaggccgggctaggcccgtacggcgcggggaaggcagtctggaaaaggcgcccgcggcagcgcctcccagcctgccgcccggctatgatgaaacgaaagtgcggggcgccgcgcggggcgaaacggctcttctggaaaacgtcgcgggtgccggtcccggggccctgctgccggggtgccccgcgcgcccgatgcacgcgcggcaagggcctgctctcagaggcggcgggcccagaggccggcgcggggccgcctccgccgctgccccgggggctctcgtcnccgtgcgggctgactatggcgcttgccgtcagctgcggcatcttccgcaccgagtccggggcttgccgccggctccttcttgtccccgggcggtcgcggagccgtgggtgcaggctggncggtgcaaancgtgtggccaanctgtcacc

SEQ ID NO: 4615 - DNA, 732 bp, Homo sapiens
  misc_feature (407)..(407): "n" may be a, t, c, g, other or unknown
  misc_feature (557)..(557): "n" may be a, t, c, g, other or unknown
  misc_feature (568)..(568): "n" may be a, t, c, g, other or unknown
  misc_feature (666)..(666): "n" may be a, t, c, g, other or unknown
  misc_feature (715)..(715): "n" may be a, t, c, g, other or unknown
  misc_feature (721)..(721): "n" may be a, t, c, g, other or unknown
gtgagggggcttggggggcctcgcctgagagagtgaggacaggctgcgggaggagctgcaggactgaggtacagaggccaggggcccagggcaggacccagcctggacttgactccctgggatcccaggaagggcacaccctttcctcaccacccgagtgagcgctgccccctcacagagacctctttgccccctgggccaggcagagcaggcgctgcggtccgggaggccccatggaggtggcggtgcccgtgaagcaggaggccgagggcctggcgctggactccccgtggcaccgcttccgccgcttccacctgggcgacgcgccgggcccgcgggaggcgctggggctgctccgcgccctgtgccgggactggccgcggcccgaggtgcacaccaaggagcanatgttggagctgctggtgctggaacagttcctgagcgcgctgcccgccgacacgcaggcctgggtgtgcagccggcagccgcagagcggggaggaggcggtggccctgctggaggagctctgggggccagcagcctcccccgatgggtcntcagcaacganggtgcctcaagatgtgacgcaaggccctggggccacaggtggaaaggaggacaattgggatgattcccttaaggaacgccccttggggctgaaggggnccggcgcctgggggaatcccaaggctgtgcgcccctacaagcaaggagncccaancaaaccccccg

SEQ ID NO: 4616 - DNA, 748 bp, Homo sapiens
  misc_feature (661)..(661): "n" may be a, t, c, g, other or unknown
  misc_feature (731)..(731): "n" may be a, t, c, g, other or unknown
  misc_feature (744)..(744): "n" may be a, t, c, g, other or unknown
aacaactttttgcatgagatacatgatcctcagcatttagaaactgcagatgcttcattgtcaaagcatagttctgtttttcattggactgatttgtctcttgagaagaaatcgtgtccttactgcccagcaacatttgaaacaggtgttgggttatcaaatcatgtcagggggcatcttcacagagcaggattaagctatgaagccagtcatgttgtatcaccagaacaaatagccacaagtgacaaaatgcagcatttcaaaagaactggcacaggaacacctgttaaacgagttagaaaagctatagagaagtctgaaaccacttctgaacacacttgtcagctctgtggtggttggtttgatactaaaattggattatcaaatcatgttagaggccacttgaaaagacttggaaagacgaaatgggatgctcacaaatctccaatctgtgttctgaatgagatgatgcaaaatgaagaaaaatatgaaaaaatcttaaaggcattgaacagtcgtcgtattattcccagaccatttgtagctcaaaaacttgcatcaagtgatgactttatatctcaaaatgttatacctcctggaagcataccgtaatgggctaaagactgaagctctgtcagtgtccgcatcagaaagaaagaanggctgaatttcctaaatggaatatgatgaaaccaaaaccagaactgccaatggggaaaaagaatcagtcnccttaaactcatngaac

SEQ ID NO: 4617 - DNA, 788 bp, Homo sapiens
  misc_feature (760)..(760): "n" may be a, t, c, g, other or unknown
  misc_feature (764)..(764): "n" may be a, t, c, g, other or unknown
  misc_feature (778)..(778): "n" may be a, t, c, g, other or unknown
tcccaatgctggtcggtactgggagacagtagagaggttgaagatcaatcagttctatggcgccccaacggctgtccggctgttgctgaaatacggtgatgcctgggtgaagaagtatgatcgctcctccctgcggaccctggggtcagtgggagagcccatcaactgtgaggcctgggagtggcttcacagggtggtgggggacagcaggtgcacgctggtggacacctggtggcagacagaaacaggtggcatctgcatcgcaccacggccctcggaagaaggggcggaaatcctccctgccatggcgatgaggcccttctttggcatcgtccccgtcctcatggatgagaagggcagcgtcgtggagggcagcaacgtctccggggccctgtgcatctcccaggcctggccgggcatggccaggaccatctatggcgaccaccagcgatttgtggacgcctacttcaaggcctacccaggctattacttcactggagacggggcttaccgaactgagggcggctattaccaagatcacagggcggatggatgatgtcatcaacatcagtggccaccggctggggaccgcagagattgaggacgccatcgccgaccaacctgcagtaccagaaagtgctgtcattggctaaccccacgacatcaaaggagaagctgcctttgccttcaatggtggtgaaaagataatggcggggtgactcaaaatgttggtggtgcaaggagctcaaattccatgggngggncaaccaaagatttnccaaattatt

SEQ ID NO: 4618 - DNA, 744 bp, Homo sapiens
  misc_feature (665)..(665): "n" may be a, t, c, g, other or unknown
  misc_feature (694)..(694): "n" may be a, t, c, g, other or unknown
  misc_feature (736)..(736): "n" may be a, t, c, g, other or unknown
ccctccaataacaagcccctctgtggctctctgcctgtggtccaccttcccactgtgaaccatgctggcaaggagctggggttatgaagggaaagagcagggcacaaggcaagtagggctcgtgacttttcccctttcattatgtgtgtccaccgagctgtcctgcttctgttttgtaatgggttcttccatggcaagctgacctttcggctgaataggtcaaactcccactgagcgttaaccctcagccctcctcacgtgagtgcctcccctgaggtgaggagcactggttaggaatatgactgggagggcctggtgtattccccaaagaagggttgccttttactgcactgaattaattctcagagaccaccgtgtgaggttatgctgaaggatccagattagaactttcctgctgacattgtggaggggcaaaactaattcttcagatacatgttttagactgtggttcccctgtgtatcttcccctttttaatgagagaaaggccaaatgcacagtcttagtgattcatcggatcattttggatttctgagacaatcagaattttcctagatgattttttaaaaaaccaataaacccttctccctgtatttctcttccatttaaaagtctcttaaaactccaaggtgtttttaattttaancccttgtaaaaacaatgaaaataagtaanaagtttgtgggtggtggtggtttgaataaattaatattaccngggaaccc

SEQ ID NO: 4619 - DNA, 615 bp, Homo sapiens
  misc_feature (493)..(493): "n" may be a, t, c, g, other or unknown
  misc_feature (520)..(520): "n" may be a, t, c, g, other or unknown
  misc_feature (580)..(580): "n" may be a, t, c, g, other or unknown
  misc_feature (595)..(595): "n" may be a, t, c, g, other or unknown
agtaattccggggagctcgccttacaactccgcgcggcctcggtcccctgcgccgcccgccccacaacaaaactcagcgcagcgctcccgggcgcccggttcagagcgacctgcggctcagagcggaggggagactgaccggagcgcggatcgggacagcggccgggacagcggcgagacgcgcgtgtgtgagcgcgccggaccaagcgggcccagaagcgggtctgcagcccagagggcaccttctgcaaacatgtctgtggatcccctatccagcaaagctctaaagatcaagcgagagctgagcgagaacacgccgcacctgtcggacgaggcgctgatggggctgtcggtgcgcgagctgaaccggcatctgcgcgggctctccgccgaggaggtgacacggctcaagcagcggcgccgcacactcaaaaaccgtggctacgccgccagctgccgcgtgaagcgcgtgtgccagaaggaggagctgcanaagcagaagtcggagctggagcgcgangtggacaagctggcgcgcgagaacgccgccatgcgcctggagctcgacgcgctgcgcggnaagtgcgaggcgctncagggcttcgcgcgctccgt

SEQ ID NO: 4620 - DNA, 559 bp, Homo sapiens
  misc_feature (525)..(525): "n" may be a, t, c, g, other or unknown
  misc_feature (540)..(540): "n" may be a, t, c, g, other or unknown
  misc_feature (557)..(557): "n" may be a, t, c, g, other or unknown
ccctatcccgtcttgctctgcggcgcaggggcaagatggctgctgagaagcaggtcccaggcggcggcggcggcggcggcattggcggcggcggtggcagtggcggcggcggtagcggcggtggacgtggtgccggaggggaagaaaataaagaaaacgaacgcccttcggccggatcgaaggcaaacaaagaatttggggatagcctgagtttggagattcttcagattattaaggaatcccagcagcagcatggtttacggcatggagattttcagaggtacaggggctactgttcccgtagacaaagacgtcttcgaaaaacactcaacttcaagatgggtaacagacacaaattcacagggaagaaagtgactgaagagcttctgaccgataatagatacttgcttctggttctgatggatgctgaaagagcctggagctacgccatgcagctgaaacaggaagccaacactgaaccccgaaaacggtttcacttgttatctcgcctacgcaaagccgtgnagcatgcagaggaantggaacgcttgtgtganag

SEQ ID NO: 4621 - DNA, 734 bp, Homo sapiens
  misc_feature (588)..(588): "n" may be a, t, c, g, other or unknown
  misc_feature (663)..(663): "n" may be a, t, c, g, other or unknown
  misc_feature (679)..(679): "n" may be a, t, c, g, other or unknown
  misc_feature (712)..(712): "n" may be a, t, c, g, other or unknown
aagtctaactacatggattggtttctgttttgtgcaggttactgtttttgtatctcaaagccaaaagccacaggcatggccacagttactgttcatctcagggatgtgaaagagtcaagatccaagcagccacagactcaaaggacatcagtaactgcatggccaaagcatacccacagtactacagaaagccgtcagtggtcaagcggatgccggccatgctcactggactctgtcaaggctgtggcactcggcaggtggtgtttactagtgatcctcataaaagttacctccctgtgcaattccagtcacctgataaagcagaaacccagcgtggagacccgtctgttatttctgtcaatggcactgactttaccttccgaagtgcaggcgtcctcctccttgttgtggatccgtgcagcgttccattccgcttgacggaaaaaacggtttttcctcttgctgatgtcagtcgcattgaagagtatttaaaaacaggcatccctccaaggtccattgttctgttgagcacaagaggagaaataaagcagttaaacatttcacacttactagtacctctgggattanccaaaccagctcatctttatgacaaagggagtaccatatttttgggattcagtggaaactttaaaccatcatggnctaagctatttaccantcctgcttggacagggccttggggtgcttgaanaattcaaacctttgcaagctgg

SEQ ID NO: 4622 - DNA, 670 bp, Homo sapiens
  misc_feature (399)..(399): "n" may be a, t, c, g, other or unknown
  misc_feature (608)..(608): "n" may be a, t, c, g, other or unknown
  misc_feature (640)..(640): "n" may be a, t, c, g, other or unknown
  misc_feature (650)..(650): "n" may be a, t, c, g, other or unknown
caagaaaattgttttgtgtgatgtagaaaaacctgagagcttacactctttttctgtggaggctccagtttcctgtatgcattggatggaagtgacagtagaaagcagtgttctcacatcattttataatgctgaggatgaatcaaatcttctcttacctaaactacctacactgccaaaaaactatagcaacacctcaaaaatatttagtgaagaaaattctgatgaaattattaagctcttgggagacgtcaggcttaatattctcgtccttggaggaagctctggatttattgagctttatgcttatggaatgtttaaaattgctcgagtcacagggattgctggtacttgtcttgcattatgtttatcaagtgatttgaaatcattatcagtggncacagaagtctctaccaatggtgcttcagaagtttcatactttcaagcttgaaactaatctgttgtactctttcttacctgaagtaactcggatggccagaaagtttactcatatttcagctctgttacaggtatataaatttgtcactaacatgtatgtgtgaagcatgggaagaaatactaatgcagatggattctcgtctcaccangtttgtgcaggaaaagaacacaaccacatcantgcaaggatnagttcatgcacttgctatta

SEQ ID NO: 4623 - DNA, 638 bp, Homo sapiens
  misc_feature (564)..(564): "n" may be a, t, c, g, other or unknown
  misc_feature (604)..(604): "n" may be a, t, c, g, other or unknown
  misc_feature (620)..(620): "n" may be a, t, c, g, other or unknown
ttgatgttttaaaatgggcagttttgagcaataatctgtcctaacagaacagtagcaataagttttaggataccatcttgaatgtctagttggtgtgcaatagcttttctttctaagatggcaataatgattcatttctactacattttgcaaaagtgtttttgttgcttatacacattttcaataaccaaggtagccttcatatgtagccttaaagcattacctcttgattgtatctttagattgatataaagtacttgcatatagagtatttgaagtgatagattattagatttgctctatgtctgaaaagagagctattctgcagtgcctaaatatcatttaaacagtaaatattaataggaaatattgctatatctgaatatataatacaaaagtttgatcatggtgacacaaatgttggacatttttttccttataaaaggctctttttttatatattgtacaatatatttggagattcagagcatagtgactatagtcgaaaactgagattgcacttccaaaattgggcacaagtaaataatcttatgaagggattcnttatcatgtttcaaacaagtgggttacaagcagactttgngacacttttccacagnaacaatactaagaattgg

SEQ ID NO: 4624 - DNA, 642 bp, Homo sapiens
  misc_feature (616)..(616): "n" may be a, t, c, g, other or unknown
  misc_feature (628)..(628): "n" may be a, t, c, g, other or unknown
  misc_feature (630)..(630): "n" may be a, t, c, g, other or unknown
gctacaagtccacccgtttcaagcctacccgcatcatcttctaccgagatggggtgcctgaaggccagctaccccagatactccactatgagctactggccattcgtgatgcctgcatcaaactggaaaaggactaccagcctgggatcacttatattgtggtgcagaaacgccatcacacccgccttttctgtgctgacaagaatgagcgaattgggaagagtggtaacatcccagctgggaccacagtggacaccaacatcacccacccatttgagtttgacttctatctgtgcagccacgcaggcatccagggcaccagccgaccatcccattactatgttctttgggatgacaaccgtttcacagcagatgagctccagatcctgacgtaccagctgtgccacacttacgtacggtgcacacgctctgtctctatcccagcacctgcctactatgcccgcctggtggctttccgggcacgataccacctggtggacaaggagcatgacagtggagaggggagccacatatcggggcaagagcaatgggcgggacccccaggccctggccaaagccgtgcaagttcaccaaggatactctgcgcaccaatgtncttcgcttgaangnaaaacgctgttt

SEQ ID NO: 4625 - DNA, 809 bp, Homo sapiens
  misc_feature (528)..(528): "n" may be a, t, c, g, other or unknown
  misc_feature (673)..(673): "n" may be a, t, c, g, other or unknown
  misc_feature (728)..(728): "n" may be a, t, c, g, other or unknown
  misc_feature (761)..(761): "n" may be a, t, c, g, other or unknown
  misc_feature (801)..(801): "n" may be a, t, c, g, other or unknown
gtagcactgcttttttgaggccagtagcaacatccagagaccattcttccatactttactccctcctttttcagacttgtttgtaaagtacagaatctgaatttagcctttatgattgtatatgatccacagaagacctgatttatgaaattttgtactaaaatcatttggaaatgattgtattgtaaactgaggctaaatttttttttaaacctgtttcatgtgttataaaggccagcttgtaaaagaagctgcaacagactttctctgctcatgatttgcactcttagggttttgttagcccttttgtactactttctttttaaattgagaacatggttctttacatataaatctgcttcaaccttaggatgttttcagaccagaggcaacttattcatgaatttttatgaaaactatctactaggacagataagctgaacagtgatgatctgtagacatttaaggactgaatgtaatggttgatatatgtacattctgatatttttaaatctttaactttttaangttaaaaacctacagctgcttaggtccagcttcttaactctttttgagacacttcctgtcctatctccactgggcctgcctaaatttgttctcaccaagcactgcctgtgcatgcagagaaaatctgtgcatcctcttttaaaanttttaaaaatactgtttaacatttgtgagaattttaagaaaaaaggcttttgtangaactgtggcttttcccattgtgaagcattgantatcacaattttgggacatgttaataggggggagtccccnggatcttt

SEQ ID NO: 4626 - DNA, 607 bp, Homo sapiens
  misc_feature (516)..(516): "n" may be a, t, c, g, other or unknown
  misc_feature (535)..(535): "n" may be a, t, c, g, other or unknown
  misc_feature (542)..(542): "n" may be a, t, c, g, other or unknown
atattaacttgagtttccttgagagctctgtttctctgaggttcacactgacttcaaaggaacttgcacaattgtttctaaggtaagcttcttcatacccaaattctttttagaaatatgggctgttcaccctaattatttctaactaataggggcttttaccctatattttctatagggttcgtgaagcatagtattctggcaaccttaaatccatccaagaagaaataagcaatgtgttaatttgttgtttttgcatcgtgtagagatagattaatgaagagcagctgttgttatagccctgccaccttatttttaatgtaaacacttgatccttttcagagcactttcacatttgattgtcccactagcctgtgaagtacacaagccaaatactgttgtcacctgttgtcaggtaagaaactgactcagggtcaggtggctcattcagcttgcctatggttacaacaagcaaggtattcggccttacaggtatttgacacctgtgttgttggnccatccacagctctattancagcagnaggatcttatttggaggttgaagtagggaatggaagatcttatttgtgtcgaaagagccctttta

SEQ ID NO: 4627 - DNA, 829 bp, Homo sapiens
  misc_feature (661)..(661): "n" may be a, t, c, g, other or unknown
  misc_feature (711)..(711): "n" may be a, t, c, g, other or unknown
  misc_feature (760)..(760): "n" may be a, t, c, g, other or unknown
  misc_feature (784)..(784): "n" may be a, t, c, g, other or unknown
  misc_feature (812)..(812): "n" may be a, t, c, g, other or unknown
tcgatgcagaactccgtctccttagacatcagaaactaaaactagatactcagatgaaattatctgacctgcaccatgtcaccttatttcaagaaatacttctcctgaagaattttgaaaaacaggagaacatacttcaagaacgtgttaattccttagacaaagaggaacagtacatgcaatggaaaataaatgaaactcttaaagagatggaagagaaaaagaatgaaatcaccaaactccaggagcaagaaaaggcactctatgctggttttcaagcagccattggagaaaacaataaatttgcaaacttcctcatgaaggtcctaaagaagaggattaaacgggtaaagaaaaaagaagttgaaggagatgctgatgaagatgaggagagtgaggaatcaagtgaagaagaatctagcttggagagtgatgaagatgagtctgaatcagaagatgaggtttttgatgattctatttgcccaacaaattgtgatgtggctctttttgagctggcccttcaccttcgagagaaaaggctggacattgaggaggctttagttgaagaaaagaaaattgttgataacctcaaaaaggaatatgatacattgtcaaaaaaagtgaaaattgtggcaactaatctgaatgcagcagaggaggncctggaggcttatcagcgagagaagcagcagcggctgaatgaactgctanttgtgattccgctcaagctccaccaagatagagtatgtgggaatttggngaaatacctagcgatctttctggnacttgggcctccccaaacatgccttganacggtgcaagaacgaat

SEQ ID NO: 4628 - DNA, 838 bp, Homo sapiens
  misc_feature (817)..(817): "n" may be a, t, c, g, other or unknown
  misc_feature (834)..(834): "n" may be a, t, c, g, other or unknown
  misc_feature (837)..(837): "n" may be a, t, c, g, other or unknown
cctcaatgtgcctgaataaatgcttgttcagacactggatgtgaagtccgattctccactggatacccaaactgcaggaggtaggtggttcccatctggacccgagttgcctaccagaccattgtcagaaacacagctggacgtgagttaaagtggtgaaaaaacagattttattcagtaactactgaaagtagggaaggagctgagcttattccgatttcggcagaggtgatttgggtgttttaaagaaagaatgagggagacgggaataaaggagctccgaagtgtcggggaagtgaaaaagtgcaaaggggagcttccggatagcgaagcacgtggaggttcctggagggtgtcctcccagagaggacgtggaaccttcccgctcccaccgcgcacttgccctgtgtatctcttccctttggctgttcatctacatacgtggtagtttcctttatagtaaactaataaacggaaatttgcagcagctgtgaaaaacttcaattttctgaatccacttttgatttttagtggcgattgcttaaatgcctcagttttaagtatcataacgaaaggaaagcatacgattcctatattaatgaatcggaagtaccttttgcagtttttgttttgctttttcagacaaggtcttattctgtcatccaaggctggagtgcattggtgggaacacagctcgctgcctactcagcctcctgggctcaagcgattctccgcctcagcctcctcaagtggctaggaccacaaggcaaccacgcactaaaacggcctaaactaaaggtttttggtttaaaataanattaattttaattttanaana

SEQ ID NO: 4629 - DNA, 782 bp, Homo sapiens
  misc_feature (720)..(720): "n" may be a, t, c, g, other or unknown
  misc_feature (727)..(727): "n" may be a, t, c, g, other or unknown
  misc_feature (774)..(774): "n" may be a, t, c, g, other or unknown
aactcctcgctagctctccctctcacacacgctcacacccggctcgagatggcggcggcggcggcggcggcgggggactcggactcctgggacgccgacgctttctccgtggaagacccagtgcggaaggtggggggcggcggcactgccggcggggaccgctgggaaggcgaggacgaggacgaggacgtcaaggataactgggatgacgatgatgatgaaaaaaagaggaagcagaagtaaaaccagaggtaaaaatttcagaaaagaaaaaaatagcagagaagataaaagagaaagaacggcaacagaagaaaaggcaagaagaaattaaaaagaggttagaagaacccgaagaacctaaagtgctaacaccagaagaacaattagcagataaactgcggctaaagaaattacaggaagagtcagacctcgaattagcaaaggaaacttttggtgttaataatgcagtttatggaatagatgctatgaacccatcttcaagagatgactttacagagtttggaaagttactaaaagataaaattacacaatatgaaaagtcactatattatgccagttttttggaagtcttagttcgagatgtgtgtatttcattggaaattgatgacttgaaaaaaattaccaattcactgactgtgctttgcagtgaaaaacagaagcaagaaaagcaaagcaaagccaaaaagaagaagaaangtgtggntcctggaagggggattaaaagccaccatgaaaagatgatctggcaanattatggg

SEQ ID NO: 4630 - DNA, 791 bp, Homo sapiens
  misc_feature (648)..(648): "n" may be a, t, c, g, other or unknown
  misc_feature (727)..(727): "n" may be a, t, c, g, other or unknown
  misc_feature (774)..(774): "n" may be a, t, c, g, other or unknown
  misc_feature (788)..(788): "n" may be a, t, c, g, other or unknown
catgggaatttgtttggttttattttttatgcttgtttttgtttttaaaataatacataaatgtagtttgccttaagaaactgttatttttgctgagaatataaattatatacaaataaaaccataaagtccagtgaaaatacaagaatacaatgctgcattacagaactccaaatctgaaagtacctccctttatcattcagttctcagatcaaaggtcatttctttaaaggtaattttctgagttccctagctaaaatatcacatcactaaccaattcagttcactctattttctgtattatctttttcatatcattttatttctacatgaaatcatctgatttatttttaaaatttttattgtctatcttatttcacttaaaagagaggagcaagaaccatatctgtcctgtttattagtgaaacacctaaaagaatacctggaacatattaggcaatcagtgaatttttattgattgaaaccatagaatcaaaatagcttgatttctagctttgttgtttcatagtctaactttagacaaattatgttctctgagcttcattatctgctctgtaaaatatcttaaggcttgattgaagattaaataagctaataaatgaaaataactgacacaataccggacanacaaggagcattcaataaaatatgtattttaagatgggataccgcaattaatcaagggaagtctgtttacaaagaaagnaaatcaacgggggaaaccgggtgtccaaggcctataatcccaagcantttggggagggcanagg

SEQ ID NO: 4631 - DNA, 713 bp, Homo sapiens
  misc_feature (681)..(681): "n" may be a, t, c, g, other or unknown
  misc_feature (694)..(694): "n" may be a, t, c, g, other or unknown
  misc_feature (705)..(705): "n" may be a, t, c, g, other or unknown
gaagcaaaaaggtcagcaactgtaatctgtatcgccttggaaaaaagaagggactacccagccgcatggtggtgtcaatatttgatccccctgtgaattggcttcctcctggttatgtagtaaatcaagacaaaagcaacacagataaatgggaaaaagatgaaatgacaaaagactgcatgctggcgaatggcaaactggatgaggattacgaggaggaggatgaggaggaggagagcctgatgtggagggctccgaaggaagaggctgactatgaagatgatttcctggagtatgatcaggaacacatcagatttatagataatatgttaatggggtcaggagcttttgtaaagaaaatctctctttctcctttttcaaccactgattctgcatatgaatggaaaatgcccaaaaaatcctccttaggtagtatgccattttcatcaagattttgaggattttgactacagctcttgggatgcaatgtgctatctggatcctagcaaagctgttgaagaagatgactttgtggtggggttctggaatccatcaagaagaaaactgtggtgttgacacgggaaagcagtccatttcttacgacttgcacactgagcagtgtattgctgacaaaagcataacggactgtgtggaaaccctgctgggctgctatttaaccanctgttgggaaaangggctgctcancttttccc

SEQ ID NO: 4632 - DNA, 667 bp, Homo sapiens
  misc_feature (643)..(643): "n" may be a, t, c, g, other or unknown
  misc_feature (650)..(650): "n" may be a, t, c, g, other or unknown
  misc_feature (655)..(655): "n" may be a, t, c, g, other or unknown
atatatattcacttaaaaatctggctaattaatgactgtcatactcttatgcaatcaaactgaatttattaggttctgttagattcagttaaattggaaggttaggaaaagtaacatacagtgggtgaacactgtgtatgtgaaaacactattatcttatgtagtcacaagttagtcaatgtcaacacacacatttcacattccattcttgtatgtacgtacttaaatagctgaggtaagggtttatctttctttgtatcttttataaagattctgattgggcaacttcccaggtctcctagattttgttgctgttgttggccttataggtaaatcctttcaattcttcctacaatgaatggcttgtaccttatgtagaaaaattgtgaaagagaaatagaatatacctctgaagttttatgtatcttggagtaactttgtttcacagttaactcttgtttgaaagtatgagtgttaaaaatggggaaaaaattccacaaaatccttggattgagagccagaaaaatgcttccatttaaaaatgttgtttgacagacaaaaaaaaaaataggtttttccccatgtccaagtttaacaccatgtttctatcccccttccccagacaactgggcagatgtgttancatatanagtcngttttgggttgc

SEQ ID NO: 4633 - DNA, 643 bp, Homo sapiens
  misc_feature (561)..(561): "n" may be a, t, c, g, other or unknown
  misc_feature (636)..(636): "n" may be a, t, c, g, other or unknown
  misc_feature (638)..(638): "n" may be a, t, c, g, other or unknown
agtcagtctattttgataaaatcaactgaaaaaacatttgcataaagactcaatgtaggggaaagattcttgacacaaatcttacattaaaagtctgttaatatttttattaacttttacaagatcctgttgtttttcatttactataagtcctaagtcaaatatgcctcacaccaagcatctgaaaagttaagtacagtttagtgtcacatttgcttgagcacatttgagtttcagactcatttaccattgtggaatctgcttttggatattagagatgtttgttcaaataccagaagacagaataatactatcttctaggctaaaactaattaattactttcatataatggacaggagaaattcacatcagatagatattttaccagttaatggtgcagcagaatatcaaactattttcttaaaatgaatcagataagaacattgctcataaaaaataacttttttgtttgatcaaaattatttatagttttatatgtataatcctagtttatcctgagatgtatttgcttttgctttttaaacttataatttaaaaanaaagagagagagtcagaaggttgtttagatggggaccataacaaacttctgtttccctaaactcaaattgttacncnaggcc

SEQ ID NO: 4634 - DNA, 717 bp, Homo sapiens
  misc_feature (579)..(579): "n" may be a, t, c, g, other or unknown
  misc_feature (639)..(639): "n" may be a, t, c, g, other or unknown
  misc_feature (679)..(679): "n" may be a, t, c, g, other or unknown
  misc_feature (681)..(681): "n" may be a, t, c, g, other or unknown
aaacgcggaaccatggccgctgtggttgctgtttgcggtggtctagggaggaagaagttgacacacttggtaacggctgctgtcagccttacacatcccgggactcacacggtgctttggagaagaggttgttcacaacaggtatccagcaatgaggacctggtaagaatttttttttctattagtaaggcctttgcaaatatgaccaaaatgtttttctttttaaaacgagatctggtattagactctaacatcttttattttagctacttgaatagagttctgccgtaggacaaaacaatttgataattactctgagttcagaaatgatgatgaattgattgtagtcatgtagtcagttgagttttgaagtaggggaattcctagattagaagcaaagctgctataataccatatttttcttcctagatcttaaatttaaggatatgtgatttgggaattgttttttttttttttacatagccctttgtaagcaaatgatatgggaattttaaaaggtaatttgggtgagcagaattttagataactgaaaagagactgtacaaagcttagctatangttggctatagtattaacatggactttctgaaagcacaggttcctgctacatgcaaaggnattttgacactaattagaccatacaaagcacttggcacananctgaagagtagttacctgagcctgaatgtaaattgg

SEQ ID NO: 4635 - DNA, 832 bp, Homo sapiens
  misc_feature (754)..(754): "n" may be a, t, c, g, other or unknown
  misc_feature (817)..(817): "n" may be a, t, c, g, other or unknown
  misc_feature (830)..(830): "n" may be a, t, c, g, other or unknown
ttattatggaaagtctccaaaagcagtagccaagaaaaaaatggaaaaggggaagtaataatacccaaagagaagttctggaagatatctacccctcccgaggcatactggaaccgagagcaagagaagctgaaccggcagtacaaccccatcctgagcatgctgaccaaccagacgggggaggcgggcaggctctccaatataagccatctgaactactgcgaacctgacctgagggtcacgtcggtggttacgggttttaacaacttgccggacagatttaaagactttctgctgtatttgagatgccgcaattattcactgcttatagatcagccggataagtgtgcaaagaaacctttcttgttgctggcgattaagtccctcactccacattttgccagaaggcaagcaatccgggaatcctggggccaagaaagcaacgcagggaaccaaacggtggtgcgagtcttcctgctgggccagacacccccagaggacaaccaccccgacctttcagatatgctgaaatttgagagtgagaagcaccaagacattcttatgtggaactacagagacactttcttcaacttgtctctgaaggaagtgctgtttctcaagtgggtaagtacttcctgcccagacactgagtttgttttcaagggcgatgacgatgtttttgtgaacaccatcacatcctggaattactttgaatagttttatccaagaccaaagccaaaagatttcttcaaangttgatgtgatccacaatgctgggacctcatcgggataagaagctgaagttactacatcccanaaagttgtttacncc

SEQ ID NO: 4636 - DNA, 784 bp, Homo sapiens
  misc_feature (36)..(36): "n" may be a, t, c, g, other or unknown
  misc_feature (732)..(732): "n" may be a, t, c, g, other or unknown
  misc_feature (735)..(735): "n" may be a, t, c, g, other or unknown
  misc_feature (749)..(749): "n" may be a, t, c, g, other or unknown
tagactgtctctttctgaaatattaagcaatatcangatcatgtcgactacagtgtttccagccaaggctactaaatttacaggacagtgatagtgaagaatgtacctcaagaaaaccagggcagactgtgaacaataaaagagtttctgcagcatctgtagctttattgaacaccagcaagaatggcatatcagtaacagggggtatcacagaagagcagtttcagacacatcagcagcagttagttcagatgcaaaggcagcaacttgcccagcttcagcagaaacagcaatctcagcattcctcgcaacagacacatccaaaagcacagggctcaagcacctctgactgtatgtctaaaacacttgactcagccagcgcccactttgctgcatctgcagtggtcagtgcacctgttccaagtcgcagtgaggtagccaaggaacagaacactggccacaacaacataaacggcgttgtccagccttcaggaacctctaaaacattatactccaccaatatggctttatcatccagcccagggatttcagctgtacagcttgtaaggacagttggccacaccactacaaaccacttaatcccagcattgtgcacaagcagtcctcagacacttcccatgaacaattcctgcctggacaaatgcagtgcacctcaataatgtcagtgttgtttctccaagtcaatgtgcatatcaatacacggggcttcancancatcgccaacaagnctttaaaacttgccaaaagttgctgccagtttggg

SEQ ID NO: 4637 - DNA, 665 bp, Homo sapiens
  misc_feature (621)..(621): "n" may be a, t, c, g, other or unknown
  misc_feature (660)..(661): "n" may be a, t, c, g, other or unknown
aagggagcgcacgccggcggcgcggaggccggctctgcgcttcgggccgccccctccccccaccccgctcacactcggcacttacttcggctgtctccgctgccctccagcggagacgcagctcctcaggcgcccggcggtatttgttgggtcggcggcgtcagggattcgcagtggcctgtggtcggcgtcgtccggccactggtgcgcccccgcggcaggcagagctcacgctcctgtcccccggctggtccggggtctgggcgccgcgtcgacggcggccccgcaggacgcgcagaccgggccgcagcccatgccccgagcggactgcattatgaggcacctgccttacttctgccggggtcaagtggtgcggggcttcggccgcggctccaagcagctgggcatccccacagctaattttcctgagcaagtggtagataatcttccagctgatatatccactggtatttactatggttgggccagtgttggaagtggagatgtccataagatggtggtgagcataggatggaacccatattacaagaatacgaagaagtctatggaaacacatatcatgcataccttcaaagaggacttctatggggaaatcctcantgtggccatttgttgggctacctgagaccaagaaaagannttgg

SEQ ID NO: 4638 - DNA, 714 bp, Homo sapiens
  misc_feature (654)..(654): "n" may be a, t, c, g, other or unknown
  misc_feature (680)..(680): "n" may be a, t, c, g, other or unknown
  misc_feature (694)..(694): "n" may be a, t, c, g, other or unknown
agagcagaacttggactgagtcctgcaggacacaggttccgccgagcccgtcccttggcggtggtgtcactggatgctgggaagagatggtgggaagagcctccatccattggcgcgtcactaattagacaaggaggccttgggctcccttgagagagtcacggtctctcctccgttgacccgcccttcattgaactcctttacttggatattcagagcgctggacagagatcacttggcgctaacaccctcggaggtcctcacggcgctccgtcggaatgacacagtcggattcccaagctgcgaagggtgagggagggactgcagcgcaggaactgaggaggagaggcccgcgcgcccactggagccgagcggtgaggaataaccggaccgacccccgacggtgcgtgcctcacttttaactttctggaacgcacccaccactgcctggctctttattgcatcagcgccctttgaagttgctgaaggggagaatgttcatctctctgtggtttatctgcccgagaatctttacagctatggctggtacaaagggaaaacggtggagcccaaccagctaatcgcagcatatgtgatagacactcacgttagggctccaggggcctgcaatacagcggtcgagagacaaatatnacccagtgggagatctgcatttccangaacgtcaccctangaggacaccgggatactaca

SEQ ID NO: 4639 - DNA, 543 bp, Homo sapiens
  misc_feature (519)..(519): "n" may be a, t, c, g, other or unknown
  misc_feature (542)..(543): "n" may be a, t, c, g, other or unknown
atctggcttaccactctccagggcctcctggggagcctgtcctgtgttcactttgtttcaggctggtctgtgccccgtgagccacatggcctagggtgatgccaggttgtcccgtcactggggtcccatctgtagattctttgcgcccttcccggctgctgcctggggccctttcctgctctcccgtccgctgtgggtggtccccagctctcctctgtgggttttaccggaaaggtggccccagctgttgacttccagtcactgtcccagacggcacaaggttttctgtaggaaagctgccattgccccggccccttttcttcctttgtcccgttgtcgaggttttttcaaatagcgtgttgttcagtatgcaaatcaattattttaagaatcgcttttgtaaatatctttgtgaatattttagtatcgtctttgataatattcaacattttcatgacctggttatagcctttgctggtgtttttaaaatacctggactcaatgacaaagaccgagtcntctttttttttaaacagaaacann

SEQ ID NO: 4640 - DNA, 847 bp, Homo sapiens
  misc_feature (780)..(780): "n" may be a, t, c, g, other or unknown
  misc_feature (798)..(798): "n" may be a, t, c, g, other or unknown
  misc_feature (818)..(818): "n" may be a, t, c, g, other or unknown
gttgtgtgaatgtttcaagcagaaattaatttaaatgtgtgtttaggaagtacttaacttggaagatgtatcatttttcttaaaatgcatgtttaaattttatttttttaagtaatttttaaaaagtttattaatgttaaatttatgatgcagaatgatagcatcagatgtctgcagctgaaaaaaatttactactatgaacccccaaaatattcagttgcaagaaaatttgattctaaaattattcatggtaggatacgtaacacaccccttcaaaacttttaagaaatacatttagcacatgtgctatgaaagcatacgtacaaagagaaaggggaaagtgatttataattcctacaacagaggccaagaaatagattaaaatattttcaagaccccaaaataatgtattatggttgggaagtcagtagaacactggaataggtgaagacctgacagtaatttttgtcttaagaatgctttctttaggacagaccctttaacctcacctctgtgcatctgtttttaaaatgattatatttgcctctgatatttgaaagcacttttgtaagttttgatgatgaaaaatatattaaacgtgcatattaccattatttaggaaataattccttatatactgtgataaatcattgctgttacatacagtaacatgccttaattacatttaatgccttactgctttaagttaggtaaatccaagtttcagaattaaaaataagcattatttcatatgggccaatcagattcgttacataggcnatataaatttgtccccantttcaccaataagcacaaantaattggggcaaaactgcctttgagggcc

SEQ ID NO: 4641 - DNA, 855 bp, Homo sapiens
  misc_feature (724)..(724): "n" may be a, t, c, g, other or unknown
  misc_feature (772)..(772): "n" may be a, t, c, g, other or unknown
  misc_feature (830)..(830): "n" may be a, t, c, g, other or unknown
  misc_feature (841)..(841): "n" may be a, t, c, g, other or unknown
acactggaaattccaacatgcctggggggctcccaaggcaagcttacacccagaaaacaacacagctggagcacaagtcacaaatgtaccaagttgaaatgaatcaagggcagtcccaaggtacagtggaccaacatctccagttccaaaaaccctcacaccaggtgcacttctccaaaacagaccatttaccaaaagctcatgtgcagtcactgtgtggcactagatttcattttcaacaaagagcagattcccaaactgaaaaacttatgtccccagtgttgaaacagcacttgaatcaacaggcttcagagactgagccattttcaaactcacaccttttgcaacataagcctcataaacaggcagcacaaacacaaccatcccagagttcacatctccctcaaaaccagcaacagcagcaaaaattacaaataaagaataaagaggaaatactccagacttttcctcacccccaaagcaacaatgatcagcaaagagaaggatcattctttggccaagactaaagtggaagaatgttttcatggtgaaaatcagtattcaaaatcaagcgagttcgagactcataatgtccaaatgggactggaggaagtacagaatataaatcgtagaaattccccttatagtcagaccatgaaatcaagtgcatgcaaaatacaggtttcttgttcaaacaatacacacctagtttcagagaataaangaacagactacacatcctgaactttttgcagggaacaaggacccaaanactttgcatcacatgcaatattttccaaaattaatggtgattccaaaagcaaggattnttccttcacangggggcttttcaag

SEQ ID NO: 4642 - DNA, 714 bp, Homo sapiens
  misc_feature (483)..(483): "n" may be a, t, c, g, other or unknown
  misc_feature (599)..(599): "n" may be a, t, c, g, other or unknown
  misc_feature (611)..(611): "n" may be a, t, c, g, other or unknown
  misc_feature (668)..(668): "n" may be a, t, c, g, other or unknown
  misc_feature (707)..(707): "n" may be a, t, c, g, other or unknown
  misc_feature (711)..(711): "n" may be a, t, c, g, other or unknown
attgatgttacaccatcaagggtctttgaatactcgattcttttttgattttttttgtctttactcctgtaccaatgtatcctttttaaagaataataaaatttgagaaattaaactcattgttattagtacctttctatccacttctttttttttttccaggatagtgaaaaaaaaaaaaaagaggagtgagggctgaacttgttacgatttagaaattaaggcccattttccttcttaagaacccagtttctctatatgaagcagatccagaccgcaggtccctgtcccaccacgcctttcacttccctgtgcctcgtttccccatctgtagaagagagtcagtcatgataataactcctacttcttggtagtgttgcaaggattaagcagcttaatacttgtatgtgctttgaacagtaacgtgctgtagtgtacaaaagatgtaaattgcagaccaggcatgctggcagctgcctgtantttcagcttctcgggaagccaaagcaaaggatctcttgagcctcagtatctgaggtcagcctgggcaacctggcaaaatacctcatctcataataagtaacaacaataataataangttagctgttangggctgttattggttacttatcccaagtcacagtcttcttatttaatttacccccanatctcaattgtttttttgaagtaatcaattatcttcccntgantgg

SEQ ID NO: 4643 - DNA, 715 bp, Homo sapiens
  misc_feature (630)..(630): "n" may be a, t, c, g, other or unknown
  misc_feature (646)..(646): "n" may be a, t, c, g, other or unknown
  misc_feature (681)..(681): "n" may be a, t, c, g, other or unknown
tgcttctggacggaagtggtggctgtggaaggcgtagcatcatcctgcagacagacaataattctggagatactggtggaagttccaagtccaataagacactcaaatatgagtacaaatgccttaaaatggaattgaaaaactctttattttcccctatcatttattggatgggtgggtggggtatttttttgtaattgcttttttaaatattagttaatggattaaatttaattcttcagcgtaaaatggtgaagaactagcatatagccattgatcataaactgactatcataaaatcaaaacaagtgaaataacaaaatggacatggtggctttgtttaggtagagccacaaaagaaaagacttgtaatatttttatatacagaggaaatctgtaacaggtattttgtttcttttaaagcaagcaacacagaggaatttatacctcaaactatctggccatatttactaccttatcactgcattattctcttttatctgtttaaagcatatagagatgaagtttgtagttgttttaagtactacacatttttaaattgttagcttccttaagtatatcatgtaaagaaatgtcttaatttttgaaaaaagtacatatttattttcntttgaattgtttttantgttttctatttatgccttgatgatttaatatggntttgttacagccaagtgccaaatgctctctcaaa

SEQ ID NO: 4644 - DNA, 618 bp, Homo sapiens
  misc_feature (536)..(536): "n" may be a, t, c, g, other or unknown
  misc_feature (600)..(600): "n" may be a, t, c, g, other or unknown
  misc_feature (606)..(606): "n" may be a, t, c, g, other or unknown
ctgtaacattagagcacaatataattgtagacattctaagcatctgtccgtgtagtctaccaattgcacaaggaaggcatgttagccctccagattgaaaatgtatgtgacctcttgaactgaagttagattcccaaccattcaaaatgttggcagctgatcacatttacttctgataaaagtaatgtgtaagtaaggttaatcttctttcataatgccttatgacaagcaggtgctgcttcatgaaacgtcattgtatagcccatttcatgtatcattacattgttgctgttatttaatgagtgcattatttctctttttaagttggccttaggtatatgtcattgtggcatgcagagggttatgacgattttaaatattaggatttttagagcacataacattagctattttatggatttcaaaagtctcaaaacagttgtagattaaaactgttagttacctttcacatttccaaactatgtgcataaaatagaataaatgcagtatagaactatgctaaccaaaattaatangttaaggggtattttattttaaatcctgtagtaattggggaaattgagaagattataattttanacatgngttcattaagat

SEQ ID NO: 4645 - DNA, 734 bp, Homo sapiens
  misc_feature (677)..(677): "n" may be a, t, c, g, other or unknown
  misc_feature (701)..(701): "n" may be a, t, c, g, other or unknown
  misc_feature (730)..(730): "n" may be a, t, c, g, other or unknown
ttttctctttgcataaattttggctccattctttccataacaatctaatcaaaactgggagttctcaagtgaatgcaaaaggagcaggccataactttatttgttagatacactgtcagaaacttgagatcttttggcctatgataataccattaatttttgcattgcttcagtttgccaagtgtttttacatcatctcatttgatctcaaaacagcttgacagagcaactgttattgaaatattacagatggaaagaatgaggctcagggaagttaaagacttggccaagatctgctcatcgtcactgtctgtacagtatttttttttagaggttgtaatgtctcagatttagtcctttaccatctatgttgatttgcttttgtctatttcctcattaattgaatatactttaaatatatatattaaagtatcaaaatatagagagacatttgaactgtattcaggtaatatgtttaaagatatttatatattgccatacaaaaacttaacatttaaaactgataatatctgtaatgacatcagaatgaaagaaaaaaaattgtacagtgtatattcctttgttttgaatccaaatctttttcataaggtaatgacagatgccttaatgtgaagcttatttataatagcaataaacctaactggatttggatgaanaagtcttaatactgacatactggntttttaatgcactgggttgttaattgggnattc

SEQ ID NO: 4646 - DNA, 610 bp, Homo sapiens
  misc_feature (572)..(572): "n" may be a, t, c, g, other or unknown
  misc_feature (596)..(596): "n" may be a, t, c, g, other or unknown
  misc_feature (599)..(599): "n" may be a, t, c, g, other or unknown
tgacaaaaaagaaagacacctgttggggtggcctgccagacccaggagtggagggctctgtgagggcccgggaattcggactcaggacagggattctccatggctaggcccagaaacacagggtccaaccactctccagcagggagacctgggggtgaaggggtgagccctgcgcaggtctctgttccttggtcttcactgggcagtgtggagaggtgtggccaggaggagcccgcgtttgtccagaccagggtctactctggcaccagagtgaccacctctgacctctcctttcctcgtcctgggccgggaacgacaccaaatgagggacatggaaaggggtgagaagcataaatgtgcgtgtgtttctgcagaggagggggcatgggcccctgccgggctgcgcaggggagggtggggtgggacttttccagagagggagccaggcctggcccgggccccgggagctcacgtcacccccacccctcacttctccagggaactgccaaagccaaacccagctcgggatgggattatgtgtactgggtagacccgtggagaggggctgcganaaagagatctcggtgggcagaganaancaaaggcagaa

SEQ ID NO: 4647 - DNA, 705 bp, Homo sapiens
  misc_feature (644)..(644): "n" may be a, t, c, g, other or unknown
  misc_feature (686)..(686): "n" may be a, t, c, g, other or unknown
  misc_feature (688)..(688): "n" may be a, t, c, g, other or unknown
acaagcagagagacaaatcatgagtgaactcccattcacaactgctacaaagataataaaatacccaggaatacaactcacaagggatgtgaagaactacaaacaactgctcaaggaaataagagagtacacaaacaaatggaaaaacattccatgctcatggataggaaaaatcaatatcatgaaaatggccatactgcccaaagttatttatagattcaatgctatccccatcaagccatgattgacattcctcacaggattagaaaaaactactttaaatttcatatggaaccaaaaaagagtccaaatagccaagacaatcctaagcaaaaggaacaaaactggaggcatcatgctacctgacttcaaactataccacaaggctacagtaaccaaaacagcatggtactggtaccaaaacagatatatagaccaatggaacagaacagatgcatcagaaataatgctgcacatccacaaccatctgatctttgataaatctgacaaaaacaagaaatggggaaaggattccctatttaataaatggtgttgggaaaactggctagccatatgcagaaaactgaaactggacccctttcctacaacttatacaaaaattaactcaagatgggttaaagacntaaatttaagactaaaactataaaacctagaagaaaacctangnaatgccattcaggcata

SEQ ID NO: 4648 - DNA, 631 bp, Homo sapiens
  misc_feature (611)..(611): "n" may be a, t, c, g, other or unknown
  misc_feature (617)..(618): "n" may be a, t, c, g, other or unknown
gcggtcatcgccgcctcggcccgggagctcagcattgcagccgcaccggaggcctgaaaccgtctcctccgctaccgccgccgccgccgccgccgccggaccgagggatacgacggttcccgagacagcggaacctgcggcccggggcggccgtcagatataaagtcatgaagaactggggagttataggtggaattgctgctgctcttgcagcaggaatatatgttatttggggtcccattacagaaagaaagaagcgtagaaaagggcttgtgcctggccttgttaatttagggaacacctgcttcatgaactccctgctacaaggcctgtctgcctgtcctgctttcatcaggtggctggaagagttcacctcccagtactccagggatcagaaggagcccccctcacaccagtatttatccttaacactcttgcaccttctgaaagccttgtcctgccaagaagttactgatgatgaggtcttagatgcaagctgcttgttggatgtcttaagaatgtacagatggcaaatctcaacattttgaagaacaagatgctcacgaattattccatgtcattacctcctcattgggaaattgagcggagancgccannctccgggtcacaa

SEQ ID NO: 4649 - DNA, 877 bp, Homo sapiens
  misc_feature (659)..(659): "n" may be a, t, c, g, other or unknown
  misc_feature (721)..(721): "n" may be a, t, c, g, other or unknown
  misc_feature (843)..(843): "n" may be a, t, c, g, other or unknown
  misc_feature (851)..(851): "n" may be a, t, c, g, other or unknown
  misc_feature (868)..(868): "n" may be a, t, c, g, other or unknown
ttatgttaacatttgaaaactcaagtacttgcaagggactatctagatagggataatttgtcctaggtgtcttaactgtgaagcagcttaaatgccccacaaaaattgctctagttctgccatcagtgtttctgtgagcattcttaaagcttctttttagccacaagaaataactgaaagctgatgtttttaactataagcattttttgttgtttttaactaaaaatagaagtgatagaactgttctctgaacatctggggacagcagagttcttaattgtcttgagtacttaagaatatatcttgaattgtttcacaaaattgactaggacataatgctaaaaattcagactgttttagaatcttgtgttcatatgagttaaagaaaaattcaaatagtaactgtctttgaatacataagggaaattttacaataaaaattttcaaaattattattcaagatttatacttagatatattacgttgagtttattttctggaatcagcttgccaaaagaggaaaagtttatttttaagtgaaggtaaaaattgattttaattatttggtagcaacccttactagtagaataagagctgaagtaccaatattaagtgattttcactgttctgaaccaagcctggttgcatggtggttttangacaacagtgaagagctttaattttttaagttttggggaaatagcttgtgagagggaagaanggattgcaaagtttttccaaaatattttatgaagttagtgaagtcagttgaaaggtgtatttaaacatatgaagggatacagttacatttttttaatgagaggaaacaattgccgtagtcanaaataagntggagtggtttacctanttaggggta

SEQ ID NO: 4650 - DNA, 687 bp, Homo sapiens
  misc_feature (524)..(524): "n" may be a, t, c, g, other or unknown
  misc_feature (622)..(622): "n" may be a, t, c, g, other or unknown
  misc_feature (645)..(645): "n" may be a, t, c, g, other or unknown
  misc_feature (687)..(687): "n" may be a, t, c, g, other or unknown
taaacaagtaaactattatggtttccattgcttacaaaatgattttcctttacattcttatcatgaacactattttaagcatcaaatgcaatcatctaaaatataaaggtcaatcatttataatagaaacaccttgaccacaagcccttgattgaacattttataatatttcatctacttattaaaacaaataatttcccttgggttggaggggaagtgatttcataaattaattagaaagccatctttagcatattgcttatgtctggatccatgtttctgaggaaaaagacattctcaggtgatgtatttttttcatgcattagtatgcatttttaaaaaataatgcatgtttctttaataattaattttcatcttctataagatgccatgtgaagaagttgtggaaatgtagaataaaaagctaaagctgccaaatttctgttgaactcttaaaaacagctcatgtttgtttgtcctctcgggttgtggcctagcctatttgcaatgtaatgaagctgcanggttcttgtatagctaaagcgttcaatgcatttcacgtgctgtggtggatgtggggtgctgtagacagggcttcctctcttccctgctctcaaaatancctccggctttgacaatttgggncaagattcctggtcaattgggtttaaagcctggaagcaaaan

SEQ ID NO: 4651 - DNA, 606 bp, Homo sapiens
  misc_feature (521)..(521): "n" may be a, t, c, g, other or unknown
  misc_feature (549)..(549): "n" may be a, t, c, g, other or unknown
  misc_feature (564)..(564): "n" may be a, t, c, g, other or unknown
aagaaaggtaagggccctgggcgaggaaagcgcggccctttccgagtttggtgttttgcagcgaaaggaaatctcgctcttccgaaagtcctccagggcgagagaggaaagggcctaggtactgtgctggggtcgcacagccggccgagacagtgccgggacggggagccaggcttccgagtgcgcccggtcactgactcctccgcgctttcctcgtgcgcctgcagcccttggttcttggaaacgccggcgccttgttcagggctggtggggctggggcgcaaggtgcagctgacaatgcccgagaggagccgcagcctctggtggagttcggtcgggtgtgggggtagtcaaggaaagaagcaaagggaatacctcctctgaaaaatggcagaagcagttttccatgccccaaagaggaaaagaagagtgtatgagacttacgagtctccattgccaatcccttttggtcaggaccatggtcctctgaaagaattcaagatattccgtgctgaaatgantaacaacaatgtgattgtgaggaatgcngaggacattgagcanctctatgggaaaggttattttggaaaagggtattctttcaag

SEQ ID NO: 4652 - DNA, 675 bp, Homo sapiens
  misc_feature (624)..(624): "n" may be a, t, c, g, other or unknown
  misc_feature (670)..(670): "n" may be a, t, c, g, other or unknown
  misc_feature (672)..(672): "n" may be a, t, c, g, other or unknown
aaaaaagcgggacaggtccaagcggttgttctgtgtgaagtcgcgcggcttccacccacgcagtgttctaagtgaaggccagaaactcgctcgccatgtcggctgcagaggcggggggtgttttccacagagccaggggcaggaccctggacgcgtttcccgcagaaaaggaaagcgaatggaaaggcccattctacttcatcctgggcgcagacccacagtttgggctgatcaaggcctggtccactggggactgtgacaatggcggcgacgaatgggaacaggagatccgtctaactgagcaagccgtccaggccatcaacgagctgaaccccaaacccaaattcttcgttctgtgcggcgacctcatccacgccatgccagggaagccgtggcggacggagcagacggaggacctgaagcgagtgcttagggcagtggacagggccatcccactggtccttgtcagcggcaaccatgacattggcaacacccccacgggcgagaccgtcgaggagttctgccggacttggggagatgactacttcagcttctgggtccgggggcgtcctgttcctggtcctcaactcccagttctacgagaacccctccaaatgccccagnctgaagcaagctcaagaccaatggctggacgagcaactgagcatcncnagg

SEQ ID NO: 4653 - DNA, 744 bp, Homo sapiens
  misc_feature (407)..(407): "n" may be a, t, c, g, other or unknown
  misc_feature (510)..(510): "n" may be a, t, c, g, other or unknown
  misc_feature (667)..(667): "n" may be a, t, c, g, other or unknown
  misc_feature (671)..(671): "n" may be a, t, c, g, other or unknown
  misc_feature (741)..(741): "n" may be a, t, c, g, other or unknown
attcacgcgcgccgcagcggggcaccggaagttatggaggtattaataggggaccctattaccacatgtctttctccctcagtgtatgatataatttgtaatcttgggtttcaactcagagaaaattgtgatatcaatagcattgtaactcagaatggtgaagtatgctggaaaacaatcacagactgtgtgagctacacagagtcagagcagggtctggattactggggaagcgtgaggctgctgggccctgtgtgtgaggctgtccattcacatttcttatctctgaccaaggggcaatttgaaattcgatatgcaccgtggttccagtggacaagttttccagagttatttcctgaaatatttgatgccttggaaagtctacaatctcctgctatttctcttancttaatgaaactgacatcgtgtctagaacgagccttgggtgatgtatttttactgattgggaaggaatgcccctttcttttaagagatctgctttcatctgangagcttgctcaagtcttcagtcagtctgtgatgaacgtgctaaaagtcttcgttggctctccgtgtggtctcaacctgcgtaacgtcttatggcatgggtttgcgtcacctgaagaaaattcctccaaaatactgttcaatgatgatactgttgacngcanggattgggtcagttactgaagagttaccttcaaaacactaaaacttacattgggcacatcgctccttcanatc

SEQ ID NO: 4654 - DNA, 581 bp, Homo sapiens
  misc_feature (571)..(572): "n" may be a, t, c, g, other or unknown
  misc_feature (577)..(577): "n" may be a, t, c, g, other or unknown
aaaactttttctgaattcataacaatcatcatagagttagactagacctttagaaaagcaacctgtttacaaaatggagatctatatggaaattatggaaatggaattgctttcttctgtttgcccatttatttctatgaaagtagactaaatactccacttatttcatagcacattcaaaggagaagcctaagttttatgagcatctttcactgtttccccaggtttccacatacaagattagaacacgaattgggctatcagtgaaaagaactcagggcatatgcagagttttatgtccagggttgactaatgattcattcactgctggaagtcattcacagacaccctttcctccaatggcttttcataatatcttcctgttttcagtaagcggctacagaaagtctggactactgagagacttgtttcaacaacagtttcaggatgatccttaattctacaaaactctgtacctctagggattaagtggcagcaatcatcactgagctccagctggtctggttgaagccagcctttctaatctatcagatgctgtaacgtttcttgnntgtantcca

SEQ ID NO: 4655 - DNA, 666 bp, Homo sapiens
  misc_feature (543)..(543): "n" may be a, t, c, g, other or unknown
  misc_feature (601)..(601): "n" may be a, t, c, g, other or unknown
  misc_feature (637)..(637): "n" may be a, t, c, g, other or unknown
cagtgggtgcgtcggccacgaccttttggccaggttagggagggggcgacgctgagatgggggcggcggcggcggaagcggatcgcactctctttgtgggcaaccttgaaacgaaagtgaccgaggagctccttttcgagcttttccaccaggctgggccagtaataaaggtgaaaattccaaaagataaggatggtaaaccaaagcagtttgcgtttgtgaatttcaaacatgaagtgtctgttccttatgcaatgaatctacttaatggaatcaaactttatggaaggcctatcaaaattcaatttagatcaggaagtagtcatgccccacaagatgtcagtttgtcatatccccaatatcatgttggaaattcaagccctacctccacatctcctagcagcaggtacgaaaggactatggataacatgacttcatcagcacagataattcagagatctttctcttctccagaaaattttcaagagacaagcagtgatgaacagtgctttgagacaaatgtcatatggtggaaaatttggntcttcacctctggatcaatcaggattttcaccatcagttcaatcacacagtcataagnttcaatcagtcttcaagctcccagtggcgccaaggnacaccatcatcacaagcgttaaagtcaga

SEQ ID NO: 4656 - DNA, 667 bp, Homo sapiens
  misc_feature (447)..(447): "n" may be a, t, c, g, other or unknown
  misc_feature (586)..(586): "n" may be a, t, c, g, other or unknown
  misc_feature (595)..(595): "n" may be a, t, c, g, other or unknown
  misc_feature (661)..(661): "n" may be a, t, c, g, other or unknown
ctacaatttttggactcaagcaaaaagccagattttttggaaccaactgaggaattctgtacacaaagcttcagcaaacacttagagaaaacaaacaaacaaacaaactgggtccttggaaacagttctggcacacaggcagaacactggaggccacctcaaaggacagaggccatgctttcgcatttggaatgtggctctgccacacagctcactcctatggtggggtcagaggtcagaacacaaaccacccatgtgggctctgctccctcccaacactctgtgttcccacagggcttctctgcgggcagccaggcacctgtcaggcttgggcaggggcctgctgagaatctgtgaatgcagaggggagggctcatggccaaggattccagccagagatgaatttccatgctctgggccaagggctctgtgccggcccctcatgangtggctggctgcattatggggagatgctgcccacggcggagatggtggcagtggctgtgaagaacagaggtacctgaattctgtgtcctcagctgtcactttccggtgagacaagtggagcagggcctttgatcactgnggtcacaanacctggtactggggttttgcccttgtgtgctcaaacatttctaaaggtgtccccaaagcccctggnggaaaa

SEQ ID NO: 4657 - DNA, 659 bp, Homo sapiens
  misc_feature (649)..(649): "n" may be a, t, c, g, other or unknown
  misc_feature (658)..(658): "n" may be a, t, c, g, other or unknown
ttgttggcctactggtcgaaatgcacctcatgcactctaattagcacgtcaaattagtctctccgtttcagaggtgtagggcctttgtggagccttctcaataaaataatttgccactcttgaaggttagacattctcttctatcaatgtacacataaaggttttgttttgctttgcttgttgtgaattaaaatggggagaaaatgatgtgttagctattacccagtcatgtgtctttttagtcataggttagcttttcaagacacttcctgcatctctgacctgttgcacctctgttatcttggcacctctgttatcttagcagcaagcacctgcctcagctgacccttgagccataacccataagctcctgaaaagtacatcaagtctaaagtgaaccagctaactcattaagactggaatcatgagcaacaatggagcagacctaacctttggttacatctcctgttttgtagctatccttttgtttggctcaaattttgtgccacttaaaaaatttgatactggtgatggaatgtttctccagtgggttctttgtgctgccatatggttggttgccttggttgtcaatctgatattacattgtccaaagttttggccttttgcaatgcttgggggctgcatttgngggcaacang

SEQ ID NO: 4658 - DNA, 662 bp, Homo sapiens
  misc_feature (619)..(619): "n" may be a, t, c, g, other or unknown
  misc_feature (643)..(643): "n" may be a, t, c, g, other or unknown
atagagccctcagtgggatgaggatgaaactgctattgccggcggctcctgttttaccgcgtcagcatgctggtgcatttatttcgggtcgggattcggggtggcccattcccaggcaggctgctaccgcccctccgcttccagacattctcagctgtcagaaacacatggcgtaatgggaaaactggacagttacacaaggcagaaggagagtactctgatggctaccgcagctcctccctcctccgggccgtggcccacctgcggtcccagctctgggcccacctccctcgagcccccctagctcccagatggagcccctctgcctggtgctgggttgggggagccctgctaggccccatggtactgagtaagcatccccacctctgccttgtggccctgtgtgaggcagaagaggcccctcctgccagctccacaccccatgtcgtggggtctcgctttaactggaagctcttctggcagtttctgcacccccacctgctggtcctgggggtagccgtcgtgctggccttgggtgcggcactcgtgaatgtacagatccccctgctcctgggccagctggtagaggtcgtggccaagtacacaagggaccacgtanggagtttcatgactgaagtcccangaatctcaagcacccacct

SEQ ID NO: 4659 - DNA, 660 bp, Homo sapiens
agtagggaaagacccaggctgcgggacgcggtgcaggctgcggcgctgacggcctctgctccttccgcgggtttccgactccctgccctagattttctgcttagcgacttggggtcccctctcgtttgcttctggtaggagtcgcaatcccagcagcaatagcccagaagaggacacggttcccgtaccgaagggttcagtaccagcagcccgaccatcacgcggcgggatgtctgtggttggcattgacctcggctttctcaactgctacattgctgtcgcgagaagtggcggcatcgagaccatcgccaatgagtacagcgacaggtgtaccccggcctgtatatcattgggatcaagaactcgagccattggaaatgcagcaaagagccagatagtcacgaacgtaagaaatacaattcatggcttcaaagagcttcatgggcgatcatttgatgatcccattgtgcaaactgaaaggatcaggcttccctatgaactgcagaaaatgcctaatggaagtgcaggagttaaggtccggtacttagaggaagagagaccttttgcaattgagcaagttactggaatgctgttagccaagcttaaagagacttcagaaaatgctttgaagaaaccagtggctgactgtggtgatttcaa

SEQ ID NO: 4660 - DNA, 732 bp, Homo sapiens
  misc_feature (709)..(709): "n" may be a, t, c, g, other or unknown
  misc_feature (731)..(732): "n" may be a, t, c, g, other or unknown
gaatacatgatcttgaacagctcctgtacttgctctttgtaaaaaaaataaaattattttgaattattctacctttgtaaacaattggctaaaagaatcatctttaagaaattaagccatttacatgtttgtgtttttctatagcagagcattatattttgcattatatgtttcaacctagtctaagtgggtcttttttacatttttcaagaacggatttcctggaatacagcgatataattttggttgtcaaattcctaatgcaaccatttagtctaaacttagtcatttatttgtgacaataagatgtgttcaggggctccctgtttttaagagactcttttaaaaaaaaaaaaacctaatgtttttatcttgagtcaatatgattaggtattttggatttacttttaatcttaaaatactgcatttttatagcttctcagagcatgtggatgggatgggattttcgttattttgctgggtcagcttatctttaatatatggactattcctataaaccaaagtctctgacaagtgcacctaatttatattgtattttaactacagtgtaagtttccattaacaaaaccatcctaaagcgttaactgctcataattttaatcagctacagttatgaaaaaggaagaattttgctccaaaagattattaataagcttagaaaatcctgcttttacctaacagaatgaantggggttgaggggccggtaagnn

SEQ ID NO: 4661 - DNA, 735 bp, Homo sapiens
  misc_feature (502)..(502): "n" may be a, t, c, g, other or unknown
  misc_feature (659)..(659): "n" may be a, t, c, g, other or unknown
  misc_feature (727)..(727): "n" may be a, t, c, g, other or unknown
  misc_feature (734)..(734): "n" may be a, t, c, g, other or unknown
aactttatggacttcccaaaacataaccagatcataactgaagaaacaggctctgcagttgaaccaagtgatgaaataaagagagccagtggagatgtccaaactatgaaaatttcatctgtgcctaatagtttatcaaagcgaaatgtgtctttgactcgaagtcacagtgttggaggcccattgcagaatattgactttacccagcgaccgtttcatggcatctcaacagttagtcttccaaatagtctgcaggaagttgtggatcctttaggaaaaagacccaatcctccccctgtttctgtgccctacttgagtcctctagtactccgtaaagaacttgaatcattgctagaaaatgaaggtgatcaggtgattcatacatcttctttcatcaatcaacatccaatcattttctggaacctcgtttggtatttcagacgtttggaccttcctagtaacttgccaggacttatcctcacatctgaacattgtaatgaangtgtacagcttcctctgtcatctctgtcccaggatagcaaacttgtgtatattcacctgttatgggataatatcaaccttcatcaggaaccaagagaacctctgtatgtctcatggaggaattttaattctgaaaagaaacatctctcctgtcaganggaacaacaagaaacaagcactttagtagaaaccatcaggcaggagtattcaagcacaataatgtccnttaaaana

SEQ ID NO: 4662 - DNA, 754 bp, Homo sapiens
  misc_feature (738)..(738): "n" may be a, t, c, g, other or unknown
  misc_feature (743)..(743): "n" may be a, t, c, g, other or unknown
  misc_feature (749)..(749): "n" may be a, t, c, g, other or unknown
gctttgcggctgtcgtcggagaggcatctgggttcggactggggccgccatggggaaagtgaatgtggccaagttgcgttacatgagccgagatgacttcagggtcttgaccgcggttgaaatgggcatgaagaaccatgaaattgttcccggcagtttgattgcttctatagccagccttaaacatggtggctgtaataaagttttaagagaattagtgaaacataaactcatagcttgggagcgtaccaaaactgtccagggctatcggttgacaaatgcaggatatgattacctagctttgaaaacactttcttctaggcaagtagttgagtctgttggaaaccagatgggtgttggcaaagaatcagatatttacattgttgcaaatgaagaaggacaacaatttgcattaaagcttcacagactaggaagaacctcgtttcgaaatttgaaaaacaaacgcgattatcataaacataggcacaatgtgtcttggctttatttatctcgtctctctgccatgaaggaatttgcctatatgaaggcattgtatgagaggaaatttccagttccaaagccaattggttacaatcgtcatgcagtggtcatgggactcataaatggttatccactatgtcagatacaccaagttgaagattctgcatcagtatatgatgaagcctatggaactaaattggcaaaccttgccaaatcatgggcctgatcaaggggggnggtanaaagtnaaaaa

SEQ ID NO: 4663 - DNA, 757 bp, Homo sapiens
  misc_feature (584)..(584): "n" may be a, t, c, g, other or unknown
  misc_feature (703)..(703): "n" may be a, t, c, g, other or unknown
  misc_feature (705)..(705): "n" may be a, t, c, g, other or unknown
  misc_feature (742)..(742): "n" may be a, t, c, g, other or unknown
acagatgagtaacgtgaatttgtccgtctccgacttctggagagtgatgatgcgggtgtgctggttggtgagacaggacagccggcaccagcgaatcagacttccacatttggaagcagttgtgattgggcgtggcccagagaccaagatcactgataagaaatgttctcgacagcaagttgaaagcagagtgtaacaagggatatgtcaaggtaaagcaggtaggagtcaatcccaccagcattgactcagtcgtaattgggaaggaccaagaggtgaagctgcagcctggccaggttctccacatggtgaatgaactttatccatatattgtagagtttgaggaagaggcaaagaaccctggcctggaaacacacaggaagagaaagagatcaggcaacagtgattctatagaaagggatgctgctcaggaagctgaggctgggacagggctggaacctgggagcaactctggccaatgctctgtgcccctaaagaagggaaaagatgcacctatcaaaaaggaatccctgggccactggagtcaaggcttgaagatttctatgcaggaccccaaaatgcangtttacaaagatgagcaagtggtggtgataaaggataaatacccaaaggcccgttaccattggctggtcctaccgtggacctccatttccagtccgaaggctgtgggcaaggaacaccntngaactccttaagcatatgcacactgttgggggggggnaaaaaaaaaaaaaaa

SEQ ID NO: 4664 - DNA, 727 bp, Homo sapiens
  misc_feature (630)..(630): "n" may be a, t, c, g, other or unknown
  misc_feature (693)..(693): "n" may be a, t, c, g, other or unknown
  misc_feature (723)..(723): "n" may be a, t, c, g, other or unknown
ctactgccatggaacttctttatcactgccaaggagtactggatgttcaaactccgcaactcctccagcccagccaccggggaggaccctgagggctcagacatcctgaactactttgagagctaccttgccgttgcctccgccgtgccctccatgctgtgcctggtggccaacttcctgcttgtcaacagggttgcagtccacatccgtgtcctggcctcactgacggtcatcctggccatcttcatggtgataactgcactggtgaaggtggacacttcctcctggacccgtggcttttttgcggtcaccattgtctgcatggtgatcctcagcggtgcctccactgtcttcagcagcagcatctacggcatgaccggctcctttcctatgaggaactcccaggcactgatatcaggaggagccatgggcgggacggtcagcgccgtggcctcattggtggacttggctgcatccagtgatgtgaggaacagcgccctggccttcttcctgacggccaccatcttcctcgtgctctgcatgggactctacctgctgctgtccaggctggagtatgccaggtactacatgaggcctgttcttgcgggccatgtgttttctggtgaagangagcttccccaggactccctcagtgccccttcggtgggcctcccaaaattcaattgattccanaaaaccccctctccggccccatccttgaangaaa

SEQ ID NO: 4665 - DNA, 789 bp, Homo sapiens
  misc_feature (483)..(483): "n" may be a, t, c, g, other or unknown
  misc_feature (751)..(751): "n" may be a, t, c, g, other or unknown
  misc_feature (761)..(761): "n" may be a, t, c, g, other or unknown
  misc_feature (786)..(786): "n" may be a, t, c, g, other or unknown
aatgccttgcgcgccgcgggcccagagacgtgaggctgtcggcgtcctggtggccccgcctcgtgtccccccccggaccccacgccgcgggagcttgggggctgcggtcttctcttcctccgacctcaccttcgatgcggaagcgcaggggcaggtgcgccgccctcggcccgcgcaggcggtgggcccgtctggggcaaggcgcccggaagcgcctggttggttcagaaaatcggaccgcagcgggagggcgggcaccggcgcgtggtctcagtggccccaggcgaaccctgatgagcagcagccgcaagtggcttactaaaggagccactttctacgtttgtctggaatttacgtgaattaagctggcgggcgggcggccaggcctgtagtctcagcactttgggaggctcagcacttcgggaggctgtggcgggcggatcacctgagcctgggagttggagaccagcctgcgcaacgtancaagaccctatctctaaaacagattcattaatacttagccaggcgcggtggctgaggtcccagctactcggcaggcccaagctggcctgagccagaccgctctggactgttttaattttttcagccttaatacctgccagaattttttttttactatgtatctttgtccttacgtatataaattttatgtacaattgagattatcctgtatttgcttttcccccctcacttttatatggtgacttttctcaagttaggctgaatactnacaatttggnaaactgtcgggcctgaaaaacgaancgg

SEQ ID NO: 4666 - DNA, 776 bp, Homo sapiens
  misc_feature (19)..(19): "n" may be a, t, c, g, other or unknown
  misc_feature (705)..(705): "n" may be a, t, c, g, other or unknown
  misc_feature (756)..(756): "n" may be a, t, c, g, other or unknown
  misc_feature (761)..(761): "n" may be a, t, c, g, other or unknown
ctagaataaccactttagnagaagaacataaatgatctgatggagctgaaaaacacagcacgagaccttcgtgaagcatacagaagtatcaatagctgaatcgatcaagcagaagaaaggatatcagagattgaagatcaacttaatgacataaagtgtgacgtcaagattagagaaaaaaagaatgaaaaggaacgaacaaagcctccaagaaatatgggactatgtgaaaagaccaaacctatgtttaattgatgtacctgaaagtgctggggagaatagaaccaagtttgaaaacactcttaggatattatccaggagaacttccccaacctagcaagacaggccaatattcaaatcagtaaatacagagaacaccacaaagatactcctcgagaagagcaaccccaagacacataatcatcagattcaccaaggatgaaatgaagaaaaaaatgttaagggcagccagagagaaaggtcggtttactcacaaagggaagcccattaaactaatagcagatttgtctgctgaaaccctacaagccagaatagagtggggggccaatatttaacattcttaaagaaaagaattttcagcccagaatttcatatccagccaaactaagcttcattagcaaagaagaaataaaatcctgagagacaagcaaatgctgagcgattttgtcaacaacaggcctggcntacaagagctccagaagggaacacttaacacctttaagggaaaaccaattncaagncactggaaaaacctt

SEQ ID NO: 4667 - DNA, 675 bp, Homo sapiens
  misc_feature (643)..(643): "n" may be a, t, c, g, other or unknown
  misc_feature (645)..(645): "n" may be a, t, c, g, other or unknown
  misc_feature (658)..(658): "n" may be a, t, c, g, other or unknown
tactttctaacagtagtatttttagaatggcagctataaagttaactcctggacacaagtatatactgtgcactgaaaaaatatccatctacacagcacccaaggggagggctgggggcaccggcacgggggcagcgtgcagccctgccctgtcaggctgtcagacaagccccggggggcagcaggtgggctcgggacgggctgggggagggacggccatggcacttgggggctccagggtgactcccatgaggcctcccttcaaccaggctttttggccccacaaatactttaagcaaatcattaaaattataacagttaatggtttgggggtgtttaggctgtaactgctaactcctaggaaacagccttttccctggacacagatggtccatacgctgagccacgtgaaactgctgatgttttgtttagatgcacacacatggcagcgtttcatacaggtcagcaggttagaccggcttttgaccatattcatcgctatttaaaacctgtggcaaaatgaacgcttattttacagactttctaatttgaccagatttcttaatgaatagacacagaattaactaaaaacagtctcaccccatgtagtgcgccgtgtcctgagagaagtgccctccctacnangagggaagaacangccctggggtgcaaagg

SEQ ID NO: 4668 - DNA, 657 bp, Homo sapiens
  misc_feature (431)..(431): "n" may be a, t, c, g, other or unknown
  misc_feature (531)..(531): "n" may be a, t, c, g, other or unknown
  misc_feature (587)..(587): "n" may be a, t, c, g, other or unknown
  misc_feature (611)..(611): "n" may be a, t, c, g, other or unknown
  misc_feature (655)..(655): "n" may be a, t, c, g, other or unknown
tttctccagcggcccggtcgtgaagggcggtcggcgccgcagcggctccgatgcccgcccggaagagagcgctctggccccggcctcgcagctgcgggacagccgggagcggagcagagggcagccgcggccagttgtctccccagcggactgggaagggaactttatctcggcctggactcccgctgtacctttgttgggggttagtggtgaggctgcggtcgtccgagctcctgggtgtcgcgggcgccgcgatcccctcttcccgtagaagggcccagggcgctgctcgaggcgcgggaacccctggccagaggcgggcactggcgcatccccgcggctgctgctggccaagccgactgcagggatgagaaattccttgtaagagtggctggaacgctccgcggagagggaataaactcttcccaaancgagctcgcactgctccttgggaatggtgcactttccagttccagttggaccctctgggattgtcacaggaagcgctgccattgtatgaggagccctctncaaactacagaaggatggatgctcttaagttataaataagattttgacgccctggntggtttgatgacttgtgtcatgangagtaggggtgttgcgctgaatccaaaattcttccaacgcgggnat

SEQ ID NO: 4669 - DNA, 769 bp, Homo sapiens
  misc_feature (612)..(612): "n" may be a, t, c, g, other or unknown
  misc_feature (694)..(694): "n" may be a, t, c, g, other or unknown
  misc_feature (743)..(743): "n" may be a, t, c, g, other or unknown
  misc_feature (752)..(752): "n" may be a, t, c, g, other or unknown
tgtgaaattgagaatcatgataaaatcctcatacctcctcctcttttgaccaaatctttctaaaatgcacaattataatttcttatctttaggaaaaagtaattatgttatatgtgttatatacactatgtaaatatagttcattaaatcattctttggtgtttgaagactttctaattcattacttcattccagacatcaatgacaacagcacataccgagcaggtacacatatgagctacctactaatatgccctgattttgattgtattttgtgaaaaccttggtatgggttatttttaaatgaatgttttcccaaattttaagctgaaactaggatgcatcaaaattatcttggtcataatcttgtcaatgatgtcatctaaaggccaccaggaacacacctgtagcccagcaaagttgaggccatcgactggctcatcacaacaaggaaggctgtgcaccactgggacccagcagcagctcagcagcagcagtgagagggccttgggaaagacttggagggtttggcttatacaaggtgatcttggggagggtcaaggaaacaggctgtgatggttaatattgagtgtcaacttgattggattgaangatgcaaaggattgttcctgggtgtatatgtgagagtgtggccaaaggagattaacattttagtcagtggactgggaaaagnacacccaacctcaatccggggtgggcatcatccaaacaagcttgccaanagcaagctnaaattaaagcaaggcaa

SEQ ID NO: 4670 - DNA, 688 bp, Homo sapiens
  misc_feature (666)..(666): "n" may be a, t, c, g, other or unknown
  misc_feature (678)..(678): "n" may be a, t, c, g, other or unknown
  misc_feature (682)..(682): "n" may be a, t, c, g, other or unknown
aagatggcggctggcggagctgtcgctgcggcgcccgagtgccggcttctcccctacgcgctacacaagtggagctccttttcctccacctaccttcccgagaacattttagtggacaaaccaaatgaccaatcttcaagatggtcttcagagagcaactatcctccccagtacttgattctaaagctcgaaaggcctgctatagttcagaatatcacatttggaaaatatgagaaaactcatgtttgcaatttgaagaaatttaaagtctttggtggaatgaatgaagaaaatatgacagagctgttgtccagtggcttaaagaatgattataacaaagaaacattcaccttgaagcataaaattgatgaacagatgttcccttgtcgattcattaaaatagttccactcttgtcctggggacccagctttaactttagcatctggtatgttgaacttagtggcattgatgatcctgatatagtacaaccttgtctcaactggtatagcaagtagtaccgtgaacaggaagctattcgcctttgcctaaaacacttcagacaacacaactatacagaagcttttgagtcactgcaaaagaaaaccaagattgcactgggacatcccatgttaacaagatattcaagacaaagctggtgtttgaanggggattttgangccntgcgaa

SEQ ID NO: 4671 - DNA, 765 bp, Homo sapiens
  misc_feature (712)..(712): "n" may be a, t, c, g, other or unknown
  misc_feature (725)..(725): "n" may be a, t, c, g, other or unknown
  misc_feature (757)..(757): "n" may be a, t, c, g, other or unknown
tgtatgagagaataaacaaacttactcagactgaagagtatgttttcaaaaattaaagaagtagcaattatatgggagctgttatttattaaagcaattatctgagcccttaaagggctgtttgtttttacaatgttgtataatggccttgcaggaaaattagatttcttattctctcttccagtgtacattgtcttgagtattgtcacatttagagaccatagggagatatgggactcctagtattcagtcgacactctgaacagattttctgtgtgatacattttttcattttaattgagtcccctcttcctcccctccaactgatagctttttataactgtgtgaaatatctagagaagaatgaagtaggctgagctacattttcaagcttaacattctttagaaaactaagaaaatgcccaatatttcaacattaaggtgtcaataggggctaaatgatcactttaagatgttttcagtttggaacttgaatgtgtgtttaattttttgtgaacagattgatgactcttccgcgtctatttctctggcccagcttacaaaggtatatatatatatatattcctgaaaatataagtttttttctaacatcatatttttttatgtggaacggttttttaagaggggttgggggaggacatattttgcaaaagcattgtacatattattactaaccctggtaaagagtaanttgctgttttggngaagatagggggaatactttgtcagcctcaanggtatggg

SEQ ID NO: 4672 - DNA, 681 bp, Homo sapiens
  misc_feature (551)..(551): "n" may be a, t, c, g, other or unknown
  misc_feature (603)..(603): "n" may be a, t, c, g, other or unknown
  misc_feature (632)..(632): "n" may be a, t, c, g, other or unknown
  misc_feature (674)..(674): "n" may be a, t, c, g, other or unknown
gagggggcggggtcacgagccgccagccgccgggtggagggtcccggccgggagccgcggaaagagtagggctccccagacaacggggtccgacgagcagttgggcacgggctgagtccgcctgccggcagaatgtccctggctgcttattgcgtcatctgttgcagaagaataggaacctctacttccccaccaaaaagtggcacacactggagagatatcagaaatataataaagtttactggatcacttattttaggaggttctttatttcttacatatgaagttctggccctgaagaaggctgtgacattagatactcaagtggtagaacgagaaaaaatgaagtcatatatatatgtgcacacagtttctttagacaaaggagaaaatcatggtattgcctggcaggcaagaaaagaacttcacaaagcagtaagaaaagtattggcaacatcagccaagatactgcggaatccatttgctgatccttttagtacagttgatatagaagatcatgagtgtgctgtgtggctgctcctacggaagancaagtcagatgacaaaaccacgcgactcgaggctgtgcgggaaatgtcgganacccatcactgggcatgattaccagtatnggataattgcccaagcctgtgatcccgaaaactcttattggnttggcac

SEQ ID NO: 4673 - DNA, 774 bp, Homo sapiens
  misc_feature (702)..(702): "n" may be a, t, c, g, other or unknown
  misc_feature (704)..(704): "n" may be a, t, c, g, other or unknown
  misc_feature (758)..(758): "n" may be a, t, c, g, other or unknown
tgttcaagcactttaggtagccaaggtgagaggattgcttgaggccaggagtttgagactagcctgggcaacttggtaaaaccccatctctacaaaagaaaaaaaaaaattagtgtggcatggtggcatgcatctgtgctcccagctcctcacgaggctgaggtggaaggatcaagtgagcgcaagaggttgaggctccagtgagccacgatcaccccactgtgctgtagcctgggtgacagtgtgagattctgtctcagaaaaaacaaagtataacattgctttgcttctgagtatactgttggctttccaaatcagtgggtctgacttgaggtctgtgatgtgacccttttcctcacctgctcaaccattattcacatggactccatcatattcatttgtagtcattcccagagtggcccagtgagggtctcgctgtatgagagtcggctacggaatttaggagaaacagaagtttcttggctttcatgctgagcttgttggtctaagcttatgaagtcactggattagcatcatatgggaagggaaattaacatggagtcatttatacagggactaaattgaatcctacctaccggaggcaagaacatgatttatcttccataagccttatcctcttcctccttattcctcagtccatatggattttgcttatgtatgacaactccaaggaatcttggnanagtaaatttgctaaacgtttccacaaattgtcaaagtaaaatcctggagggcantaaacacctttttagg

SEQ ID NO: 4674 - DNA, 726 bp, Homo sapiens
  misc_feature (513)..(513): "n" may be a, t, c, g, other or unknown
  misc_feature (662)..(662): "n" may be a, t, c, g, other or unknown
  misc_feature (704)..(704): "n" may be a, t, c, g, other or unknown
  misc_feature (712)..(712): "n" may be a, t, c, g, other or unknown
aaaagcttattgtcatatagcccattcattgggagatgaagacaaacaaaaaattgagagtaacacagtggaagatatcaagagctcagtgaaaggtcatcctcaagaaaatgaagagaattcaaaaaacatctctactatggaatctgatctgcccacagtagaggagctgatgaaacctatcagaatagattcctttgggatcagtggttttgatttacaacctgtcagctctgagaaagtggccgaaagaaaagaaactgaattttttagctctttacccctgaagatgaacccaaatattttgtctcaagactcacaacatgtgaaccttttttttgacaaaaatgatgagaatgtgattttacaaaagaccacaaatgagagtatggaaaacagctgtccacaagtaactgaagtaactgccacagaagaacatgttgataaaatgtaccttaatattttgaggaaaaaaataactgttaattcttcatcattatctcaggatgacanaattaataaaacttacagatctcaacttagttctgaagaagaaggggctgtaatgggtaaacaggtaccatacaagaagggcagaagtgcacctcctttacttaaaaggaaaccccagagtggattatatgcgtcagttaggagctcangctatggcaaacccagttcaacactcaaggatgttttccacncctgaaangaaaacttcagagg

SEQ ID NO: 4675 - DNA, 793 bp, Homo sapiens
  misc_feature (611)..(611): "n" may be a, t, c, g, other or unknown
  misc_feature (673)..(673): "n" may be a, t, c, g, other or unknown
  misc_feature (759)..(759): "n" may be a, t, c, g, other or unknown
  misc_feature (782)..(782): "n" may be a, t, c, g, other or unknown
  misc_feature (793)..(793): "n" may be a, t, c, g, other or unknown
ctcatcgatgacctgcaacactgtctggtcaacaagatgtgccccaattatttcatccctcagtgcaacatgctggaacatctgtctgaggagacagtcatgcttcacgcccggaagctgtcctctgtgcgctcagacccggcagagcacttgcgcaccgccattgagcatgtcaaggcagccaaccggctgacactggagctccagaggcgaggtagcaccaccagcatcccctctccacagtctgacggaggggaccccaaccagcctgatgaccgtttggcaaaaaaactgcagcagctagtgactgagaacccgggaaagtcaatctctgtctttatcaatcctgacgatgtcacaaggccccatttcagaattgatgacaaatttttctgagtgttagctgacttttttttttcctgattcttaaactctgataatgtgtcgtgtggtttgtgatgctatctttctgttttttacatatccagcctagattggatttgttaagaacaaattttaagtttcctggttctgcaggatggtgcaggctctgaaacagtatattactatttcatattctgcctctgatttcgttgtttactttttgtagntattgtcatgctctttagtttgttggagttttttttccttttaaggagatcttaagccatanatgaaaatgccatgaatcctcctgctttttctgtttcaaacttggtgcaaatttgttcaagggtatggggaaacaaatctctttcngatgcttaacgattccaaccccnagtattttaan

SEQ ID NO: 4676 - DNA, 547 bp, Homo sapiens
  misc_feature (486)..(486): "n" may be a, t, c, g, other or unknown
  misc_feature (498)..(498): "n" may be a, t, c, g, other or unknown
  misc_feature (511)..(511): "n" may be a, t, c, g, other or unknown
gtgatccctgcgcgcgtctcctgctcgggtcagtgcgccgcgctgcgctgggcgccatggcgctccccggagcccgggctcgcggctgggcggcagcagccagagcggcccagaggcgccgccgcgtggagaacgcaggagggtccccgagtcctgagcctgcgggccggcgcgcggcgctttacgtacactggccttactgcgagaagcgctgcagttactgcaacttcaacaagtacatccctcgccgcctggaggaggctgccatgcagaagtgtctggtgaccgaagctcagacgctgctgcggctcagcggggtgcaacgggtggagtctgtgttctttggtggggggacccccagtctagccagtccccacacggtggctgctgtcctggaggctgtggcacaggcagcccacctgcctgcagacttggaagtcacattggaggctaatcctacttcagctccgggctccagactggcanagttcggggcancaagggttaacangttgtctataggcctccagtccctagatgacactga

SEQ ID NO: 4677 - DNA, 688 bp, Homo sapiens
  misc_feature (611)..(611): "n" may be a, t, c, g, other or unknown
  misc_feature (623)..(623): "n" may be a, t, c, g, other or unknown
  misc_feature (677)..(677): "n" may be a, t, c, g, other or unknown
gagcaggtctccaggggagcgatggcagccgggggtctgagccgctccgagcgcaaagcggcggagcgggtccggaggttgcgggaggagcagcagagggagcgcctccgccaggtgtcgcgcatcctgaggaaggcggcggcggagcgcagcgccgaggagggccggctgctggccgagagcgcggacctggtaacggagctgcagggccggagccggcggcgcgagggcctgaagcggcggcaggaggaggtgtgcgacgacccggaggagctgcgggggaaggtccgggagctggccagcgccgtccggaacgccaaatacttggtcgtctacacaggcgcgggaatcagcacggcagcgtctatcccagactaccggggccctaatggagtgtggacactgcttcagaaagggagaagcgttagtgctgccgacctgagcgaggccgagccaaccctcacccacatgagcatcacccgtctgcatgagcagaagctggtaagagccctgggtggctggtacacttgccagggaccaaggcagagcaccttggtgcccagtgggcaactaactgcacccgccctctgtctgccagttgactcccattnatgagcacccancaagcgggtttaggccgcgggtttgatcctcctgtgcttgactctccaagacanaaggggagctc

SEQ ID NO: 4678 - DNA, 779 bp, Homo sapiens
  misc_feature (628)..(628): "n" may be a, t, c, g, other or unknown
  misc_feature (686)..(686): "n" may be a, t, c, g, other or unknown
  misc_feature (718)..(718): "n" may be a, t, c, g, other or unknown
  misc_feature (738)..(738): "n" may be a, t, c, g, other or unknown
agggtttaaccgaaaccgaacattaaccgtagccctaacgcggctgagggatccaggccttgcctctgggccgggtgagagacagacactcgccaaccagtccgcagtggctccccgtgtgtgcgaggctcccgcctgcgtgtgtgcgtgtgcatgtgtgcctgcgcacaggggagggaaagttcttcagctgccgagggcgggagtaggggctggagcagcaccttgcggggaggccccacaggagaatcgatggttctgatgctgtcagcctctgggtgcaaattctgagggcccgggagcgtctggcggccctgagcagcttgctggggaagctccgtggaggaggaagtccggaggcatgtgatgtgaatcagctgacatcatcttgacgggagccctgtgaggcggacacttaactccagtttcacaggagggagccatggatttgctgcgggagctgaaggccatgcctatcacgctgcacctgctccagtccacccgagtcgggatgtctgtcaacacccttcggaagcagagctcggatgaggaggtcattgcactggccaagtctctcatcaagtcctggaagaagctcctggatgcttccgatgccaaagccagggancgggggaagggcatgcctctgcccacgtcctcgaagggatgcctcaaaagggcccggnttccaaccgcaagaggccgggagctgcccaanggcaaccgtctactcccganggatttaccaaattttccctccgggggcctggtcaacctgt

SEQ ID NO: 4679 - DNA, 727 bp, Homo sapiens
  misc_feature (635)..(635): "n" may be a, t, c, g, other or unknown
  misc_feature (649)..(649): "n" may be a, t, c, g, other or unknown
  misc_feature (697)..(697): "n" may be a, t, c, g, other or unknown
cattgcaaatgtccttaatgccactgaactgtacacttaaaaatggctaagttgggctgggcgtgagccaccacacccagccagatctgcctcttagaacaatgctatggaagttgattttggggaatgggtggaagaggcagaggtcaggcagagtgttcaataaagaggatcagacaggccaggtaggagaagctgatgcctagcctaggacagggcaggtagctcagcaagtgtgagcacctctcagtgtaagagctgaggtgggagaggggcagatgggctgtggagctggccacactaaaggcagctgtgtgtttgcagggctcaggaccaaagggaggctgagtcaggaaggcactcctgggcttctggcttgagcaggctcaaagtcaacagatgcagctgcatctgtgtctagcgattgggaaggtccacagcaggactccagctcatacctgggagtcagggcaaagtccagcctagggaagagcccccaagagccaggctgggtgtcaggtggggcccttgtcctgaagggagaagagactacaaggtagagcaccaagcacacctggctctggcacctttacgtctctggccacttctctcttatggctccctgtaacaatganatacggacacctgnaggcacctggggctaatttcttcctcaaacctgccccgctccgatgangctccctccaaggctccgcatcttgactta

SEQ ID NO: 4680 - DNA, 721 bp, Homo sapiens
  misc_feature (479)..(479): "n" may be a, t, c, g, other or unknown
  misc_feature (586)..(586): "n" may be a, t, c, g, other or unknown
  misc_feature (647)..(647): "n" may be a, t, c, g, other or unknown
  misc_feature (705)..(706): "n" may be a, t, c, g, other or unknown
gataattgagggaagaaggccagcggaaggaacaggaagaaggaacagcaaatatttattgagtgtctactgtgtgccaggcactatatctatgtgcatagaaaaaccctggaaggccatacaacaatatatatagagtgatcgtctctgcttgctgagctaacaggggtgtcaagcttccattttggtatctacttctaaatacactcagaacaggagaaatttggactaattttcaaactacagacactttctaatcatgatgcatttcaaaagtggactcgaattaactgagttgcaaaacatgacagtgcccgaggatgataacattagcaatgactccaatgatttcaccgaagtagaaaatggtcagataaatagcaagtttatttctgatcgtgaaagtagaagaagtctcacaaacagccatttggaaaaaaagaagtgtgatgagtatattccaggtacaacctccttangcatgtctgtttttaacctaagcaacgccattatgggcagtgggattttgggactcgcctttgccctggcaaacactggaatcctactttttctgggacctttgacntcagtgacattgctgtctatatattcaataaacctcctattgatctgttcaaaagaaacangctgcatggggtatgaaaaagctggggggaacaagtcttttggcaacacaagggaaannttcgtaatcctttgg

SEQ ID NO: 4681 - DNA, 677 bp, Homo sapiens
  misc_feature (552)..(552): "n" may be a, t, c, g, other or unknown
  misc_feature (598)..(598): "n" may be a, t, c, g, other or unknown
  misc_feature (611)..(611): "n" may be a, t, c, g, other or unknown
  misc_feature (667)..(667): "n" may be a, t, c, g, other or unknown
tattataaaataattgaggaatgtgtttcacagatagtgctacactgcagtggtatggatccagacttcaaatacaggcaaagattagacatcgatttaactcatctgatagattcttgtgtgaacaaggcgaaagttgaagaaagtgaacaaaaagctgcagagttttcaaagaagttcgatgaagaattcacagctcgacaggaagctcaagcagagcttcaaaaaagagatgagaaaatcaaagaacttgaagcagaaatccagcaacttcgaacccaggcacaagtactctcaagttcatcaggaattccaggtcctcctgcagcacctccattgccaggtgtagggccgcctccaccaccacccgcgccacctctacccggaggagctcctcttcctcctccaccacctcctttacctggaatgatggggataccaccaccacccccaccaccacttttatttgggggacctcctccaccaccaccccttggaggagttcctcctcccccaggaatatcacttaatctaccttatggaatgaagcanaaaaaaatgtataaacctgaagtgtccatgaagagaatcaattggncaaaagattgaanccacagaattatctgagaactgtttctgggtaagagtcaaaggaagacaagtttgngaatccaaat

SEQ ID NO: 4682 - DNA, 742 bp, Homo sapiens
  misc_feature (526)..(526): "n" may be a, t, c, g, other or unknown
  misc_feature (580)..(580): "n" may be a, t, c, g, other or unknown
  misc_feature (649)..(649): "n" may be a, t, c, g, other or unknown
  misc_feature (718)..(718): "n" may be a, t, c, g, other or unknown
  misc_feature (722)..(722): "n" may be a, t, c, g, other or unknown
attgctctcctgccacggaggggagcgcttggtggcagtccgcgggcccggacggaaggctgaggcgacgcctcgacgacagcggaccggagctgcaggggcaacacattcagggcggggtgccccatttaggcctggctcaccggagtaagaaactacaacccccgaagtgccttgcgcctcaaggttacggaggcagtgaccacccaccctggagccatggtccacgccttcctcattcacaccttgagggccccgaatactgaggacacgggcctttgccgagtgctgtactcctgcgtcttcggtgctgagaagtcacctgatgacccacggccgcatggtgccgagagggacaggcttctccggaaggaacagattttagctgtggccaggcaggtagagtcaatgtgtcggctgcagcagcaggcatctggccggccccccatggacctgcagccgcaatcctcagatgagcaagtgccgctgcacgaggccccacgtggggctttccgcctggcagcanagaaccctttccaggagccacggacggtggtgtggctgggcgtgctctcgttangctttgccctggtgctggatgccatgagaacctgctactggctgagggcacgctccggctgctgacacncctcctccttgacaactccggctgctggcgcccagcaacaaccttctgctgcgggctgaccgcattgangggnatcctcaaccgcttcctgca

SEQ ID NO: 4683 - DNA, 779 bp, Homo sapiens
  misc_feature (691)..(691): "n" may be a, t, c, g, other or unknown
  misc_feature (707)..(707): "n" may be a, t, c, g, other or unknown
  misc_feature (709)..(709): "n" may be a, t, c, g, other or unknown
atgctttgtcttcaacaagtaaatatgaaactaatcaggtactggattcacattggggtaacttgagaacgtatattgagcagaatcatcagattcttaaatccaaccacctaggggagacagtttaattcacttaatgtgatttcctttccttattgataagcagactccattgtagccagctgatatttttgcatcagagatactcttgttccacccagaggggccactgaagatttagaaaagtactcatgatttgagatcaagtgtatctttgccttaaaaacagaatcacagatactgtgggcatcagctattcctatttttgtctgttctccttttagtggaaaaaggaattgaaaataatgcttgcagttcagaattttgatttaccatactagattagctagaatcttatttaataatttaacttccttctcctgtcatggtgctttgttatataaaacactacttacttgaggcaatagtctcccagggagacaaatagaaatatagcttgttgaatatctttgatttctttcctaccgtcatagtttgccaagatttctcagcagctgaggcagcggcactgtggtgcggtaaggtgttctgatgctataagcagacacgtttgcaacatccatctggaggagccctgggggcaaggatgtgggttgaccacccaggcaanggatgccctgaatgananggccaacaagcctcaacaagtcccccaagcaattttcaaccatccaagcccctccaaaacaagtctcact

SEQ ID NO: 4684 - DNA, 704 bp, Homo sapiens
  misc_feature (652)..(652): "n" may be a, t, c, g, other or unknown
  misc_feature (685)..(685): "n" may be a, t, c, g, other or unknown
  misc_feature (695)..(695): "n" may be a, t, c, g, other or unknown
agcaatggggttcctgcagctgctggtcgtagcggtgctggcatccgaacaccgggtggctggtgcagccgaggtcttcgggaattccagcgagggtcttattgaattttctgtggggaaatttagatacttcgagctcaataggccctttccagaggaagctattttgcatgatatttcaagcaatgtgacttttcttattttccaaatacactcacagtatcagaatacaactgtttccttttctccgactctcctttccaattcctcggaaacaggcactgccagtggactggttttcatccttagaccagagcagagtacatgcacttggtacttggggacttcaggcatacagcctgtccagaatatggctatcctactctcctactcagaaagagatcctgtccctggaggctgtaatttggagttcgatttagatattgatcccaacatttacttggagtataatttctttgaaacgactatcaagtttgccccagcaaacctaggctatgcgagaggcgtagatcccccaccatgtgacgctgggacagaccaggactccaggtggaggttgcaatacgatgtctatcagtattttctgcctgagaatgactcactgaggagatgttgccggaagcatctgcanaaggatggtcagtgtgccccaagtgaagggcantgctctcaanggtgggtta

SEQ ID NO: 4685 - DNA, 771 bp, Homo sapiens
  misc_feature (624)..(624): "n" may be a, t, c, g, other or unknown
  misc_feature (713)..(713): "n" may be a, t, c, g, other or unknown
  misc_feature (735)..(735): "n" may be a, t, c, g, other or unknown
  misc_feature (739)..(739): "n" may be a, t, c, g, other or unknown
aagaaatcaaaacattaaaatatttcaagtttggtaacagctttgagtgtgaaaggggatctcattataaagctgtactggatgtcttagtctgggctgctgtaacaaaatactataaagtgggtggttgattgataaacaatagaaacttatttctcaccattctggagactagaagtttgagatcagggtgcccgcaggtcaggtcctggtgaggatctgcttctgggttgcagaatgctgacttcttactgtgtcctcatgtggtgaaagggtgagggggtctctctctctccagcctttcttgtaagggcactaatcccattcatgagggctccaccctaatcacttcccagagacccccaccttgtgatcccatcaccttgagggtaggattcgaacatatggatttggaggggaggagacacagacactcagttcattgttctggtgtgctctgaccttctaggcttctctccattcaccttagaacccctactctcttgctcagctccgtagtaagtttatgaccagtcaaagcaattttgtgcagtgtatgcagaattttctgtgtaagctttgcattctttttggagggctttacagaaaagggaaattactcanaacaacttcaatcacttgctacagttaaaaataatttcaccagacatattaagagaagggtaaaaattagttccagaaggattttttanattgcaataaatcaagaggaanaagntataatttcctaatttaaaagataagttttta

SEQ ID NO: 4686 - DNA, 874 bp, Homo sapiens
  misc_feature (568)..(568): "n" may be a, t, c, g, other or unknown
  misc_feature (659)..(659): "n" may be a, t, c, g, other or unknown
  misc_feature (702)..(702): "n" may be a, t, c, g, other or unknown
  misc_feature (726)..(726): "n" may be a, t, c, g, other or unknown
  misc_feature (815)..(815): "n" may be a, t, c, g, other or unknown
  misc_feature (822)..(822): "n" may be a, t, c, g, other or unknown
  misc_feature (871)..(871): "n" may be a, t, c, g, other or unknown
tctatcatttatgagtactatgtccataggaaagccacttcaactcactgtactttttcttacctgtaagagatcaaacctgataaagtatcaggtttattccagctctaacactctgaaatgccacaaaatgcactccccaataaattaagattaaaggaatgcccaaaccccaaacatgatcattgtgatcatttcttatgaaacataagaatgagacataagaattttatatgagatactggcagaatttgctgagtcagtctcaggcaacatttaataagtaaatatgcagctaagcagtggactataatgcttttacacagccagaaaatagcaatattcctaaaattaatgaaagcatacacaaatccactcaggatgctaggacacaggcagctgaatgatatgagcttataatctattcttcccagactatttatcttatcacagcaacaccctgaagccacatgcaaaggatgaaccagactccccagtgctctatagaaccatgagtgaagcagctctggtgagaaaaaggatgaagcctctgatgatggacagaaangaaagacagaaaaatagagcctctattaatggacacttctataaccatgaagtaagtgagttacaattccattaatgtaatataaaataangttccctgtttcactaacaataccacccaattcaattcacaanttaaagtcataataataacagttncatgtccaacatctgggggcactctccatgtgcagatattaaagtaaatgggtttaaatagattttactgaatatcttattaacactanacatccntggaatagggtaccattatttccttacttgacatataagctaattgagncta

SEQ ID NO: 4687 - DNA, 702 bp, Homo sapiens
  misc_feature (599)..(599): "n" may be a, t, c, g, other or unknown
  misc_feature (619)..(619): "n" may be a, t, c, g, other or unknown
  misc_feature (696)..(696): "n" may be a, t, c, g, other or unknown
  misc_feature (700)..(700): "n" may be a, t, c, g, other or unknown
gactttagccttcccattttatggagtttgtcatgagtgtgatcgtatttgctgctcgtgagatttcgctcactaataaatttgattcatttaattatgtgttttctcttcctagattttaatttgatttgaaaatgagtaagtgcagaaagacaccagttcagcagctagcaagtcccgcgtcattcagcccagatattcttgctgacatttttgaactctttgccaagaacttttcttatggcaagccacttaataatgagtggcagttaccagatcccagtgagattttcacctgtgaccacactgaatttaatgcatttcttgatttgaagaactccctaaatgaagtaaaaaacctactgagtgataagaaactggatgagtggcatgagcacactgctttcactaataaagcagggaaaatcatttctcatgttagaaaatctgtgaatgctgaactttgtactcaagcatggtgtaagttccatgagattttgtgcagctttccacttattccacaggaagcttttcagaatgggaaactgaattctctacacctttgggaagctccaggagcttttaaagctagtctcaancactacttaaaatcccatcngtttccctgtcaatgggagttgggtaacgaatactccgaatccataccatgaagcaaaatgacgacctcatgatgantaangg

SEQ ID NO: 4688 - DNA, 696 bp, Homo sapiens
  misc_feature (532)..(532): "n" may be a, t, c, g, other or unknown
  misc_feature (610)..(610): "n" may be a, t, c, g, other or unknown
  misc_feature (655)..(655): "n" may be a, t, c, g, other or unknown
  misc_feature (694)..(694): "n" may be a, t, c, g, other or unknown
gttcgatgcattgatgttgaagtctcccacagtgaagggcctgatggaagcgatatctgagaaatatgggctgcccgtggagaagatagcaaagctttacaagaaaagcaaaaaaggcatcttggtgaacatggatgacaacatcatcgagcactactcgaacgaggacaccttcatcctcaacatggagagcatggtggagggcttcaaggtcacgctcatggaaatctagccctgggtttggcatccgctttggctggagctctcagtgcgttcctccctgagagagacagaagccccagccccagaacctggagacccatctcccccatctcacaactgctgttacaagaccgtgctggggagtggggcaagggacaggccccactgtcggtgtgcttggcccatccactggcacctaccacggagccgaagcctgagcccctcaggaaggtgccttaggcctgttggattcctatttattgcccaccttttcctggagcccaggtccaggcccgccaggactctgcangtcactgctagctccagatgagaccgtccagcgttcccccttcaagagaaacactcatccccgaacaacctaaaaaantcccatcccttctttctcaaccctccatatctatatctccccganttggttggacaaaaatgagctaacgtctgggggtgcaanta

SEQ ID NO: 4689 - DNA, 567 bp, Homo sapiens
  misc_feature (526)..(526): "n" may be a, t, c, g, other or unknown
  misc_feature (555)..(555): "n" may be a, t, c, g, other or unknown
  misc_feature (564)..(564): "n" may be a, t, c, g, other or unknown
agcctaggagcagagcctcccagatggctgagttggatctaatggctccagggccactgcccagggccactgctcagcccccagcccctctcagcccagactctgggtcacccagcccagattctgggtcagccagcccagtggaagaagaggacgtgggctcctcggagaagcttggcagggagacggaggaacaggacagcgactctgcagagcagggggatcctgctggtgaggggaaagaggtcctgtgtgacttctgccttgatgacaccagaagagtgaaggcagtgaagtcctgtctaacctgcatggtgaattactgtgaagagcacttgcagccgcatcaggtgaacatcaaactgcaaagccacctgctgaccgatccagtgaaggaccacaactggcgatactgccctgcccaccacagcccactgtctgccttctgctgccctgatcagcagtgcatctgccaggactgttgccaaggagcacagtggccacaccatagtctccctggatgcancccgcagggacaaggaggctgaactccantgcacccantta

SEQ ID NO: 4690 - DNA, 773 bp, Homo sapiens
  misc_feature (716)..(716): "n" may be a, t, c, g, other or unknown
  misc_feature (726)..(726): "n" may be a, t, c, g, other or unknown
  misc_feature (749)..(749): "n" may be a, t, c, g, other or unknown
agcagtatattaagctctgggtcttctcatgactaaaatgactatttttaaacataagaccatattttataaatgtacagataattcaaatctattatctaatgtattaggttaatttctatttgttctatacttttttttttttttttttttgagatggagtcttgctctgtcgcccaggctggagtgcagtggtgcaatcttggctcactgcaagctccgcctcctgggttcatgccattctcctgcctcggccttccaagtagctgggactacaggtgcccgccccgacacctggctaatttttaaaaaaatatttttagtagagacagggtttcaccgtgttagccaggatggtctcgatctcctgacctcgtgatccgcccgctttggcctcccaaagtgctgggattacaggcgtgagccaccgcacccggcctattgacattttttaaggtttcagattttcttttgtgtgtctagtaattcgtcttttattgtcaaagataatttgcttatttgacttaagaaaaatgatttgagggcatacaatattgtatgtggtacctaaacgttgccatttagttactcttacagaacaactttcattacactggatattaatataaattacttcttgagtaatcccagaattgtagaaccaattggtagaatcagaaactgtccttggacttgagggtttcctcccttaaggnaaaattttanggtttcccgggttagtttccaangagtttggcggggcaaagttcata

SEQ ID NO: 4691 - DNA, 695 bp, Homo sapiens
  misc_feature (604)..(604): "n" may be a, t, c, g, other or unknown
  misc_feature (655)..(655): "n" may be a, t, c, g, other or unknown
  misc_feature (683)..(683): "n" may be a, t, c, g, other or unknown
aagaatgtctcaggaggaaacatgacagagatgtttgtccagttaaaactgggagatcagaggtataaaagtaaggatgggcattttggacattgaagtgtggggaaaggacaacaaaaagcatgaggaacgtctgggcacgtgtaaagtggatatctcggcactccctctgaagcaagccaactgcctggagctgccactggacagctgtctgggggctctccttatgttggtcacacttacaccctgtgcgggggtctccgtctctgatctgtgtgtctgccccttagcagacctcagcgaaagaaagcagattacccagcgatattgcttacagaactccctgaaagatgtgaaagacgtcggcattctacaagtgaaggttttaaaggcagcagatctcttagcggcagatttctcagggaagagtgacccattttgcttgttggagttaggcaatgaccgacttcagacgcataccgtctacaaaaacctcaaccctgaatggaacaaagtttttacatttcccattaaagatatccatgatgttttggaagtgacagtgtttgatgaagatggagataaacccccagattttcttggnaaagttgccaatcccttgctgtccattagagatggacaaccgaattgttangtactaaagaataaagatttagaacaancttttaaaggag

SEQ ID NO: 4692 - DNA, 683 bp, Homo sapiens
  misc_feature (621)..(621): "n" may be a, t, c, g, other or unknown
  misc_feature (651)..(651): "n" may be a, t, c, g, other or unknown
  misc_feature (665)..(665): "n" may be a, t, c, g, other or unknown
cttaaagaagaggaaactgaattgaaacagctgaatttacacaaagatactgagccaaaacccctggagggaactcatctaatgggtgtgaaagactctaacatccatgagcttgaacatgagcaagagcctacttgtgcctcccagatggctgagcccttccgtaccttccgagatggatgggtctcctactacaaccagcctgtgtttctggctggcatgggtcttgctttcctttatatgactgtcctgggctttgactgcatcaccacagggtacgcctacactcagggactgagtggttccatcctcagtattttgatgggagcatcagctataactggaataatgggaactgtagcttttacttggctacgtcgaaaatgtggtttggttcggacaggtctgatctcaggattggcacagctttcctgtttgatcttgtgtgtgatctctgtattcatgcctggaagccccctggacttgtccgtttctccttttgaagatatccgatcaagggtcattcaaggagagtcaattacacctaccaagatacctgaaattacaactgaaatacatgtctaatgggtctaattctgctaatattgtcccggagacaantcctgaatctgtgcccataatctctgtcantctgctgtttgcangcgtcatgctgctaaaaa

SEQ ID NO: 4693 - DNA, 604 bp, Homo sapiens
  misc_feature (517)..(517): "n" may be a, t, c, g, other or unknown
  misc_feature (523)..(523): "n" may be a, t, c, g, other or unknown
  misc_feature (548)..(548): "n" may be a, t, c, g, other or unknown
ataggtatgaattcatttaagtcctgaagaaaaagaaaaaaaatacgaagtggatattacccttcccattttcaaataaggaaactgaagcacaaaaagaacaagtaacttgacaaggacaccccggtagtaaatcatggggctggagctcaaccccagggtaggctggctccagagctgtgctctccttgactcttctgatggtctcctagctggaagcctcacatttcagtctcattcccccaagtggcccatcagctactccatctctggctccccaactaaacagtttctctcatagtgctggacctccactcactagttttttttccagctgttcttctcttttcttcaggtcactcttctcgaccgagtgcaaaaattatcccctccataccagctttgatgaccttccttccatactcctcaccagacacaacataataggtcacacactcctctgtgctttctggcacgttttaaacattagtattattgacctttacctatagtatancatggnctatttatgtatccatctcccctangcatttttcctcaaagacaagaaccatgtcttacccatctcttgggtaagtgccta

SEQ ID NO: 4694 - DNA, 727 bp, Homo sapiens
  misc_feature (600)..(600): "n" may be a, t, c, g, other or unknown
  misc_feature (650)..(650): "n" may be a, t, c, g, other or unknown
  misc_feature (679)..(679): "n" may be a, t, c, g, other or unknown
  misc_feature (711)..(711): "n" may be a, t, c, g, other or unknown
ggatgttctgataaatggagcaccgcgacctgccaatttcaaatgtaattcaggttacgtggtacaagatgatgttgtgatgggcactctgacggtgagagaaaacttacagttctcagcagctcttcggcttgcaacaactatgacgaatcatgaaaaaacgaacggattaacagggtcattcaagagttaggtctggataaagtggcagactccaaggttggaactcagtttatccgtggtgtgtctggaggagaaagaaaaaggactagtataggaatggagcttatcactgatccttccatcttgttcttggatgagcctacaactggcttagactcaagcacagcaaatgctgtccttttgctcctgaaaaggatgtctaagcagggacgaacaatcatcttctccattcatcagcctcgatattccatcttcaagttgtttgatagcctcaccttattggcctcaggaagacttatgttccacgggcctgctcaggaggccttgggatactttgaatcagctggttatcactgtgaggcctataataaccctgcagacttcttcttggacatcattaatggagattccactgcngtggcattaaacagagaagaagactttaaagagatcatagagccttccangcaggataagccactcatagaaaaattancggagattttatgtcaactcctccttctacanagagacaaaagctgaa

SEQ ID NO: 4695 - DNA, 631 bp, Homo sapiens
  misc_feature (223)..(223): "n" may be a, t, c, g, other or unknown
  misc_feature (589)..(589): "n" may be a, t, c, g, other or unknown
  misc_feature (620)..(620): "n" may be a, t, c, g, other or unknown
  misc_feature (630)..(630): "n" may be a, t, c, g, other or unknown
tgtcccaacatacggatggatccaaaattatgccctgctgatccagactggattgcttttatacatagcaacgatatttggatatctaacatcgtaaccagagaagaaaggagactcacttatgtgcacaatgagctagccaacatggaagaagatgccagatcagctggagtcgctacctttgttctccaagaagaatttgatagatattctggctattggnggtgtccaaaagctgaaacaactcccagtggtggtaaaattcttagaattctatatgaagaaaatgatgaatctgaggtggaaattattcatgttacatcccctatgttggaaacaaggagggcagattcattccgttatcctaaaacaggtacagcaaatcctaaagtcacttttaagatgtcagaaataatgattgatgctgaaggaaggatcatagatgtcatagataaggaactaattcaaccttttgagattctatttgaaggagttgaatatattgccagagctggatggactcctgagggaaaatatgcttggtccatcctactagatcgctcccagactcgcctacagatagtgttgntctcacctgaaattatttatcccagtagaangatgatgttnt

SEQ ID NO: 4696 - DNA, 798 bp, Homo sapiens
  misc_feature (728)..(728): "n" may be a, t, c, g, other or unknown
  misc_feature (732)..(732): "n" may be a, t, c, g, other or unknown
  misc_feature (746)..(746): "n" may be a, t, c, g, other or unknown
caacgcttttgacaagtcaaacttttctaaacatcaagaaaatcatgctgctgagaaatcctagaaatgtgaagaatgtgacaaagcctctaaatgattgtcacacttgatcgtagggcccagacagaagagaagagtcacatcatctagatgatgaatgaaaagatatgtcattattctcctttgggcagtgcttctgcagaaaagttgcaccttctaggtgttggactcagcaatatatcacaatgtctgcagtattttggaaggagaggagagtcaccattacttaggtgctaggcccagcaatacatctcaagcacttcttgggcaaagcccaagcagtaaaaaagagtcacattacctaggttctgggtatagcaatatgtcacaaatgcccctaagaagagggcccaggaaaagagagtcaccttggtgagaatgtcagagatattccatttttgggtattcacaaaaaagaataaagtcccataacctagaaggtgggctctgctccatgacacaaatcaccctagtgggcaggtccattaaagagaaggctgtcaaagcacatagatgctgggcaaagtgatatgtcataatccccatgatgataggcccagagacatgtcacaatgacctctttaggcaagaggaccaggcaagaagaatcacatcacttgtgtgctggccctagtgagaaagtcactcccaattctgtggacatgggnccangcaagaagagcaangtcacatttcctaagcgctgggtccaagagatatgtcacaaaccttttacaa

SEQ ID NO: 4697 - DNA, 793 bp, Homo sapiens
  misc_feature (703)..(703): "n" may be a, t, c, g, other or unknown
  misc_feature (772)..(772): "n" may be a, t, c, g, other or unknown
  misc_feature (789)..(789): "n" may be a, t, c, g, other or unknown
agtttcaaaatattctgacaggacacagacagccctggctgaaaggagcacagagagaatacttcgagctcatgctgagagaaaaaggcgagtttgtcttttcttacctgagactgggcctgaagggagagtttcagttcttcattgacggttgctttcaagatgtacctgggaattacaccaagtgtgacctgtaacaattcaagcaaaaatgaattttccctgattctagagaagaatcccctggtggagtttgtggaagagctccctgctgggcgatcttctctgtgctactgcaacttgctctgtgggattatcagaggtgccttggaaatggttcatttggcggctgatgttacattcttgcaagacagactaaaaggtgacagtgtgacagaaataggaataacatttctaaaaaagcgagacgagaaaaaatatagagggaaaaaatgaagactagcacggaaaatgccacggggcggctagctgagttaatgttagctaaacatgtatagacatagaaattttgaattgcttcatagcatgagctttgaaaggtttataaatcagccagaaatttgaaatgcagggcatgaaggcttaaaggtttttttttccttttgcttaaaaatcacgcattttcaatctcatgtccacaaaaatttcatatgcaaatagctccttacaagatagcaggcangaattccacatcttacactatccaacctcagagaaactgttcattccattcacgtttggtaaatggggnaaaaaaagcaacacaanttac

SEQ ID NO: 4698 - DNA, 827 bp, Homo sapiens
  misc_feature (641)..(641): "n" may be a, t, c, g, other or unknown
  misc_feature (684)..(684): "n" may be a, t, c, g, other or unknown
  misc_feature (792)..(793): "n" may be a, t, c, g, other or unknown
  misc_feature (826)..(826): "n" may be a, t, c, g, other or unknown
aatggctaatgatgttgagtatctttttgtgtgctaatttgccatctatgtatcctcttcggtgaaatgtcttcatgtcttttgtctattttctatttaggtcatttgttctttttactattgagttttgagaggttttttatatatcctagataaaattcctctgttagatatgtggttgcttgaatttttaacataacttctaccaaggaaaaataagtaaaatttccaacccttgcatggccagtcacttacttaattcctgtccttcagtgttccatctagagaattaagagatatgatgtataaaatagacatcgagggccattaagagagtaaatacttaaaaatacatgttatgaaagcaaagccaataatcactgtaggagtatgagttgcctaagggccaaaactaatgtaaataagagaaagtgtggatataaatgaccattgtttataaacagtcatgaaaaatgctgtgacttgaaatctttcccacatctcccaagaaagtaggtaggagtttatcctttccgtaatctctttttaaccctgctgactattacagggcttgtttaatcacagtggcaagaattacatgtatcttacagtaaagaaacagaatactggaatcgttaganaaccctgatgtgttgacctggataaagtacaaaggtggaaganggaatgagttatgctgttaaaatctcaggctaatccggttaaaggtcccggctactaatgaacccaaactttttttttcccccttttgactccttgtgtcttccctcnncctgggggcaataaaaagttagttcctggccgnt

SEQ ID NO: 4699 - DNA, 756 bp, Homo sapiens
  misc_feature (719)..(719): "n" may be a, t, c, g, other or unknown
  misc_feature (722)..(722): "n" may be a, t, c, g, other or unknown
  misc_feature (725)..(725): "n" may be a, t, c, g, other or unknown
ttagaacaattgctccccaataatttattttacaaacaggaatatgaaaaataaatggtggtaggaggaaggacccactaagaacaccatttttaaattttgctaagtaaggacattgagggaaaaaactcaaactctgatctaccatcattgtttaatgttcggcaaacatgaagcattttaataccaaaaaaagtgaggagaataaatctcagcataaaggaacaactttttaaactgaatttagcactatgaaaaatgtacctcattttctgtaattttagcgagtttcccgcggatgtacactggccccatggattggcgctggggatcaccagtttagaggtgccagtgccttctgacaaaggcccatggatccatatgactgcctgtctgttctttttagagacgggcccacactgcagagaagtgattgtgaaggtctccaaccctgtcatgcccccacctgccaccttgacttgggagagggacactcacaaaagcatgtcaaatcgacatccatttctttctctttccctcaggtctcagggagttttcctcttctcctcggactctttctctcaaggcctcttctacaaaaacccctgcccagagggttactgctaaaatgaaactcccgtgtctgtccccttccctggcccccaactgacttgcctgcctctgcttgctgctgtccctgcctattccccttcatgccnggntcnagaaagatgcaatctttttcccaaggcccaa

SEQ ID NO: 4700 - DNA, 781 bp, Homo sapiens
  misc_feature (704)..(704): "n" may be a, t, c, g, other or unknown
  misc_feature (752)..(752): "n" may be a, t, c, g, other or unknown
  misc_feature (763)..(763): "n" may be a, t, c, g, other or unknown
tggataaagaaaatgtggtacataaacaccatggaatactacacagccataaaaaagaatgaaatcatgtcctttgcagcaacatggatgctactggaggccactatcctaagcaaattaatacagaaatggaaaaccaaataccacgttctcacttataagggaaagtgaaacactgggtatacacggacacaaagatggaaacaataaactctgggaattccaaaaggggagagatagggggtgagggttgaaaaactacctattgggtactatgttcactgcttaggtgacaggatcattagaagcctaaacctcagtatcacacaacatacccatgtaacaaacctgtacatgtacccctgaatctaaaataaattttttcaataaagaaagaaaggttcttggaggagatagattcgatgttaaatcttctttcatcagcacatgtgtattgactgtcactctctaccaggctgtattctaggtaatggatgtaggagagaacaaaaaggtctctgctgttctgaagcttatagtctattggggagagatagtaaataagacggaaacaaataaatacacagtttcagagagcaatgagttctacaaatgagcagtgagccctataaacaaaatttagattaaattaaattaggataggtcagcctctttgttatagcagatgatactttttatatggnttagcaaaggagtcaggaaggaagtaattttaaaaaaggaaaaccagnaaaaaacctcnttaccaaccaacttttaa

SEQ ID NO: 4701 - DNA, 754 bp, Homo sapiens
  misc_feature (556)..(556): "n" may be a, t, c, g, other or unknown
  misc_feature (681)..(682): "n" may be a, t, c, g, other or unknown
  misc_feature (690)..(690): "n" may be a, t, c, g, other or unknown
gagcggggcctctccgggccgcgtctgtggggtcgagactgcgcggccgttgggcgtgcagcggcgccagtcggcggacgaggggcccccgggagttgctggactgagacatgagcctccaactgtgtggttgggctcggtagcacatcgtgggacttgggtgtgcgcccacagatggtttggccctgcagtgaccagagcagcccaagccgccaccatggtgaaattgctagtggccaaaatcctgtgcatggtgggcgtgttcttcttcatgctgctcggctccctgctccccgtgaagatcatcgagacagattttgagaaggcccatcgctcgaaaaagatcctctctctctgcaacacctttggaggaggggtgtttctggccacgtgcttcaacgctctgctgcccgctgtgagggaaaaggtaagggctccctgggcactagcagcagcccttggcaccttatggccaagggactctgatgcattttcaacactgatgccaagttcagtgaaggccttgatgctgtaagggtgacggaaagtaaggaantgaatttgctgtgtgattgtgaactggttactttctgtctctgtgctctaccggccaaacaaggggtttggaccaaactgggattcccaacaggtggacttgtcggttgtcacctgataatcagnncaaactanccacctaggtaagggaaaactctgtcctgaagctggaaagcatggcctcccttccggttcccaa

SEQ ID NO: 4702 - DNA, 665 bp, Homo sapiens
  misc_feature (617)..(617): "n" may be a, t, c, g, other or unknown
  misc_feature (656)..(656): "n" may be a, t, c, g, other or unknown
  misc_feature (658)..(658): "n" may be a, t, c, g, other or unknown
gaatttgagatgagccctcgctgtgctaatctggccctcaagcactacctgctcaagccggttcagaggatcccccagtacaggctgttgctgacagattatttgaagaatctcatagaagatgctggagattacagagacactcaagatgcccttgctgttgttatagaggtagccaaccacgccaatgacaccatgaagcaaggagacaactttcagaaacttatgcaaattcagtacagcttaaatggacaccatgaaattgtgcagcctggtcgggtttttctcaaagaaggaattctgatgaagctgtctcggaaagtgatgcaacctcgaatgtttttcctgtttaatgatgccctgctgtatacaacaccagtgcagtctgggatgtataaactgaacaacatgctctcactggctggaatgaaggtcagaaaacctacccaagaagcctatcagaatgaattaaagattgaaagtgtagaacgttccttcattctctcagccagttctgccacagaaagggatgaatggctagaagcgatttccagggcaatagaagagtatgccaagaaaagaatcaccttctgtcctagtaggagtcttgatgaggnaagactcagaaaataaagaagaaagttagtcctcctggntngaaaggt

SEQ ID NO: 4703 - DNA, 789 bp, Homo sapiens
  misc_feature (765)..(765): "n" may be a, t, c, g, other or unknown
  misc_feature (776)..(776): "n" may be a, t, c, g, other or unknown
  misc_feature (787)..(787): "n" may be a, t, c, g, other or unknown
aggcgccacgtgggattcggcccgggtgctcttgtgagctgctgctcctgcggttggtgagattacctgggtctagagtgcggagctgctccgtggccacgaggacgtcaccatgcccaaagcaccaaagggaaaaagtgcaggacgggaaaaaaaagtcatccatccatatagtagaaaagcagctcaaattacgagagaggcccacaaacaagaaaaaaaggaaaaattgaagaatgaaaaggccttgcgtctcaaccttgttggtgaaaaactgcaatggtttcaaaatcatcctgatcccccaaaaaagagatattcaaagaaagatgcttgtgaactaattgaaaggtacttaaatcgattcagcagtgagctggagcagattgagttacataacagtatcagggacaggcaggggaggcggcactgttcccgggagaccgtcatcaagcagacgatggagcgggagcgacagcagtttgagggatatggccttgagattccagacattctaaatgcaagtaatctgaaaacatttagggaatgggactttgatctgaagaaattaccaaacattaaaatgagaaaaatttgcgctaatgatgcaattcccaagacgtgcaagaggaaaactactataactgtagaccaagatttgggggaattggaactaaacgatgaatcaagtgattcagattgaggaaatgactgcaatggcctaaattgtcctcacttgaattgaaaataaataatttgagagcntcaaattatantcattgattangg

SEQ ID NO: 4704 - DNA, 693 bp, Homo sapiens
  misc_feature (575)..(575): "n" may be a, t, c, g, other or unknown
  misc_feature (642)..(642): "n" may be a, t, c, g, other or unknown
  misc_feature (681)..(681): "n" may be a, t, c, g, other or unknown
  misc_feature (688)..(688): "n" may be a, t, c, g, other or unknown
agttctgcggtgccagggagtggagcagagctcagccccgtcccaaacacagatgggaccatgaactccggacacagcttcagccagaccccctcggcctccttccatggcgccggaggtggctggggccggcccaggagcttccccagggctcccaccgtccatggcggtgcggggggagcccgcatctccctgtccttcaccacgcggagctgcccaccccctggagggtcttggggttctggaagaagcagccccctactaggcggaaatgggaaggccaccatgcagaatctcaacgaccgcctggcctcctacctggagaaggttcgcgccctggaggaggccaacatgaagctggaaagccgcatcctgaaatggcaccagcagagagatcctggcagtaagaaagattattcccagtatgaggaaaacatcacacacctgcaggagcagatagtggatggtaagatgaccaatgctcagattattcttctcattgacaatgccaggatggcagtggatgacttcaacctcaagtatgaaaatgaacactcctttaagaaagacttggnaattgaagtcgagggcctccgaaggaccttagacaacctgaccattgtcacaacagacctagaacangaggtggaaggaatgaggaaagagctcaatctcatgaanggagcancatga

SEQ ID NO: 4705 - DNA, 795 bp, Homo sapiens
  misc_feature (670)..(670): "n" may be a, t, c, g, other or unknown
  misc_feature (713)..(713): "n" may be a, t, c, g, other or unknown
  misc_feature (762)..(762): "n" may be a, t, c, g, other or unknown
  misc_feature (786)..(786): "n" may be a, t, c, g, other or unknown
gttagagaacgtcgcggaggaggtaagcgtcgcttggcgcctggccgccgcgggcaggatacaccgtgggcctgaggcgcgagcccggcggcgtgcggccctctctccgcgcggagccgagccggaactgcggcagtctctccctgccaggctcttcatccaaggtttctgtggatcccttctgaagttctatctgaaaattgcgcttaagtgaattttctgttagaagaacttggttgctactttcttgtcaagatgattgcaacacctttgaaacattcaagaatttacttacctccagaggcatcttctcaaaggagaaatctacccatggatgcaatcttttttgacagcattccttcaggcacacttactcctgtaaaagatttggtgaaatatcagaactcctccttaaaattgaatgaccataaaaagaatcagttcctaaaaatgacaacttttaacaataaaaatatatttcaatcaactatgctaacagaggctactacctctaacagttctcttgatatcagtgctataaagcccaacaaggatggattaaaaaataaagcaaactatgaatcaccaggaaaaatatttctaagaatgaaagaaaaagtactgcgtgacaagcaagaacagccatcaagaaacagtagtttgttgggancacaagaaaaagtgggaataatgaaaccttcactcctaaacangaggttgaaaaaaaaaaattgcagcatacctaactaatgtgaagaaaangggaaacaacaaatcaattccagncaagatgac

SEQ ID NO: 4706 - DNA, 742 bp, Homo sapiens
  misc_feature (665)..(665): "n" may be a, t, c, g, other or unknown
  misc_feature (682)..(682): "n" may be a, t, c, g, other or unknown
  misc_feature (707)..(707): "n" may be a, t, c, g, other or unknown
gttaaaatttgatggtctacagacaatttataatccttttcttgttataaaatattgtcaaatttatagtagtatcagttagaaagtttatggaaacattgtttaaggtggtttaaaatagaagtaaatctttaatttgaatttgatgacacctgttttcattttgttcccccggcaacactgctagtaccaaaattgcccatagaccaccctggtttttgaaaagaatgaaatcattctgttttttaaaaattttatccttttactgactaaatatttaaacagggttataaaacatctgtcagagtttgtgaactcatgttggagtaaaagagtttaggacacataattggaagttttgcatgaaaattcctgagtagttttagtttgtctttcttagttatgctgaagtttttattagaattataattagaaattagaaaagtaattgacagcaacaatggaaaaaatatctggactcagttgttttggaaagctatgcttgctttccttcagttattgacaattgagattttttaaaaagacaatatgatccttttctctggaaggctctgggcagtcaagatatacgaattaagggttacactgttgagactcctgtgagagagaggtaaagctgacacaaatgttatctttcctagcanttttccacctgctgtangatgatcatgtgtttgggacattgnaaaatggtcattaatccaacctttttagttgggaa

SEQ ID NO: 4707 - DNA, 836 bp, Homo sapiens
  misc_feature (593)..(593): "n" may be a, t, c, g, other or unknown
  misc_feature (608)..(608): "n" may be a, t, c, g, other or unknown
  misc_feature (775)..(775): "n" may be a, t, c, g, other or unknown
  misc_feature (808)..(808): "n" may be a, t, c, g, other or unknown
  misc_feature (834)..(834): "n" may be a, t, c, g, other or unknown
agctggggtccctttggagacactccaggaaaaggggggcacatacccccactgggcttttcctgatgctgacaggggctgctctggctgttcctaagtggaactcgtcaaggtggcagtgacggtgctgatggggacctcaggacttatctgatcagtttcccatcgtccttgctgggtctgttgcttcaccggcatctgtgctctgacaccattaataaccacagagtctgagagtcaggaggaagtgctgctcacactggaggaagtggctgggagagtgcaggggctggtggcagagaccgcccagagcccatcctagcccaacatggcgtgggtgtcctgggaatgaggcctgcctccagcctcaccttctccatctgggaaatgggactattgatgcagaagcctccccaaaagtggatctgagaggcatagacatcgtggttctcacggactctccaaggatgaggcctgcggaccccttgataaaggccatcaaggatggcgatgaagaggccttgaagaccatgatcaaggaagggaagaatctcgcagagcccaacaaggagggctggctgccgctgcacgangccgcatactatggncaggtgggctgcctgaaagtcctgcagcgagcgtacccagggaccatcgaccagcgcaccctgcaagaggaaacagccgtttacttggcaacgtgcaaggggcaacctggactgtctcctgtcaatgctccaagcaaggggcaaaagccggacatctccaacaaatnccgagaagacaccgctctaaaaaagcctgtganccgcaaagaaacgcccggaagggccntt

SEQ ID NO: 4708 - DNA, 462 bp, Homo sapiens
  misc_feature (384)..(384): "n" may be a, t, c, g, other or unknown
  misc_feature (404)..(404): "n" may be a, t, c, g, other or unknown
  misc_feature (427)..(427): "n" may be a, t, c, g, other or unknown
tattgagcgccgactgtctacgggcggccgggggagaggagaggcagcagcatggcgagtgtcctgtcccgacgccttggaaagcggtccctcctgggagcccgggtgttgggacccagtgcctcggaggggccctcggctgccccaccctcggagccactgctagaaggggccgctccccagcctttcaccacctctgatgacaccccctgccaggagcagcccaaggaagtccttaaggctcccagcacctcgggccttcagcaggtggcctttcagcctgggcagaaggtttatgtgtggtacgggggtcaagagtgcacaggactggtggagcagcacagctggatggagggtcaggtgaccgtctggctgctggagcanaagctgcaggtctgctgcanggtggaggaggtgtggctggcanagctgcagggcccctgtccccaggcaccaaccctg

SEQ ID NO: 4709 - DNA, 788 bp, Homo sapiens
  misc_feature (535)..(535): "n" may be a, t, c, g, other or unknown
  misc_feature (670)..(670): "n" may be a, t, c, g, other or unknown
  misc_feature (719)..(719): "n" may be a, t, c, g, other or unknown
  misc_feature (761)..(761): "n" may be a, t, c, g, other or unknown
  misc_feature (780)..(780): "n" may be a, t, c, g, other or unknown
gagagattctgctaaggataaagagaaaggcaaacatgatgatggacggaaaaaggaagcagaaattatcaaacaattgaagattgaactcaagaaggcacaggagagccaaaaggagatgaaactattgctggatatgtaccgttctgccccaaaggaacagagagacaaagttcagctgatggcagctgagaagaagtctaaggcagagttggaagatctaaggcaaagactcaaggatctggaagataaagagaagaaagagaacaagaaaatggctgatgaggatgccttgaggaagatccgggcagtggaggagcagatagaatacctacagaagaagctagccatggccaagcaggaagaagaagcactcctctctgaaatggatgtcacaggccaggcctttgaagacatgcaggagcaaaatatccgtttgatgcagcaattgcgggagaaggatgatgcaaatttcaagctcatgtcagagcgtatcaagtccaatcagatccataagttgcttaaagaagagaangaggagctggcagaccaggtgttgactctgaagactcaggttgatgcccagctacaggtagtaaggaaactggaagagaaggagcatctgttacagagcaacattggcacagggggagaaagagctgggtcttangacccaagccttagagatgaataaacgcaaggcaatggaggcagcccancttgcagatgacctcaaagcacaactggagttggctcaaaanaagctacattgattttcangatgagat

SEQ ID NO: 4710 - DNA, 771 bp, Homo sapiens
  misc_feature (715)..(715): "n" may be a, t, c, g, other or unknown
  misc_feature (757)..(758): "n" may be a, t, c, g, other or unknown
tttttttcaaattgtggacatcaaaaatgcagcctcatcattttcaaatgcctgtttaaggaaacatgtttattcagttttaaagcttcataacttgtagccttagagtttgcatctttcctggcatttctccgcactgtggtgtcaaggaaagagcatggctttcatgtcagacacatctgcaatcagatcctggctcagtcaacatgcattattagctcagtgtggctgtgtcagcttacttggctgctcttagccacaggttcttcctcttctaaacctcaggagattggtgaattcagtgaaaaaatgcatgtcaggccaccagcacagcatatggcaaatgacaccctcactaaacagtgatttttccttccctcttattctgcttgatagaattaaattatctttaaggtctgtgagtaatgtctgtttgtgtaattaagataggagtatttttataagattgtaatgacatgaaagaaactttccccattcccatagtgtctttaatttgctttaaaacacttgaattagtgaaaaagccagttatttattcgaatactataattttctcaaagaatgatcaccattttaagattaattccaatgttctttttcatatctaaataatgttggcatactactgacaagagaaacaagacaaatgtgagagatgtctgcgtttctcctattaaataatattacaattggnatgttaggggtgcaaggttaaatagcttttcctttaaattannattacaaattgaa

SEQ ID NO: 4711 - DNA, 685 bp, Homo sapiens
  misc_feature (619)..(619): "n" may be a, t, c, g, other or unknown
  misc_feature (639)..(639): "n" may be a, t, c, g, other or unknown
  misc_feature (652)..(652): "n" may be a, t, c, g, other or unknown
gactgcagatgaaattagtaactggtggggtcgtggggtgtgaatggtgggcgggagcagctatgtcagttggtgtgtttctgcttatgttagggtaattgggcacggcctttgtgtaactggtgaatatctctgaacctgggcatgaaacagagagatgtcctaactctgggtgagaggaatcctcatttttctctgccctctcactgtggcatcctaagaaaaaagttttgggttcctgcagcatgaaggagagctctgctcccagaatttgggagctccagatttcttccagggtgtggaggcatcaatatatcagtctgggaaaggggttcctgggccactccaggagctgagttgggtggaaggtgctgagagtgtgggtgggggccacttctgagcacccatgtggcacccactgctggtccctgtttgtggctgggcactcaggaaaatgtttttggtgctaagagtaaaaagccaaccaacaaacacatctcttttttctgtctattcactgggaaagtaaaagcagtctgggcgcaggctggggacccagatggaattcaaacttatgcctgctctcaaggtgctcacggttgctgataaacagctgggntaaaatgaagagtctatgantgagggatgcaanagccaagggaaggctggtggagtgattccacca

SEQ ID NO: 4712 - DNA, 830 bp, Homo sapiens
  misc_feature (693)..(693): "n" may be a, t, c, g, other or unknown
  misc_feature (756)..(756): "n" may be a, t, c, g, other or unknown
  misc_feature (790)..(790): "n" may be a, t, c, g, other or unknown
  misc_feature (816)..(816): "n" may be a, t, c, g, other or unknown
aaacggatcgcgttgggtgaaggtgacggcgtcgagccattgacttccaaagactcctggcacatgaggaagaaacccagaagaggagagcaaaggagtcaggaatggcttttactcagttgacattcagggacgtggccatcgaattctctcaagatgagtggaaatgcctgaactctacacagaggactttatacagggatgtgatgttggagaactacaggaacctggtctccctggatctgtctcgtaactgtgtaatcaaggaactagcaccacaacaggaaggtaacccaggagaagtattccacacagtgacattggaacaacatgaaaaacatgacattgaagagttttgcttcagggaaatcaagaaaaaaatacacgactttgactgtcagtggagagatgatgaaagaaattgcaacaaagtgactacggccccaaaagaaaatcttacttgtaggagagaccaacgcgatagaagaggtataggaaacaagtctattaaacatcagcttggattaagctttctaccacatccccatgaactgcagcagtttcaagctgaagggaaaatttatgaatgtaaccatgttgagaagtctgtcaaccatggttcctcagtttcaccaccccaaatactttcctctaccgtcaaaacccatgtttctaataaaatatgggactganttcatctgttcttcatactcacacaaggaacagaaatcatgcattaggggaaaaaccttacangtatatttgaggtgcgacaaagcccttgaatcanggtcacacatgactggacgtcaaggnaaagtcattctgga

SEQ ID NO: 4713 - DNA, 798 bp, Homo sapiens
  misc_feature (574)..(574): "n" may be a, t, c, g, other or unknown
  misc_feature (587)..(587): "n" may be a, t, c, g, other or unknown
  misc_feature (636)..(636): "n" may be a, t, c, g, other or unknown
  misc_feature (751)..(751): "n" may be a, t, c, g, other or unknown
  misc_feature (771)..(771): "n" may be a, t, c, g, other or unknown
  misc_feature (780)..(780): "n" may be a, t, c, g, other or unknown
attcaagtcctggcttgagagccgagcggcaagagcgcgggccggggaagggaagagtaggagaggaagccgcgagggagaacaggcgagctactgtctcctttggaaaagaaccagtgacgcgccgcctgggagctggagcccgcgcagcgccccgcagggcgatggacggccgaaccccgcgcccgcaggacgccccagccaggagaaaaccaaaagccaaggcaccacttcctccagctgagaccaaatatactgatgtctcttcagctgctgattctgtagaatccactgctttcatcatggaacagaaagaaaacatgatagataaagacgttgaactctcagtggtcctacctggggatattatcaaatctactactgttcatggcagtaaacctatgatggacttgttgatattcctttgtgcacagtatcacttaaatccatcaagttacacaatcgatctgttgtcagctgaacagaaccacattaaatttaagccaaacacaccaataggaatgttggaggtagagaaggtaattttaaagccgaaaatgttggataagaaaanacctacacctatnataccagagaaaactgtgagagtagtgattaattttaagaaaacacagnagaccatagtgagagtgagtccacatgcatcgcttcaagagcttgcccctattatatgttaccaaatgtgagtttgatccgttgcatacactattggtgaagatttcaatcgcangagcctcttgacttgacaanaatctcctnaatgacctgggactaaga

SEQ ID NO: 4714 - DNA, 779 bp, Homo sapiens
  misc_feature (609)..(609): "n" may be a, t, c, g, other or unknown
  misc_feature (733)..(733): "n" may be a, t, c, g, other or unknown
  misc_feature (750)..(750): "n" may be a, t, c, g, other or unknown
  misc_feature (765)..(765): "n" may be a, t, c, g, other or unknown
aaaaaaaaaaaaaagcgcttccgcccggagagagctggccgggttgaggcgccggctttcccgggtcttctccagctgccaccgctttactgcaaaactgacgggcgcaaaaacatgagtgactccgcgggagggcgcgctggtctccggcgttaccccaagctcccagtgtgggtggtggaggatcatcaggaggttctaccctttatataccgggccataggctcaaagcatcttcctgccagtaatgtaagttttttacatttcgactcacatccagacctccttattcctgtgaatatgccagcagacaccgtgtttgataaggaaacactctttggagaattaagtattgaaaattggattatgcctgcagtttatgctggccatttttcacatgtaatatggtttcatcccacgtgggctcagcagatcagagagggcagacaccactttttagtaggcaaagacacttctaccacaacaatcagggttacaagtacagatcattatttcctaagtgatggtctgtatgtacctgaagaccagctagagaaccaaaaacctttacaattggatgtattatggtaaaaccttataagctctgtnacaatcaagaaagaaaacgatgcagtgtcctccggctaagaaacaaaagctagccctggaagattcggaaaacactggcctctactaactggtgactcctctccaaaaaggactgggaaaaggncaacagcaaacacaagnggaaagttgaccaanactttgcctaagaa

SEQ ID NO: 4715 - DNA, 711 bp, Homo sapiens
  misc_feature (567)..(567): "n" may be a, t, c, g, other or unknown
  misc_feature (630)..(630): "n" may be a, t, c, g, other or unknown
  misc_feature (684)..(684): "n" may be a, t, c, g, other or unknown
  misc_feature (692)..(692): "n" may be a, t, c, g, other or unknown
aagaaacctaaaggctgcaggctgccaggtgtgcttggagagcccccttcttccgccgggcctcgcaagcagcgtaggactgtggagaagggcggtgggcaaggagggaactcgagagcagcctccatgggcacacaggagggctggtgcctgctgctctgcctggctctatctggagcagcagaaaccaagccccacccagcagaggggcagtggcgggcagtggacgtggtcctagactgtttcctggtgaaggacggtgcgcaccgtggagctctcgccagcagtgaggacagggcaagggcctcccttgtgctgaagcaggtgccagtgctggacgatggctccctggaggacttcaccgatttccaagggggcacactggcccaagatgacccacctattatctttgaggcctcagtggacctggtccagattccccaggccgaggccttgctccatgctgactgcagtgggaaggaggtgacctgtgagatctcccgctactttctccagatgacagagaccactgttaagacagcagcttggttcatgggcaacgtgcangtctctggagggggacctagcatctccttggtgatgaagactcccagggtcgccaagaatgangtgctctggcaaccaacgctgaacttgccactgaacccccaagggactgttccnaactgcanttggagttccaagttgatg

SEQ ID NO: 4716 - DNA, 711 bp, Homo sapiens
  misc_feature (642)..(642): "n" may be a, t, c, g, other or unknown
  misc_feature (654)..(654): "n" may be a, t, c, g, other or unknown
  misc_feature (664)..(664): "n" may be a, t, c, g, other or unknown
tcatcaacagcaaaaacttcgaccgagagattggccacaataaccccagtgccatggcagtggagtcattcacggcaacagccccctttgtccaaattggcaggtttttcctctcgtcaggcctcatcgacaaagtcgacaacttcaagtccctgagcctatccaagctggaggaccctcatgtggacatcattcgccgtggagactttttctaccacagcgaaaatcccaagtatccagaggtgggagacttgcgtgtctccttttcctatgctggactgagcggcgatgaccctgacctgggcccagctcacgtggtcactgtgattgcccggcagcggggtgaccagctagtcccattctccaccaagtctggggataccttactgctcctgcaccacggggacttctcagcagaggaggtgtttcatagagaactaaggagcaactccatgaagacctggggcctgcgggcagctggctggatggccatgttcatgggcctcaaccttatgacacggatcctctacaccttggtggactggtttcctgttttccgagacctggtcaacattggcctgaaagcctttgccttctgtgtggccacctcgctgaccctgctgaccgtggcggctggctggntcttctaccganccctgtgggncctcctcaatgccggcctggcccttgtgcccaatccttgttgctcgg

SEQ ID NO: 4717 - DNA, 815 bp, Homo sapiens
  misc_feature (736)..(736): "n" may be a, t, c, g, other or unknown
  misc_feature (748)..(748): "n" may be a, t, c, g, other or unknown
  misc_feature (767)..(767): "n" may be a, t, c, g, other or unknown
aaaatttaaatctcgggcttcaaatgcccaggccaaacccagctctttttttttgcagatgcagaagagagtatcgggtcactatgtgacatctgcagctgccaagagtgtccatgctgcccctaatcctgctccaaaagaactgacaaataaagaggcagaaagggatatgctgccttctccggagcagactctttctcccttaagtaaaatgcctcactctgttccacaaccccttgttgaaaaaactgatgatgatgtcatcggtcaggctcctgctgaagcctcccctcctcccatagctccaaaacctgtgacaattcctgctagtcaggtatccacacaaaatctgaagactttgaaaacttttggtgccccacgaccatactcaagttctggtccttcaccgtttgctcttgctgtagtgaaaaggtcacagtctttcagtaaagagcgcaccgagtcacctagtgccagtgcattggtccaacctccagccaacacagaggaagggaagactcattctgtaaataaatttgtggacatcccacagcttggtgtgtctgataaggaaaataactctgcacataatgaacagaattcccaaataccaactccaactgatggcccatcattcactgttatgagacaaagttctttaacattccaaagctctgacccagaacagatgcgacagagtttgctgactgcaatccgttcgggaagaggctgctgncaaattgaaaanggttaccaatccatcaaantacaatatcctggtgaatgggaagggcaaagactcaaggcaattccaa

SEQ ID NO: 4718 - DNA, 846 bp, Homo sapiens
  misc_feature (657)..(657): "n" may be a, t, c, g, other or unknown
  misc_feature (685)..(685): "n" may be a, t, c, g, other or unknown
  misc_feature (711)..(711): "n" may be a, t, c, g, other or unknown
  misc_feature (792)..(792): "n" may be a, t, c, g, other or unknown
  misc_feature (832)..(832): "n" may be a, t, c, g, other or unknown
  misc_feature (844)..(844): "n" may be a, t, c, g, other or unknown
ctaaggacatattttgataaagtattatttgtaatgaacacaagcctctcttgagtagaagtctaaatcacattatgattattttatactagttctgctatcatgctgttttatgctaattctgcttattttagagtatttttcattaaaaggtgagcaaagtgaaagatacttggtattttacccagatttctaagtggcaacatttttattcttcagagtcaggtaaatgactataatagtttggtttctaatgaaaagtcaatagcattagcagttataattctgtttataatttcctttcagcatttacagtgaaaagtgagaattttaaaatttatgaaatctatattccaggtattgtttttagtctgaaaaacaaactcccccatgtggtattaatataccttcaatttatgttgagtcttaaacataattaggagatatttttctctatttgctagatttgttttgagtcaaaactgatttagtgttcttccaaacaacatttatgtgttggcctacagagtttatttcatgtgttttttttaatatttaatattatattacattcattgaaatctgttcaaaaacagattaagacaaacatttatgatggtctgtatcaatcagcaggattttattgcttttcattantttactggtaaggcaaagaatgcaatangtgatggttggttgaaaaggaattgntaatgctgtttttaatttttactttttttgagacagagtctcactccgttgccagcctggagtgcaatgtgtcacctgggntcactgaacctccggctcccggggtcaaggaatctcctgnctcagcctcaanta

SEQ ID NO: 4719 - DNA, 691 bp, Homo sapiens
  misc_feature (574)..(574): "n" may be a, t, c, g, other or unknown
  misc_feature (658)..(658): "n" may be a, t, c, g, other or unknown
  misc_feature (683)..(683): "n" may be a, t, c, g, other or unknown
  misc_feature (686)..(686): "n" may be a, t, c, g, other or unknown
gcagtcactgccgaccggctggctgggccttgcggcgtgaggaccccggcggcgccgcagtcccgcgagccatggcccagtccggcggggaggctcggcccgggcccaagacggcggtgcagatccgcgtcgccatccaggaggccgaggacgtggacgagttggaggacgaggaggagggggcggagactcggggcgccggggacccggcccggtacctcagccccggctggggcagcgcgagcgaggaggagccgagccgcgggcacagtggcaccactgcaagtggaggtgagaatgagcgtgaggacctggagcaggagtggaagcccccggatgaggagttgatcaagaaactggtggatcagatcgaattctgcttttctgatgaaaacctggagaaggacgcctttttgctaaaacacgtgaggaggaacaagctgggatatgtgagcgttaagctactcacatccttcaaaaaggtgaaacatcttacacgggactggagaaccacagcacatgctttgaagtattcagtggtccttgagttgaatgaggaccaccggaaggtgangaggacacccccgtcccactgttccccaacgagaactccccagcaagatgctcctggtctatgatctctactttgtctcctaanctgtgggctctgggcaacccccaanaanaatgg

SEQ ID NO: 4720 - DNA, 762 bp, Homo sapiens
  misc_feature (587)..(587): "n" may be a, t, c, g, other or unknown
  misc_feature (670)..(670): "n" may be a, t, c, g, other or unknown
  misc_feature (732)..(732): "n" may be a, t, c, g, other or unknown
  misc_feature (744)..(744): "n" may be a, t, c, g, other or unknown
aaacggcggcggcggcggcaccggaggctccgaggctcctgcgctcccgcgccgcgctcccctcgtccgcccgggccgccaggagaagaaactgaggcctggaatttgattaactcattcaaggttacccagttggtaattcatttgcacacctgttagcaagaaacagaagttgaaggactggaacaagtgaactaggaaagagggaacgccaatccaaggatagaaggacaaggacagaatcaccagcactggctgaaggcctcctgtttcctgcgctttctccttttcctgtgaaatctccgaggagaagaaagaatgatggacagtttatcctttcactgccacaaggcctgtttacttggcagtaccttaacatggggaatcttcttaaagttttgacatgcacagaccttgagcaggggccaaattttttccttgattttgaaaatgcccagcctacagagtctgagaaggaaatttataatcaggtgaatgtagtattaaaagatgcagaaggcatcttggaggacttgcagtcatacagaggagctggccacgaaatacgagaggaatccagcatccancagatgagaagttgcaagagaagcatggggtgcaattgttccactagtaggcaaattaaagaaattttacgaattttctcaanaaggttagaaagcagcatttaaggaaggtcttctgggaagccttaacaaagttaccccaatnattcctcccaancccaaagcaatctaagaa

SEQ ID NO: 4721 - DNA, 750 bp, Homo sapiens
  misc_feature (519)..(519): "n" may be a, t, c, g, other or unknown
  misc_feature (590)..(590): "n" may be a, t, c, g, other or unknown
  misc_feature (615)..(615): "n" may be a, t, c, g, other or unknown
  misc_feature (701)..(701): "n" may be a, t, c, g, other or unknown
  misc_feature (707)..(707): "n" may be a, t, c, g, other or unknown
  misc_feature (720)..(720): "n" may be a, t, c, g, other or unknown
accgctacacatgcgccttgcaaggaagggcgaagatttcgggggcggggcggggggcgggcctaggccggggtctcacagcgactgcgcggacgggttcctgagtggaacatggcgacttgcgccgaaatcctgcggagcgagttccccgaaattgacggacaggtcttcgactacgtgaccggcgtcttgcacagcggcagcgcggacttcgagtctgtggatgacctggtggaagctgtaggggaactattgcaagaggtgtccggggacagcaaggatgacgcgggcatcagggccgtgtgccagcgcatgtacaacactctgcgtctggctgagccacaaagccagggaaatagccaggtgctactggacgcccctatccagttgtcaaagataacggagaactacgactgtggaaccaaacttccaggactgctaaagagggaacagtcctcgacagtgaatgcaaagaagttagagaaggccgaggctcgacttaaggcaaagcaggagaancgctcagagaaggacacgctcaagaccagcaaccctctagtcttagaaagaggcatcagccagccaggcangcagcagaaaggagagtccgttggnatcatctggcaagaacaaatcctatgatgtgcgaattgagaactttgatgtgtcttttggcgatagagtactgctggctggaagcngatgtnaaacctgggattngggccgccgtttacggggctggttggggcg

SEQ ID NO: 4722 - DNA, 722 bp, Homo sapiens
  misc_feature (432)..(432): "n" may be a, t, c, g, other or unknown
  misc_feature (496)..(496): "n" may be a, t, c, g, other or unknown
  misc_feature (683)..(683): "n" may be a, t, c, g, other or unknown
  misc_feature (688)..(688): "n" may be a, t, c, g, other or unknown
  misc_feature (716)..(716): "n" may be a, t, c, g, other or unknown
gctgctgcactgacggcgggtgcccgcgcctcagagttactgatttattcttgagattcctctactctcgttatctgacctcatggatgaacttcaggatgttcagctcacagagatcaaaccacttctaaatgataagaatggtacaagaaacttccaggactttgactgtcaggaacatgatatagaaacaactcatggtgtggtccacgtcactataagaggcttacccaaaggaaacagaccagttatactaacatatcatgacattggcctcaaccataaatcctgtttcaatgcattctttaactttgaggatatgcaagagatcacccagcactttgctgtctgtcatgtggatgccccaggccagcaggaaggtgcaccctctttcccaacagggtatcagtaccccacaatggatgagctggntgaaatgctgcctcctgttcttacccacctaagcctgaaaagcatcattggaattggagttggngctggagcttacatcctcagcagatttgcactcaaccatccagagcttgtggaaggccttgtgctcattaatgttgacccttgcgctaaaggctggattgactgggcagcttccaaactctctggcctgacaaccaatgttggtggacattattttggctcatcactttgggcaagaagagttacangccantctggacctgatcaaacctacagattgnatattg

SEQ ID NO: 4723 - DNA, 734 bp, Homo sapiens
  misc_feature (531)..(531): "n" may be a, t, c, g, other or unknown
  misc_feature (574)..(574): "n" may be a, t, c, g, other or unknown
  misc_feature (578)..(578): "n" may be a, t, c, g, other or unknown
  misc_feature (655)..(655): "n" may be a, t, c, g, other or unknown
  misc_feature (676)..(676): "n" may be a, t, c, g, other or unknown
  misc_feature (698)..(698): "n" may be a, t, c, g, other or unknown
gaggggttcctcgccagccaggtgctcgtcatgcgcaatgtggcgctgcggcgggcggcagggcctgtgtgtgctgaggcggctgagcggcggacatgcacaccacagagcgtggcgatggaacagtaaccgggcttgtgagagggctctgcagtataaactaggagacaagatccatggattcaccgtaaaccaggtgacatctgttcccgagctgttcctgactgcagtgaagctcacccatgatgacacaggagccaggtatttacacctggccagagaagacacgaataatctgttcagcgtgcagttccgtaccactcccatggacagtactggtgttcctcacattcttgagcataccgtcctttgtgggtctcagaaatatccgtgcagagaccctttcttcaaaatgttgaaccggtccctctccacgttcatgaacgccttcacagctagtgattatactctgtatccattttccacacaaaatcccaaggactttcagaatctcctctcggtgtatttggntgccacctttttcccatgtttacgcgagctggatttctggcangaangatggcggctggaacatgagaatccgagcgacccccagacgcccttggtctttaaaggagtcctctttaatgagatnaagggagcgtttacagacaantgagaggatattctcccagcancttcagaacaagactttcttcccggaccaaaacgtt

SEQ ID NO: 4724 - DNA, 899 bp, Homo sapiens
  misc_feature (695)..(695): "n" may be a, t, c, g, other or unknown
  misc_feature (719)..(719): "n" may be a, t, c, g, other or unknown
  misc_feature (782)..(782): "n" may be a, t, c, g, other or unknown
  misc_feature (876)..(876): "n" may be a, t, c, g, other or unknown
  misc_feature (881)..(881): "n" may be a, t, c, g, other or unknown
acttttgggcaggtgtcagcgcccgtgtcaccgccacgtcgcggacatggtgatttcagaaagtatggatatactcttcagaataagaggaggccttgatttggcttttcagctagctactcctaatgaaatttttctcaagaaggcactgaaacatgtgttgagtgacctgtcaactaagctgtcttcaaacgcccttgtgttcagaatttgccacagttcagtgtatatatggcctagcagtgacataaacaccattcctggagaactgactgatgcttctgcttgtaagaacatactgcgctttgttcaatttgagccagaagaagatataaaaagaaaattcatgagaaagaaggacaaaaagttatcagacatgcatcaaatagtaaatatagatcttatgctggaaatgtcaacctccctggcagctgtaacgcccatcattgaaagggaaagcggaggacaccattatgttaatatgactttacctgtcgatgcagttatatctgttgctccagaagaaacatggggaaaagttcgtaaactcctggttgatgcaattcataatcaactaactgacatggaaaaatgtattttgaaatatatgaaaggaacatctattgtggtccctgaaccactgcactttttattaccagggaaaaaaaatcttgtaacaatttcatatccttcangaataccaagatggccagctgcangcctataggaaaggagttacatgggccttttcaatctgcctcacgacagacccaattcaaaanggctaatgcctaacactttccaagatgagccatacaaagatgggtacattagaaaatccacatacttaccttaaaccacctaacatggggaacngggangatttaggtggccaaagg

SEQ ID NO: 4725 - DNA, 805 bp, Homo sapiens
  misc_feature (734)..(734): "n" may be a, t, c, g, other or unknown
  misc_feature (770)..(770): "n" may be a, t, c, g, other or unknown
  misc_feature (784)..(784): "n" may be a, t, c, g, other or unknown
gatgcaggaactgagcttcatcgctcttcaatgttagctgaagcaatggctaatttagtagttgacaaatctaaaaggagccaagggtcaagctctaaaatgggaaaatgttataattgtggaaaaactggacatttaaaaaaggaatgccaccagatctcaggacagaaaggatcttacaatgcagttcccccatcagcggaaaaaacgccaggactttgtcctcgctgtaacaaaggaaatcactgggctaatcactgctgctcaaaatttcatcggaatggcaccccgttttaggcatgggttcctggaggcacattgattccatcaccccaggaacaccaggaagtgcaggattagatctacctgccagagaaagaatcacattagttgggggagacaaacccatcaaagttcccactggtatttggggaacttcaccagcaggatacatgggactaattttaggcaaaagccgccttaacttgcaaggcatgactgtagtcccaggagctgttgactctgattatgaaggagaaactcaagtagttttaatgtcacaagatctttgggtttttgaactgggagaatatattgctcaattattgcttattccctgcaaattacacccttctccatgaaaggagaaacgaggaaataaagggtttgggagcacaactacatgggaaatctatctatcccgacccatagcctctaatagaccacctgtgtantacaaatttaaggaaagaaatttatgggcttatggntacgggaactgaangtatcaagttaatatcctaaa

SEQ ID NO: 4726 - DNA, 728 bp, Homo sapiens
  misc_feature (683)..(683): "n" may be a, t, c, g, other or unknown
  misc_feature (693)..(693): "n" may be a, t, c, g, other or unknown
  misc_feature (696)..(696): "n" may be a, t, c, g, other or unknown
tgctggaaaccaggcgggttgggacagagggcttggtggactccttttctcagggactggaaaggtcatacgctgtcagcagcagcgtactacacggcatcgagcctcggctgaaggacttccaccagctcctgctcaacccgcccaagaagaaagcgatcctgaccaccattggtgtgctggaggagcccctggggaatgcccgtctgcatggcgcccgcctcatggcagcactgctgcacacaaacacacccagcatcaaccaggagctctgccggctcaacacgatggacttactgctggacttgttctttaagtacacctggaataactttttgcacttccaagtggaactatgcatagccgctattctctcccacgctgcccgtgaggagaggacagaagccagcggatccgagagcagggtggagcctccgcatgagaacgggaaccggagcctggagactccccagccggccgccaagcctccctgacaacacaatggtgacccacctgttccagaagtgctgcctggtgcagaggatcctggaggcctgggaagccaacgaccacacgcaggcagcgggtggcatgagacgtgggaacatgggccacctcacacggattgccaacgcggtggtgcagaacctggagcggggccctgtgcagacgcacatcatccnaggtcatccnganggctccctgcggactgccgttggccgctggga

SEQ ID NO: 4727 - DNA, 814 bp, Homo sapiens
  misc_feature (580)..(580): "n" may be a, t, c, g, other or unknown
  misc_feature (752)..(752): "n" may be a, t, c, g, other or unknown
  misc_feature (755)..(755): "n" may be a, t, c, g, other or unknown
  misc_feature (788)..(788): "n" may be a, t, c, g, other or unknown
gaaattatttgaaagcataacttcacaatttgaaggcttgaatcttatgcctgctagtcatgaagttaaaaacatagctttgaaaaattaaagtaagtgctggaaatttgaagagaagttactggctcgtagtagattttacagatccctcttggaaatcaggtaaaaaatgggaggtataggtaatcagaatgtcataattaagcttgatttaatagataacgcaagattatatgtaataaacagaggatatatgttcttttcaaatacccgtctattttaaaattggttatgagaccacacatacatacacacacgtgctaaaaaccaaaaacatgcaaaactcaagaagttaacaaaagtagggaattgtacagcctacattccattctctggcaaccaggcagtaagactataaattaaaaaagaaagctccccaaaatgtagctatgcagaaatttaatatcactcttctaaaaagtctttaaaaaggaaacatataaattacttagcaacaagtcacactgaaagcaatacattatcaaaaatcagaatataaccaaagcaatatttgattganatattcaaagcataattaaaattgtttgtataataactctttaagaaatgtgtttgttataagacaaccaaatagaaatgaaccaagcattaatcttaaaacactagaggaggctgggcacgggtggcgcacgcctgtcatcccagcactttggggaaggcgaggcgggcanatnacgaggtcaggagatcgagaccaacctgggctnaaacggggaaaaccggtatccggtcc

SEQ ID NO: 4728 - DNA, 757 bp, Homo sapiens
  misc_feature (641)..(641): "n" may be a, t, c, g, other or unknown
  misc_feature (686)..(686): "n" may be a, t, c, g, other or unknown
  misc_feature (749)..(749): "n" may be a, t, c, g, other or unknown
  misc_feature (752)..(752): "n" may be a, t, c, g, other or unknown
agtttgtaaagtatggtaagctggcctgttatttgtttagtatcttctggattttttttttttaattatagagctagcttaccgtgtgtatcatgtaaaaaaaattcataagattaacaatttccatgagaatatcataaactcagggcacacattctggccattcctgactaaaaaacttcaagcagaataagcagctataaaatagaaaagaaaaattaaggataaacggcattgtgaaaaaaaaccgagccacacagatgagaattaaaaattaacagccagcaaactcaaaagaacctttgtcctccttgagatatggtgatgatcaaaaagttagcaaggaatattaatcaaggaattaaagggcattaggaatgctatagtattggaagaaattacatcttaacatttcaaagccccatttcacttaagagtaaaatctaatctgatgttttttactctgaattttattcagtaatttttattcataattcatgataattggtaatgtagtataattgttagtaaatgcagtacaaattgttctactgttttaaaaagttttccgcagaacagtgcatttatggcaatgctatgtttaatgagttagggacatcaaatatatagtagttccttantttcagttgtgaaaatgaaatggctaaagcagaagagacgtctantttagtcttttaaaaatgtgtgtggggtggtcttttttcctcaagaagcccaaagcacatgtngantttgg

SEQ ID NO: 4729 - DNA, 862 bp, Homo sapiens
  misc_feature (697)..(697): "n" may be a, t, c, g, other or unknown
  misc_feature (831)..(831): "n" may be a, t, c, g, other or unknown
  misc_feature (834)..(834): "n" may be a, t, c, g, other or unknown
  misc_feature (836)..(836): "n" may be a, t, c, g, other or unknown
acaaaacccgagagaggcgtgagcagcgctgtgtttgcgagcgggagcgaggggcgccggctggggtgtgtgctcctgagctcttcagaaaccaggctgctttcaggaacattgctgtggattcccagggcctattccactagaagcaagatggctgaactcaatactcatgtgaatgtcaaggaaaagatctatgcagttagatcagttgttcccaacaaaagcaataatgaaatagtcctggtgctccaacagtttgattttaatgtggataaagccgtgcaagcctttgtggatggcagtgcaattcaagttctaaaagaatggaatatgacaggaaaaaagaagaacaataaaagaaaaagaagcaagtccaagcagcatcaaggcaacaaagatgctaaagacaaggtggagaggcctgaggcagggcccctgcagccgcagccaccacagattcaaaacggccccatgaatggctgcgagaaggacagctcgtccacagattctgctaacgaaaaaccagcccttatccctcgtgagaaaaagatctcgatacttgaggaaccttcaaaggcacttcgtggggtcacagaaggcaacaagactactgcaacagaaactatccttagatgggaaccccaaacctatacatggaacaacagagaggtcagatggcctacagtggtcagctgancaagccttgtaacccaagcaagcctaaggcaaaaaacatctcccgttaagtccaatacccctgcagctcatcttgaaataaagccagatgaatttggcaaaggaaaaggaggcccaaatattggggaaatcaantgnanggttttcaacgctgcaccgttttctc

SEQ ID NO: 4730 - DNA, 723 bp, Homo sapiens
  misc_feature (554)..(554): "n" may be a, t, c, g, other or unknown
  misc_feature (579)..(579): "n" may be a, t, c, g, other or unknown
  misc_feature (582)..(582): "n" may be a, t, c, g, other or unknown
  misc_feature (672)..(672): "n" may be a, t, c, g, other or unknown
  misc_feature (698)..(698): "n" may be a, t, c, g, other or unknown
  misc_feature (704)..(704): "n" may be a, t, c, g, other or unknown
aaataacacttcacttctaacaaacaaaccaagcacttcttagatcccttttcaccgttggagcactatgtcggcattttgattttgatctggaagattttaaaggcaacagcaaggttaacataaaagataaagtacttgaactattgatgtattttacaaaacactcagatgaagaagtacaaacaaaagctatcattggtctaggatttgcctttattcagcatccaagtctaatgttcgagcaagaagtgaagaatctatataataatattttatctgataagaactcctcagtcaatttaaaaatacaagtgttaaaaaacctccagacctacctacaagaagaagatacacgtatgcagcaggcagatagagactggaagaaagttgcaaaacaggaagacttaaaagaaatgggtgatgtttcctcagggatgtgtagttccatcatgcagctttatctcaaacaggtgcttgaggcattttttcacacccagtcaagtgtacgccactttgccctaaatgtcattgcattgactccaaatcaaggncctaatcatccagttcagtgtgtgncanatttaattgctatgggcacaagacccagaacctgctatgcggaacaagggtgatcagcaacttgtgggaatagacaaaaaatatgctggnttcaatcaaatgaaagcatggctggnatgaanatgtcttaccgggtcaaca

SEQ ID NO: 4731 - DNA, 743 bp, Homo sapiens
  misc_feature (665)..(665): "n" may be a, t, c, g, other or unknown
  misc_feature (734)..(734): "n" may be a, t, c, g, other or unknown
  misc_feature (739)..(739): "n" may be a, t, c, g, other or unknown
ggagatcaacgcagaaggagataatttctgcatttccaactaaagtacccagctcatctcattgggactggttagacagtgggtgcagcccacagaaggcaagcagaagcagggtggggtgtcgcctcacccgggaagcgcaaggggtcagggaactccctcccctagccaagggaagctgtgagggactgtgccgtgaggaacggggcattccggcacagatactatgctttccccacggtctttgcaacccacagaccaggagattcccttgggtgcctgcaccaccagggccctgggtttcaagcaaaaaactgggcagccatttgggcagacactgagctagcagcaggagtttttttcataccctagtagcccctagaatgccagcgagacagaactgttcactcccctggaaaggggcactgaagccagggagccaagtggtctagctcagcagatcccacccccacggagcccaacaagctaagacccactgggttgaaattctcgctgccagcacagcagtctgatgtccacctggaatgcttgagcttggtgcagggaggggcgtctgccattactgaggcttgattaggcagtttccccctcacaagtgtaaacaaagctgctgggaagtttgaactgggtggagcccactgcanctcggcaaaagttgctgtagcaagatgtctctctagattcccctctctgagcaaggcatctctgaaacnaaggnaaca

SEQ ID NO: 4732 - DNA, 740 bp, Homo sapiens
  misc_feature (670)..(671): "n" may be a, t, c, g, other or unknown
  misc_feature (724)..(724): "n" may be a, t, c, g, other or unknown
ccttcggatggcgtttctgagtggacgtcctttttgttgatattgatgctatacctttctgtttgttagttttccttctaacagtcaggtccctctgctgcaggtctgctagagtttgctggaggtccactccagaccctgtttgcctgagtatcaccagcagaggctacagaacagcaaagattgctgcctgttccttcctggaagcattgtccctgaggggcacccgccagatgccagccagagctctcttgtatggggtatcttttggcccctgctggggggtgtctcctggtcaggagacacaggggtcacggacccacttgaggaggcagtctgacccttagcagagctcgagcactgtgctaggagatccactgctctcttcagagctggcaggcagggacctttgagactgctgaagctgcacccacagccagcatttgccccaggtgatctgtcccagggagatggcttcatctataagcccctgactggggctgctgcctttttttcagagatgccctgcccagagaagaggaatctagagaggcagtctagctacagtagctttgctgagctgcggagggctccagccagttgccatttccctgtggctttgtttacactatgaaggggaaaaccacctgctcaagcctcaagtaatggnnggatgcccctccccccggggcaaagctttgagcatcccaaggtcgattttaanactggttgttgctggg

SEQ ID NO: 4733 - DNA, 751 bp, Homo sapiens
  misc_feature (690)..(690): "n" may be a, t, c, g, other or unknown
  misc_feature (693)..(693): "n" may be a, t, c, g, other or unknown
  misc_feature (744)..(744): "n" may be a, t, c, g, other or unknown
cagttaaataacatcttcttgtttctatagttgtgctgtgagttttctgttcatatttgcgcagtgtattttaatacggcccatgtcattatagttgattttatccctttaaacaattactgtatttgtttttgacgtagaggtttcaattttttcaccttgggggcaaatgaaaaacttggcatttttcatttgggaacatataatagcttgtaaacttttcagacagcagtaaatgtctgaaaaaatatcaaaaacagcataaagacaagattatgtagctctaattatacgtatataattataaaaaacaatgtgcaagggttatattttaaggtcttttaaaatctgattttgatcataccaaatgacataatattttttatggtagccttttactttcaagacttaattttcagacttgtacaagttccttcttacattctttccctctcacaccatcctactggagaaagcatacttttatgctaagatcttactttaagctttttatgtgaacaaaagatgtacatatagtaagtattacttccgtagtcctcaaatttactataacttttgtacttagtatatgttttatatttggaaaacagcactacgcttagttttcctgtagttcctgagtgatgtctgtgtgttccttgcctgcccttttttgtgagcacagattantcngttatccatggctggcacttcacttatgatcctttctctgctaaaatttangcagctc

SEQ ID NO: 4734 - DNA, 875 bp, Homo sapiens
  misc_feature (810)..(810): "n" may be a, t, c, g, other or unknown
  misc_feature (829)..(829): "n" may be a, t, c, g, other or unknown
  misc_feature (848)..(848): "n" may be a, t, c, g, other or unknown
tattggacattcgttgggcaatttaataattcgttcagtgcttacaaggccaaggtttaaatattacctcaacaaacttcatacctttctgtctctttctggacctcaccttggtacactctacaacagcagtgctcttgttaatacaggtctctggtttatgcagaaatggaaaaaatcaggttcgcttttgcagctgacatgtcgagatcactcagaccctcgccaaacttttttatataagcttagtaacaaagcagggcttcattatttcaaaaatgttgtgctagtgggatccctacaggatcgctatgttccttatcactctgcccgcattgaaatgtgtaaaacagctttaaaggacaaacagtcaggacagatctattcagaaatgatccacaacttgcttcgacctgttctgcaaagcaaggactgtaatttggttcgctataatgtcatcaatgcattgcccaatacagctgattcactcattgggagagctgcacatatagctgttcttgattcggaaatatttttagagaaattctttctggttgctgccctcaaatatttccaatagtataaaaacattgttagcgactggacaattacctcattcaacaatgtttcaaataatgtattatattaaaatgtagatgctgataagttctaagaaatatttatacctttttatatggaagataatttatatcatccatgtttagtgctttttaaacatcaactttactttccaggtaatgtggctgtgcaataattttttaattttacctttttacttttccaataacnttttcaaaaaattttggcnacctaaggtaatttcagtngaaaacttttaaagccccataccctgg

SEQ ID NO: 4735 - DNA, 846 bp, Homo sapiens
  misc_feature (775)..(775): "n" may be a, t, c, g, other or unknown
  misc_feature (824)..(824): "n" may be a, t, c, g, other or unknown
  misc_feature (830)..(830): "n" may be a, t, c, g, other or unknown
tttaacgaatttaaaaagctaatgacaattttgagaaaaggtttgggatgtatattgctatgtaatttaataaactgattttatggatataaatatgactgctttccttagagaataattattacctgaagcgcatccagacaacgtggctacctttatcatttcattcaaccctgagtggcccaaacaaaggcctcaggccggccacttccttccacttcttggtctgacctctccatgatctgttactaggcaaaactcagatgtttggctaccttgggctgcaactgtcccactcttgcccaggcttgctggagttggggttatccacagtcagaggttcagagttgtcaaattctccaattagagcaagagatgaggaaaggaaagggagacgaaagaaagaggctgtgcctcagaaataataacgccgcatatctacaactatctgatctttgacaaacctgagaaaaacaagcaatggggaaaggattccctatttaataaatggtgctgggaaaactggccaaccaatgtagaaagctgaaactggatcccttccttgcaccttatacaaaaatcagttcaagatggattaaagacttaaacgttagacctaaaaccataacctaggcattaccattcaggacataggcatgggcaaggacttcatgtctaaaacaccaaaaccaatggcaaccaaaggcaaaattgacaaatgggatctaattaaactaaaagagcttctgcacagcaaaaagaaactaccatcagnagtggacaaggcaacctacaaaatggggagaaaattttcgcaacctacnccatcngacaaaagggctaaat

SEQ ID NO: 4736 - DNA, 890 bp, Homo sapiens
  misc_feature (26)..(26): "n" may be a, t, c, g, other or unknown
  misc_feature (812)..(812): "n" may be a, t, c, g, other or unknown
  misc_feature (815)..(815): "n" may be a, t, c, g, other or unknown
  misc_feature (865)..(865): "n" may be a, t, c, g, other or unknown
attgactaaacctaactagaagccangaggccaaaggaatctgtcgatatacaagctagcttcccagtggatggagcaggatggagaagaggaagaacgggcctggagggacaaacaaagggttaaaagaaaaggtccatccacatcgtggcgctggggaacgagggggacacattccaccaggacaaccggccgtcggggcttatccgcacttacctggggagaagccctctggtctccggggacgagagcagcttgttgctgaacgcggccagcacggtcgcgcgtccggtgttcaccgagtatcaggccagtgcgtttgggaatgtcaagctggtggtccacgactgtcccgtctgggacatatttgacagtgattggtacacttctcgaaatctaattgggggcgctgacatcattgtgatcaaatacaacgttaatgacaagttttcattccatgaagtaaaggataattatattccagtgataaaaagagcattaaattcagttccagtaattattgctgctgttggtaccagacaaaatgaagagttaccttgtacatgcccactatgtacctcagacagagggagctgtgttagtacaactgaagggatccaacttgcaaaagaactaggagcaacctatcttgaactccacagccttgatgacttctacataggaaagtattttggaggagtgttggagtattttatgattcaagccttaaatcagaagacaagtgaaaaaatgaagaaaagaaaaatgagcaactcctttcatgggaattagaccacctcaacttgaacaancangaaaaaatgcctgtcctaaaggctgaagcgtcacaattataactctgacntaaataacttgctgttctgctgcca

SEQ ID NO: 4737 - DNA, 894 bp, Homo sapiens
  misc_feature (678)..(678): "n" may be a, t, c, g, other or unknown
  misc_feature (781)..(781): "n" may be a, t, c, g, other or unknown
  misc_feature (844)..(844): "n" may be a, t, c, g, other or unknown
  misc_feature (878)..(878): "n" may be a, t, c, g, other or unknown
  misc_feature (882)..(882): "n" may be a, t, c, g, other or unknown
ttactaacggaatctgaatcagagcatggtgaaagggttaatggacgatgtctgaacaattggcttaggagagggaaaactttaaaactaatattctctctaagaaaagaaatggaagcgttcttggtttcagtaggggcaacaacagtccacttctcagacaaacaatggctttgtgactttggcttcttggtggacattatggaacaccttcgagaactcagtgaagaattacgagttagtaaagtctttgctgctgctgcctttgaccatatttgtactttcgaagttaagctgaatttatttcaaagacatattgaggaaaaaaatctaacagactttcctgccctcagagaagttgttgatgagctaaaacagcaaaataaggaagatgaaaaaatatttgatcccgataggtatcaaatggtgatctgtcgtctccaaaaagaatttgagagacattttaaggacctcaggttcattaaaaaggacttaggacttttttcaaatccatttaactttaaacctgaatatgcacctatttcagtgagggtggagctaacaaaacttcaggcaaacactaatctttggaatgaatacagaatcaaagacttggggcagttttatgctggattgtctgctgaatcctacccaattatcaaaggggttgcctgtaangtggcatccttgtttgatagtaaccaaatctgtgaaaaggcttttcatatttgactcgaaaccaacacactttgagtcagccattaacagatgagcatctccnaagccctgtttccgggttgccacaactgaaaatggagccccggttgggatgaccttgtgagangaaagaaatgaatccaatccataagggctttgtngtanaaagattgaaaa

SEQ ID NO: 4738 - DNA, 743 bp, Homo sapiens
  misc_feature (686)..(686): "n" may be a, t, c, g, other or unknown
  misc_feature (692)..(692): "n" may be a, t, c, g, other or unknown
  misc_feature (706)..(706): "n" may be a, t, c, g, other or unknown
gacagagtaataagtagaagaaggaaatcagatttttctaaagcctactccttcctcactttgaaggccttctgggaaagacagcaaagttgagctcatataaaccaaaagctctggtcccagttctccctgtatggtggggagaattgcccattctttcttacttctgacaactggctcttcaagtacacttcaaatacctgagaacctattcatatccattctctgaatgggaagaaaattgctcctccttggcaaacatctttggcctgggcaaaactttccacttttttcatttttgtggtcactgttctcttctatatccttttatgtattagtccataagcactaagttttgaaagcactaagacattctagagtccttgattgttcacccatacttccatttctttattcaataaacatgtattaagttcctattatgtcagatgtgcaaattcttatggtaataaaaagatgtatgagacatagacactttatttagtcaaacactcaacaatatttgaacatctactgtgtacaaggtgctaaggatcaataaaggagtagtgcagtttaagacaacacaacaaaaacaaactcttcactccactggctgtaacacatttctactctgagatcttcatggcacaacttcttgaacaagtgttttcaatagtcactcncttcanattttttcttccanttcctcaaacatacaggaagaaaacgttgtggttggg

SEQ ID NO: 4739 - DNA, 805 bp, Homo sapiens
  misc_feature (567)..(567): "n" may be a, t, c, g, other or unknown
  misc_feature (633)..(633): "n" may be a, t, c, g, other or unknown
  misc_feature (666)..(666): "n" may be a, t, c, g, other or unknown
  misc_feature (751)..(751): "n" may be a, t, c, g, other or unknown
  misc_feature (772)..(772): "n" may be a, t, c, g, other or unknown
  misc_feature (803)..(803): "n" may be a, t, c, g, other or unknown
aaccacaaaacccgccaggccggtgcgggagctgcggagcatccgctgcggtcctcgccgagacccccgcgcggattcgccggtccttcccgcgggcgcgacagagctgtcctcgcacctggatggcagcaggggcgccggggtcctctcgacgccagagagaaatctcatcatctgtgcagccttcttaaagcaaactaagaccagagggaggattatccttgacctttgaagaccaaaactaaactgaaatttaaaatgttcttcgggggagaagggagcttgacttacactttggtaataatttgcttcctgacactaaggctgtctgctagtcagaattgcctcaaaaagagtctagaagatgttgtcattgacatccagtcatctctttctaagggaatcagaggcaatgagcccgtatatacttcaactcaagaagactgcattaattcttgctgttcaacaaaaaacatatcaggggacaaagcatgtaacttgatgatcttcgacactcgaaaaacagctagacaacccaactgctacctatttttctgtcccaacgangaagcctgtccattgaaaccagcaaaaggacttatgagttacaggataattacagattttccatcnttgaccaaaaatttgccaaagccaaagagttancccaagaagattctctcctacatgggcaattttcacaagcagtcactccccctaacccatcatcacacaagatttattcaaaagnccaaccgattatctcaatggngaagaacaacaacttttcccaaaaaagtttngg

SEQ ID NO: 4740 - DNA, 793 bp, Homo sapiens
  misc_feature (670)..(670): "n" may be a, t, c, g, other or unknown
  misc_feature (721)..(721): "n" may be a, t, c, g, other or unknown
  misc_feature (775)..(775): "n" may be a, t, c, g, other or unknown
  misc_feature (789)..(789): "n" may be a, t, c, g, other or unknown
tagtgaagatgccttacttgaggaagaggatgcatctgagcaagatattcatttagctctggagtctgataattcaagcagtaaatcaagttgttcttcttcctggacaagccgatctgttgctccaggctttcagtaccaccctaatctacctatgcatgccgtcataatggaaaagtccaatgatcatttcattgtgaaaatacgacgtgcaacaccatctacctcttctggccttaaacagagtatgatgcctgatgaattattgacatctttgcccagacatggaaaggaagctgatgaaggaccagagaaagaatatatttcatgtcagaacacagtttttaaatctgtggaggaattggaaaactccaacaaaaatgttgatggcagcaagtcaactcatgaagaacagagctctatgatacaaacacaggttcctgatatatatgaatttcttaaagatgcttcagataagatgggtcatagtgatgaagtggctgatgaatgtttcaaattgcatcaagtatgggaaacaaaagtgcctgaaagcattgaagaattgccttcaatggaagaaatctcacactctgttggggaacatcttccaaacacatacgtagatctaacgaaagattcaagtcactgaaaccaaaaacttggggggaantcatagaagtaacagttttacatattgatcaagttgggatgtcctggaggnaatttaaatcagagtgctcaatatagacattccttgcaagctgatacggtaggngctttatggatttncaca

SEQ ID NO: 4741 - DNA, 755 bp, Homo sapiens
  misc_feature (510)..(510): "n" may be a, t, c, g, other or unknown
  misc_feature (565)..(565): "n" may be a, t, c, g, other or unknown
  misc_feature (616)..(616): "n" may be a, t, c, g, other or unknown
  misc_feature (683)..(683): "n" may be a, t, c, g, other or unknown
  misc_feature (745)..(745): "n" may be a, t, c, g, other or unknown
  misc_feature (749)..(749): "n" may be a, t, c, g, other or unknown
cttaaaatgtattcaagttatttaagtggcccccacaggagtggagtcttgaaatctaattctaaatgccagtcagtgatgatcgcatcacagttgagtgaaatggccttcctgttcagctgttagagactgaagattgttagggcaccttagaatgtctcatcttttctaggttgtcaacaggtactatttgtcacataactaactttcgaggcactggaacatacctgaactaagaattaaatcttttactttatactcacttaaaatcaagaatcccatctaaaacacataggtaccttatctgaaactcttgcacttccccaaccagggcagaaatgaggtgggagaagtttgactaaaatgagggatgggggaaagtaaaagatgtttttttttttttgagactcgctttgtcacccaggctggagtgcaatggcacaatctcaactcaccgcaacctccgcctcccgggttcaagcgattctcctgcctcagcctcccgagtanttgggattacaggcgcctgcctccatgcctggctaattttgtatttttaagtaanagacagggtttcttcatgttggtcaggctggtcccaaactcctaacctcgngatccgcctgcctcgacctcccaaagtgctgggattacaggcatgagccaccatgcccagccaaagntcattttttaaatagacttcaaccctttgtaaatactggtactgggggaagtatagaagtanaaanaaaagt

SEQ ID NO: 4742 - DNA, 710 bp, Homo sapiens
  misc_feature (683)..(683): "n" may be a, t, c, g, other or unknown
  misc_feature (689)..(689): "n" may be a, t, c, g, other or unknown
  misc_feature (699)..(699): "n" may be a, t, c, g, other or unknown
gagattctgtgccccttgtcgggccgcttgtttggctgctgccgtcacctcatggcgacgcgggtagaggaggcagcgcggggaagaggcggcggcgccgaagaggcgactgaggccggacggggcggacggcgacgcagcccgcggcagaagtttgaaattggcacaatggaagaagctggaatttgtgggctaggggtgaaagcagatatgttgtgtaactctcaatcaaatgatattcttcaacatcaaggctcaaattgtggtggcacaagtaacaagcattcattggaagaggatgaaggcagtgactttataacagagaacaggaatttggtgagcccagcatactgcacgcaagaatcaagagaggaaatccctgggggagaagctcgaacagatccccctgatggtcagcaagattcagagtgcaacaggaacaaagaaaaaactttaggaaaagaagttttattactgatgcaagccctaaacaccctttcaaccccagaggagaagctggcagctctctgtaagaaatatgctgatcttctggaggagaacaagagtgttcagaagcaaatgaagatcctgcagaagaagcaagcccagattgtgaaagagaaagttcacttcagaagtgaacatagcaaggctatcttggcaagaagcaagctagaatctcnttgcanagaacttcancgtcacaataa

SEQ ID NO: 4743 - DNA, 704 bp, Homo sapiens
  misc_feature (664)..(664): "n" may be a, t, c, g, other or unknown
  misc_feature (688)..(688): "n" may be a, t, c, g, other or unknown
  misc_feature (704)..(704): "n" may be a, t, c, g, other or unknown
acgtactccatgcgctacctgctgcccagcgtcgtgctcctgggcacggcgcccacctacgtgttggcctggggggtctggcggctgctctccgccttcctgcccgcccgcttctaccaagcgctggacgaccggctctactgcgtctaccagagcatggtgctcttcttcttcgagaattacaccggggtccagatattgctatatggagatttgccaaaaaataaagaaaatataatatatttagcaaatcatcaaagcacagttgactggattgttgctgacatcttggccatcaggcagaatgcgctaggacatgtgcgctacgtgctgaaagaagggttaaaatggctgccattgtatgggtgttactttgctcagcatggaggaatctatgtaaagcgcagtgccaaatttaacgagaaagagatgcgaaacaaggtgcagagctacgtggacgcaggaactccaatgtatcttgtgatttttccaagaaggtacaaggtataatccagagcaaacaaaagtcctttcagctagtcaggcatttgctgcccaacgtggccttgcagtattaaaacatgtgctaacaccacgaataaaggcaactcacgttgcttttgattgcatgaagaattatttagatgcaatttatgatgttacnggtgggttatgaagggaaaagacnatggaggggcaacgan

SEQ ID NO: 4744 - DNA, 813 bp, Homo sapiens
  misc_feature (717)..(717): "n" may be a, t, c, g, other or unknown
  misc_feature (744)..(744): "n" may be a, t, c, g, other or unknown
  misc_feature (787)..(787): "n" may be a, t, c, g, other or unknown
cttaaacagttacatgagaaccaaaaaaacaacccaacgcttttggagaataaatcaggatctggagttccaaacagtaataccaattccagtgtgcagcatgttcagataagagttgcccgcttggaagataatacagccatctcttctagccccatggcagcattgcagattccagtccagatcacccatgtttcttcagcagactctcctgctaccgttgactcagaaacaataacactaaacagtggaacactacagacatttgagattcttccctctttccatctacagcccactggcactccaggcacctacctacttcaaacaagctcaagccaaggccttcccctaactctgactgctagtcccacagtaaccctgacagctgctgctcctgcttctcctgaacagattattgttcatgctttatccccagaacatttgttgaacacaagtgataatgttacagtgcagtgtcacacaccaagagtcatcattcagactgttgccacagaggacatcacttcttccatatcccaagcagaactgacagtcgatagtgatattcagtcatctgattttcctgagcctccagacgccctagaagcagacactttcccagatgaaattcatcaccctaagatgactgtggagccatcatttaatgatgctcatgtatccaaattcagtgaccaaaatagcacagaactgatnaatagtgttatggtcagaacaagaagnaagaaatctctggacaccggaccttaaacaaagagggaatcancctccggatttagccagttgcttaag

SEQ ID NO: 4745 - DNA, 732 bp, Homo sapiens
  misc_feature (684)..(684): "n" may be a, t, c, g, other or unknown
  misc_feature (695)..(695): "n" may be a, t, c, g, other or unknown
  misc_feature (724)..(724): "n" may be a, t, c, g, other or unknown
gacagagcctcattcattcaagatataagaacaggaggaaagagtccattgacgtgaaatcgatatcatctcgaggcagtgatgcaccaagcctgcagaatcgtcgctatccgtccatggcgaggatccactccatgaccatcgaggctcccatcacaaaggttataaatataatcaatgcagcccaagaaaacagcccagtcacagtagcggaagccttggacagagttctagagattttacggaccacagaactgtactcccctcagctgggtaccaaagatgaagatccccacaccagtgatcttgttggaggcctgatgactgacggcttgagaagactgtcaggaaacgagtatgtgtttactaagaatgtgcaccagagtcacagtcaccttgcaatgccaataaccatcaatgatgttcccccttgtatctctcaattacttgataatgaggagagttgggacttcaacatctttgaattggaagccattacgcataaaaggccattggtttatctgggcttaaaggtcttctctcggtttggagtatgtgagtttttaaactgttctgaaaccactcttcgggcctggttccaagtgatcgaagccaactaccactcttccaatgcctaccacaactccacccatgctgccgacgtcctgcacgccaacgctttcnttcctgggaanggaaaggagtaaaggggaagcctccgatnaatttggg

SEQ ID NO: 4746 - DNA, 798 bp, Homo sapiens
  misc_feature (649)..(649): "n" may be a, t, c, g, other or unknown
  misc_feature (725)..(725): "n" may be a, t, c, g, other or unknown
  misc_feature (779)..(779): "n" may be a, t, c, g, other or unknown
  misc_feature (784)..(784): "n" may be a, t, c, g, other or unknown
atgaatagaattggaggaggtatgtataaagatttgtttttttgtatgtacccatcaccatttttaataaactagaaactgtgttgagaattccatgaaaaaaaagtcatggtttattgttggctcatgttctaaaggctgctagcagaaattgagcctggtacatacttaaaggaaggtgatgtgttaagaagtagctgcacaaggtagggtggatgaagagcttactggtgagatttaacatttacaaaacgtacctttcagctacatgactgacagttggatctcaaaattaatctttattccataggaatagggtttggtggtctggaagcaatgaatagcatgggaggatttggaggagttggccgaatgggagagctgtaccgtggtgcgatgactagtagcatggagcgagattttggacgtggtgatattggaataaatcgaggctttggagattcctttggtagacttggtggtggaatgggtagcatgaacagtgtgactggaggaatggggatgggactggaccggatgagttccagctttgatagaatgggaccaggtataggagctatactgggaaaggagcatcgatatggatcgaggatttttatcgggtccaatgggaagcggaatgagagangagaataggctccaaaggcaaccagatatttgtcaagaaatctacctttttgaccttgaccttggcaagaaaactnaaaaggagaaaattcaagtccagtggtgggccaaaggtaaatggttttgccaanaaaantaaaaaaatggggg

SEQ ID NO: 4747 - DNA, 635 bp, Homo sapiens
  misc_feature (487)..(487): "n" may be a, t, c, g, other or unknown
  misc_feature (579)..(579): "n" may be a, t, c, g, other or unknown
  misc_feature (591)..(591): "n" may be a, t, c, g, other or unknown
  misc_feature (615)..(615): "n" may be a, t, c, g, other or unknown
gttctcttcgcccggtccctgccgcgcacaggcctcggggtcggcgggagcacgatggcggccgctaggagactcatggcgctggccgccggcatctctccgcgcctgcagccgctgggtccccgcgctgctgggcgacagggtcgctcgcgcggcttctcttcaagctgcgcccaccccgaccacaccaaggaagccgccgaggccgagtcagggatggcccccggcgggcctggggaaggcgacggaagcttggtgaacgcttctagggacctattaaaagagttcccacagcccaaaaatcttctcaacagtgtgattggaagagccctcggcatctcacatgcaaaagacaaactagtctacgtgcacacaaatggaccgaagaaaaagaaagtcacactgcacataaaatggcccaagagcgtggaggtagaaggctatggcagcaagaagatcgatgctgagcggcaggctgcagctgcancctgccagctgttcaagggttggggtctgctaggtccccggaatgagttgtttgacgcagccaaataccgagtgctagctgatcgctttggntcccctgccganagctggtggcgtccggaacccatnatgcccctacttcctggcgg

SEQ ID NO: 4748 - DNA, 849 bp, Homo sapiens
  misc_feature (590)..(590): "n" may be a, t, c, g, other or unknown
  misc_feature (596)..(596): "n" may be a, t, c, g, other or unknown
  misc_feature (651)..(651): "n" may be a, t, c, g, other or unknown
  misc_feature (776)..(776): "n" may be a, t, c, g, other or unknown
  misc_feature (796)..(796): "n" may be a, t, c, g, other or unknown
  misc_feature (823)..(823): "n" may be a, t, c, g, other or unknown
gtctgtaggttaagggagaagatggcggcgctaggggaacccgtgcggctggagagagatatttgtagagcaattgaattattggaaaaactacaaaggagtggagaagtaccaccacagaaacttcaggctttgcaaagagtccttcaaagtgaattctgcaatgctgtgagagaggtatatgaacatgtctatgagactgtggacatcagtagcagtcctgaagtgagagcgaacgctactgcaaaggctactgttgctgcatttgctgccagtgaaggacattctcatcctcgagttgttgagctaccaaaaacagaagagggccttggattcaatattatgggaggcaaagaacaaaactctccaatctatatatcccgaataattccaggtggaattgctgatagacatgggggcctcaaacgtggagatcaactcctctctgttaatggagtgagtgttgaaggagaacatcatgaaaaagctgtagaactgctgaaagccgcacaaggaaaggttaaattagtggtacgatacacacccaaagtcttagaagaaatggagtcgcgctttgaaaaaatgagatnagcaanacgcaggcaacagacctaatacatttcaaaacttgatatttcattttgcgtttanctagagaagttttccttgtgacttactaatgggctgcaatgccaatgattgttaagaaaacaaacaaatttatcatgaaattcccccttgtcaattttataaaatgcctaattttaacaatccanttttaaggggttcccaagangaatgccattacaccttttttttcccngaacaaaggaaaaaaaagttaaaaaa

SEQ ID NO: 4749 - DNA, 787 bp, Homo sapiens
  misc_feature (731)..(731): "n" may be a, t, c, g, other or unknown
  misc_feature (733)..(733): "n" may be a, t, c, g, other or unknown
  misc_feature (780)..(780): "n" may be a, t, c, g, other or unknown
attacaatgaaaaattttgtgttccaaggcaactgtatcataggtgtaaacataaagcatataaattatgacaatccttttagaggtagggtcaatatagtggataaacctgtctatcagacgtattgattatagcagtactatagttattctgctgtcattattaaagatgattatattcattcaaagctttagatgtgtcccatgtggcaagaaaggagacagtgaattttgtcaaacaataaaaatgtgtcaggaacacaaggatgaaggggatgtcatttgcctggtaagaactgggttatttccactgaaatttgttatgtttaaggaaattaagattttaagcttgaaattatacaagcagaatctaatttaattttgattgactgaagaaccagggtcttttgctctcctttggtatttcactctcctttggtattcaatcatgtgtcttttagtgctttttaaaattttacccattctttaattcagcatctccctatgtatgtgtcatagaatacttagttctgctagatattctgcaaatatatttgggaattacttcctgctgtttcgccttcttaggttcatagtacacatcagcatatgagaatctctgagaggtcctccaaaaaggagagaaaaagcacctcttttgggctcaatgttttccaaaaccttatttgaccccaaaaacctttttcatatacccaataataagctacagnanctaatattccgcaaatggtcccttgggaacacactgccttaaacagntaattcc

SEQ ID NO: 4750 - DNA, 625 bp, Homo sapiens
  misc_feature (586)..(586): "n" may be a, t, c, g, other or unknown
  misc_feature (597)..(597): "n" may be a, t, c, g, other or unknown
  misc_feature (603)..(603): "n" may be a, t, c, g, other or unknown
tacgttggaagtgttcgtccgcttgtcactgaattggaccctgatgctcccataagacagaaaatgccccttgatgatctggatagagaagatgaagttagattactcaaatatctctttactctaatccgtgctggaatgacagaagaggcacaacgactctgtaaacgctgtggtcaagcatggagagctgcaacacttgaaggctggaaactgtaccatgaccctaatgttaatggaggaacagaattagaacctgttgaagggaatccatatagacgcatttggaaaataagttgctggagaatggcagaagatgagctttttaatagatacgagagagcaatttatgcagctttaagtgggaatcttaagcagccgcttcctgtctgtgacacctgggaagacacagtttgggcctacttccgggtgatggtggacagtctggtagaacaggagatccagacatcagtagcaactctggatgaaactgaagaactccctagagaatatctgggagcaaactggacgttagaaaaggtttttgaggaacttcaagctactgacaaaaagagagttctggaanagaatcaagancattancatatagttcaaaagtttctta

SEQ ID NO: 4751 - DNA, 707 bp, Homo sapiens
  misc_feature (640)..(640): "n" may be a, t, c, g, other or unknown
  misc_feature (682)..(682): "n" may be a, t, c, g, other or unknown
  misc_feature (697)..(697): "n" may be a, t, c, g, other or unknown
attgtgtatgattcgttgttgactgcagcatcactaggtgggacatcactgcgttttccttgaacttccgcgggttctcctaaagttacttggtgactttttatgattgctttctgctcgtctgaataaaggatgagcccagggcctgctgcccactgtctgctctgatgaccctctctcccctgcagatccgagtgatggtggacctgtgcaacagcaccaagggcatctgcctcacaggaccttctggaccaccaggacctccgggagccggcgggttgccaggacacaacggagtggatggacagcctggtcctcagggcccaaaaggagaaaaaggagcaaatggaaaaagaggaaaaatgggtatttttggcaactcttctaattaatttccctgttatttatctccatgattgcatttgggtcgactaaaactgtgtgcagcaggggtaaggtgtttcatctctgcacagtttaaggccggtttaactcttacctagaagccgttgcgttccgggataccaagggtatacttcttggtcccaccttgacagatgtttatttcaaactggagaagccgtctcctgggaactgactccgcacccttctgctgcagatgggaggtggaagggagcangagcccacagccctgggaaggggcaatcctgtgggccgtgtnacaactgggggcctnggtgcaatgg

SEQ ID NO: 4752 - DNA, 431 bp, Homo sapiens
  misc_feature (349)..(349): "n" may be a, t, c, g, other or unknown
  misc_feature (356)..(356): "n" may be a, t, c, g, other or unknown
  misc_feature (430)..(430): "n" may be a, t, c, g, other or unknown
agcagttggaagttggcaggtggagaggcaggttgggagggaaagtcgggggaggacgcggaagaggagctgtgggaagggggaggagggagggaggaaaagaggacgaggcggcggagaactgagcagagcagagcatctagccaaaggggagatgagtttgtctgtcctctgctgaggctacggccgggcctagggaactgggagcttgggtggaagcgacacccgtggaagtgggaggaggtggcgccgggactttaaccccttgtgggctctgcggcaagggatttaaccctttgtggatctggcccctcggtggcagcgtcatcggtagttttaaccccttcgnggctggntttcacgcactggacttaccctcatcaccttgctcaccaactcctttattggggtgctccgcttggaggtttgnc

SEQ ID NO: 4753 - DNA, 765 bp, Homo sapiens
  misc_feature (705)..(705): "n" may be a, t, c, g, other or unknown
  misc_feature (743)..(743): "n" may be a, t, c, g, other or unknown
  misc_feature (756)..(756): "n" may be a, t, c, g, other or unknown
aaaagcccgggccgaacggccccgccgcagagactcagcgcggatcgctgctccctctcgccatggcgcaggtgctgatcgtgggcgccgggatgacaggaagcttgtgcgctgcgctgctgaggaggcagacgtccggtcccttgtaccttgctgtgtgggacaaggctgaggactcagggggaagaatgactacagcctgcagtcctcataatcctcagtgcacagctgacttgggtgctcagtacatcacctgcactcctcattatgccaaaaaacaccaacgtttttatgatgaactgttagcctatggcgttttgaggcctctaagctcgcctattgaaggaatggtgatgaaagaaggagactgtaactttgtggcacctcaaggaatttcttcaattattaagcattacttgaaagaatcaggtgcagaagtctacttcagacatcgtgtgacacagatcaacctaagagatgacaaatgggaagtatccaaacaaacaggctcccctgagcagtttgatcttattgttctcacaatgccagttcctgagattctgcagcttcaaggtgacatcaccaccttaattagtgaatgccaaaggcagcaactgggaggctgtgagctactcctctcgatatgctctggggcctcttttatgaagctggtacgaagattgatgtcccttggggctggggcantacatcaccaagttaatccctggaataaggctttcgtnctccaatttgatnattaagaaa

SEQ ID NO: 4754 - DNA, 771 bp, Homo sapiens
  misc_feature (682)..(682): "n" may be a, t, c, g, other or unknown
  misc_feature (710)..(710): "n" may be a, t, c, g, other or unknown
  misc_feature (761)..(761): "n" may be a, t, c, g, other or unknown
tcatcttcagatctgatcttattttgctacttaggagttctgatactgggcaagtcacctagcctgtgagcttcatttgcttatacagttgttggaattagatgtggtgacatgcgaaaagcacaaaacctggctcctatcaagcttctgcatctatttttttttctatttttctctcaattattggaagctcatagaagcattttgggatagaattttagtagtttgcaagtatttttaaacattttatcataggtacacttataattttgatatgatctcagtattaacctgataactcccaaattgatattttcctagttcaactgaaattaaagggagaaatatgggattgtaggagtgccttgtcctcaaattgactgtatttctgttttgagaaagatcttggtactgatcacgtagtcaactttctaatgcaatgttaaagtttatatatttgtaaatgttattgttataaaagcataaaaccagaaattaagtcttagatttagtttctacatcttttattggaagatgactgtagataaatatctttctgtatatcattttaataaatgagaaaagagagctgttgaatgaaagatcatgaacatcagtatttatctgaggaacatcctgcggaggaatccctttccccatttattaaacacaaaattgccantgtttcaagtagttccccggatcgatangaccaacaactgaaattaaatgcctttaagtcccaagtgcccaattttaantaaaaatggt

SEQ ID NO: 4755 - DNA, 697 bp, Homo sapiens
  misc_feature (600)..(600): "n" may be a, t, c, g, other or unknown
  misc_feature (612)..(612): "n" may be a, t, c, g, other or unknown
  misc_feature (692)..(692): "n" may be a, t, c, g, other or unknown
agaattatggcgacctccgcgacgtcgccgcacgcgcctggttttccagctgagggtagatgcggttactatgtggaaaagaagaaacggttctgcaggatggtggtggccgcagggaaaagattttgtggtgaacacgctggagccatggaggaagaagatgctcggaaaagaatcctgtgtcctttagatccaaaacacacagtatatgaagatcaactagcaaagcatttgaaaaaatgtaactcaagagagaaaccaaaacctgatttctatattcaagatattaatgcaggcttaagagatgaaacagaaatacctgaacaattagttccaatttcttctctatctgaagagcagttggaaaagttaattaagaaattgagaaaagcaagtgaaggcttgaattctacacttaaagatcatattatgtcccatccagcattacacgatgcacttaatgaccctaaaaatggcgattctgcaaccaagcacctgaaacagcaggcttctattttaggtaacattgaaaatttaaagttacttggtccaagaagatgctttgttgagtttggagcgggaaagggaaaattatctcantggggttgatantgccttaaaagatgctgaaaaagttcacttcatcctagtgggaaaaggtgaccacaagattcaaggggggatgggaaacncagaa

SEQ ID NO: 4756 - DNA, 670 bp, Homo sapiens
  misc_feature (542)..(542): "n" may be a, t, c, g, other or unknown
  misc_feature (649)..(649): "n" may be a, t, c, g, other or unknown
  misc_feature (651)..(651): "n" may be a, t, c, g, other or unknown
  misc_feature (668)..(668): "n" may be a, t, c, g, other or unknown
aaaaatgtgtgtttgtgggtgaaatggctgcgcaggtcggagcggtgcgcgtagtacgggcggtggcggcgcaggaggagccggacaaagaggggaaggagaaacctcatgctggggtctccccgcggggagttaaacggcagcgccgatctagcagtggggggtctcaggagaagcgggggcggccgagccaggagccccctctcgctccccctcaccggcggcgtcgcagccgccgacatcctgggccgctgccgccgacgaatgcagccccaactgtcccaggccctgttgagcctcttctcctgccgcctccgccgccaccttcgctggcacccgccgggcccgctgtcgctgcccctctcccggccccaagcacctcggccctcttcaccttctcgcctctgacggtgagcgcggccgggcccaagcataagggccacaaggagcggcacaagcaccatcaccaccgcggccccgatggtgatcccagctcctgcggaaccgatctcaagcacaaggacaagcaggaaaacggcganaggactggaggggtgcctctgatcaaagccccaagagagaaacaccagatgaaaatggtaaaacccagagagccgatgattttgtcctgaagaaaataaagaagaanangaaaaagaaacaccganaa

SEQ ID NO: 4757 - DNA, 809 bp, Homo sapiens
  misc_feature (417)..(417): "n" may be a, t, c, g, other or unknown
  misc_feature (433)..(433): "n" may be a, t, c, g, other or unknown
  misc_feature (481)..(481): "n" may be a, t, c, g, other or unknown
  misc_feature (520)..(520): "n" may be a, t, c, g, other or unknown
  misc_feature (587)..(587): "n" may be a, t, c, g, other or unknown
  misc_feature (631)..(631): "n" may be a, t, c, g, other or unknown
  misc_feature (636)..(636): "n" may be a, t, c, g, other or unknown
  misc_feature (741)..(741): "n" may be a, t, c, g, other or unknown
  misc_feature (756)..(756): "n" may be a, t, c, g, other or unknown
  misc_feature (785)..(785): "n" may be a, t, c, g, other or unknown
aaatcgctcgcctctcaagcaacacggaagcatggcactgatctgtggcttgatagttgtgtggttccacctttgtcccctccaccaaaggaggaagatttttttgcctctcacgtttctcctgaggtgagtgacacagcgtgggcatcagcaatagcagaaccatcttctttaacatcaaggcctgtggaaaccactttggaaaataatgaaggtggacaagagcaaggaccaagtgtggaaggtcttaatgtaccaacaaaggctactttagaggtatcctctatcataaaaaagaaaccaaatcaagctaaaaaaggccttggggccaaaaaaggaagtttgggagctcagaaactggcaaacacatgctttaatgaaattgaaaaacaagctcaagctgcggataaaatgaangagcaagaagacctgnccaaggtggtatctaaagaagaatcaattgtttcatcattacgattancctataaggatcttgaaattcaaatgaagaaagacgaanagatgaacattagtggcaaaaaaaatgttgactcagacagactcggcatgggatttggaaattgcanaagtgttatttcacattcagtgacttcagatatgcagaccatanagcangaatcacccattatggcaaaaccaagaagaaagtataatgatgacagtgacgattcatattttacttccagctcaaggtactttgacgagccactgggagttaanggagcaattctttcnccaacctgggatgacagttcagattcccnattgggaaaaaagagacccagcaa

SEQ ID NO: 4758 - DNA, 898 bp, Homo sapiens
  misc_feature (731)..(731): "n" may be a, t, c, g, other or unknown
  misc_feature (833)..(833): "n" may be a, t, c, g, other or unknown
  misc_feature (848)..(848): "n" may be a, t, c, g, other or unknown
  misc_feature (895)..(895): "n" may be a, t, c, g, other or unknown
acttttggtcgagcggagggcgcgcagctccaccgttgccaagacgccgcgtaaacacccgagcgcgcgcagccaggtgcgctccttggggctgctggctgctgcgtttgcggcgggaggtggtggccgcggtcccacgagaaggggtatttttcgtcagccaagatgggttccaaaaggagaaatttgagctgtagtgaaaggcatcagaaattagtagatgaaaactactgcaaaaaattacatgtccaagctctaaaaaacgtcaacagtcaaatcaggaatcaaatggtgcagaatgaaaatgataaccgtgttcagcgcaagcaatttctcagattattacaaaatgaacaatttgagttggatatggaagaggccattcaaaaggcagaagaaaacaagagattgaaagaactccagctcaaacaagaagaaaaactggctatggaattggcaaaactgaaacatgaaagtctaaaggacgaaaagatgaggcaacaagtaagagaaaacagcattgagcttagagaattggagaagaaattaaaagcagcttacatgaataaagaaagggcagctcagattgctgaaaaggatgccattaaatatgaacaaatgaaacgtgatgctgaaatagccaaaaccatgatggaagaacacaagagaataataaaggaagagaatgctgcagaagacaaacgaaacaaagcgaaagcacagtactatcntgacttagagaaacaacttgaggaacaagaaaaaaaaaagcaggaagcttatgagcaactgcctaaaagagaactcatgattgatgaaattgttaggaagantctatgaagaagatnaagttgggaaaaacaacaaaaagtttgaaaaaatggaatgcaatgcnaaa

SEQ ID NO: 4759 - DNA, 828 bp, Homo sapiens
  misc_feature (679)..(679): "n" may be a, t, c, g, other or unknown
  misc_feature (699)..(699): "n" may be a, t, c, g, other or unknown
  misc_feature (764)..(764): "n" may be a, t, c, g, other or unknown
  misc_feature (787)..(787): "n" may be a, t, c, g, other or unknown
  misc_feature (821)..(821): "n" may be a, t, c, g, other or unknown
tactgccatttaaaaataggtttttaaaatttagctaagtcttaagtaatttgccgttgctaataattttatctccttgagtcggttgttggggagagatgttatattcaataatttttagttattttgtaatgcagagtgtttattcatttcacagttctgcaatggatgtagtattttgggattgccctgtccagaaaattttcagctacacacctttaaaggaaaatgtttctatctcagatgaaacatgtaatttgggatggttcttcctttgtcacttaaaggaagagataggaaaagtctcttacccactttaaacatgagggtaaaggtttaggtcaaacttactggctttgtcattcaagcatatctgaatcctcacttttttctctttgctttttagggtcagaactgagatattaccaagaaaaggcacaatgccataatattatggtgttatggtattttgacttaaaggggaaaaggtacttaattttggtgggatgttgattgtaccttgttaaaaagactctcattttctcatatgttttctcctaataagatggaatatggagtatactgtaataatataagcgttcattataagctatctggattaagaactattgcagagttgtaagcttgttatcaaattaatgcaagacatttaaactanttttttgcaaaaccatttanttttaaaacaacttaaagtatatcctagggtgagttaaaagtccctggtgcatccaataattaanatgggcaaggttttggtcacaanagtcactggggtaattaataataaaatggtttgnaaatggg

SEQ ID NO: 4760 - DNA, 626 bp, Homo sapiens
  misc_feature (558)..(558): "n" may be a, t, c, g, other or unknown
  misc_feature (581)..(581): "n" may be a, t, c, g, other or unknown
  misc_feature (596)..(596): "n" may be a, t, c, g, other or unknown
aacaagtggctgcggccgtcgcccaggagtcatcggacgccagaatctggccgggttctgagcttgttccgcctccctcccccgggaatggcgctatccgggtcgaccccggccccgtgctgggaggaggatgagtgcctggactactacgggatgctgtcgcttcaccgtatgttcgaggtggtgggcgggcaactgaccgagtgcgagctggagctcctggcctttctgctggatgaggctcctggcgccgccggaggcttagcccgggcccgcagcggcctagagctcctgctggagctggagcgccgcgggcagtgcgacgagagcaacctgcggctgctggggcaactcctgcgcgtgctggcccgccacgacctgctgccgcacctggcgcgcaagcggcgccggccagtgtctccagaacgctatagctatggcacctccagctcttcaaagaggacagagggtaactgccgtcgccgtcggcagtcaagcagttctgcaaattctcagcaaggtcagtgggagacaggctcccccccaaccaagcggcancggcggagtccgggccggcccantggtggtgccagacngcggcggagaggggccccaaccgcacccca

SEQ ID NO: 4761 - DNA, 825 bp, Homo sapiens
  misc_feature (598)..(598): "n" may be a, t, c, g, other or unknown
  misc_feature (677)..(677): "n" may be a, t, c, g, other or unknown
  misc_feature (735)..(735): "n" may be a, t, c, g, other or unknown
  misc_feature (779)..(779): "n" may be a, t, c, g, other or unknown
  misc_feature (822)..(822): "n" may be a, t, c, g, other or unknown
acagatgaaatgtaaagctggttttaatagttacgccgagcttttaacccaccgaaaggagcatcaagtctttagagcaaaatgtatgtttcctaaatgtggaagaattttttcggaagcttatttactatatgatcatgaagcacaacattataatacgtacacttgtaagttcacaggttgtggtaaagtttatcgttctcagggtgagctggaaaagcatctggatgatcacagtactcctcctgaaaaagtgctgcctcctgaagcccaacttaattcatctggagattccattcagccttctgaagtgaatcagaacacagcagagaatattgagaaagaaagatctatgcttccttcagaaaataacattgaaaacagcttactagcagatagaagtgatgcttgggataaaagcaaagcagtatcagctgtgaccaaacaagaccagatttctgcctctgagctcaggcaagctaatggaccattgtcaaatggtttggaaaaccctgctactactcctctacttcaatccagtgaagtagctgtgtccattaaggtgtctctcaatcaggggattgaggataactttggnaagcaagaaaactcaactgtggaaggcagtggtgaagcactggtcacagacttacatacgccaattgaagatacttggnatgatttgtgtcatccaggtttccaggagaggaaaagaacaagaattgctttaatgangcccatggttactcaaggattccttaagtaaattcaggaaaccnctcaaaaataaggtgaccctttaccccaacaaaaaacctttanaaa

SEQ ID NO: 4762 - DNA, 710 bp, Homo sapiens
  misc_feature (631)..(631): "n" may be a, t, c, g, other or unknown
  misc_feature (688)..(688): "n" may be a, t, c, g, other or unknown
  misc_feature (708)..(708): "n" may be a, t, c, g, other or unknown
tttggccttatagcagttatccatggccgtactgtagtaaagttccttagaactttgccaggagtgaactagaaaaaagtgcttactagggcctaagagttgctttgtgccgtgtagtctggcctttgcactagtagatcattgctgacataggtcagtttagagacctttctgtgttaatgcctcctggtactgtcttaagatacgtacagtgtctgtttttagatctatgcatatgtcatgaagctccttgtgggctctgcatgaagctgctgctttgtttttgggttaacagatgtgcctgtcaactagcatgtgtattgtccaaattccataaacttaaggtttttaagggctgtgtggtttctgagctctatgtgtctttcctatccttgtaccttcaaagggtgagaaatgagatttatacatccaaagttagtctgataaatatggctttttgtttctccatgtaacctagactgtcaaaaataagtgatggtgataagtaggcctggagcctcagcttctgtaaatctcattcctaaaattttgctaagactcgtgttggcaaaaacaaatacctgtggattgtccttaaggcttttaatcaagatacctgtgttgctgttanctgaactgtagtgaagcatcgatccaaatccggtcctctgaagtatcaagttatgcntttgaggtttagaaaatacnta

SEQ ID NO: 4763 - DNA, 677 bp, Homo sapiens
  misc_feature (557)..(557): "n" may be a, t, c, g, other or unknown
  misc_feature (642)..(642): "n" may be a, t, c, g, other or unknown
  misc_feature (650)..(650): "n" may be a, t, c, g, other or unknown
  misc_feature (673)..(673): "n" may be a, t, c, g, other or unknown
gagacttccgccctcgcgggactggctagggcgtttgaccgccggcggtgaaggggaggcggtgggcgtcttggagaacagagcgagatggagaagcgaggccgaggcgtgaagtcgagccccatccagaccccgaaccagacccctcagcaggctccggtgacgcctaggaaagaaaggaggcctagcatgttcgagaaggaggcagtgagtgcggagactgctaggggcccgagacggctatgtccgaccgtttaagtgaaatcgctccccagtgggccccgctcccgtcaccacccccagagccaaggaggcagcatctcccttttgtgtttcttttttccccagatgcgaaattgaagcctgagactgagttgggcagtcccctttggacttgagtgctaaagttttcttgttttttaattagggccatagaaccctacataagtcgattggaagggtggttacaagatcttcttttcaaatttactcaagcttgcggatttcctgagagtactctgagtattattgctttgtactaaaacacagtatgttantgtatttaagtgccattataagcagttttgctaagcgaaaaatgagtgtgttgtattaaaaaaataatttgataaaccaggcaanaatagtgncatgtttttgggtttttgaaacnatca

SEQ ID NO: 4764 - DNA, 789 bp, Homo sapiens
  misc_feature (723)..(723): "n" may be a, t, c, g, other or unknown
  misc_feature (739)..(739): "n" may be a, t, c, g, other or unknown
  misc_feature (773)..(773): "n" may be a, t, c, g, other or unknown
ctgggtacgctgtgccaaattttcacccgatgaaagactaattgtgtcatgtagtgaggataaaactattgaaatttgggataccacaaataagcaatgtgttaataacttctcagattccgttggatttgcaaattttgtggactttaaccctagtggtacatgcatagcttcagcaggttctgatcaaactgtgaaagtctgggatgtaagagtgaacaaattactacagcattaccaagttcacagcggtggagttaattgcatatcattccatccttcgggtaactatctcatcacagcttcttcagatggtacccttaagattctggacctcttagaaggaaggctcatctatacacttcaaggacatacgggacctgtctttactgtttcattttcaaaaggtggagagctatttgcatcaggaggtgcagacacacaggtcttattatggagggctaactttgatgaattgcattgtaaaggtcttaccaaaagaaatctcaaaagattacattttgattcaccaccacatcttcttgatatctacccaagaacaccacatccccatgaggaaaaagttgagactgtagaaattaatccaaagcttgaggtaatcgatttgcagatctctactccccctggtaagggataaccctttctttttgattcctaccaacaacaaacaagaaacccagtgggtaaggactcctggccaanacaaaggggttgaaanaaagggcctggtggggataaatttccttggaaancccctttccctttaaa

SEQ ID NO: 4765 - DNA, 711 bp, Homo sapiens
  misc_feature (664)..(664): "n" may be a, t, c, g, other or unknown
  misc_feature (672)..(672): "n" may be a, t, c, g, other or unknown
  misc_feature (706)..(706): "n" may be a, t, c, g, other or unknown
tagaaagaatgatcgacttgctgtttccaatgatgttgaataagtttactaaatctggtctcaagtcacagtttgcttactgcatgctgatccgaattgccagtcgcttactaaaagaaactgaggatggccatgaaagtccactgtttgatttcattgagagctgcttgcgaaataaacatgaaatggttatttatgaagctgcttcagctatcatccatcttcctaactgcactgcaagagagttggcacctgctgtttcagttcttcaacttttctgtagttctcctaagccagccttgagatatgcagctgtgaggaccttgaacaaggtggcaatgaagcacccctctgctgttactgcctgcaatctggacttagaaaacttaatcacagactcaaacagaagcattgctaccttagccattactacactcctcaaaacaggaagtgagagcagtgtggaccggctcatgaagcagatatcttcttttgtgtctgaaatctcagatgagttcaaggtggtggttgtacaggcaattagtgctctctgtcagaaataccctcgaaagcacagtgtcatgatgactttcctctccaacatgctccgagatgatggaggctttgagtacaagcgggccattgtggactgtataatcagcantgtggaanagaaccctgagagtaaagaagcaggctagcccanctttg

SEQ ID NO: 4766 - DNA, 783 bp, Homo sapiens
  misc_feature (643)..(643): "n" may be a, t, c, g, other or unknown
  misc_feature (645)..(645): "n" may be a, t, c, g, other or unknown
  misc_feature (766)..(766): "n" may be a, t, c, g, other or unknown
  misc_feature (768)..(768): "n" may be a, t, c, g, other or unknown
  misc_feature (782)..(782): "n" may be a, t, c, g, other or unknown
ttattgccttgccttatggtttatgtttatgaggtcatcattatgttctggtcactagcacagaataaggtccatttatttatttagtttttaaaatttttttttttcaaaaaaggggggagaaaatgtaacctttgtgattggtttaccttttctttaattctagggtgggtatatggctgccaaggtccagaaattggaggaacagtttcgatcagatgctgctatgcagaaggatgggacttcatctacaatttttagtggagttgccatctatgttaatggatacacagatccttccgctgaggaattgagaaaactaatgatgttgcatggaggtcaataccatgtatattattccagatctaaaacaacacatattattgccacaaatcttcccaatgccaaaattaaagaattaaagggggaaaaagtaattcgaccagaatggattgtggaaagcatcaaagctggacgactcctctcctacattccatatcagctgtacaccaagcagtccagtgtgcagaaaggtctcagctttaatcctgtatgcagacctgaggatcctctgccaggtccaagcaatatagccaaacagctcaacaacagggtaaatcacatcgttaagaagattgaaacngnaaatgaagtcaaagtcaatgggcatgaacagttggaatgaagaagatgaaaataatggattttaagtttttggggatctgggagcaaaacctcctccggggaaagggaaacaagaatgggnantcccgcatcccaana

SEQ ID NO: 4767 - DNA, 651 bp, Homo sapiens
  misc_feature (587)..(587): "n" may be a, t, c, g, other or unknown
  misc_feature (638)..(638): "n" may be a, t, c, g, other or unknown
  misc_feature (648)..(648): "n" may be a, t, c, g, other or unknown
gttttgtgtggacataagttttcaagttcatttgagtaaatacccaggagtgtgattactggatcttatggtaagatatgtttatgtttgtaacaagattgccaaactgtcttccaaagtggacatccagatgcataaaaatgaatctagatattttgcatttcctgtaccattttgtattctccactagcaatggatgagagttcctgttactccacattttcttcagcatttgttgttggtgttttggatttgggccattctaataggtgtgtagtggcatgcctttcttgttttaacttgaaattccctaatgacatgagtttgaacagtttttcatacgcttacttgccatctgtttatctttggtgtgaggtatctgttcaggtatttcacccattttataatcaggttgttcattttctttagttttaatggttcatcgtatatttttgataacagttctttatcaggtacatcttttgcaaatattttctccaaggctgttgcctgccttgttctcttgacattgtcttgcagagcaaaaaaaatcctaggctgcaagttacagatttgggaaagttaangagcatattggtgctaattgggaagccgtaaaactgcataagataaccaanaccagtatangtt

SEQ ID NO: 4768 - DNA, 891 bp, Homo sapiens
  misc_feature (823)..(823): "n" may be a, t, c, g, other or unknown
  misc_feature (835)..(835): "n" may be a, t, c, g, other or unknown
  misc_feature (849)..(849): "n" may be a, t, c, g, other or unknown
gcatcagagctaaacagcagcagtcgtgcagtatcatccacagcctgagagagagtcagcagcaagagctgagccggtttctgaacccgcccagcatcgagaccacccagcccagtgaggacacgaatgccaacagtcaggacaacagcatgcaacctgagacaagcagccagcagcagctcctgagccccacgctgtcggatcgaggaggaagtcggcaagatgcagccgacgcagggaaaccccagaggaaatttgggcagtggcgtctgccctcagccccaaaaccaataagccattcagtgtcctcagtcaacttacggtttggaggaaggacaaccatgaaatctgtcgtgtgcaaaatgaaccccatgactgacgcggcttcctgcggttctgaagttaagaagtggtggacccggcagctgactgtggagagcgacgaaagtggggatgaccttctggatatttaggtggatgtcaatgtagatgaatttctagtggtggaaaccgttttctaataatgtccttgattgtccagtgagcaatctgtaattgatctataactgaattccagcttgtcacaagatgtttataaattgattttcatcctgccacagaaaggcataagctgcatgtatgatgggttactatcaatcattgctcaaaaaaatttttgtataatgacagtactgataatattagaaatgataccgcaagcaaatgtatatcacttaaaaatgtcatatattctgtctgcgtaaactaaggtatataattcatatgtgctctaaatgcagtattatcaccggccccgcaaaangagtgcttaagnccaaaaggtggctngatattttagggtacaagggggttaaagctttagttcaaaat

SEQ ID NO: 4769 - DNA, 783 bp, Homo sapiens
  misc_feature (705)..(705): "n" may be a, t, c, g, other or unknown
  misc_feature (716)..(716): "n" may be a, t, c, g, other or unknown
  misc_feature (782)..(782): "n" may be a, t, c, g, other or unknown
aacaaatcatcgtagtaaaatggcggcagagagctagtaatgtgtctggaattggtgggttcttggtcgcactgacttcaagaatgaagccgcggaccctcacggtatgacagctcctctcccaacagctctactttctacatctactctctaccaccgcaaaacttctttcagttccatgaaagggccatgtttttctggtctcttggcctaggagcatgttgttcttctgccagcaaccttcttcaaccatccccacaggatgactcctctattggatacttccatgaaaagtccaggcctgggttatgtacccttcccaaagtgcaccccagacacccaacagtttttccagcccagactcaccacactgtgtggtaatttcctgatcactcagttgtgctccccacagactataagctctatgagggcaggggccacagtttgcttgttcactactatatgctcagtacctggtaaatattagttgactgaagaatgactatgtggtaatctattccattggtggcctccagtgaaccatgtcttctggtatttacatcttgtgtggtcccctccattaaatttgggctttaaccaacagaatgctgcagaagcgacaccctgccacttgtgcttttgtgatcctagccaccagtaagaagccctgtgaccttgctgagacctgaagagacacatagaganggcacttgaanggcaaggggtcctgactctacatggagagagaagccaagcatccctgtttcccaactgaagtcctna

SEQ ID NO: 4770 - DNA, 671 bp, Homo sapiens
  misc_feature (437)..(437): "n" may be a, t, c, g, other or unknown
  misc_feature (469)..(469): "n" may be a, t, c, g, other or unknown
  misc_feature (617)..(617): "n" may be a, t, c, g, other or unknown
  misc_feature (641)..(641): "n" may be a, t, c, g, other or unknown
  misc_feature (661)..(661): "n" may be a, t, c, g, other or unknown
atgataggcaaaaatgggaaaataacttgaggccaggagtataagggcagcctgggcaaaatagtgagacaccgtctttacaaaaactttaagtgtcagacaggcaacttggtgggcattttttttttgagatggagtcactctgtcacctaggctggattgcaatggtgcaatcttttcttactgcaaccttcgcctcccgagttcaagtgattctcctgcctcagcctcctgagtacctgggattacaggtgcacaccaccacgcttggctaatttttgtatttttagtagagacgggatttcaccatgttggtcaggctggtctcgagctcctgacctcgtgatcgaccttccttggcctcccaaagtgctgggattacaggcatgagccactgcacccagccttggcgggcatctttcaccaaagctactcangaagccaaggtgtgaggacccctgcagcacangagttcaaggcttcagtgagctatgggtgcaccactacacatcagcctgggtgagagagtgagaccatgtctcagaaaggaagaaaaattatccacttgtaggttgtctctaattacttccctgacccgcactcttcatttgtccaantgctgcagctgtgctctcaacaanttttacaacttctgggaaanatgcccatgg

SEQ ID NO: 4771 - DNA, 780 bp, Homo sapiens
  misc_feature (664)..(664): "n" may be a, t, c, g, other or unknown
  misc_feature (682)..(682): "n" may be a, t, c, g, other or unknown
  misc_feature (705)..(705): "n" may be a, t, c, g, other or unknown
  misc_feature (772)..(772): "n" may be a, t, c, g, other or unknown
gcttcgcgtcccgcctctcgcctgggctggccgtggggggcctggacgcagtggcctcccgaatctcccaggaccctaatatcgcccgaggatgctgggaggaacgctgagccgacctctccgttaggctgaagattgcacaaaccatgctaatggccagcatggatggagggagcgtgtgagatgtgtggggcagcgtgctgcatctcagccaactccaggagccagttgatgtgatggactaccttaattgatttttgaatgttgagccagccttatgcatgtgggataaacccctgttgatcatggctggctggagtgcagtggtgcaatcatggctcactgcaacctcaaattcctgggctcaagggatcctcctgcctcagcctcccgagtagctgggactacagttcctgctggaatcttgctgttgcccattcaagtctggtggttcctgtgtgttggggtggccttgcttctcctgctcttagctctggaggagccctcggctggtgctgcagtgaatctgtcagagtcgtcctaaccagagtgcccccatcctgaatagaggctggataaagccaaacctgctgggttatagtcccaggggattgggcaatcctggtcacaagatatttaagggttaagggaataaagttaatgntgctaagtaaataaagancctgaaatccttcccgtgagaanattcaaagaaatcaactcctgggaatctgggaataaagaccctttttcccggtaaaaaaaacccctngccctggg

SEQ ID NO: 4772 - DNA, 666 bp, Homo sapiens
  misc_feature (647)..(647): "n" may be a, t, c, g, other or unknown
  misc_feature (650)..(650): "n" may be a, t, c, g, other or unknown
  misc_feature (666)..(666): "n" may be a, t, c, g, other or unknown
tgcacacagtgggagctaaagcaagtgtagttgatgggactcctttagttgcagcaccctctttaaatgccacaaccgtagtaacaacagtttatcaggagcccattatgagccagggagcagccttgagtggtgagcctactactctgaccaaggaagaagaaaagaaacagcctgatgaagaacccatggacatggtggtggaaaaacaagaagaaacggaccacaagaatgacaatcaaatactgagtgaaattgttgaagcgaaaatggcagaggaattgaaaccaatggacactgataaagagagcatagctgaatcaaaatccccagagatgtccatgcaagaagattgtattagtgacattgcccccatgcaaactgatgaacagacaaacaaggagcagtttgtgccaggtccaaatgaaaagcctttgtacactgcggaaccagtgaccctggaggatttgcagttacttgctgatctattctaccttccttacgagcatggacccaaaggagcacagatgttacgggaatttcaatggcttcgagcaaatagtagtgttgtcagtgtcaattgcaaaggaaaagactctgaaaaaattgaaagaatggcgggtcacgaagcagccaaagttttgaanganattgtgtgggacctan

SEQ ID NO: 4773 - DNA, 720 bp, Homo sapiens
  misc_feature (569)..(569): "n" may be a, t, c, g, other or unknown
  misc_feature (666)..(666): "n" may be a, t, c, g, other or unknown
  misc_feature (700)..(700): "n" may be a, t, c, g, other or unknown
  misc_feature (713)..(713): "n" may be a, t, c, g, other or unknown
agacaatacctgcgtgaatttgcttttggaagctagcaattaccaaatgatgccatatatgcagccagtgatgcagtcagatagaactgccattcgatctgactccactcacttggttacattaggaggagttttgaggcagcagctggttgtcagtaaagaattacggatgtatgatgaaagggcacaagaatggagatctttagccccaatggatgctccccgttaccagcatggtattgctgtcattggaaactttctttatgtagttggtggtcagagtaattatgatacaaaaggaaaaactgctgttgatacagttttcagatttgatcctcggtataataaatggatgcaggttgcatcattaaatgaaaagcgcacattctttcacttgagtgccctcaaaggacatttgtatgcagttggtgggcgcagtgcagctggtgaactggccacagtagaatgttacaacccaagaatgaatgagtggagctatgttgcaaaaatgagtgaaccccactatggtcatgctggaacagtatatggaggcttaatgtatatttcangaggaattacccatgacactttccaaaatgagctcatgtgttttgacccagatacaagataaatggatgcaaaaggctccaaatgactacagtcaanagggcctgcaattgcatgtgtacagtttgggganaagcctccaaggncattggg

SEQ ID NO: 4774 - DNA, 758 bp, Homo sapiens
  misc_feature (577)..(577): "n" may be a, t, c, g, other or unknown
  misc_feature (698)..(698): "n" may be a, t, c, g, other or unknown
  misc_feature (723)..(723): "n" may be a, t, c, g, other or unknown
  misc_feature (738)..(738): "n" may be a, t, c, g, other or unknown
attttatcagttcgcaaatctgaagtctcatactgttttctgtctctttaaaacacattcttctggtggcttgggttcattgtgcattcattggccactcttcttgcagcaaattttaaatcaatttaaaattaggtaaactttttatgatactataatatatatgacgttgaaatgacattggttctgagtctattaatttaaattttgggatcattacattcagaatgaaatgaaattgaccttgatactaactttgagagccaaaaaaatgaatgggtaaacaaagcctaagggtcatgttaattaatttaacaaaacacactattttcagtcctttgggcttgtacattttatagacaaaattagtatttattgatttggaagtgttcaattgagagtaaatgactctgtgttttgaaactaatacctttgcatttaaaatactgaagtattattttgttagttgaagtagatcttttcctgtgtagcatgatttaatgcagagcagttattcacttatacttctgaaaagccataatattgaaatttaaaatgaatagtcttactttaaggncctttactttacattttactttaaagggccgtttttaaactttaagcactagtgggattgaaacctaaccttaatatttgactaaaattgcctgtggaattttgggaaactaagttttaanttttaaaaggcaattggttaagtgnaattaacccttaccnaaaatttatcaactttaagg

SEQ ID NO: 4775 - DNA, 638 bp, Homo sapiens
  misc_feature (567)..(567): "n" may be a, t, c, g, other or unknown
  misc_feature (599)..(599): "n" may be a, t, c, g, other or unknown
  misc_feature (631)..(631): "n" may be a, t, c, g, other or unknown
attgcatttaagttgtgccgaaatgagggaaagttttattattttgatgcccaaatatcagtaggtacagtcatatggacctcccaccataattctttatggagatttgttgaagattatttatacttgaggtaacacatacctgagtgctaacctctagtctgcattaaaaaagaatcaatgatcttcataaaaataattgagagccaagcaatattaggtctaaatttatatcctacactgtcactgtttttttttaaacttatactcaaacatacacaacagtaaaggaaattatatgaaaagaattataggaagctagatgaattgtttatctaagttgtcaatgcaaagcaaagtttgttttatctgtatcctgtattattttgtaacaaaccctgaacattttgtttcattcataaatatttcattaggtatctttgaaagataaggattttttaaaaatataactctaatgtcatttatattttcaaatatagctagtcagtgttcagattttcctgttagtctcaaaattctttcttatggtgtgtttattgtaatcanggtccaaataatatctatatattgcaattggntgatatgtcccaagtgttttttgatccatagnttatcca

SEQ ID NO: 4776 - DNA, 681 bp, Homo sapiens
  misc_feature (649)..(649): "n" may be a, t, c, g, other or unknown
  misc_feature (664)..(665): "n" may be a, t, c, g, other or unknown
agcagatctcagctatgtgtctgaccaaaatggaggtgtcccagatccaaatcctcctccacctcagacccaccgaagattaagaaggtctcattcgggaccagctggctcctttaacaagccagccataaggatatccaactgttgtatacacagagcttctcctaactccgatgaagacaaacctgaggttccccccagagttcccatacctcctagaccagtaaagccagattatagaagatggtcagcagaagttacttcgagcacctatagtgatgaagacaggcctcccaaagtaccgccaagagaacctttgtcaccgagtaactcgcgcacaccgagtcccaaaagccttccgtcttacctcaatggggtcatgcccccgacacagagctttgcccctgatcccaagtatgtcagcagcaaagcactgcaaagacagaacagcgaaggatctgccagtaaggttccttgcattctgcccattattgaaaatgggaagaaggttagttcaacacattattacctactacctgaacgaccaccatacctggacaaatatgaaaaattttttagggaagcagaagaaacaagtggaggcgcccaaatccagccattacctgctggactgcggtatatcttcagncacaggaaagccagnntcaaaaacaaaaatgg

SEQ ID NO: 4777 - DNA, 734 bp, Homo sapiens
  misc_feature (683)..(683): "n" may be a, t, c, g, other or unknown
  misc_feature (715)..(715): "n" may be a, t, c, g, other or unknown
  misc_feature (720)..(720): "n" may be a, t, c, g, other or unknown
aaaggcgtgagcgcgcgtgcgtgcgtgtgcgggtgcgtgagcgtgagcgcgcggaggccggaagcgagcgctgcgcagtcgggtggtcgcgggccatggagggtagcttctcggatggcggagcgctgccggaggggctcgcggaagaggccgagccgcagggcgccgcctggagcggggacagtggcactgtttcccagagccacagcagcgcctcggggccgtgggaggacgagggcgcggaggacggcgcgccgggccgcgacctgccgctgcttcgccgcgccgctgcgggctacgccgcctgcctgctgcccggggccggggcgcggcccgaggtcgaggccctggacgcgagcctagaggacctgcttaccagagtggacgagttcgtgggcatgctggacatgcttcgcggcgactcgtcccacgtcgtcagcgagggcgtgccgcgcatccacgcgaaggccgccgagatgcggcgcatctacagcaggatcgaccggctggaggccttcgtgaggatggtggggggccgcgtggccaggatggaggagcagtcaccaaggccgaagccgagctggggcaccttccccagggcgttcaagaagctcctgcacacgatgaacgtgccctcgctctttagcaagtctgctccctcgaaggccacagcaagccggctncgaagcccccgttcctgtttcggaccgaaagnctacnttcccttggttgca

SEQ ID NO: 4778 - DNA, 711 bp, Homo sapiens
  misc_feature (679)..(679): "n" may be a, t, c, g, other or unknown
  misc_feature (681)..(681): "n" may be a, t, c, g, other or unknown
  misc_feature (706)..(706): "n" may be a, t, c, g, other or unknown
tttagtcagtcctatgggtgtttcaagattgatggacttactagcggattccagggaagttatacgtaatgatggcgtcttactactgcaggcactaacaagaagcaatggtgcaatccagaaaattgttgcttttgaaaatgctttcgagagactactggacattatttcagaggaggggaacagtgatggaggtatagtagttgaagattgtttgattttgctccaaaacttattaaaaaacaacaactccaatcaaaatttttttaaagaaggctcatatattcaacgtatgaaaccttggtttgaagttggagatgaaaattctggctggtctgcacagagagtgaccaatctacatctaatgctacagcttgttcgtgtattggtatctcccaccaaccctcctggtgctaccagtagctgccagaaggctatgttccagtgtgggttattgcagcagctttgtactatcctaatggctactggggttcctgctgatatcctgactgagaccataaatactgtatcagaagttattcgaggctgccgagtaaaccaagactactttgcatctgtaaatgcaccttcaaacccaccaagaccggcaattgtagtacttcccaatgtccatggttaatgaaaaggcagccatttgttttgcgcctgtgctgttccncnaatgtttccaagtggttccttgtanaaaaa

SEQ ID NO: 4779 - DNA, 834 bp, Homo sapiens
  misc_feature (788)..(788): "n" may be a, t, c, g, other or unknown
  misc_feature (794)..(794): "n" may be a, t, c, g, other or unknown
  misc_feature (820)..(820): "n" may be a, t, c, g, other or unknown
tataattattttattcataaatggtgatagtccccagatctgtacacctttatcactccctgccgtagatatactttaggttagtatttctacattcgtggcaagcattttggtaacaccagtggttttcattgtgacttttatcactatcactaagaatgcaatttaagttgccttttggcatcatagatcatagaaactttctctctgaatcatacccatgtgtgaattttcattttatatgatagtgtagcatattagaagcatattttaaaacagagcctttgaatttttttcactatcaaaaatagtgcttttgtttagttaaaaattgtagtttttctttttttgtgtgtccaaactaacataaaaggagtggtcaaagaaggaaagaagaaaaatgagggaggatgtccgaaactgtatggcattttactccttctgaaagagaaatactgtacttgaatttttgagctatgcagacttatacctagattgttgtgtttctttgattcttaggagaaaagctttcttcctaataattcctgagaactttatattttgtttgaaaacagtttctatgtacataaaaagggtatttacccatttgtgagcacttaaaacactccacagagtcagacagtgggaaaggtcaccctttttttaatcggcaggtatcaagttagaatgtatggaattgtgaataaaaattatattttattttatgaaaatattttatataataaaatttaaaaggctgggaaagccaaaaaaatagcctccttaancccaanggggtttccccaatttagccctttcnaaaaatttatccgg

SEQ ID NO: 4780 - DNA, 737 bp, Homo sapiens
  misc_feature (553)..(553): "n" may be a, t, c, g, other or unknown
  misc_feature (644)..(644): "n" may be a, t, c, g, other or unknown
  misc_feature (664)..(664): "n" may be a, t, c, g, other or unknown
  misc_feature (723)..(723): "n" may be a, t, c, g, other or unknown
gtaattaatatgtgctactttgggtggtggttttctcttgagagcttctcagttatttctacaacactccctttctctgccccatcccaaccaagagttgatctctcagtatgcgtctttttaacctaggagagcacttagaggatttgctgccgtatctgtcactggtaagggcctgaagacagggcacgaatagtactctgtccttgtgtgtgtgtgtccttggtgcccaacatgagggctggtacagagtcagtccctgctgagtgtttgcgaggccactggaggagtggttcatctttgcaggtgggcaccttcccctccagccagaccatacccctgagggcccaaacataggtggcgcacagtcgctggcactcaatgatggccacagtgagatcacgtatatttgcaatctagcaaacaccaatatgaccccacagaatttactttaaaaactcacaaagtgctcttgtccctggcatactggtaagtgctctcttgtcctaaaaatgcctatggatacacatgggaagttaagcagagaaagcangtagctatcagatgactgtcaacagaggagttcttagaggcctgagagaaccatggggttataaatctcaagggactcctatcaacttcangtatttcagtgcttctttantaaaaaagtaagttccttaaatggataatgacttttggggaaaaccttaactccggtgntagctgaattaaaa

SEQ ID NO: 4781 - DNA, 830 bp, Homo sapiens
  misc_feature (738)..(738): "n" may be a, t, c, g, other or unknown
  misc_feature (740)..(740): "n" may be a, t, c, g, other or unknown
  misc_feature (778)..(778): "n" may be a, t, c, g, other or unknown
cacacagtcgaaaagagcaggcaaaagaatcctcgaagcttatgtatccagccacagacggctcccgatgcgctgccccctgagaaaacacttgaattgacgcaatataaaacaaaatgtgaaaaccaaagtggatttatcctgcagctcaagcagcttcttgcctgtggtaataccaagtttgaggcattgacagttgtgattcagcacctgctgtctgagcgggaggaagcactgaaacaacacaaaaccctatctcaagaacttgttaacctccggggagagctagtcactgcttcaaccacctgtgagaaattagaaaaagccaggaatgagttacaaacagtgtatgaagcattcgtccagcagcaccaggctgaaaaaacagaacgagagaatcggcttaaagagttttacaccagggagtatgaaaagcttcgggacacttacattgaagaagcagagaagtacaaaatgcaattgcaagagcagtttgacaacttaaatgctgcgcatgaaacctctaagttggaaattgaagctagccactcagagaaacttgaattgctaaagaaggcctatgaagcctccctttcagaaattaagaaaggccatgaaatagaaaagaaatcgcttgaaggatttactttctgagaagcaggaatcgctagagaagcaaatcaatgatctgaagagtgaaatgatgctttaaatgaaaaattgaatcaggagaacaananaggaagagcaaggggaaaaagcaaatttgaaaaatccncagattaggtatccagaacaaggagttagaaagcctgaaagctgtgttagag

SEQ ID NO: 4782 - DNA, 634 bp, Homo sapiens
  misc_feature (223)..(223): "n" may be a, t, c, g, other or unknown
  misc_feature (274)..(274): "n" may be a, t, c, g, other or unknown
  misc_feature (436)..(436): "n" may be a, t, c, g, other or unknown
  misc_feature (449)..(449): "n" may be a, t, c, g, other or unknown
  misc_feature (542)..(542): "n" may be a, t, c, g, other or unknown
  misc_feature (584)..(584): "n" may be a, t, c, g, other or unknown
  misc_feature (593)..(593): "n" may be a, t, c, g, other or unknown
agaagattagcatcacagagcgaagctgcgatggagcagcaggcctcccagaagttcctgccgaatcgtcttcgtcacccccggggtccgaggtagcctcccttacacagcctgagaagagcacaggccgagtgcccacccaggagcccacccacagggagcccaccaggcaagcagcctcccaagagtccgaggaggccgggggcaccggcgggcccccggnaggcgtgcgatctatcatgaaacggaaagaggaggttgcagaccccacggnccaccggaggagcctccagttcgtgggggtcaacggcgggtatgagtcgtcatccgaggactccagcacagcagagaacatctcagacaacgacagcacagagaacgaggccccagagccgagggagagggttccgagtgtggccgaagccccccagctcangcctgcagggacngcagcggccatgaccagccggcaggagtgtcagctgtctcgagaatctcagcacatacccactgctgagggggcatcaggatcaaacacggangaggagatcaggattggagctaagccctgacctcatctcaanctgcttggnccttggaaaagtacctggacaatcccaacgccctcacagag

SEQ ID NO: 4783 - DNA, 690 bp, Homo sapiens
  misc_feature (497)..(497): "n" may be a, t, c, g, other or unknown
  misc_feature (652)..(652): "n" may be a, t, c, g, other or unknown
  misc_feature (663)..(663): "n" may be a, t, c, g, other or unknown
  misc_feature (687)..(687): "n" may be a, t, c, g, other or unknown
ttctgcaagtatgcacaaggtgcagacagtgtggagcctatgtttaaacatctgaaaatgacttatgtgggcctacagctaatagtggttatcctgcctggaaagacaccagtatatgcggaggtgaaacgtgttggagatacccttctaggtatggccacacagtgtgtccaggtaaaaaatgtagtgaagacctcacctcaaaccctttccaatctttgcctgaagataaatgcaaaacttggaggaattaacaatgtgcttgtgcctcatcaaaggccctcggtgttccagcagcctgtcatcttcctgggagcggatgtcacacaccccccagcaggggatgggaagaaaccttccattgctgctgtggttggcagtatggatggccaccccagccggtactgtgccaccgttcgggtgcagacttcccggcaggagatctcccaagagctcctctacagtcaagaggtcatccaggacctgactaacatggntcgagagctgctgattcagttctacaaaatccacacgcttcaaacccactcggatcatctattaccggtggagggggtatctgagggacaaaatgaaacaggtagcttgggcagaactaatacaattcgaaaggcatgtattagcttgggaagangattaccgggncaaggaataacttatattgtgggngca

SEQ ID NO: 4784 - DNA, 775 bp, Homo sapiens
  misc_feature (563)..(563): "n" may be a, t, c, g, other or unknown
  misc_feature (623)..(623): "n" may be a, t, c, g, other or unknown
  misc_feature (700)..(700): "n" may be a, t, c, g, other or unknown
  misc_feature (729)..(729): "n" may be a, t, c, g, other or unknown
  misc_feature (752)..(752): "n" may be a, t, c, g, other or unknown
tttcctaagcattgaaatggcaagtgcaaccaaaagtaggtatattcgtgacttcttgtttaggtctctgggccaggaaattcatactgttacatggataaggttgggattggggagagggaacagttgggactagaagcaaaagtgattctgggactaaaataggaagcagatgtcctttcccaatgtgtgttgctgtcttcacctgaatgcatttgtgtaaaaatagcggagggacaatgtgaacatttgtatttggaagctatgaatttactctgaagtttgcagttgtttccaatttgtgagctctaagagtttctgcctgtaagaactactctccttttattttgatttttaaaaacctgtctgaatttcacactcttagagcctggaagagccctgaaaagacacaagtcttgcctggctactgctttttaactttgagggctctatgttgacagactgttatctcctctgggtgacctcaaacatctgaaaagaaagatgttgcctgtgccaattccactttttccagctgccccttgatgaacactcccttatancagaccactctaggacttctgactggtgtcatcaagtcctcagaaaatattttaagttantttaagttattaaggaagggatgatttggagacaaggagtaatgaaagatgggtaaaaactgggaaaagattctggngccaagtactaccccttcaacttcaaggntggtcattaccttcctgcctccngtcatgacacacacacacacaca

SEQ ID NO: 4785 - DNA, 628 bp, Homo sapiens
  misc_feature (544)..(544): "n" may be a, t, c, g, other or unknown
  misc_feature (567)..(567): "n" may be a, t, c, g, other or unknown
  misc_feature (591)..(591): "n" may be a, t, c, g, other or unknown
agtaaaatgtgaatggagcagaggacactaagaggctgagaatggcaggggaaggagagtagggagacgtttgttaaaagtacagagttacagttctagaggagggataagttccattgttctacatcactgtaagatgactatcattaacaataatacagagttttcagtagctaggagactatcgagtgttcccaaaatgaagaaatgataaatgccggagatggtggatatgctaattaccctgatctattcaccacacaccatcactatgtaaaaatgtgactagagaactgatgcttggatttggccagtgagaagttcctggtggccaggcaaggtggctcatgcctgccataccagcactttgggggtctgagattggaggattgcttgaggccaggagtttgaggctgcagcaaactaggactgcactactgcactccagcctggggaacagaacaagacccccatctctacaaaaaataaaaatagctggggatgatggcagatgcctgtggtcccagctacctgggagactgangtgggaggattgcttgaacccangtgttggaggctgcagtgagtcanggactgcaccactgcactccaacctgggtgacagagt

SEQ ID NO: 4786 - DNA, 649 bp, Homo sapiens
  misc_feature (597)..(597): "n" may be a, t, c, g, other or unknown
  misc_feature (639)..(639): "n" may be a, t, c, g, other or unknown
  misc_feature (647)..(647): "n" may be a, t, c, g, other or unknown
aaagcactagccacttacagcaaagactttatttttgtacagaagatggtgaagtccaagacggtggctcagtgcgtggagtactactacacgtggaaaaagatcatgcggctggggcggaaacaccggacacgcttggcagaaatcatcgacgattgtgtgacaagtgaagaagaagaagagttagaggaggaggaggaggaggacccggaagaagataggaaatccacaaaagaagaagagagtgaggtgccgaagtccccggagccaccacccgtccccgtcctggctcccacggaggggccgcccctgcaggccctgggccagccctcaggctccttcatctgtgaaatgcccaactgtggggctgtgttcagctcccgacaggcactgaatggccatgcccgcatccacgggggcaccaaccaggtgaccaaggcccgaggtgccatcccctctgggaagcagaagcctggtggcacccagagtgggtactgttcggtaaagagctcaccctctcacagcaccaccagcggcgagacagaccccaccaccatcttcccctgcaaggagtgtggcaaagtcttcttcaagatnaaaagccgaaatgcacacattaaaactcacaggcagcaaggngggaacanca

SEQ ID NO: 4787 - DNA, 649 bp, Homo sapiens
  misc_feature (544)..(544): "n" may be a, t, c, g, other or unknown
  misc_feature (615)..(615): "n" may be a, t, c, g, other or unknown
  misc_feature (639)..(639): "n" may be a, t, c, g, other or unknown
  misc_feature (645)..(645): "n" may be a, t, c, g, other or unknown
tcagatccgccgagtatgaagcgctcggcttttcttttgtgtgaggagcacccacgacgccccgaccatgggcgcaggggcagaggcgaaggtcgtcgctccgtccgctaccccgtcccccagccgcaagcgccgaggagccggaagagaggcggaaagggcagcaggctccttacccagaccagcgaggggaggtcagctcgtcgcggggtgtggctcccgtccggggactcccgagctcattacgggtggccgtgtgtagccaagttcaagctctccctccgggaatgcctgccgcggcggcggaatacggcttcttcaggacattcagcaaagcggggaggcggggacctgcgggcggaggagcgacgccccagctgggaacgcggcggacgggcgagcggggggtgcgccctgggcgcgccaggccgcagaggctccggggaaagttctcttggccgcgcgagtggtggcgccccgggcgggagcagcccaggtgcatgtgggcccggtccaggcgtctgcaaaaagccctggaacgaancggaccccccagtccagcgctggccgcggcaggggagccccttctgggcggggtatcagctgggggcggangggcgggggcaaaagaccgttggncccaancggc

SEQ ID NO: 4788 - DNA, 778 bp, Homo sapiens
  misc_feature (554)..(554): "n" may be a, t, c, g, other or unknown
  misc_feature (616)..(616): "n" may be a, t, c, g, other or unknown
  misc_feature (667)..(667): "n" may be a, t, c, g, other or unknown
  misc_feature (734)..(734): "n" may be a, t, c, g, other or unknown
  misc_feature (746)..(746): "n" may be a, t, c, g, other or unknown
  misc_feature (767)..(767): "n" may be a, t, c, g, other or unknown
gttttaccttacggtcgctgggaatctaagcaacaaagactagaagcctccgatatgccattatcaacacacaagagacaaacagcccgaggaagcactcaatgatgagagcagtagacctgccctggcagatgagagaggagaaactctccacaatgaaggaaaagcactgacagtatttgatagctttagtcaaactgtgcttgagtttggcttagatttatgccagtggaacctgtccttaccaaattcagagatgacccaagattctactctgtggtatgagggaaagacctctcgatatttatctcacaccaacggctttatcgtaggagcgtcttcgcctcccccgtttccagtagaaaagacagctttgctcctttgaaagcgcagaccgccgcacctccagccccttctccccggggaagtaggccccgctaagaatgtgggaaggtggtggggcggcgactgaagtcgcttccgattggcgttgtcccaaggaagcctgcgcggattgatcggcggcaggcctccaatagagcctgctaggcggnttggctgctacgcggctgggccctgtttccggtacctaggcgggcagccatggtgaccggcnagcggcatgcgacgcccgcctctgtggcctgtggaggcccgcttggcggcnctgcttcccgacctactggtctttcggaagcctcggggatgggaaccccgagctcgccacggccaanggggtcctcccnaggcgtccatgttaccggttnagggcgaacgg

SEQ ID NO: 4789 - DNA, 627 bp, Homo sapiens
  misc_feature (529)..(529): "n" may be a, t, c, g, other or unknown
  misc_feature (597)..(597): "n" may be a, t, c, g, other or unknown
  misc_feature (621)..(621): "n" may be a, t, c, g, other or unknown
attcagtggctggcaggaagcccgccctgcccgcccgccagtgtcagtggtgttggcatcagcttgggcaggtgtgcgggctcaggatggggcggccgtggtgaggaaccctggactctcagagatggaatttcaccgtgttgcctaggctggtctggagctcttgatctcaagcgatcctccctgcctcggcctcccaacgtgctgggattataggcgtgagccaccgctcctggccagggtctgttcctagttgcaacagttcttggaaacccactcgagagggccacgcctccattcaccaggccacgcatcacaagaggcaacaccaggagccaacatgagctcggggactgaactgctgtggcccggagcagcgctgctggtgctgttgggggtggcagccagtctgtgtgtgcgctgctcacgcccaggtgcaaagaggtcagagaaaatctaccagcagagaagtctgcgtgaagaccaacagagctttacggggtcccggacctactccttggtcgggcangcatggccaggacccctggcggacatggcacccacaaggaaggacaagctgttgcaattctaccccancctggaggattcaacatcttccangtacca

SEQ ID NO: 4790 - DNA, 748 bp, Homo sapiens
  misc_feature (602)..(602): "n" may be a, t, c, g, other or unknown
  misc_feature (650)..(650): "n" may be a, t, c, g, other or unknown
  misc_feature (659)..(659): "n" may be a, t, c, g, other or unknown
  misc_feature (718)..(718): "n" may be a, t, c, g, other or unknown
gcacagtgagcggagcgcctgggcggcggcggcggcggcgtgatggctccggccgcggaccgagagggctactggggccccacgacctccacgctggactggtgcgaggagaactactccgtgacctggtacatcgccgagttctggaatacagtgagtaacctgatcatgattatacctccaatgttcggtgcaattcagagtgttagagacggtctggaaaaacggtacattgcttcttatttagcactcacagatggagtctcactctgtcgccgaggctgaagtgcagtggcacaatctcggctcactgcaacctccatttcccgggtttacgcgatccttctgcctcagcctcccaagtagctgggactacagtggtaggaatgggatcctggtgcttccacatgactctgaaatatgaaatgcagctattggatgaactcccaatgatatacagctgttgcatatttgtgtactgcatgtttgaatgtttcaagatcaagaactcagtaaactaccatctgctttttaccttagttctattcagtttaatagtaaccacagtttaccttaaggtaaaagagccaatattccatcangagtctcactctgtcaccccggctgaagtgcaatggcacaatctcggntcaattggnacctccaactcccaagtcatgtatggaatgttggtctttacattaagaacttcgattcnatttatattgttacatgggtttatccatgg

SEQ ID NO: 4791 - DNA, 659 bp, Homo sapiens
  misc_feature (528)..(528): "n" may be a, t, c, g, other or unknown
  misc_feature (564)..(564): "n" may be a, t, c, g, other or unknown
  misc_feature (620)..(620): "n" may be a, t, c, g, other or unknown
  misc_feature (649)..(649): "n" may be a, t, c, g, other or unknown
ttttttgcactcctgcgccgggcctccccgctggcgcatcgccacctgcggcggcagcgcattgaccctgtgctctacatgacggagtggttcatgtgcatcttcgcccgcaccctgccctgggcgtcggtgctgcgtgtctgggacatgtttttctgtgaaggcgttaagatcatcttccgggtggccctggtcctgctgcgccacacgctgggctcagtggagaagctgcgctcctgccaaggcatgtatgagaccatggagcagctgcgtaacctgccccagcagtgcatgcaggaagacttcctggtgcatgaggtgaccaatctgccggtgacagaagcactgattgagcgggagaatgcagcccagctcaagaagtggcgggaaacgcggggggagctgcagtatcggccctcacggcgactgcatgggtcccgggccatccacgaggagcgccggcggcaacagccacccctgggcccctcctccagcctcctcaagcctccctgggcctcaagagccgangctcccgggcagctggaggggccccgtccccgccgncccccgtccgcagagccagtgctgggcctgccccaaggcctgtggtcactgctganggactgcatccatcccttccctcaaccantggcaatagc

SEQ ID NO: 4792 - DNA, 583 bp, Homo sapiens
  misc_feature (343)..(343): "n" may be a, t, c, g, other or unknown
  misc_feature (386)..(386): "n" may be a, t, c, g, other or unknown
  misc_feature (495)..(495): "n" may be a, t, c, g, other or unknown
  misc_feature (545)..(545): "n" may be a, t, c, g, other or unknown
  misc_feature (576)..(576): "n" may be a, t, c, g, other or unknown
aggttggtctggaccggaagcgaagatggcgacttctggcgcggcctcggcggagctggtgatcggctggtgcatattcggcctcttactactggctattttggcattctgctggatatatgttcgtaaataccaaagtcggcgggaaagtgaagttgtctccaccataacagcaattttttctctagcaattgcacttatcacatcagcacttctaccagtggatatatttttggtttcttacatgaaaaatcaaaatggtacatttaaggactgggctaatgctaatgtcagcagacagattgaggacactgtattatacggttactatactttatattcngttatattgttctgtgtgttcttctggatcccttttgtctacntctattatgaagaaaaggatgatgatgatactaagtaaatgtactcaaattaaaacggcactcaagtatactttgggatttgttgtgatttgtgcactgcttcctttanttggtgcctttgttccattgaatgttcccaataacaaaaattctacagantgggaaaaagtgaagtccctatttgaagaanttgggaa

SEQ ID NO: 4793 - DNA, 789 bp, Homo sapiens
  misc_feature (758)..(758): "n" may be a, t, c, g, other or unknown
  misc_feature (776)..(776): "n" may be a, t, c, g, other or unknown
  misc_feature (782)..(782): "n" may be a, t, c, g, other or unknown
agctataaaggacattcttgggacaattgacgtttagatatggattgtggggttcgatcatagtatcatatcaatgcaaattgtcctagctctgataagcatatgtgtttatgtaagagagtgtccttgtttttagggaacaaacactgaaatatacaatagtagagaggcatcatgtctccaccatactctcagatggttcaggagaaatatgcgtgtgtctccgtacatattaatatagagagaatggtacagccagtgggacaagttgtaagcaattggtgaatctaggtaaagggtatatgggaaattgcatcaaaattaaaagttatgaaaatgggggagaaaacccagttcttctataaaaacagcctccagcctctccctccagcacaacctgtccccacacgtggggcacccggcacccatgctctggctcttgtctctctgggtcttagtcccacttagcaccccacacccaaaggtcatgttttcacagatgtgtaccctcaagactaaacacacacttgaggcattcatgtgactatacatatttatggaaaaagaaaattcttgggctcacaaaactgaacgctccagggtggactgtctcaagtggccttaatcggggtgctgacaacatccagacgagcacgcaggcttctctccctgccacagcggtgccattctccaacggactctgccgccgtggctgcaagatggtggcaacagctccaacccctgcacccttttgtggncaagtccaatggggaaanaatgtnaagggcc

SEQ ID NO: 4794 - DNA, 812 bp, Homo sapiens
  misc_feature (675)..(675): "n" may be a, t, c, g, other or unknown
  misc_feature (719)..(719): "n" may be a, t, c, g, other or unknown
  misc_feature (739)..(739): "n" may be a, t, c, g, other or unknown
  misc_feature (787)..(787): "n" may be a, t, c, g, other or unknown
gaaaaaagatcctcaaggtcttgggcttcatttctataaacatggagaaccagaagaagacatagttggacttcaggccttccaagaaagattaaacagttacaaatgcattacagacacacttcaagaactggtaaatcaaagtaaggccgctcctcagtctcccagtgtacccaaaaaacctggtcctccagtgttgtcatctgatccaaatatgctgagtaatgaagaagcaggacatcattttgaacaaatgcttaaattgtcacagcgatccaaggatgagctctttagtattgccctttataattggctaatacaagtcgaccttgcagataagctgctacaggttgcttctccatttctggagccacatctagtccgaatggccaaagttgatcaaaacagagttcgttatatggatttactctggcggtattacgagaagaacagaagtttcagtaatgctgctcgtgtactgtccagactggctgacatgcatagcacagaaatttcacttcagcagcgactagagtacattgctcgagccattcttagtgccaaaagttccactgccatttcatcaatagctgccgatggtgaatttcttcatgaattagaagaaaaaatggaggttgctaggatccaacttcagatacaggagacactacaaanggcagtattcccatcattcctccggtcaggatgcagtttctcanctggattctgagctgatggncataactaagctttatgggggaatttgctgacccatttaaacttgcanagtgcaaacttgcaataattcaatg

SEQ ID NO: 4795 - DNA, 695 bp, Homo sapiens
  misc_feature (597)..(597): "n" may be a, t, c, g, other or unknown
  misc_feature (681)..(681): "n" may be a, t, c, g, other or unknown
  misc_feature (691)..(691): "n" may be a, t, c, g, other or unknown
ttcttcagttcatgggattttatttcaggagaattcaaacattcacgtattggagaagatgacacatttcttgaatgtctttggctttgagctgaatgcactaactagaagggacttcagattgtcctccttcgggggaggtaagtatattcttcatatacaggtaagagtgaaatgatagaagaatgttcctcctctccttttcttcctggacaacagatcaaatatttctcagatcttttacagctgaattggagtcacatggacaggtatgatcttaaaatataaaaaattattttaaaattacatgctaaaattttataaaaataaatgctaaaactaacttaaacggaagcatttgattaaaaaatttatccaaaaaagtttgaattttatatgaaacaggatagaagatgaaaaagctaaagaaataaaatataaataaattatggctggggacagtggctcacacctgtaatcccagcactttgggaggctgaggtgggaggactgattgaggctaggagtttgagacctgttatttgaggcacatgggaaggggaagttttctttgagatattccacattttataatantcctcaagagatttacagagttccttgagtgaattgttgggttgttcctaatactgaatttcctaatccaaatttaattagaangttcaattcntaca

SEQ ID NO: 4796 - DNA, 769 bp, Homo sapiens
  misc_feature (11)..(11): "n" may be a, t, c, g, other or unknown
  misc_feature (752)..(752): "n" may be a, t, c, g, other or unknown
  misc_feature (755)..(755): "n" may be a, t, c, g, other or unknown
  misc_feature (764)..(764): "n" may be a, t, c, g, other or unknown
ctaacatttgngatcagagatcccctcactaaaacagcctgagagcctggctccttccaggacgagtgccccaacctgttctctagctgctggaaaagacccctctgtttcttaaaagcctgttaagttccttcaggctagtagctacaccttgttgcatacttccttggaaatagagagtgctttcaaattaatttctcacttattgctattagtggtcccaagaaaaagagatgaaattgcagcatcttgtaatggtgagttttttaggtctaggagagaggtactgtcatctttgtttacttgctgagagacgacagaaatgtgtagttgtggggtatgaaggtaaagtcagtgattatagctaaaaagcaaacgtcatttaaggtcactggtatttttggatgttggaatgcaggttttgttttacatagaaattttccctctaattattttaccatcttatgttctggaaaatgattccatgttgctttaaattcatctttcagtgaagttcttatttcttaccaaaaaatgacagctttgtcatttcttacatcgttttttcctttctgttgccaaatgccctccagactttccatgttggtgcggtaagctagacatttttagtttgtagtgattgttttcgtttgtgtttgtatgtttttgtgcccaaagtcacttctgtaatgttcgtttccgagtttcctttgggggggaataacctgccactgaagtgtcagcttccctgncangggactgtncttgg

SEQ ID NO: 4797 - DNA, 842 bp, Homo sapiens
  misc_feature (489)..(489): "n" may be a, t, c, g, other or unknown
  misc_feature (760)..(760): "n" may be a, t, c, g, other or unknown
  misc_feature (796)..(796): "n" may be a, t, c, g, other or unknown
  misc_feature (824)..(824): "n" may be a, t, c, g, other or unknown
agtaaatgaagaggaaaatgctaacatgccatattggacaccacttgtctttcgatgccaggtcccttttcagccgaatatgtcagaattttctaggctccatcttttcttttattcctcttgcagcaaccataggctttgatggcttctcacaggacagaaaacctggatcatcccaaacctgctctgtgaaccctctacttcatgtatgggtttcctcccatgctgcacactgtgagggtcatgcatcaccacagcatgcacagctgagaaatgtggagagtgaaggacccaggccacattgactgtggggatgtaagccagtggagacacacttcctgaagtaagatgcatttcacaaagctcccagtttccaagaaggatggagcaccagtcacccttggtcatggccaaaccctctttgtccttgccctttcctgctctctgggatcacagaacatgtgcactggacacagcttctgccttggnaacacccagactaaggtaatttctcacacaccagtttatcttccagcttctgtcaagaactttaggtcaagtattatgagccagatagagtaaaaaatataaactttaaaaattataatcaccctcaacatggcaaggcttctcatggtaagaaaagaaatgcaagaattcagaaactaacccagggaatagcaggctcaagatttcctggcaaataaattcacttaatagatcacagatattttcccatctcaacacatgctgtgcacangtatatttcaaacctaatcaaccgtggggaatttcncaattttcaatagttacaaacaaagctnacaataagttcaaggtgt

SEQ ID NO: 4798 - DNA, 736 bp, Homo sapiens
  misc_feature (513)..(513): "n" may be a, t, c, g, other or unknown
  misc_feature (581)..(581): "n" may be a, t, c, g, other or unknown
  misc_feature (721)..(721): "n" may be a, t, c, g, other or unknown
  misc_feature (727)..(727): "n" may be a, t, c, g, other or unknown
  misc_feature (730)..(730): "n" may be a, t, c, g, other or unknown
atcggctgtcagcctccctggctgttagtaccttctttcccggagtcctggtccacgagttggatttactgctgtcgcgggtgggcctcacgccattccctgtccctcggccccctgagtgagtccggtctcccggcgaaagtgagcgaggtttgcccggagcgcgcacgaggggaaaatgcctaaaaaaaagactggtgcgaggaagaaggctgagaaccgccgagaacgtgaaaaacaactaagagcatcaagaagcactatagatttagctaaacatccatgtaatgcctcaatggaatgtgacaagtgtcagaggcggcagaagaatagagcattttgctacttttgtaattctgtacagaagttaccaatttgtgcacagtgtgggaaaacaaagtgcatgatgaagtcttcagactgtgtcataaagcatgctggtgtatacagtactggccttgcaatggtgggtgcaatatgtgacttctgtgaagcttgggtttgccatggtangaaatgtctcagtacacatgcttgtgcctgccctcttaccgatgctgagtgtgttgaatgtgaacgangcgtgtgggaccatggaggcagaatattcaagttgttctttttgccataactttctctgtgaagatgatcaatttgagcatcaaagccagctgccaagttttagaggcagaaacatttaaatgtgtttcatgcaatcggntttggncancactca

SEQ ID NO: 4799 - DNA, 713 bp, Homo sapiens
  misc_feature (501)..(501): "n" may be a, t, c, g, other or unknown
  misc_feature (659)..(659): "n" may be a, t, c, g, other or unknown
  misc_feature (682)..(682): "n" may be a, t, c, g, other or unknown
  misc_feature (707)..(707): "n" may be a, t, c, g, other or unknown
atctgcaagggggaaacaggattttggcaagcaatcctttcattactaaagcttcctttcttttcgggtacagtgaaaagagccaaggctgtgtgaccccctcatcacttagccaggcgtatggtcctggtttctgaggctgccagaaagcatcttagcaatttgtgtttggaaggtccatgcctgactattctaggctggaggttcctaaagagtaacaagaggaagagaaacaagaatctctgacacttgttgagaatagagcacagtcccatttgtttgaaaagagacaccaggcagccatgtttatgtgccagaaatgcattccacctcaaggaggacttaatttatggacccgtgtgtgccaggctgagctgggcaagatctttctcaggacaaactctgccatgcagctaaaagcctggaaactaaaggatttcatgtagtaaactatcttccaacccctgtaggcatcaagaccacaggatgaggtttcagaangtcataaggcagaatagttaagcctacagggcttacagtctgacagacctgggttcagttcttgggtcctcatcactagttttgtgacttcgggaagatgactcccggagcctcagtgagcctcaattacttcatatgtaaatgaagtaatactatcnacttcacaaaggtgttgaaaggnttaaatggagaatgggtggtaaaanccttaa

SEQ ID NO: 4800 - DNA, 738 bp, Homo sapiens
  misc_feature (626)..(626): "n" may be a, t, c, g, other or unknown
  misc_feature (657)..(657): "n" may be a, t, c, g, other or unknown
  misc_feature (696)..(696): "n" may be a, t, c, g, other or unknown
  misc_feature (729)..(729): "n" may be a, t, c, g, other or unknown
tgctttgctgtctcagtcaggtttctgtttttctgtcctccttgcctttcttcccgttttgcttcctgttttccttcttccttcccgttttccttcttccttccctgcctcccttcctttgactgtggatggaagaaagtgtgcagtttttagggattttacttaggttcgtctttagttttcctcagtaagatagttgttttttgatacctgagtttgggattaattcatatcaaattcaggtatttgtatattactcttgatttttgtctgaaattcactttgctatgacagcctagtagttgggtcttcactccttaagtatatgtttttcccatggtgaaaatacatgaactttagttctagtagtgagcattcaaaggtccgtgatagggcttgtcacagagagagagaaatcatttatccctattgtgctggttatcataagaagagactgcctcaccactttatagaaccaatttgcaaactaaaacactgtttggagaaggtacaaactacctttcaaaaaggctacaggaaacattttatgaagcagcaaatattaggaagagagcggatacagaatttagtgcctttgagaagaatataattaaagtggaattaanagggggttagaaaaaaggcaatttagaaaantattcctggaaaactttaatgttccaaaaggtgaaacangaagattagacaaattccctaacccttaagtantttttttaa

SEQ ID NO: 4801 - DNA, 700 bp, Homo sapiens
  misc_feature (649)..(649): "n" may be a, t, c, g, other or unknown
  misc_feature (668)..(668): "n" may be a, t, c, g, other or unknown
  misc_feature (691)..(691): "n" may be a, t, c, g, other or unknown
aggaataaaaccacagaagaaaatggagagaaggggactgaaatattcagagcttctgcagtgattcccagcaaggacaaagccgcctttttcctgagttatgaggagcttctgcagaggcgcctgggcaagtacgagcacagcatcagcgtgcggccccagcagctgtccgggaggctgagcgtggacgtgaatatcctggagagcgcgggcatcgcatccctggaggtgctgccgcttcacaacagcaggcagaggggcagtgggcgcggggaagatgattctgggcctcccccatctactgtcattaaccaaaatgaaacatttgccaacataatttttaaacctactgtagtacaacaagccaggattgcccagaatggaattttgggagactttatcattagatatgacgtcaatagagaacagagcattggggacatccaggttctaaatggctattttgtgcactactttgctcctaaagaccttcctcctttacccaagaatgtggtattcgtgcttgacagcagtgcttctatggtgggaaccaaactccggcaagaccaaggatgccctcttcacaattctccatgaccctccgaccccaaggaccgtttcagtatcattgggttttccaaaccggatnaaagtatgggaaggccacntgatatcagtcactccagacagnatcagggat

SEQ ID NO: 4802 - DNA, 722 bp, Homo sapiens
  misc_feature (677)..(677): "n" may be a, t, c, g, other or unknown
  misc_feature (696)..(696): "n" may be a, t, c, g, other or unknown
  misc_feature (711)..(711): "n" may be a, t, c, g, other or unknown
gggcgcccaattccggaaggtgctgcacagctgtggcggcgggtactgcgttagtgattagagtttcttccctgccggaggtgggatacacggtagcatcatggtcgaggaggtacagaaacattctgtacacacccttgtgttcaggtcgttgaagaggacccatgacatgtttgtagctgataatggaaaacctgtgcctttagatgaagagagtcacaaacgaaaaatggcaatcaagcttcgtaatgagtatggtcctgtgttgcatatgcctacttcaaaagaaaatcttaaagagaagggtcctcagaatgcaacggattcatatgttcataaacagtaccctgccaatcaaggacaagaagttgaatactttgtggcaggtacacatccatacccaccaggacctggggttgctttgacagcagatactaagatccagagaatgccaagtgaatcagctgcacagtccttagcggtggcattacctttgcagaccaaggctgatgcaaatcgtactgcccctagtggaagtgaataccgacatcctggggcttctgaccgtccacagcctacagcgatgaattcaattgtcatggagactggcaataccaagaactctgcactgatggctaaaaaagcccctacaatgccaaaaccccagtggcacccancgtggaaactctacagggntatcagtgggcatcntggctgggttc

SEQ ID NO: 4803 - DNA, 690 bp, Homo sapiens
  misc_feature (500)..(500): "n" may be a, t, c, g, other or unknown
  misc_feature (561)..(561): "n" may be a, t, c, g, other or unknown
  misc_feature (610)..(610): "n" may be a, t, c, g, other or unknown
  misc_feature (624)..(624): "n" may be a, t, c, g, other or unknown
  misc_feature (688)..(688): "n" may be a, t, c, g, other or unknown
tgcttgaacccaggaggcagaagttgcagtgagccacctgtgaagagagagcgagcattctgctgggtgtataagtggattgtgtgcaatggtgcttcagtctagatattcatgccttaatcttactgtgttcgtctctccctttttcaggggaagcctgagctttgcttagtgatgatggccctagtgtgaggactggggcttgtggagtagcctcttgtttgctctagccaccccactgcctctgtcctctgcagttactaggaccttccctagcaagtttgcgtcctttccaccacaggcatgacctgcctctctctgctctcttccagcccgtcctctctctgcctagtccttttcagacacttgcttcttggcacctttgacttttctcactgccgggctgcccctactaaggatgattgccctgttttcgtagctctaagaagcagccaaaatccactccacctccctcccaccctccgtcactccaaacaagnctggttttgttccagtcaggaaaagggttctttcttcctcatatttttttgaacaaaatantttgcatacggaagcccggagctcctgcaaaagtgattttggacctaantatttaagattatnaggtttaccccaacttgcaagtttttttcaagccaagagatacaatcttaatgaagggtggctnga

SEQ ID NO: 4804 - DNA, 494 bp, Homo sapiens
  misc_feature (378)..(378): "n" may be a, t, c, g, other or unknown
  misc_feature (442)..(442): "n" may be a, t, c, g, other or unknown
  misc_feature (451)..(451): "n" may be a, t, c, g, other or unknown
  misc_feature (483)..(483): "n" may be a, t, c, g, other or unknown
aagtagcggcggcgcttcaagatgcgctgcctgaccacgcctatgctgctgcgggccctggcccaggctgcacgtgcaggacctcctggtggccggagcctccacagcagtgcagtggcagccacctacagtgagtacctgggtggcctctggcctcaggtgttcctgactggtcctgctggagtaggggaagagacctgagttccagtcctggctttgtcaggggcgttcttctctgggcctgtttccacttttaaaatgattatggtgatggagactgactctgattcacaggggcagggtccatcattgccgaggttagcatgtgtgatctcagagctccctgggtgtgatggggagggggttgccaagtgtganccatgggtacctgtgcctattgccagtccctggtgaaggcaaaggctcaagccccccacctatnccccttgantcctctttcaagccctgttgggcagggaagtncgtctgggctc

SEQ ID NO: 4805 - DNA, 570 bp, Homo sapiens
  misc_feature (498)..(498): "n" may be a, t, c, g, other or unknown
  misc_feature (552)..(552): "n" may be a, t, c, g, other or unknown
  misc_feature (555)..(555): "n" may be a, t, c, g, other or unknown
tgcagaagactttcagtcgtttttgctggaatgattgagcttacattttttattctttccgcattcaaacttagagacactcacctctggtattttgtaatacctggcttttccatttttggaattttctggatgatttgtcatattatttttcttttaactctttggggattccataccaaattaaatgactgccataaagtatattttactcccaggacagattacaatagccttgatagaatcatggcatccaaagggatgcgccatttttgcttgatttcagagcagttggtgttctttagtcttcttgcaacagcgattttgggagcagtttcctggcagccaacaaatggaattttcttgagcatgtttctaatcgttttgccattggaatccatggctcatgggctcttccatgaattgggtaactgtttaggaggaacatctgttggatatgctattgtgattcccaccaacttctgcagtcctgatggncagccaacactgcttcccccagaacatgtacaaggagttaaaatttgaggtccnacnggcatgctcaaatgg

SEQ ID NO: 4806 - DNA, 543 bp, Homo sapiens
  misc_feature (517)..(517): "n" may be a, t, c, g, other or unknown
  misc_feature (527)..(527): "n" may be a, t, c, g, other or unknown
  misc_feature (540)..(540): "n" may be a, t, c, g, other or unknown
tgaacttggacaatgaaactgtagcaatacattccttaaattcaagcattaaagaccctttacaatttgttttttcagatgaagagacttccagtgatgtgaaaagtagttgcagctccaaacctaacttggatactatgtgtaaaggcttccagagtcctgataaatctaataactctacagggacagcaattacattaaattcaaaactgatttgtttaggcactccttgtgtcatttcaggttccatttctagtaatacagatgttagtgaagatagaactatgaaaaaaaatagtgatgtattaaatctcacacagatgtattcagaaatccctacagttgaaagtgaaactcatctgggtacaagtgatcctttttcagccagtactgatatagtaaagcaagggcttgtggaaaattattttgggtctcaaagcagtacgggtatttctgacacatgtgctgttagctacagcaatgcacttagccctcagaaggaaacttctgaaaaagngattagtaancttcagcaggaanagg

SEQ ID NO: 4807 - DNA, 637 bp, Homo sapiens
  misc_feature (492)..(492): "n" may be a, t, c, g, other or unknown
  misc_feature (522)..(522): "n" may be a, t, c, g, other or unknown
  misc_feature (600)..(600): "n" may be a, t, c, g, other or unknown
  misc_feature (613)..(613): "n" may be a, t, c, g, other or unknown
  misc_feature (629)..(629): "n" may be a, t, c, g, other or unknown
gatgttataaagccatagtaatcaaaactgtggtattggagaaaggatacatagatcatcagaacagagcagagcagagcatccataaatatgcacacataaatatagtctaccaaaatttacaatagtgcaaaggtaattcatttgagaaagtagtcttttcaacaaatggtgatgaaacacttggatatccatatgcataaaatgaaacttgatacacattttatgtctcatacacaaataagtcatgaacctaaatgtaaaacataaaactatacaacttctagagcaatggtctcaagtggtagtaacttttgtctccaagaaacaaagtatagagacatttttgactgtcagtacttggggggaggagatcactggcatctaatgggtgcagaccagggatgtcactaaatatcccacaatgcacagcacagtcaccatcacacacacgaaaatgccaatttctagtctggataaatataccatggntatgtaactatctcttattagaggaacagnaacttggtaaagagtgtatgggaatgctttttactccctttgcaactcttcagggcaatagactatacttcaaagtcnaacatttaataanttcccaatccaattcngggaaagg

SEQ ID NO: 4808 - DNA, 657 bp, Homo sapiens
  misc_feature (511)..(511): "n" may be a, t, c, g, other or unknown
  misc_feature (607)..(607): "n" may be a, t, c, g, other or unknown
  misc_feature (613)..(613): "n" may be a, t, c, g, other or unknown
  misc_feature (628)..(628): "n" may be a, t, c, g, other or unknown
atattgtctactgaaagctgccgctgaagctgccgccgttgcctccgccgccaagagtgagcgagcggacccgcgatggagaccatggcgagcccagggaaagacaattatcgaatgaagagctataagaacaatgctctaaaccctgaagaaatgagacgaagaagagaggaagagggcattcagctccggaagcagaagcgagagcaacaactttttaaacggagaaatgtggagctgattaatgaagaagctgccatgttcgatagtcttctcatggactcttatgtgagctctaccactggggagagtgtgatcacaagagagatggtggagatgctcttttctgatgattctgacctgcagttagcaaccacacagaaattccggaaactgctctccaaagagcctagtcctccaatagatgaagttatcaacactccaagagtggtggatcggttcgtggagtttctgaagaggaatgagaattgtacattacagtttggaaaangcccctgccctggggctctaaacgaaatattgcctcctgggaacctctcagcggggaccaaaaattgtcattgaagcaggggctgtccccattttnatagangggcagaagtcaganttgggagggatgttcaggaggaggcagtc

SEQ ID NO: 4809 - DNA, 635 bp, Homo sapiens
  misc_feature (474)..(474): "n" may be a, t, c, g, other or unknown
  misc_feature (567)..(567): "n" may be a, t, c, g, other or unknown
  misc_feature (598)..(598): "n" may be a, t, c, g, other or unknown
  misc_feature (616)..(616): "n" may be a, t, c, g, other or unknown
ctaaagaaataatagctgaaaacgtcccaaatctgggaagtgatatcaatattcatgtacaagaagttgtatgcaggttcttttcactttgagaaacagaaggtgaaactcaaactggcttaagtaattttaaaaaaatgtattggttcaagtgacttaaaaaccacactggttccaggagcaggttgatagtacctcaaagatgtcaccatctcttggatgtgctttccctgttcattcctaagcttcatgcagtttcagggtggtgaccagaagtttacatcttatcttccctctcccctgtgtttgactggaacagaaaaaagagtgtcttattccctagcactttggacaaaagctctggacatgatggccatttgtgacagggaagtagaataccattatttgaccagtctgggacatctgaattcagggctagagaacacagacaggggctaatggggtgcggggtanggggaaggaaaccccaaaataggaaagctaaggaaattttgggcctggttaacctgggaaaaggggggaaaattgtttgcaaccttttcaagncaaaaggaatggaaaattccaagtttaattnccaaaattttccaaggcnttcccccaacaattaatgg

SEQ ID NO: 4810 - DNA, 657 bp, Homo sapiens
  misc_feature (582)..(582): "n" may be a, t, c, g, other or unknown
  misc_feature (617)..(617): "n" may be a, t, c, g, other or unknown
  misc_feature (621)..(621): "n" may be a, t, c, g, other or unknown
gctttttttctttcattacatgaagagtcaagaccagtggttttgtggaatgcatgataatctgggttcttaaaaatcatttcttcttgattagatttcccattgtcttgaattgactcagtcagcctttcctcaccgctactccaggttcactaatgatctccctgttgcccaaccaatggttatttgttagttcacatttcagttaccctctcagaagcctttggcacagctaatcacttctttcttgaagcactttcgtccctcagcttctgggatatactttctcttctccatctgctccttctcagtctcctttgttgcttccccttcatcatacagacctcagtaaattttcccctgggcaccgctttagctgcatcctaggaattttgatgtgtggtgtttttgtttttctcatactggggcttttttgattccctgattggtaacccttggagcaagcactcctgtggccatggagactctagataggatcaaggttaaccaagaaggggcttgcctggcaagtcatttttaaagggggaaatctctgccaaaaattaggtgggctaaaggaanctgggtttaaaaagaattgcacaaaaaatctcaangtanggtggcaataatggggggaaacttttttttttaaaa

SEQ ID NO: 4811 - DNA, 741 bp, Homo sapiens
  misc_feature (356)..(356): "n" may be a, t, c, g, other or unknown
  misc_feature (624)..(624): "n" may be a, t, c, g, other or unknown
  misc_feature (661)..(661): "n" may be a, t, c, g, other or unknown
  misc_feature (701)..(701): "n" may be a, t, c, g, other or unknown
  misc_feature (730)..(730): "n" may be a, t, c, g, other or unknown
ggactctatggttcggcggctctaagcgctcagctccgcggtcgtcctccaggtctgtgccgcctccttccggtctcggtggcgcggcacgcgcggctctctaggcctccttcagctctgtggtgacggtggccgaggtggagggccggtctgaagagtggcgggactggcttcacttcctccgcggttcctcggagccgcctcgctcctcttcagggactttgctgagaagggctctcgggcgtccagaccccaccgcaaaggtgtttggcgatccgccgagaagttgttggccccaggagcgtccctcggggccgaatgcgcagtggacgatgccccttctgacccaacagatncaagacgaggatgatcagtacaagccttgtggccagccttgacaacgttaggaatctctccactatcttgaaagctattcatttccgagaacatgccacgtgtttcgcaactaaaaatggtatcaaagtaacagtggaaaatgcaaaaggttgggtttgttgcaaaagcaaaaattgcttttattcaagggctgggaatatttcaagggaagtttaaaagttcaggaagagtctgttacttttcgaattaatttaactgtccttttanactgtttatctatttttgggtcaaggtcctatgccanggaactttaactgcaacttcgaaatggtggtttacccaanggtttatgggttaaccctttgaatggccngttcctgggaa

SEQ ID NO: 4812 - DNA, 621 bp, Homo sapiens
  misc_feature (516)..(516): "n" may be a, t, c, g, other or unknown
  misc_feature (566)..(566): "n" may be a, t, c, g, other or unknown
  misc_feature (569)..(569): "n" may be a, t, c, g, other or unknown
  misc_feature (621)..(621): "n" may be a, t, c, g, other or unknown
acaaagaaagaaacaagcaagactggtattgcaaccccagtcgaatatgcatgaaacagttgatggctatagaagatatttcactcaaattgtagggttctttgtggtagaagatcacattttacatgtgacccaaggattagtaaccagggcatacactgatgaactttggaacatggccctctcaaagataattgctgtccttagagctcattcatcctattgcactgatcctgatcttgttctggagctgaagaatcttattgtaatatttgcagatactttacagggttatggttttccagtgaaccgactttttgaccttttatttgaaataagagaccaatacaatgaaacactgcttaagaaatgggctggagttttcagggacatttttgaagaagataattacagccccatccctgttgtcaatgaagaagaatataaaattgtcatcagcaaatttccctttcaagatccagaccttgaaaagcaagtctttccccccaaaaaaanggaaaaatttcccccaatgggtcctcaaggttccaagtggcccctccaanaantttttacccaattttcaaaagggtttttaaaaaaagggaaaatttttaaaan

SEQ ID NO: 4813 - DNA, 665 bp, Homo sapiens
  misc_feature (546)..(546): "n" may be a, t, c, g, other or unknown
  misc_feature (575)..(575): "n" may be a, t, c, g, other or unknown
  misc_feature (628)..(628): "n" may be a, t, c, g, other or unknown
  misc_feature (653)..(653): "n" may be a, t, c, g, other or unknown
atttttctgtccaggaaggaccccagaatgttctgagtcagaaagacagtgaatcctctcctctgggtcagtggggagggagagagagagaattcagagggaagaaagcagaaaaagatgtcacaaaattgcctaatcaaaagttaccatgatgcctgcctcatctggaactgggctcccagtctctagtgagggagacatagtccagtccagtcccagtctccagtctgagccaaagcagaacaaagctggacactgcagcctggcatccaacgaacattttgtcactttccccagggtgggagcatttgaactttggatgtgaaggaaacatggtaaccactgcagtaagaaaagcaactgctggagaaaatggcactttcttccccaaatttgtttttacactcatgtctaaggaacaccttagaaaccacattaacatctttcagcaaaaggaaattctgcctgttgatcttttgctgtgagacaaacttgaaaagttcacagacactgcctttctctgaaaactgcccttacctctttggntataattcacttcaagatctgttgagtangaacatcaaaaatgcaaataaaaagtttcaagtattatgaaagaatgcaatanaactgcctttaaaaaaaatctcaanatggagggtggg

SEQ ID NO: 4814 - DNA, 720 bp, Homo sapiens
  misc_feature (589)..(589): "n" may be a, t, c, g, other or unknown
  misc_feature (652)..(652): "n" may be a, t, c, g, other or unknown
  misc_feature (664)..(664): "n" may be a, t, c, g, other or unknown
  misc_feature (711)..(711): "n" may be a, t, c, g, other or unknown
atcagcgctggcgcggctgcgagccgctgctgcctacgcgccatggagcatcgcatcgtggggcccgggccgtaccgagctaccaggctgtggaatgagaccgtggagctttttcgtgctaagatgccgttacggaaacatcgctgtcgtttcaagagctatgagcattgtttcacagcggccgaagctgtggattggctgcatgagctgctgaggtgcagtcaaaacttcggccctgaagtgacccgcaaacaaacggtccagctgctaaaaaaattcctgaagaatcacgttattgaagacatcaagggaaaatggggtgaggaagattttgaagacaatcgtcacttatacagatttcctccttcttcacccctgaaaccatatccaaagaagcccccaaaccaaaaggatgttattaaatttccagaatggaatgatctcccaccaggcacttcacaagagaacatcccagtgaggccagttgtgatgaattctgagatgtggtacaagcgtcacagtattgcaattggagaggtgccagcttgccgtcttgtccaccgcagacagctgacagaggccaatgtanaagagatatggaagtctatgacattatcatacttacagaaaattcttggcctggattccttanaagaagttttanacgtcaaacttgtcaattcgaagttcatcatccataatggtatatantgttagcaa

SEQ ID NO: 4815 - DNA, 548 bp, Homo sapiens
  misc_feature (529)..(529): "n" may be a, t, c, g, other or unknown
  misc_feature (535)..(535): "n" may be a, t, c, g, other or unknown
  misc_feature (537)..(537): "n" may be a, t, c, g, other or unknown
ttggccctaattggctatgtggatccaagtgaaagggagaggaatccgaattctctcaattgatggtggaggaacaaggggcgtggttgctctccagaccctacgaaaattagttgaacttactcagaagccagttcatcagctctttgattatatttgtggtgtaagcacaggtgccatattagctttcatgttggggttgtttcatatgcccttggatgaatgtgaggaactttatcgaaaattaggatcagatgtattttcacaaaatgtcattgttggaacagtaaaaatgagttggagccatgcattttatgacagtcaaacatgggaaaacattcttaaggataggatgggatctgcactgatgattgaaacagcaagaaaccccacatgtcctaaggtagctgctgtaagtaccatagtaaatagagggataacacccaaagcttttgtgttcagaaactatggtcattttcctggaatcaactctcattatttgggaggctgtcagtataaaatgtggcangccatnanagcctcatctg

SEQ ID NO: 4816 - DNA, 789 bp, Homo sapiens
  misc_feature (693)..(693): "n" may be a, t, c, g, other or unknown
  misc_feature (777)..(778): "n" may be a, t, c, g, other or unknown
tcaaaaagataatccaccatgatcaagtgggttttacaccaggggatgcagggatggtttaacatccacaagttaataaatgtgatacaccacacaaacagaattaaaaacaaaaatcacatgatcatctcaatagattcagaaaaagcatttgacaaaatctaacatcctttatgattaaaaccctcagcaaaattagcacagaaggaacatatcttaaggtaataaaagctaactacgacaaacccacagccaacattatgctgaatggggaaaagttgaaagcattttccctgagaattggaacaagacaagacactttcaccacttttattcagcatagtactggaagtcctggccagagcactcaaagagaaagaaataaagggcatccaaattggtaaagaggaagtcaaactgttgctgtttgctgatgatatgatcatatacctagaaaaccctaaggattcatcttgaaagctcctagaactggtaaacaaattcagcaaagtttcaggatacaaaattaatgtacgcaaatcagtagctctgctatacaccaacatcaaccaatagctgcagaaataaaataaaatacttaggaatatacctaacgaaggacatgaaagacctctacaaggaaaactacaaatcactactgaaagaaatcacagatgacacaaacaaatgggnaacacatcccatgttcatgaatagggtcaatcaatattgtgaaaatgaccatactttggtagatttgcaaaaagcaatctacanngtcaatgcaat

SEQ ID NO: 4817 - DNA, 795 bp, Homo sapiens
  misc_feature (484)..(484): "n" may be a, t, c, g, other or unknown
  misc_feature (668)..(668): "n" may be a, t, c, g, other or unknown
  misc_feature (751)..(751): "n" may be a, t, c, g, other or unknown
  misc_feature (764)..(764): "n" may be a, t, c, g, other or unknown
  misc_feature (788)..(788): "n" may be a, t, c, g, other or unknown
tgctgtaatgcaggctttgatctgtttcaccatggcttctattcaagtccagttaaaacctcccagctgacctcagactaggcatatttcaggctttaaattattctactttccaaactgaattctcctgcagtgccaagtatcaaaggtgtccttaaatacttgtagggatgaggttaggaatattcagttccaaaacaagatatcttctgtccgccttacatatagcagtgacacttgttgcctaactttatggtgacctcctattttgtaagggctgttagaagttctatctaagaaatggcattctgtaggtttatagaaggtttagccttcatattttaattgcttgtatacacaacagctgttttgcttttagatttctgtgtttctgaaggtaatgttcttcctgttttcaagtttacataaggatctttggtctgatgctgatgaagagttcacaggtggtatgggagagcaaaangcaagctaatgctgtttaccgtgttttggtcaaacgtaacgagtgaaatagaatttgcctttctcatatttaattatcatgtagtttaatgtaccatatgtgaaacattctggccatagcagcaactaaaaactgcaagcaacttggtaacaagaactttctaaataaacttaacctgttccanaatgtcatgtattttgacttttaagccctatctcagttgggccagtaaagaccaatccttactgtaggaaatcattgttggancatcacaaacatncaaccttttggctgtcctgtccangtcccca

SEQ ID NO: 4818 - DNA, 753 bp, Homo sapiens
  misc_feature (417)..(417): "n" may be a, t, c, g, other or unknown
  misc_feature (576)..(576): "n" may be a, t, c, g, other or unknown
  misc_feature (617)..(617): "n" may be a, t, c, g, other or unknown
  misc_feature (707)..(707): "n" may be a, t, c, g, other or unknown
  misc_feature (726)..(726): "n" may be a, t, c, g, other or unknown
  misc_feature (741)..(741): "n" may be a, t, c, g, other or unknown
gaaattatctttgttagcagtagtagtatagaataaaagatccgtatgctggttcgtagattgatacgtgttagtcctgttatttggaggctttttggcatagttgttcgatcaggagcctgtttactaaaagtcttcatacagagtacaagtgcagccgccagaggagaaaattgagattcttgaccctttcatactcttttctttggtattcaggacactaaggcaggaggaccacatgagttctggttggtaagtgtccttgtcatgaaaacacttgccttacaaggctctaattatgatttccctagtcagtgctctgaagatgtgtcacattatattataaacaatacggaaggggagataggtgagatgatatgaaaaacaaattttctcactgtcataaaaggctctaantatggttactttccttgtgatgaaaaacttggccttacagggctctagttatggttactttccctaagtcaatgctctaaaaatgtgtcacattataaacaatacagaaggagagatagatgagagatcatgaaaaccaaattttatcttttacatggnccctttgtcttcgtttgaaacatccccaacatttcctacanatcagcgtagttacaaaggggtcaagtcttttaaaataagtatttcctattaaactggatatatatacagtgcctttttggggttgtgangtcagtgggacactgaaanacaacggttgtgtantttaaggagtgg

SEQ ID NO: 4819 - DNA, 786 bp, Homo sapiens
  misc_feature (625)..(625): "n" may be a, t, c, g, other or unknown
  misc_feature (629)..(629): "n" may be a, t, c, g, other or unknown
  misc_feature (636)..(636): "n" may be a, t, c, g, other or unknown
  misc_feature (764)..(764): "n" may be a, t, c, g, other or unknown
  misc_feature (770)..(770): "n" may be a, t, c, g, other or unknown
  misc_feature (776)..(776): "n" may be a, t, c, g, other or unknown
aaaacatgctgctcaatgggcttcagttccttcaaatcttttcttaaatgtttcaaaaatcttatatatatatgtatttttttcatgctttatattgaaagttttaagctttgattattgccatattcagctagccaaaaacaactacatagaaccttcaaagcgtattaattctggctaggttagcctaggttgagtaggaggttgaatagatgacttctgaagttccttcaactctaaattttatgattctgggaatttataacatccaagaatcacagaatgttagaatgggaaggaactttaagatcatctagtctaagccactcattttacagatgagaaaggctacccagagtgtagagacagaagcagagctctagggaggcagagagaggggaagtggcagaagggccagagctggggagggtctgggcataacctcacaggactggtcaatccatggcctgcagaggaaaaagggagaagagagaccacacaggagcttcagcatcactccaggaaactgatcacaggttggatgggatgcgaatggggccagtggcaccagctggtgtctgaacaggaatcagtaatggtcactctgtctgaggtcacctggcantcanggccggncagacttttgtgctttccacagctagcatagctgcttctcatggtttggcaagaacagcagcatccagagctgaattctggccttgctctcaagtgtccaacctgttggtaaatgaagctggggtaancccaanaactgnggccccctgg

SEQ ID NO: 4820 - DNA, 668 bp, Homo sapiens
  misc_feature (437)..(437): "n" may be a, t, c, g, other or unknown
  misc_feature (519)..(519): "n" may be a, t, c, g, other or unknown
  misc_feature (580)..(580): "n" may be a, t, c, g, other or unknown
  misc_feature (600)..(600): "n" may be a, t, c, g, other or unknown
  misc_feature (637)..(637): "n" may be a, t, c, g, other or unknown
attcccaggctggtctgaagctccggggccgtggtcccgctgcctcctccggtcgtcgtgcggaagctgcgacgcaggcagaccatggcagagttctcccagaaacgggggaagcggcgtagcgacgaagggctgggcagcatggtggacttcctcctggccaatgcccgcctggtgctgggcgtgggcggggctgctgtgctgggcattgccaccctggccgtgaagcggttcattgacagggccactagcccgcgggatgaggatgacaccaaggcagacagctggaaggaactgagcctgctcaaggccacaccacacctgcagccccggcctccacctgctgcccttagccagccagtgttgcccttggccccctcgtcgtctgccccagaagggcctgcagaaactgatcctgaggtgacaccacagctcanctccccagcaccgctgtgtctgacactgcaggagaggctgctggccttcgagcgggaccgtgtgaccatcccagcagcccangtggctttggccaaacagctggctggcgacatcgccctggagctgcaggcctactttcggnagcaagttcccgggaactgncctttggggcattctgcctgggggggcccgctctacnatgggctgcaagccgggggcttccggaccat

SEQ ID NO: 4821 - DNA, 706 bp, Homo sapiens
  misc_feature (665)..(665): "n" may be a, t, c, g, other or unknown
  misc_feature (695)..(695): "n" may be a, t, c, g, other or unknown
  misc_feature (697)..(697): "n" may be a, t, c, g, other or unknown
gagctcggttagggcctcacttccctgcttccacacctcagggaggcctcggtgattttgccagagcctcagcctccatcgctctgtaacctgcgggtattggatgattcgtagctaagacttcgcgacacccttgaagctgagaaatggaacccttaacattcagggatgtggccatagaattctctccagaagagtggaaatgcctggaccctgcccagcagaatttgtatagagatgtgatgttggagaactacagaaacctggtctccctaggtgtctggaaatgaagtatggaaatgaaatcatgaataaagacccagttttcagaatctctccacgaagtagaggaactcataccaatccagaagagcctgaagaagatgttcaagctgaaagagtccaagcagcaaatgcactcactactccaaacttggaggaggaaccagtcataactgcaagctgtttacacaaggaatattatgagacaaagaaagttgcttttcaacaacaaggaagaaagcagccatcagaaatgtttcgttttgtgttaaaaagtgaagttttgggattactaggacacaatggagctggcaaaagtacttccattaaaatgataactgggtgcacagtgccaactgcaagagtggtggtgttacaaaggnaacagagcatccagttagggaacagcgtgncnacaagcctc

SEQ ID NO: 4822 - DNA, 725 bp, Homo sapiens
  misc_feature (587)..(587): "n" may be a, t, c, g, other or unknown
  misc_feature (661)..(661): "n" may be a, t, c, g, other or unknown
  misc_feature (699)..(700): "n" may be a, t, c, g, other or unknown
tccaggcgcaggccgaggccttcgcgcgccagatctacgggcccgagtgcaccttcaaggccagccacggctggttctggcgctggcagaagcgccacggcatctccagccagcgcttctacggcgaggccgggcccccagccccgagccccgcgcccggcccgcccgtcaaggaggagcccgcgctgccctccggcgccggccccctgcccgaccgcgccccggccccgccgcccccggccgagggcggctacggggacgagcagatttacagcgccagcgtcaccggcctctactggaagctgcttccggagcaggctgcgcccccgggcgcaggggaccccggggcggggggctgtggccggcgctggcggggcgaccgcgtaacggtgctgctggccgcaaacctgaccggcagccacaagctgaagccgctggtcatcgggcggctgccggacccgcccagcctgcgccaccacaaccaggacaagttcccggcctcctaccgctacagccccgacgcctggctcagccgcccgctgctgcggggctggttctttgaaggaatttgtcccaggcgtcaaacnctacctgcgccgaagctgcctgcagcagaaggccgtgctgctggtggccacccgccctgcccaagcccagctgncagtattgccggcctgggacagcgaggatgcccccgtnncggttcaggccggaagcccctcggt

SEQ ID NO: 4823 - DNA, 803 bp, Homo sapiens
  misc_feature (643)..(643): "n" may be a, t, c, g, other or unknown
  misc_feature (739)..(739): "n" may be a, t, c, g, other or unknown
  misc_feature (750)..(750): "n" may be a, t, c, g, other or unknown
  misc_feature (795)..(795): "n" may be a, t, c, g, other or unknown
acttccggtcccgccgccgggagccggtgcggctgtgaggggccgcgtctcgcagcagccgcccggaccgggcatggtgttgggcgccgggcccgcctcgcctgtctcggggagcccagggtaaaggcagcagtaatgctaacgctagcaagtaaactgaagcgtgacgatggtctcaaagggtcccggacggcagccacagcgtccgactcgactcggagggtttctgtgagagacaaattgcttgttaaagaggttgcagaacttgaagctaatttaccttgtacatgtaaagtacattttcctgatccaaacaagcttcattgttttcagctaacagtaaccccagtttattgagagaacattcaattgatggcactggctgggctcccacaagaacattaaaggatgtcgtttggggattaaactctttgtttactgatcttttgaattttgatgatccactgaatattgaagctgcagaacatcatttgcgggacaaggtgagaattctatttggtgcacgtgctattgtgtccggaattggtgggttcttggtctcactgacttcaagaatgaagccgcggaccctcgcggaaagtttatatggactataatgcaacgactcccctggagccagaangttatccaagccatgaccaagggcatgttgggaagcctggggaaatcccaacagccccgttattcaacaaggaagaaaaggccaaaggatattatnaattgcagctncgggaaaaagcctccccaaagatgataaggggggaaaacctcaangattataa

SEQ ID NO: 4824 - DNA, 757 bp, Homo sapiens
  misc_feature (732)..(732): "n" may be a, t, c, g, other or unknown
  misc_feature (739)..(739): "n" may be a, t, c, g, other or unknown
  misc_feature (754)..(754): "n" may be a, t, c, g, other or unknown
ttctcattactaggtcaataacctgagggaatcaatggctttttgccgctctacctcttgtgtatctctttgacttttctttctctgtctagtttcctctgttctcagtttatattctatgttatcagtctctctttccacagtacaaacatccatcctttctcctgtgcaattctgtctctccctcttattatctttatttgtactttttccttcctccctgtctaggcattgggcatgtgcctcttcttagcctgtgattttgccttggggctgatgataaattatttccagattcaatcagccctggtcctaccccagtccaatcagaagtatgttggtgggaatcaacctgatcctggccctttcttcttctccattttcattcgtaatccccctcagcagatctttacaagcagttttcttatagctcatgtatctttaggtctttgccttccaagctctgtacagaatactttgtggttcctttttagtctgacattttgtggagcagtgaagcgtgctcagagacataatcagctgaagagaaaaaatccacccatggatttatatcaagctaaatactaataattgattttgtttgatgtgcccataaattttaaagctggcaatataatataatgagggaccacaaggtaattctcctgtcaattgtttggtggatgggggtgggggagtaattgctaagtttacaatacacattaaaccccnataaaanctggttggggctgcnacg

SEQ ID NO: 4825 - DNA, 753 bp, Homo sapiens
  misc_feature (700)..(700): "n" may be a, t, c, g, other or unknown
  misc_feature (736)..(736): "n" may be a, t, c, g, other or unknown
  misc_feature (753)..(753): "n" may be a, t, c, g, other or unknown
acgattcgacagcgcatccttcgacttttccatgtggccacacacgcttcagagccctaggtgtcagtgatcaaacttcttttccattcagagtcctctgattcagattttaatgttaacattttggaagacagtattcagaaaaaaaatttccttaataaaaatacaactcagatccttcaaatatgaaactggttggggaatctccattttttcaatattattttcttctttgttttcttgctacatataattattaataccctgactaggttgtggttggagggttattacttttcattttaccatgcagtccaaatctaaactgcttctactgatggtttacagcattctgagataagaatggtacatctagagaacatttgccaaaggcctaagcacggcaaaggaaaataaacacagaatataataaaatgagataatctagcttaaaactataacttcctcttcagaactcccaaccacattggatctcagaaaaatgctgtcttcaaaatgacttctacagagaagaaataatttttcctctggacactagcacttaaggggaagattggaaagtaaagccttgaaaagagtacatttacctacgttaatgaaagttgacacactgttctgagagttttcacagcatatggaccctgtttttcctaattaattttcctaacaaccctttaantaggcaaaagatattaattaggtaccctcattgganccatggggaaaaattgn

SEQ ID NO: 4826 - DNA, 833 bp, Homo sapiens
  misc_feature (549)..(549): "n" may be a, t, c, g, other or unknown
  misc_feature (663)..(663): "n" may be a, t, c, g, other or unknown
  misc_feature (691)..(691): "n" may be a, t, c, g, other or unknown
  misc_feature (810)..(811): "n" may be a, t, c, g, other or unknown
  misc_feature (822)..(822): "n" may be a, t, c, g, other or unknown
gtacagaagcaaaatcaaacctgctatttcaagcactcctgtttttaacttggtgtctttagtgcttggattggtgggatgtttcggaatgggcattgtcgccaattttcaggagttagctgtgccagtggttcatgacgggggcgctcttttggcctttgtctgtggtgtcgtgtacacgctcctacagtccatcatctcttacaaatcatgtccccagtggaacagtctctcgacatgccacatacggatggtcatctctgccgtttcttgcgcagctgtcatccccatgattgtctgtgcttcactaatttccataaccaagctggagtggaatccaagagaaaaggattatgtatatcacgtagtgagtgcgatctgtgaatggacagtggcctttggttttattttctacttcctaactttcatccaagatttccagagtgtcaccctaaggatatccacagaaatcaatggtgatatttgaagaaagaagaattcagtctcactcagtgaatgtcgcaggccatttctaaaagtgctacagangacagacagggttttgaggccaccctgattattgggatgcatctgcagcacatccaggacttgaatttcattacgagttcctaatagttgtatttctaaagatgtgtttcctanaagaatgtacagccttatgacactgtantggatgtttttaaaaatttccaaagtagatttttttaaaatttaacaaaattcataatacaaggaaaaaaattaaggtgtttacaaaaaaatggagaagctccttaatttttgggacannattccggtcgntttttttttaa

SEQ ID NO: 4827 - DNA, 747 bp, Homo sapiens
  misc_feature (535)..(535): "n" may be a, t, c, g, other or unknown
  misc_feature (693)..(693): "n" may be a, t, c, g, other or unknown
  misc_feature (704)..(704): "n" may be a, t, c, g, other or unknown
  misc_feature (720)..(720): "n" may be a, t, c, g, other or unknown
agttactgagaactcataagacgaagctaaaatccctcttcggatccacagtcaaccgccctgaacacatcctgcaaaaagcccagagaaaggtaatatgaatgaaataattttgggggactttaattgaggagtaaaatatttgagaatatgaggaagattccaaagtctctgcatataccttaataagaactgagacaggcttttactcattctcttttcagcacttatgattgaattagaaggaagtctgtaaaatttggctgtgatcatagggtaagatgttatctaacagaagccagaaacccaatgtctcctgctgagatgcttgagtgcctgtcaggatctaaaaattttcctcaagaattactgtatgtcattggaaagacgttcttttgagtggcttccaggagccagacagagggcaagtagacattatgatattgttttattatccatttttaagtgatgtatagctatatcttcaagctggcccatgataaagtggttcacttgttcagctgaatgactatancttctgattatcttttgaatagatgttctcatgcagacttgaatagtagcatggaatttcttgaacgtcgttgttttcatttttcttctttaataaaatgctacaaaaatcaaagttggtagtatttctctagctattaatcatgaatttgcaaaganaagtcacttgnccaagtccaaattggntaagtccaaatgagttttctgggaaac

SEQ ID NO: 4828 - DNA, 726 bp, Homo sapiens
  misc_feature (348)..(348): "n" may be a, t, c, g, other or unknown
  misc_feature (360)..(360): "n" may be a, t, c, g, other or unknown
  misc_feature (565)..(565): "n" may be a, t, c, g, other or unknown
  misc_feature (655)..(655): "n" may be a, t, c, g, other or unknown
  misc_feature (658)..(658): "n" may be a, t, c, g, other or unknown
  misc_feature (716)..(716): "n" may be a, t, c, g, other or unknown
ccaatattgagctgtgtccctctgaatatttgccttagctatttcaaaataggtatcttcagaaccaaagcaaagggtggtttgttactgaaacattcttagaggcctacttaacgggcggcagtatccggtagtggtaaaacctcacagtttcctaattgcaggtatgtaaataccaaaaaagtcctgttgtcagccctaggtttatctttgaaagcagttaaatgtgcaccttggtcttcctccgtgtgttcagattccttctggttaaagttcttattcagagtcatctaaaagaaatttctaacatgatgtatggtttcttgaatgtcatgagtggctgcgtanattgctttgtancaacagattgtattaataatagaatacctaatttttttggcctatcctctttgaactagaaatgactacttgagggctatttcagagaaccaatatgaaatgtttttgttagtacaaaataccattgccttaaaaggtttcaagcacattttcttttctatttgagaacttaaattgctgacttgtattcgttaagcaaccttanaaataaaccactgcttatatctgcatgaatattatgcatttcatgcgtacagttagttgattagatatttcagggttttgcattttctanagncatggggacttttttaacatggtaacgtcttaggaaaaccattcccctcaaggtattncaccatttcc

SEQ ID NO: 4829 - DNA, 725 bp, Homo sapiens
  misc_feature (309)..(309): "n" may be a, t, c, g, other or unknown
  misc_feature (628)..(628): "n" may be a, t, c, g, other or unknown
  misc_feature (670)..(670): "n" may be a, t, c, g, other or unknown
  misc_feature (681)..(681): "n" may be a, t, c, g, other or unknown
tgaaagatgccatcatagctaaattggctaatcaggctgcagattattttggtgatgctttcaaacagtgtcaatacaaagatactctccccaaggaggtgttccctgtcttggctgcaaagcactgtatcatgcaggccaatgctgagtaccatcagtctatcctggcaaaacagcagaagaaatttggagaagaaattgcaaggttacagcatgcagcagaactgattaaaacagtggcatctcgctatgatgaatatgttaatgtgaaggatttttctgacaaaatcaatcgtgcccttgctgcancaaagaaggataatgacttcatttatcatgatcgagttccagaccttaaagatctagatcctattggcaaagccacacttgtgaaatctaccccggtcaatgtacccatcagtcagaaatttactgatctgtttgagaagatggttcccgtgtcagtacagcagtctttggctgcctataatcagaggaaagccggatttgattaacaagatcaattgctcagatgagagaagccaccactttggcaaatggggtgctagcttcccttaatcttccagcagcaattgaaagatgtgtccgggagacactgtacctcaantctatattgactaaatccagatctgtgattgaacaaggaggnatccaaactgntgatcagttgattaaaagaactgcctgaattactgcaacgaaat

SEQ ID NO: 4830 - DNA, 580 bp, Homo sapiens
  misc_feature (390)..(390): "n" may be a, t, c, g, other or unknown
  misc_feature (537)..(537): "n" may be a, t, c, g, other or unknown
  misc_feature (558)..(558): "n" may be a, t, c, g, other or unknown
  misc_feature (567)..(567): "n" may be a, t, c, g, other or unknown
taatcagaggataacatgatcaagagttgcattttagaagtagtactttggttgtaattttgcaaactggagatggggtgactatttattttgatggcatgttagtcatccttaggagaaatgacagtggcccataataaagaggcatcagtgaggatacagagtaggtagattctagaaaaatttatgagagagaatttataggcatttgattggtatggagagacaagaagaaagccagggattttgtccaggattctggcttgggcacttgagtgaatggtgtaaaactgaggggacgtataggatttacttaccatttcatttgcttgtttttttgtgtgtgttttgtttttctgggagggatgacagatatagctggtgtattantccattttcacactgctgatagagacataccagagactgggcaatttacaaaagaaagaggtttaattagacttacagttccacgtggctggggaaggtctcacaatcatcatggcagaggggtgaaagacaattcttacatggcantggcaagaaagaatgaggaanaagcaaaangcagaaaccctga

SEQ ID NO: 4831 - DNA, 837 bp, Homo sapiens
  misc_feature (590)..(590): "n" may be a, t, c, g, other or unknown
  misc_feature (668)..(668): "n" may be a, t, c, g, other or unknown
  misc_feature (757)..(757): "n" may be a, t, c, g, other or unknown
  misc_feature (762)..(762): "n" may be a, t, c, g, other or unknown
  misc_feature (776)..(776): "n" may be a, t, c, g, other or unknown
aaaaaaacatgaactcccagagaaggattgtgggagacactttttctttccttttgcaattactgaaagtggctgcaacagagaaaagacttccataaaggacgacaaaagaattggactgatgggtcagagatgagaaagcctccgatttctctctgttgggctttttacaacagaaatcaaaatctccgctttgcctgcaaaagtaacccagttgcaccctgtgaagtgtctgacaaaggcagaatgcttgtgagattataagcctaatggtgtggaggttttgatggtgtttacaatacactgagacctgttgttttgtgtgctcattgaaatattcatgatttaagagcagttttgtaaaaaattcattagcatgaaaggcaagcatatttctcctcatatgaatgagcctatcagcagggctctagtttctaggaatgctaaaatatcagaaggcaggagaggagataggcttattatgatactaagtgagtacattaagtaaaataaaatggaccagaaaagaaaagaaaccataaatatcgtgtcatattttccccaagattaaccaaaaataatctgcttanctttttgggtgtccttttaactgtctccgtttttttcctttaattaaaaatgcactttttttcccctgggagttaaantccgcttatccaaattaccaactttgcaaagccttacaagagagcacaaagttgggctaaaattttaaaattttttaaaggaagatacntttgngaatgcattatganaaactttcaagttcaaaagcatcaaatttgatggccataatccaaggggcatggccaaaat

SEQ ID NO: 4832 - DNA, 753 bp, Homo sapiens
  misc_feature (534)..(534): "n" may be a, t, c, g, other or unknown
  misc_feature (629)..(629): "n" may be a, t, c, g, other or unknown
  misc_feature (732)..(732): "n" may be a, t, c, g, other or unknown
  misc_feature (746)..(746): "n" may be a, t, c, g, other or unknown
  misc_feature (749)..(749): "n" may be a, t, c, g, other or unknown
tcagtgtcaagcctctattttgtaaccaggatgagactgtagtccgagtccctggaaaatgttgcccgcagtgctctgcaagatcctgctctgcagctggccaagtatacgagcatggtgagcagtggagcgaaaatgcctgcaccacgtgtatatgtgaccggggtgaggtcaggtgtcacaagcaggcctgcctgcccctgagatgcggaaagggtcagagcagggctcggcgtcatgggcaatgctgtgaggaatgtgtgtctcctgccgggagctgctcctatgatggagttgtgcggttccaggacgaaatgtggaagggctcggcctgtgagttctgcatgtgtgatcatggccaagtgacctgccagactggagagtgtgccaaagtggagtgtgcccgggatgaagaattaattcacttagatggaaagtgttgtcctgaatgcatttcaaggaatggttattgtgtttatgaagaaactggagaatttgtgtcatcaaatgctagtgaagttaaacgtattccanagggagagaagtgggaaaatggcccttgcaaggtgtgtgagtgccgaagggctcaagtaacttgctacgagcccctcttgcccaccatgttcaantgggcacaactgggccttaaaagggtgaaaggggacagtgctgtcccaagacttgcaacaatcaatttcaatttgccaatcccaaaaattgtttttgaacaangcctcctcaaggtnctnccaa

SEQ ID NO: 4833 - DNA, 742 bp, Homo sapiens
  misc_feature (657)..(657): "n" may be a, t, c, g, other or unknown
  misc_feature (682)..(682): "n" may be a, t, c, g, other or unknown
  misc_feature (725)..(725): "n" may be a, t, c, g, other or unknown
aaaaccatatgaatgcaataactgtggcaaatccttcatttccaagtcacaacttcaggtacatcaacgtgttcacacaagagtgaagccctatatatgtaccgaatatgggaaggtcttcagcaataattccaacctcattacacatgagaagattcaaagtagagagaaatcttccatatgtactgagtgtgggaaggcctttacctacaggtcagagttgattattcatcagagaattcacactggagagaaaccttatgaatgcagtgactgtgggagagccttcactcagaagtcagcactcacagtgcatcagagaattcatacaggagaaaaatcgtatatatgcatgaaatgtggactggccttcatccggaaggcacacttgattacacatcaaataattcatactggagagaaaccttataaatgtggtcactgtgggaaattgtttacttccaagtcacaactccatgttcataaacgaattcacacaggagaaaagccctatgtatgcaataaatgtgggaaggcattcaccaaccggtcaaatctcattacacatcagaaaactcatacaggagagaaatcttatatatgttccaaatgtggaaagggcttcaaccagaggtcagacttgattacacatcagangggttcaatactgggggagaagccntatgaaatgcaataccttgtgggaaaagccctttactcagaangtcaaaatccttaatat

SEQ ID NO: 4834 - DNA, 555 bp, Homo sapiens
  misc_feature (383)..(383): "n" may be a, t, c, g, other or unknown
  misc_feature (467)..(467): "n" may be a, t, c, g, other or unknown
  misc_feature (504)..(504): "n" may be a, t, c, g, other or unknown
  misc_feature (507)..(507): "n" may be a, t, c, g, other or unknown
actggatggtgctactgctgtggaaccttgtaaaaaccatgtggggtaaactgggaataacatgaaaagatttctgtgggggtggggtgggggagtggtgggaatcattcctgcttaatggtaactgacaagtgttaccctgagccccgcaggccaacccatccccagttgagccttacagggtcagtagctctccacatgaagtcctgtcactcaccactgtgcatgagagggaggtggtcatagagtcagggatctatggcccttggcccaaccccacccccttccctttaatcctgccactgtcatatgctacctttcctatctcttccctcatcatcttgttgcgggcatgaggaggtggtgatgtcagaagaaatggntcgagctcagaagataaaagataactagggtatgctgatcctcttttaaaaacccaagatacaatcaaaatcccagatgctggnctctattcccatgaaaaagtgctcatgacatattganaanacctacttacaaagtggcatatattgcaatttattttaattaaaagat

SEQ ID NO: 4835 - DNA, 632 bp, Homo sapiens
  misc_feature (605)..(605): "n" may be a, t, c, g, other or unknown
  misc_feature (610)..(610): "n" may be a, t, c, g, other or unknown
  misc_feature (621)..(621): "n" may be a, t, c, g, other or unknown
aaacatgaattcaaacggctcatcttatttcgaccattcggccccatcatgaaagtgaaaaatgaaaagctcaacatggccaacacgcttatcaatgttatcgtgcctctagcaaaaagggtggacaagttccggcagttcatgcagaatttcaggcctgctgatgaagtttttagatgtgtgcctttaagcccttgattgtgcggtgttggatcttagaagctgtgatggctcagatgcacatattggctgaggataaccagctaagtgatttcaccagcttgttttaaacatagaaaatcctactgtctaattataaatcttgaaagatcaagctgattttttatttctttttttttgagatggagtcttactctgtcacccaggctggagtgcagtggcacgaactctgctcactgcaaccttcacctcccaggttcagggagatgtgcattgagcaggatgggagagtccatctcactgttgtttactttgggaaagaagaaataaatgaagtcaaaggagtacttgaaaacacttccaaagctgccaacttcaggaactttaccttcatccaactgaatggagaattttctcggggaaanggacntgatgttggancccgcttctgg

SEQ ID NO: 4836 - DNA, 717 bp, Homo sapiens
  misc_feature (676)..(676): "n" may be a, t, c, g, other or unknown
  misc_feature (678)..(678): "n" may be a, t, c, g, other or unknown
  misc_feature (682)..(682): "n" may be a, t, c, g, other or unknown
aggacggcgggaagaggagtgcggaacccgcgggaggatgtgcacagagggcccaggaggagcctcaggagccggactgccgttggccaaccgagtccccagggagacacttaagggaaattaaactgcagagtgcaagagatgcctcagtcaagtcagccaaaaacacgcgggtcatccccaagccccagagagtgacagagccccgatgacacggacacctcggctgctgtcacttccctggttcgggcctcccacaggctttgaattgaaggcgagtgcctcagaatttgcatccattgttctgtctttcctgggaagttattcatcctggtggccagcccaccgacaaaatggatttggatctactggacctgaatcccagaattattgctgcaattaagaaagccaaactgaaatcggtaaaggaggttttacacttttctggaccagacttgaagagactgaccaacctctccagccccgaggtctggcacttgctgagaacggcctccttacacttgcggggaagcagcatccttacagcactgcagctgcaccagcagaaggagcggttccccacgcagcaccagcgcctgagcctgggctgcccggtgctggacgcgctgctccgcggtggcctgcccctggacgggatcactgagcctgggccggncncaanctccggaagggaaagacccaaactgggggctggaa

SEQ ID NO: 4837 - DNA, 722 bp, Homo sapiens
  misc_feature (449)..(449): "n" may be a, t, c, g, other or unknown
  misc_feature (667)..(667): "n" may be a, t, c, g, other or unknown
  misc_feature (709)..(709): "n" may be a, t, c, g, other or unknown
  misc_feature (714)..(714): "n" may be a, t, c, g, other or unknown
ttttcacattactctagtccccaagaactgtgggccaccagatgacttcagatgtcccaatccgacaaagcagatctggacagtgaatgaagctctaattcagaaatggctgagctatccttctggaaggtttcctgtggagatagccaatgagatagatggaacgttttcttcctctggttgcctaaatggaagttttttagctgttagcaatgatgatcactatagaacaggtaccagattttcaggggttgatatgaatgctgctaggcttttattccacaaacttatacaacctgatcatccgcagatatctcagcaggtggcagctagtttggaaaagaatcttattcctaaactgactagctccttacctgatgttgaagcattgaggttttatcttactctaccagaatgtcccctgatgagtgattccaacaatttcacancaatagcaattccctttggtacagctcttgtgaacctagaaaaggcaccactgaaagtacttgaaaactggtggtcagtacttgaacctccactattcctcaagatagtagaactttttaaggaagttgtggtacatcttttgaaactctacaagatcggtattcccccttctgaaagaagaattttcaacagttttcttcatactggcattaaaggntttagaaatactacatagggtaaatgggaaaatggggacagnttatncagtaagg

SEQ ID NO: 4838 - DNA, 684 bp, Homo sapiens
  misc_feature (617)..(617): "n" may be a, t, c, g, other or unknown
  misc_feature (666)..(666): "n" may be a, t, c, g, other or unknown
  misc_feature (668)..(668): "n" may be a, t, c, g, other or unknown
agatttttttaatgccgagaaaagtccatgccacagaagttattgtgtatgtctctagggagctttaagaatttcacgtttgaactttacagctgtttaccaattaaatggcaagctggaaaaatacattttgagaggggtagaaagaataagaatataattaaaagtatgctaacaaaataagcagtacatatttttttagaaaatgcagtttaggccaggcacggtagctcgtgcctgtaatcccagcactttgggaggccgaggcaggtggatcacctgaggtcaggagtttgagaccagcctggacaacatggtgaaaccccgtctctactaaaaatacaaaaaattagccaacgatggtgatgcctgtctgtaatcccagctactctggaggctgaggcaggagaatcgcttgaaccggggaggcagaggttgtagtgagccaagattgcaccactgcactccagcctgggcaacagagcaagactccgtctcaaaaaaggaaagaaaatgcagtttcattccagccatccctagatttcttttccccttaaagtggctgaatccattggagatgtgatttattttgcagattcaccaattccaaacttcangaatattcaagcgggaagtcatgtgtaagtgacagcctttgcaaagaananactgtggctggggtgg

SEQ ID NO: 4839 - DNA, 826 bp, Homo sapiens
  misc_feature (808)..(808): "n" may be a, t, c, g, other or unknown
  misc_feature (820)..(821): "n" may be a, t, c, g, other or unknown
aaggaagacagcaagagaggaacagatggacaaaagaattataagactaacacaaaccaattaataaggctgggcatggtggctcatgcctgtaatcccaacactttgggaggcgaaggtaggcggatcacctgaggtcgggagtttgatgccagccaggccagcatggtgaaaccccatctctactaaaaatacaaaaattagccagacgtgctcacttgaacccatgaggcagaggttgcagtgagctgagatcgtgccaccgcgctccagcctgggcgacagagcaagactctgtctcaaaaaaacaaaagcaaaaacaaaaaacaataaaatggctgtagtaaattcttccctataaataattactttaaatgtaaattgattaaaccccctaatcaaaagatatagaatggctgagtggataaaaaaacaagactacatgctgtctataagaaactcactttagatttaaggacacacatagagcaatgtgtgtccttaaacatattccatgcaactggtaaacgagtgcagaagtggttatacttggatcagacaaaatagagttaaaatttaaaactgtcataagagacaaggaaggacattatataatgataaaacgggcaattcactaggaagacataacaattataaatattcactcaacatcagaacacctaaatatgtaaagcaaatgctgatagaactaaagagagaaaagcaatacgattaatatctgagcctctggctactttgtaaaaaaggaaaaaaaaagcattacaattacagttacaagcctcaatancccactttcaannagggg

SEQ ID NO: 4840 - DNA, 681 bp, Homo sapiens
  misc_feature (529)..(529): "n" may be a, t, c, g, other or unknown
  misc_feature (636)..(636): "n" may be a, t, c, g, other or unknown
  misc_feature (647)..(647): "n" may be a, t, c, g, other or unknown
  misc_feature (652)..(652): "n" may be a, t, c, g, other or unknown
aaaaaggcgtcggccctctggcaagatggctgctgcggaggcgttggagcgcggaaatctggaaccgggatggcgacgtctacactgagtcggaggcgaaggagcttactccacgggaacagcctctagataatctgagttgttgaaaatacgaagcctgttactcgtgaacagtggctgacaacagtgttgttgtgagcctggctgtctgcttggacccagaggtttcgtctgccagggtttttggttgtatttaggatttcagggaaaagtgtccaagctttcagtgttggagcaggtatggacgacaaaggcgacccgagcaatgaggaggcacctaaggccatcaaacccaccaagcaaagagttcaggaaaacatggggttttcgaaggaccactatcgccaagcgagagggcgcaggggacgcggaggctgacccactggagccgccacccccacagcagcagctgggcctgtccctgcggcgcagtgggaggcagcccaagcgcactgagcgcgtggagcanttcctgaccattgcgcggcgccgcggcaagaggagcatgcctgtctccctggaggattctgggtgagcccacgtcctgccccgccacagacgccgagacagcctccnaaggggcaacnttggnaaagcgcttctgaagaaccaaaaagcggg

SEQ ID NO: 4841 - DNA, 570 bp, Homo sapiens
  misc_feature (511)..(511): "n" may be a, t, c, g, other or unknown
  misc_feature (523)..(523): "n" may be a, t, c, g, other or unknown
  misc_feature (546)..(546): "n" may be a, t, c, g, other or unknown
taaaccatgacctgggctgcagaccttgactggcttattggaacagatgcaggttcacagagatgctgagtcacagctggttttgcaggagtggaaaaaggaaaggaaggagatgcgagaaatgaccaagagtttcttcaatgcccagtttggaagcctgttccgcacagaccagaacccaacctacttcctaaggcgcctgtcgcgcttcgctgacatctacatggcgtctctgagctgcctcctgaactatgacgtcagccacactttctacccccggaggactccactgcagcacgaactgcccgcctggtcagaaaggccccccaccttcggaacccctctcctgcaggaggcccaggccaagtagccaagggcaaaaactagaaactgtaactgcccctgattgggcaggcatgatggggttgacttcatgtgggtctgagtgttgcttttggaaaagatacagataagccttttgatatttattttgcaccttacggagaataantctcccaatgantaagacaggagctagcagcccanccctccagcctttccccccatgca

SEQ ID NO: 4842 - DNA, 762 bp, Homo sapiens
  misc_feature (701)..(702): "n" may be a, t, c, g, other or unknown
  misc_feature (760)..(760): "n" may be a, t, c, g, other or unknown
ataggtaagttctccagtggtgattactgagattttggggcacccatcacccgagcagtgtacactgtacccaatgtgcagtcttttatccctcgcccacttcccacccttccccctgagtccccaaagtccactgtatcattcttatgccttcgcatgctcatagctgagctcccacttatatgtgagaatatacatttggtttttcatccctgagttacttcacttagaataatgaaatccccatacacctaggttcagggctcctccccaggaaacttctgaggtttggggagtcccaggagagaagttaggaaactctggcctccatcccctccctgtagcagccaaagttcttagggatttagaggcgattttcttttgtcctttctaagaattgacatcattggtctcatctagacttgcttcaagccctactgatggacctttgacagagtcttccccccaatctgactcttctccatttttccaagaaaagggattagataggaaagtcacatacccaggggcctgcagcctgtgacttcagaactgggaagtctaaaccctacagccccttcttcttctgagccacctactattgttgcagaattgtgtgactgagtcctgtctccttaaaacgaccataaactcttgagtgcaaaggattgtattagtcaagagtaaagctatgctgctannaaaaaatagtccctacatgcaaaggttcaatacagtagatgtttatttcccggcttanaa

SEQ ID NO: 4843 - DNA, 660 bp, Homo sapiens
  misc_feature (600)..(600): "n" may be a, t, c, g, other or unknown
  misc_feature (636)..(636): "n" may be a, t, c, g, other or unknown
  misc_feature (640)..(640): "n" may be a, t, c, g, other or unknown
aaaaatcagaataagaagtacctgacatactttctacatctgtagttgcggaagacattttaataggtcttctcatagcctttctttgctaaggacattgtgactctccagagagcaacagtgatggctctagaatgtctaggaaaaagaagggcttaatgtcaggagtctgcttggggcacacaacactagaagatgtccttctgcacattgtttcatatcgagtatggaacccttcagatcaaagcttaccaataaattcagtatgtagaacagattaacgtagttgaaatgaggaagaatgagagttatctcaaccagccagcaccccctatccccattcccacactttccctcatgggaggctgtcgggagcacttcgaaaaccactggaaaggccgggcacggtggctcatgcctgtaatcccagcactttgggaggccaaggcaggcagatcacctgaggtcaggagttcgaaaccagcctggccaacatggcgaaaccccatctttactaaaaatacgaaaattagccaggtattagaattatttctgaattatcagtctctcatttgtgctttggagaagcagaaaaggcanaaggggtctttggccatcttctgctggagcttccanggangatgtgtctccaagagacca

SEQ ID NO: 4844 - DNA, 773 bp, Homo sapiens
  misc_feature (699)..(699): "n" may be a, t, c, g, other or unknown
  misc_feature (727)..(727): "n" may be a, t, c, g, other or unknown
  misc_feature (735)..(735): "n" may be a, t, c, g, other or unknown
tatgaagaaatgccattagtacttgtttcagagaagcaaaataattgatcatgaaaaatcaccagcaatcttctggtctaaaacaattggcaataggatgtctcattccatttttaaggtactcttggaagaatttagtttagttacatacattttttaaaagataggctttcatgctcctcagttcctttagtttttaaaaagtttccaatgtgtaaagaaacttccacctgttaatcttaagaattggtagctatttgttaaactgatggcatatgaaggcaagagtctatgagtcgtttctaaagtaatagatctttgaaaattttaaaaagtgaaatttgtcaataacagagttaagagctgaattcttttgtctaaaacttatcgaaattgatgcttgtactctactggctccctgatgatagtagaaaagcactagtaatgtaccaaatgaaactggttgtgtaccagatgattttgttaacttcttaaatagcctagaaatcgtcagcaggtcacatacaactgcagtgataatttcaagaacatagcaaaaggctgattttattctacttcacattttagaagtgcattttctcaagttacagggcatttcacttcccttttacatgaagagattttcttttgaatatttttcctctcctttggtagcagtgatagacatgactaaataanatatgggtccttttggtttgctttttancagttaangaactgaagaggctgatcgtagttccgggataaggtgg

SEQ ID NO: 4845 - DNA, 622 bp, Homo sapiens
  misc_feature (514)..(514): "n" may be a, t, c, g, other or unknown
  misc_feature (585)..(585): "n" may be a, t, c, g, other or unknown
  misc_feature (610)..(610): "n" may be a, t, c, g, other or unknown
  misc_feature (618)..(618): "n" may be a, t, c, g, other or unknown
gaagtggcgtacggcatgcgccggtggcgtgatggagcggcagcagcagcagcaacagcaactgcgaaacctgcgtgacttcctgttggtctacaatcggatgacagaactctgcttccagcgctgtgtgcccagcttgcaccaccgagctctggacgctgaggaggaggcctgtctgcacagctgtgctgggaagctgatccattccaaccaccgcctcatggccgcttacgtgcagctcatgcctgccctggtacagcgccgcatcgcagactacgaggctgcctcggctgtgccaggcgttgctgctgaacagcctggggtctctccatcaggcagctagccatacccaaccccaggaaggaaggccttggatggaccctcagattgaaggacccggtggaccttggggttggtgaatcctaaacagagagaattcgaggttgcctgaaaagctgggtgtccttgctccttttcctggagccaatatacccagtttttactcagtttgatntatattctgggcaaggaagctttgcctactttattggcacaatccgttgttctgtcgtttagtgcatatcngctggcttcagccctggcagctgangaaattgntttc

SEQ ID NO: 4846 - DNA, 476 bp, Homo sapiens
  misc_feature (304)..(304): "n" may be a, t, c, g, other or unknown
  misc_feature (413)..(413): "n" may be a, t, c, g, other or unknown
  misc_feature (425)..(425): "n" may be a, t, c, g, other or unknown
  misc_feature (452)..(452): "n" may be a, t, c, g, other or unknown
tccaaagaatgttgctacagagacacaattgaaaggtggtcagcattctcaagctgctccagtgaaatggattttccaagataatctacagccttttacgccatctcttgttcctgttaagtcttcaaataatgtggcttcaaagattttaaaaacttttgtagataggaaaaatttgggagataatactataaatatgccaccattgagtaccatcgatcctagtgggacgcgatccaaaaatatgcctattaaagataatgctttggttatgtttaatgggaaagtctatctgttggctaanaaggggacagatgttctgccatcacaaattgaccaacagaattctgtttctcctgatactccagtaagaaaagacacgttacagacagtgagttcaagtccagtcacanaaatatccaganaggttgtaaatattgttttggctaaangtaaatcttcccagatggagacaa

SEQ ID NO: 4847 - DNA, 630 bp, Homo sapiens
  misc_feature (551)..(551): "n" may be a, t, c, g, other or unknown
  misc_feature (587)..(587): "n" may be a, t, c, g, other or unknown
  misc_feature (622)..(622): "n" may be a, t, c, g, other or unknown
gtgtcacaagcaaaccctaacctcactgccaaacaaagatgctggcattatgctaagaaataaggggaatggccaggcgcggtggctcatgcctgtaatcctagcactttgagaggccaagataggcagatcacgaggtcaggagttcgaaaccagcctggccaacagggcgaaactccatctctactaaaaatagaaaaattagccaggtaaggtggcgggtgcctgtaaggtggcgggtcccagctagttgggaggctgaggcaggagaatcatttgaacctgagaggaagaggttgcaatgagccaagatcatgccattgcactccagcctgggcgacaagagcaagactctgtctcaaaaaaaaagaagggggataaagaaaaacactggaaaaaggatgacctgtagttaagtgttggcataatacaatgaaagacttaacgtttctagacactctagttgaatttggtcctttgagactgtcgtgggctcatttcctcagcgtgttgatttagtgactcctgaaggagcagacccttggtttggncctcacttttccataagacgttcaaatagatttaangcctgagggtcctgtcatctaaatccattcagtanaccgtaca

SEQ ID NO: 4848 - DNA, 642 bp, Homo sapiens
  misc_feature (587)..(587): "n" may be a, t, c, g, other or unknown
  misc_feature (596)..(596): "n" may be a, t, c, g, other or unknown
  misc_feature (614)..(614): "n" may be a, t, c, g, other or unknown
gcagaaggaggaaggacagcacagctgacagccgtgctcaggaagtttctggatcctaggctcatctccacagaggagaacacacaggcagcagagaccatggggcccctctcagcccctccctgcacagagcacatcaaatggaaggggctcctgctcacagctactcaggaggctgcggcaggagaatcacgtgaacccaggaggcagaagttgcagcgtgccgagatagcgccactgcataccagcctgggcgacagtacgagactccgtctcaaaaaaaaaaaaaaaaaaaaaaaaaaaagagaaaaaagaaataaaaggaaagaaggctctgttggagcctggataggggaaaatataccagagagggacaggggtcaaaacaggaaagtcacattgaactggaattggtaagaggtaggaaaatcttaagtgttctgttttcctgattaatcatcaggggccacattttgaaaaatgataataataactatatcaagatgacacttcaaataaaaatataaagcaggacgtgaaacactgtcctcagcaaaaaacctcaacaattggggggagaaaaaaanaacaccaangggtgttggagggccctnaaaagtctcacatctacaggggtctgca

SEQ ID NO: 4849 - DNA, 571 bp, Homo sapiens
  misc_feature (528)..(528): "n" may be a, t, c, g, other or unknown
  misc_feature (540)..(540): "n" may be a, t, c, g, other or unknown
  misc_feature (567)..(567): "n" may be a, t, c, g, other or unknown
atgacaataaaatgcatgttcttttatgttgaggctctgttttgagaagtaaaataaattatgtctttagtacaatatatgaattgtatatggaaaaacatgctttttgaaagtcccaccaaaaaggtttctttatggtatcattaaatataatttcagtttttatatgtatacatcatccctgtctctctttccaggccgggcatttatatatgtatggtcagtatattttctattattggcacttggcatctcctttcccctgctccagaatggtcttttctgataaaactcacaagctttgcattaccacaagctctgctgctagaagagtgaatcacaagaatgttgtatgcttggggtgttctgtgtgcctgtgttgatgtgtctgtattctaatgagcaatccagttttacactagcatacagatatttaactctgaggtatgtgtccacaaagctgcttttgtcatttcactaagtcagtgggttttgcttgtgagagttagggggttgatttgacccgangcttcttagaangaattttttaacattccaagtttatcnaata

SEQ ID NO: 4850 - DNA, 576 bp, Homo sapiens
  misc_feature (508)..(508): "n" may be a, t, c, g, other or unknown
  misc_feature (543)..(543): "n" may be a, t, c, g, other or unknown
  misc_feature (559)..(559): "n" may be a, t, c, g, other or unknown
aaagatttggtagaaatgtgccgtggtgtgcaacatcccttgaggggtctgtttcttcgaaattaccttcttcagtgtaccagaaataccttacctgatgaaggagagccaacagatgaagaaacaactggtgacatcagtgattccatggattttgtactgctcaactttgcagaaatgaacaagctctgggtgcgaatgcagcatcagggacatagccgagatagagaaaaaagagaacgagaaagacaagaactgagaattttagtgggaacaaatttggtgcgcctcagtcagttggaaggtgtaaatgtggaacgttacaaacagattgttttgactggcatattggagcaagttgtaaactgtagggatgctttggctcaagaatatctcatggagtgtattattcaggttttccctgatgaatttcacctccagactttgaatccttttcttcgggcctgtgctgagttacaccagaatgtaaaatggtgaagaacataancattgcttttaattgatagattaccttaatttgcncacccttaaaaatggncctggaatcccagcggg

SEQ ID NO: 4851 - DNA, 698 bp, Homo sapiens
  misc_feature (476)..(476): "n" may be a, t, c, g, other or unknown
  misc_feature (635)..(635): "n" may be a, t, c, g, other or unknown
  misc_feature (657)..(657): "n" may be a, t, c, g, other or unknown
  misc_feature (678)..(678): "n" may be a, t, c, g, other or unknown
gcagccttcccagccccagcgggaccctgctccagcatgtggctcagtcacagaccgcaacacagacttcggtggtggtgaagtccatcccagcatcttcccctggagcaatcacccacattatgcagcaggcattaagcagtcacactgcttttaccaaacacagcgaggaacttggaactgaggagggcgaggttgaagagatggacactttagaccctcagacaggtctgttttaccgatctgccctgactcagtcacagtcagctaaacagcagaaacttagccagcccccgctggaacagactcagctgcaagtgaaaactctgcagtgcttccagactaaacagaagcagaccatccacctgcaggcagaccagctccagcacaaactcccgcaaatgccccagctttccatcaggcatcaaaaactcacccctctccagcaagaacaagcacagcccaagccagatgtncagcacacacagcatcccatggtggccaaagacaggcagcttcctaccttaatggcacagcccccgcaaactgtagtacaggtgcttgcagtgaaaaaccacgcagcaagctccctaaaactggcagcagggtccggaaccaaaccaaaaaatctacgntgtaaaccccaaaaccccccangagccaaattgtcgctcccangcttcttcaagaggaaacaa

SEQ ID NO: 4852 - DNA, 761 bp, Homo sapiens
  misc_feature (733)..(733): "n" may be a, t, c, g, other or unknown
  misc_feature (737)..(737): "n" may be a, t, c, g, other or unknown
  misc_feature (741)..(741): "n" may be a, t, c, g, other or unknown
gggcgcagcgccgagattgattcaccttcacctgtgctgcactccagctgacccaagtaggaagccagacgagctgtaaaacatgaacggaagagtggattatttggtcactgaggaagagatcaatcttaccagagggccctcagggctgggcttcaacatcgtcggtgggacagatcagcagtatgtctccaacgacagtggcatctacgtcagccgcatcaaagaaaatggggctgcggccctggatgggcggctccaggagggtgataagatcctttcggcaaatggccaagacctaaagaacctgctgcaccaggatgctgtagacctctttcgtaatgcaggctatgctgtgtctctgagagtgcagcacaggttacaggtgcagaatggacctataggacatcgaggtgaaggggacccaagtggtattcccatatttatggtgctggtgccagtgtttgccctcaccatggtagcagcctgggctttcatgagataccggcaacaactttgaaaaacttgctctctttcaatactcccaatgaagatacatttcactcaccctccacccctgctattctgccatgtctttccctctctctgcatagccagatttgaagtgactgatacccaccccaaaccttgctgttcacagtctccaattcttcatattctaatggggaaaagttaaggtatttgtttgaaaggaaaactgaaagaaaagacntggnttanaacaaatggagggagttata

SEQ ID NO: 4853 - DNA, 830 bp, Homo sapiens
  misc_feature (642)..(642): "n" may be a, t, c, g, other or unknown
  misc_feature (672)..(672): "n" may be a, t, c, g, other or unknown
  misc_feature (746)..(746): "n" may be a, t, c, g, other or unknown
  misc_feature (756)..(756): "n" may be a, t, c, g, other or unknown
  misc_feature (828)..(828): "n" may be a, t, c, g, other or unknown
caactaatgggaaaaataaccaagctagcatcataatgacagaatcaaattcacgcataacaatattaaccttaaatgtaaacaggttaaatgccccaattaaaagacactgactggcaaattggatagagagtcaagacccatcggtgtgctgtattcaggagactcatctcacgtccaaagacacacataggctcaaaataaagggatggaggaatatttatcaagcaaatggaaagcaaaaaaaaaaaaaaaaaagcaggggatgcaatcctagtctctgataaaacagactttaagccaacaaagatcaaaaagacaaaaaagggcattacataatggtaaagggatcaatgcaacacgaagagctaactatcctaaatatatatgcacccaaaacaggagcacccagattcataaagcaagttctcagagacctacaaagagacttagactcccacacaataatgggagactttaacaccccactgtcaatagtagacagatcagcaagacagaaaattaacaaggatattcaggacttgaactcacctctggaccaagtggacctagtagacatctacagaactctccaccccaaatcaacagaatatacattcttctcagcatcctgatccacancatcacacttttctaaaactgaccacatantggaagtaaaacagtcctcagcaaatgcaaaagaatggaaatcataacaaacagtctctcagaccacagtgcantcaagttagngttcaagattaaagaaacttgccccaaactttcaactacatgggaaactgaataacctgctccaaaatgacnac

SEQ ID NO: 4854 - DNA, 676 bp, Homo sapiens
  misc_feature (631)..(631): "n" may be a, t, c, g, other or unknown
  misc_feature (634)..(634): "n" may be a, t, c, g, other or unknown
  misc_feature (655)..(655): "n" may be a, t, c, g, other or unknown
agcatgatgcaagggaggtttgatgtcaaaatgaaatctatttccttgtttggccaaatgttctatggctttcccaccactcatggtggagcactctggatgttttattaaagaaagtcttcttgccacctatcaaagaaacatattttttagagtcataaaattaaatactgtgaaacgaaaagatgcaaaggaaataaattgaaaattactaacaaaacaaaaaacccctgaatgaataaaacatgctatactttggcaaatatagactatagctgatattcaggtaagcagacaaccctgttccttatgatgacccgaacaataagaggccaatcactgcccctgtctatgtttgctcttctattggttggaaaatgggcttgaagttgacaataactgcttaatgatgaacgtcaataataagaacttgtcctatacttcctattatttcactgtgggaagcagtgttttgtttgtttgtttgtttgttttcctatatatggcagtagcctctgtagtattctaaaacaaaggggggtgcggggggaccctgtctgtggtgtaagtaaatgtgtgatttaattctgtgcattgcatccttaatgtccttatgttaatccatatatantcncctaatttaccttttttgcantaagttagtttacgaagcacg

SEQ ID NO: 4855 - DNA, 763 bp, Homo sapiens
  misc_feature (563)..(563): "n" may be a, t, c, g, other or unknown
  misc_feature (706)..(706): "n" may be a, t, c, g, other or unknown
  misc_feature (751)..(751): "n" may be a, t, c, g, other or unknown
  misc_feature (760)..(760): "n" may be a, t, c, g, other or unknown
ctacggcggccgcgcgctccaggccggtcgctccaccccccggctcccgggactgtggactccacgaccctgtcctcggccctgtccgcgccgaagcagcccgggactgcgcagcgccccgcgtgccgacatgggaaagtctctttctcatttgcctttgcattcaagcaaagaagatgcttatgatggagtcacatctgaaaacatgaggaatggactggttaatagtgaagtccataatgaagatggaagaaatggagatgtctctcagtttccatatgtggaatttacaggaagagatagtgtcacctgccctacttgtcagggaacaggaagaattcctagggggcaagaaaaccaactggtggcattgattccatatagtgatcagagattaaggccaagaagaacaaagctgtatgtgatggcttctgtgtttgtctgtctactcctttctggattggctgtgtttttccttttccctcgctctatcgacgtgaaatacattggtgtaaaatcagcctatgtcagttatgatgttcaaaagcgtacaatttatttanatatcacaaacacactaaatataacaaacaataactattactctgtcgaagttgaaaacatcactgccaagttcaattttcaaaaacagtttttgggaaaggcacgcttaaacaaacataagcattattgggtccacttgatnatgaaaacaaatttgattacacaagtacctaccgtttataccaanagggaaaangag

SEQ ID NO: 4856 - DNA, 748 bp, Homo sapiens
  misc_feature (525)..(525): "n" may be a, t, c, g, other or unknown
  misc_feature (653)..(653): "n" may be a, t, c, g, other or unknown
  misc_feature (730)..(730): "n" may be a, t, c, g, other or unknown
  misc_feature (744)..(744): "n" may be a, t, c, g, other or unknown
gaagagatgccacttggcggccatggcagctgtagtatcggcgactccgggtcaaggcccggtcgagtgcagtaccatgggcagcaccgggtatagggcagagacagctttgtgtcaactttgctgctgaacccctaggacccatcgttagagacctgcaggactcctttcctcatcccaggctcggaggagagtttgctgggactggtgggctggtttcctgctctggggggcggatcaccttcggggccgcctcttggagacaggggcgcctagggaacgaacaggttcgcttgagtcacttacccgccgccgcctaagacattgtgccaccctcaatccgacaatcgaagaaatcgatcattcgcacattttccccattgacttttcccatctctgttaacccacgagaatctaatgactggcatctgagaacccagagcctgggaccttagattgctgtaagctttctctggtgctaatatcagcaaaaagggtctgttgccgggtacgttcaagaggaangtgcctcgtgaacacatctgctggtgggaaggcctaaagaactggaaaagcccactctcttggaaccaccacacctgtttaaagaacctaagcaccatttaaagccactgggaaatttgttgtccaantgggttgtgggtgaataaaggagggcaaaatgggatgattttcatctccaattaaccctgctgtcctctgggctaangtttggtggggaangtta

SEQ ID NO: 4857 - DNA, 675 bp, Homo sapiens
  misc_feature (608)..(608): "n" may be a, t, c, g, other or unknown
  misc_feature (631)..(631): "n" may be a, t, c, g, other or unknown
  misc_feature (633)..(633): "n" may be a, t, c, g, other or unknown
gagttcgccagtggtccaggagccgcttttttccactcgggaagacttcagagaagtctcacaaaggactcggctggctgcttttctcagtgccgaagccgcgccatgctcgttctcagaagcggcctgaccaaggcgcttgcctcacggacgctcgcgcctcaggtgtgttcatcttttgctacgggccctagacaatacgatggaacgttctatgaatttcgtacttattaccttaaaccttcaaatatgaatgcgttcatggaaaatcttaagaaaaacattcatcttcggacctcttactctgaattggttggattctggagtgtagaatttggaggcagaacgaataaagtgtttcatatttggaagtatgataattttcctcatcgagctgaagttcggaaagccttagccaactgtaaggaatggcaagaacaatctatcattccaaatttggctcgcattgataaacaagagacggaaattacttacctgataccatggtccaaattagaaaagcctccaaaagaaggagtctatgaactaactgtttttcaaatgaaacctggtgggccaagtctgtggggtgatgcaattgaaaagancaattaatgccatgtcaatttangntacacaaaagtagttggggttttccacacaggatattggggg

SEQ ID NO: 4858 - DNA, 604 bp, Homo sapiens
  misc_feature (508)..(508): "n" may be a, t, c, g, other or unknown
  misc_feature (554)..(554): "n" may be a, t, c, g, other or unknown
  misc_feature (576)..(576): "n" may be a, t, c, g, other or unknown
tctctgaatgctgagttctgccttaaaacagcacgggtcatgctagatgaaagggatctctgttttatactctcatctcttcgctattgccgtgggatgaaagacagcagaaggaaggcgtctaagttcagaacaaagtgagcaagaccagctggctgctgttggtagcagaggcacagccagcctgtcatggcactggggggccgaggtgagctgtgccccctcctcctgggcttgtgaccctctgccccccatgggagtttcactctggctcctaggctggaatgcggtggcaccatctcagctctctgcaacctccacttcccaggttcaagcgattctcctgcctcaccctcctgagtagctgggactacaggcgagcaccaccacagccggctaatttttctatttctagtagaaatggggtttcaccatgttggcaggctggtctcgaactctgacctcaagtgatctgcctgcctcagcctctgaaagtgctggattgcangcgtgagccaccgcaccaggcctaaacagatttctttacaatctancaccatgaacagcaagcattancattgctccgtccaaccaacaacccgca

SEQ ID NO: 4859 - DNA, 781 bp, Homo sapiens
  misc_feature (703)..(703): "n" may be a, t, c, g, other or unknown
  misc_feature (731)..(731): "n" may be a, t, c, g, other or unknown
  misc_feature (737)..(737): "n" may be a, t, c, g, other or unknown
aattcatacaggagagaagtcatatatatgcagtgattgtggaaaaggcttcatcaagaagtctcggctcattaatcatcagagagttcatacaggagagaaaccacatggatgcagcctgtgtgggaaggccttctccaaaaggtccaggctcactgaacaccagagaactcatacaggagagaagccctatgaatgcactgaatgtgacaaagcattccgctggaaatcacagctcaatgcacatcagaaagctcacacaggagagaagtcatatatatgccgtgattgtggaaaaggcttcattcagaagggaaatctcattgtacatcagcgaattcatactggagaaaaaccctatatatgcaatgaatgtggaaaaggcttcatccaaaagggcaacctccttattcatcgacgtactcacactggagagaaaccctatgaatgcaatgaatgtgggaaaggcttcagccagaagacatgtttaatatcccatcagagatttcacacaggaaagacaccctttgtatgtactgagtgtggaaaatcctgctcacacaagtcaggtctcattaaccaccagagaattcacacaggagagaaaccctatacatgcagtgactgtgggaaagctttcagagataaatcatgtctcaacagacatcgggggaactcatacagggggaaagaccgttatggnttgctctgattgttggggaaagctttcntcccanttgtcatgccttggtttaaccaaaagggaaatgcctgcttgcaa

SEQ ID NO: 4860 - DNA, 715 bp, Homo sapiens
  misc_feature (538)..(538): "n" may be a, t, c, g, other or unknown
  misc_feature (617)..(617): "n" may be a, t, c, g, other or unknown
  misc_feature (640)..(640): "n" may be a, t, c, g, other or unknown
  misc_feature (692)..(692): "n" may be a, t, c, g, other or unknown
gaaaggacgcgccggagccgggtgagtggccccgcaactgcccctgcccctgattcttccttgcctcgccgcgaaccccggcgcccgcgccgacccgccactgcctctgcccttttccagataacagaaagtaacgtgaaggaattcaggtgactcagacatggaggagagaagacctcatctggatgccaggcccaggaattcccataccaaccacagaggccctgtggatggagagttaccaccaagagctagaaatcaggccaataacccaccagccaatgctctccgaggaggagccagccaccctggaaggcatcctagggccaacaaccatcctgctgcttactggcagagggaagagagatttagggccatgggcaggaacccacatcaaggaaggaggaaccaggaggggcatgccagcgacgaagctagagaccaaagacatgaccaggagaatgacaccaggtggagaaatggcaaccaggactgtaggaaccgcagaccaccatggtccaatgacaacttccagcantggcggactccccaccaagaagcctacagaacagccacaagcaggcgaagaaactgggctacaagttcttagaaagtcntctgcagaaaagacccttctgangtggtcatcacacttgccacaaagtttagggctgaaagagctcctttctcantcttccattgaaatctaacttcc

SEQ ID NO: 4861 - DNA, 730 bp, Homo sapiens
  misc_feature (707)..(707): "n" may be a, t, c, g, other or unknown
  misc_feature (717)..(717): "n" may be a, t, c, g, other or unknown
  misc_feature (730)..(730): "n" may be a, t, c, g, other or unknown
cttatgccccacctcccaccccagctcctgcaacacaaatgcccagcacaccagggtttgtgggatacaatccatacagtcatctcgcctacaacaactacaggctgggagggaacccgggcaccaacagccgggtcacggtaggagaatcaactattacagcatccggcaaacaactggaattgaccagaaatgccttcagaattaggtctttttgaatcataagcacagccatttaaaaaaaattttttaacctagctttttgagtattttcaacattcgttgtagcatctcacactgaaaaaataaatagtgagatctggaatgtatatagaagaaaagaaaaatccattctgtttggtggttggtagggttaaagccttgagcacttgatgcttatactgtatgtaaacaaacagaatttcttaaggtaaaaatatcctttttgacataaagagtatttttcatttttataaggtgattggcattagtctcaaggattgagtttctagtagaggctggtctttcagacctggctttttcagggctggaaagcttttggctggtacaccagtttgaatcgctacccatagttatttgtcttttggatttagtagttgaccttctaactaagactcatttctctacagtgaaaaagagaaaaacgttttaatgtcacctcaaagaaatgcagagtgaagggtgantgaaattaanttgaaggtatcan

SEQ ID NO: 4862 - DNA, 790 bp, Homo sapiens
  misc_feature (115)..(115): "n" may be a, t, c, g, other or unknown
  misc_feature (405)..(405): "n" may be a, t, c, g, other or unknown
  misc_feature (533)..(533): "n" may be a, t, c, g, other or unknown
  misc_feature (627)..(627): "n" may be a, t, c, g, other or unknown
  misc_feature (629)..(629): "n" may be a, t, c, g, other or unknown
  misc_feature (638)..(638): "n" may be a, t, c, g, other or unknown
  misc_feature (734)..(734): "n" may be a, t, c, g, other or unknown
  misc_feature (763)..(763): "n" may be a, t, c, g, other or unknown
  misc_feature (767)..(767): "n" may be a, t, c, g, other or unknown
agacaggagcagtcattcccttgtagggacaactagaagaaattttatgaataagcatcagaagccagtgctaacaggccagcggttcaaaactcggaaaagggatgaaaaaganaaattcgaacccacagtcttcagggatacacttgtccaggggcttaatgaggctggtgatgaccttgaagctgtagccaaatttctggactctacaggctcaagattagattatcgtcgctatgcagacacactcttcgatatcctggtggctggcagtatgcttgcccctggaggaacgcgcatagatgatggtgacaagaccaagatgaccaaccactgtgtgttttcagcaaatgaagatcatgaaaccatccgaaactatgctcaggtcttcaataaactcatcangagatataagtatttggagaaggcatttgaagatgaaatgaaaaagcttctcctcttccttaaagccttttccgaaacagagcaagacaaagttggcgatgctgtcggggattctgctgggcaatggnaccctgcccgccaccatcctcaccagtctcttcaccgacagcttagtcaaagaaggtaacgaggctcctgttttctcgcctgtcaagacaacanangaaaaatanagtcacagatagttagaaaaaatgccaggggctctttttggggtcctccaatactcattccttcatttaagagaatatctttgtatggggtggtanattgccctttcaaattagtaaaagggagngggncttgttaatttgtagggaaaagg

SEQ ID NO: 4863 - DNA, 600 bp, Homo sapiens
  misc_feature (559)..(559): "n" may be a, t, c, g, other or unknown
  misc_feature (572)..(572): "n" may be a, t, c, g, other or unknown
  misc_feature (590)..(590): "n" may be a, t, c, g, other or unknown
gcttcccgtccgctgtcctctgctgccagtcccctgccccgggcaaagcccatctggtccgccgagcaggccggagctattgggagtggcggatcctcccaccccagccggatctgggccatggccgagcctggagagggactgccagaggaggtgctggcactcatcttccgccacctgtccctgagagaccgtgctgccgccgccagggtctgcagggcctgggccgccgctgctacctgcagcgccgtgtggcacgacacaaaaatcagttgcgaatgtgagctggaaggcatgctgccaccttatctgtccgcctgcctcgaccacattcacaacctacggctggaatttgagccatcgaggaagccgagccgccgggcggccatcgagctgctgatggttctggcgggccgtgccccggggctgcgaggcctgcgcctggagtgccgcggagaaaaaccgctcttcgacgcgggccgcgacgtcctggaggctgtgcacgctgtatgcggggcggccaaccagctacgccaactcgacctgcggcgcttgtccntcacactgggacnaagcgctggtgctgcaangcggcgcgca

SEQ ID NO: 4864 - DNA, 684 bp, Homo sapiens
  misc_feature (615)..(615): "n" may be a, t, c, g, other or unknown
  misc_feature (644)..(644): "n" may be a, t, c, g, other or unknown
  misc_feature (651)..(651): "n" may be a, t, c, g, other or unknown
gaacccaggaggcagaggttgcagtgagccaagatcatgccactgcactccagcctggcgacagagcgagactccatttaaaaaaaaaaacaccagggcatctgtaagccactttgggagtcaaaagaatgtagagctgggctggactccttagaagaaagttaagttctgagtgtgggaggaagtgcctgcacccccacatccagacagcccgtcactcctgctgccgaagactgacttgctgattcgggctctgcctccatagtgggggcacagagccagggagagtgcccacaggcccagggatcctgggtgtgggaccagggagaatgcccacaggccccagggcctttttgagcccagggcgctctctgcacaggcctgctacaacttcatccgaagcatggccgcctacagcctcctgctgttcctgctgcagatcaaggacagacacaacggcaacattatgctggacaagaagggccatatcatccacatcggtcagccagccacagcgccaccctcctctcccttcaccccggcacccaggggtggatagggatccccaccccacagagaggagaatgcccaagaccaccctgccaggagtgtcanggtccaactctgaggtccgaactgtcggncaccaanctgttctgctgtaaaaggtgcctgggccccggg

SEQ ID NO: 4865 - DNA, 777 bp, Homo sapiens
  misc_feature (644)..(644): "n" may be a, t, c, g, other or unknown
  misc_feature (717)..(717): "n" may be a, t, c, g, other or unknown
  misc_feature (730)..(730): "n" may be a, t, c, g, other or unknown
  misc_feature (754)..(754): "n" may be a, t, c, g, other or unknown
tgaaaaccagcttgtagttagggcccggagcgcatgccatagactcggcgactcaggaatcctgaagactctctgagcgacctggagcaccttggctgtgtccctgcctgccttcaccctcctccagtgcccccagtactgggcgtgagtccggaagtggccacaacccagcctggaccgtcgcttataaagctgtgtaaacctgtataagctcaggcgttgacagctggaaggcagctggcactggcagcccccttcattgcacctatctcccccatctcattgccacggctgaaccctccttctcaatcttggaacagcacccccttctttaagtcccccaggacccgacagcctgagccagatttctactgtgtcaagtggatcccttggaaaggagaacagacacccatcatcacccagagcactaacggcccttgccctctccttgccatcatgaacatcctctttcttcagtggaaggtgaagctccccccgcagaaggaagtgatcacatcggatgagctcatggcccatcttggaaactgcctcctgtccatcaagccccaggagaagtcagagggacttcagcttaattttcagcagaatgtggatgatgcaatgacagtgctgcctaaactggncacaagtctggatgtcaatgtgcgattcacaagcgtctctgattttgggtatacaaccgaggtgcaatgtccnttgaccctgctanggaatacctccgttacaaaggggntgggcttgtttgattccaaaaaa

SEQ ID NO: 4866 - DNA, 699 bp, Homo sapiens
  misc_feature (516)..(516): "n" may be a, t, c, g, other or unknown
  misc_feature (554)..(554): "n" may be a, t, c, g, other or unknown
  misc_feature (615)..(615): "n" may be a, t, c, g, other or unknown
  misc_feature (630)..(630): "n" may be a, t, c, g, other or unknown
  misc_feature (666)..(666): "n" may be a, t, c, g, other or unknown
gtgtcactcggcccgctcggcgcgccccttcccagccgcccttccgtaccggctctcgggctcttccggtctccggccgccccttacctgcaggctcttctcccgccgcggcccggcgctctccgagtcgcccctgcggactggtctcgcacagtgcctgggcaccgggcgccagacagacactggccatgacgagcggcgcaaccaggtaccggctgagctgctcgctccggggccacgagctggacgtacggggcctggtgtgctgcgcctatccgccgggagcctttgtgtccgtgtcccgagaccgcaccacccgcctctgggccccagacagtccaaacaggagctttacagaaatgcactgtatgagtggccattccaattttgtatcttgtgtatgcatcataccctcaagtgacatctaccctcatggcctaattgccaccggtggaaatgaccacaatatatgcattttctcactggacagtccaatgccactttatattctaaaangccacaaaaatactgtttgtagtctatcatctgggaanaattttgggacattacttaatgggttcatgggacaccaactgctaaagtctggctgaatgncaagtgcatgatgancttgcaggggtcatacagatgcggtgtgggcgggtnaagatcttacctgaaacaagggcttaaatgttt

SEQ ID NO: 4867 - DNA, 723 bp, Homo sapiens
  misc_feature (461)..(461): "n" may be a, t, c, g, other or unknown
  misc_feature (665)..(665): "n" may be a, t, c, g, other or unknown
  misc_feature (676)..(676): "n" may be a, t, c, g, other or unknown
  misc_feature (689)..(689): "n" may be a, t, c, g, other or unknown
atcgccagcctccagtcctgcctccacgacgcgcccttccccaaggctggccgggtctggatgtcgccatcccctattcggagctacagacctcgcagctgaactcttaaaaagaacctcgcttcttcctcacggtgctccagctccacacaccgtactgagcctcgccagccaccgtacgcgaggtcgcggcgcgtccgtgacgtcactgatgtgcgcttctcccgcactaagggaaacatggctctagcgcggccggtgcggctcttttccctcgtgactcggttgctcctggcgccgcgacggggcctcacggtccgcagtcccgacgaacccctgccggtggtgcgcatcccagtggctctacagcggcagttggaacagcggcagagcaggcggcggaacctcccgaggccggtgctggttcgacccgggaccgctgctggtttcggcgcggcggncggagttgaaccagccggcgcgcctcacactgggccgttgggagcgcgcgccgctagcctctcaaggctggaagagtcgacgcgcgcgtcgggacaacttctccatcgagcgcgcgcaacaaggaggcgccagcggtgcgaaagctctcgtctaagggcaactttgctgacctgggcctggagccccgtgtgctgcacgcactnaaagggaaggnttgcgccttgaangtcgtttaagcccaaaaaccggtggcaattccaa

SEQ ID NO: 4868 - DNA, 698 bp, Homo sapiens
  misc_feature (518)..(518): "n" may be a, t, c, g, other or unknown
  misc_feature (549)..(549): "n" may be a, t, c, g, other or unknown
  misc_feature (659)..(659): "n" may be a, t, c, g, other or unknown
  misc_feature (679)..(679): "n" may be a, t, c, g, other or unknown
  misc_feature (698)..(698): "n" may be a, t, c, g, other or unknown
ataacgaggacacagtgagtgagagggtacaataatgagaggcaggaagcggaagactgttgaagctaaaatcagaaatcattgtgatcgttctctaggtcagtggatcctgctgtgccatacgttggaatcaccttggaatcagctggggatctttaaaggtgtttctgcctggctccccaccccagaccttgtgatttaattcaccaggggtgtggcatggcattggggtttccaaaggcttcccatgtgatcctaatatgcagccacgtttgtgaactcctgcactaggcagtgagaacgcttccttctgagttgaggctgcctgaacctcaaaggcatctcaacgttgtgtcaatgcctaaatgcactcttcggctcatgtagcaacttctagagctgcgtccgaatcacagaggaaattaactgttgaaaataatgtttgattgagttaccatgggcatgctaaattatgtttatgtccctaaaaagtgtttttcatcgttctctaatgttangatggttggatgtctgaaggaaagtgttggnattcttaaaagtactagaaatcttgaaaccaagttatgtttttaaatatgttttgaatttgataacttaataaattgtaattaattaaagtcatgtttaacactgggaanaggagccatccaaagtttangaaaataaatccttttgan

SEQ ID NO: 4869 - DNA, 777 bp, Homo sapiens
  misc_feature (648)..(648): "n" may be a, t, c, g, other or unknown
  misc_feature (747)..(747): "n" may be a, t, c, g, other or unknown
  misc_feature (757)..(757): "n" may be a, t, c, g, other or unknown
  misc_feature (765)..(765): "n" may be a, t, c, g, other or unknown
attaatctggccgtgccatgcatctactccatgttcaggcttgtggagaggtacgagatgccacggcacgaagtctacgttctcctgatccgaaacatctttttgaaaatatcaatcattggcattctttgttactattggctcaacaccgtggccctgtctggtgaagagtgttgggaaaccctcattggccaggacatctaccggctccttctgatggattttgtgttctctttagtcaattccttcctgggggagtttctgaggagaatcattgggatgcaactgatcacaagtcttggccttcaggagtttgacattgccaggaacgttctagaactgatctatgcacaaactctggtgtggattggcatcttcttctgccccctgctgccctttatccaaatgattatgcttttcatcatgttctactccaaaaatatcagcctgatgatgaatttccagcctccgagcaaagcctggcgggcctcacagatgatgactttcttcatcttcttgctctttttcccatccttcaccggggtcttgtgcaccctgggccatcaccatctggagattgaagccttcagctgactgtggcccttttcgaggtctgcctctcttcattcactccatctacaagctggntcgacaccctaagtacaagggcctgggctacctgtggggttgtttggatctaaccgggaacctcaatgggaagttgtgcacttctttttcaacctcaancctcatttgnggctaaancatcaaccctaa

SEQ ID NO: 4870 - DNA, 526 bp, Homo sapiens
  misc_feature (160)..(160): "n" may be a, t, c, g, other or unknown
  misc_feature (436)..(436): "n" may be a, t, c, g, other or unknown
  misc_feature (439)..(439): "n" may be a, t, c, g, other or unknown
  misc_feature (509)..(509): "n" may be a, t, c, g, other or unknown
atttgccactcgatactgcctctgcaacccaggcgtcttccagtccacagacacctgctacgtgttgtccttctccatcatcatgctcaacaccagcctccacaatcccaacgcccgggacaggccgcctttcgagcgctttgtgtccatgaaccgcggnatcaacaatggtagcgacctgcccgaggaccagctgcggaacctcttcgacagcatcaagagtgagccattctccatccctgaggacgacggcaatgacctcactcacaccttcttcaatccagaccgggagggttggctgctcaagctagggggccgcgtgaagacgtggaaacggggctggttcatcctgaccgacaactgcctctactacttcgagttcaccactgacaaggagccacggggaattatacctcttgagaacctctcggtgcanaangtggatgaccccaagaagccattctgcctgggagctctacaaccctagctgccgaggccagaaaatcaangcctgcaagaccgatgg

SEQ ID NO: 4871 - DNA, 737 bp, Homo sapiens
  misc_feature (694)..(694): "n" may be a, t, c, g, other or unknown
  misc_feature (722)..(722): "n" may be a, t, c, g, other or unknown
  misc_feature (726)..(726): "n" may be a, t, c, g, other or unknown
cagcagatttaggcattggagatctaattcctgtggatgttaaccatttgaacatttgtaagccaaagaaaaaggatgcttttttgtaccagcgtactttacaattcattcgtgaagctttagccaaagaccttgaaaactaacagttgtgctcttccagttttcatatgtgaattcagtgcaagaaacttggtgttctgtttcttcttttaagctctatgcaatcatgcaaacatagtgatcatagcgtcaacatggtctggagtgtgttgcagactacagaacattgttctcccttcaagcgctgtaaagcaccaacccggaagtggcaggcacagaaggaagggctggattgggcccctttggtgtaaagaagtccctgtgtgctgctttatggttcgcagtgttgggcttggtgactggagcaaagctgctgtgagagagtgtcctttcccatctgtgactttcctggtgcatccaggaggggcacggcaggttctgaggtaactcaacttaccataaaaatgccattaagagagtacctaaaatggagagaagaatgaactagaacattcaagactcttttacttctgggtattgatttgctgtacatttttaaagtttgagtttttagctcagttctaccttttatctgacacattattactaagtggttaactttgttagacttaantggcatgtccggggtcaagttcccttgnatcnaattttccgta

SEQ ID NO: 4872 - DNA, 661 bp, Homo sapiens
  misc_feature (384)..(384): "n" may be a, t, c, g, other or unknown
  misc_feature (620)..(620): "n" may be a, t, c, g, other or unknown
  misc_feature (652)..(652): "n" may be a, t, c, g, other or unknown
  misc_feature (660)..(660): "n" may be a, t, c, g, other or unknown
actcgatattgcgaaaccaaacttggtataagagctcccaacactgctaaactggtcatcgctaaacctttaaaaaaaaaaaaaaagcattcgctggtacccagatttccacaggagttaaacatttcctgcgcagctaaagcaagtcttaccagtaggaaaccggaacttgctaggactaagaaacttgaggctaggctgaccccatggttgttatgattagaaatccgaggccactggaaacccggagctgctgaccaacgagtcacagggtaacttcgccttcgcatggggaaacgggctggtgcagtggtgtcatcttggctcagtgcagcctcgacttcctgggatccagcgatcctcccgcttcagcctctagagtanccgagaccacaggtcacccctcgctgccaggctctcttcccggtccagagcccacaggatcctacaggaggggccaacaactgcttgcctttgaaacttgaaactctcggtctaaggttccttaggagcgtaaaaggcacagcgttttctgatcgcagcttcaggtctcccgcccctgtcccggtacctctcctgcaggacggaactctgtgggaacgctcgttgattctgatggntaactgtcagatatccttgatattgggcatangatttggna

SEQ ID NO: 4873 - DNA, 648 bp, Homo sapiens
  misc_feature (586)..(586): "n" may be a, t, c, g, other or unknown
  misc_feature (619)..(619): "n" may be a, t, c, g, other or unknown
  misc_feature (638)..(638): "n" may be a, t, c, g, other or unknown
attggctgggttcggcgcagctaacagacggcggcagtgcgagaaagccgaagatggcggtccccgcggcgctgatcctacgggagagccccagcatgaagaaagcagtgtcactgataaatgcaatagatacaggaagatttccacggttgctcactcggattcttcaaaaacttcacctgaaggctgagagcagtttcagtgaagaagaggaagaaaaacttcaagcggcattttctctagagaaacaagatcttcacctagttcttgaaacaatatcatttattttagaacaggcagtgtatcacaatgtgaagccagcagctttgcagcagcaattagagaacattcatcttagacaagacaaagctgaagcatttgtcaatacttggtcttctatgggtcaagaaacagttgaaaagttccggcagagaattctggctccctgtaagctagagactgttggatggcagcttaaccttcagatggctcactctgctcaagcaaaactaaaatctcctcaagctgtgttacaactcggagtgaacaatgaagattcaaagagcctggagaaaagttctgtggnattcagtcacaaggagttgtttgatttctatancaagctagagactatacangcacagctgg

SEQ ID NO: 4874 - DNA, 490 bp, Homo sapiens
  misc_feature (465)..(465): "n" may be a, t, c, g, other or unknown
  misc_feature (470)..(470): "n" may be a, t, c, g, other or unknown
  misc_feature (476)..(476): "n" may be a, t, c, g, other or unknown
ccctgcgcggctgctggaccgacgggcgcacccaggtaggggggcggctgagccgcgcagtgcggaccctcgcggggaactgcgccgccgccaccatgtctcaggaaggtgtggagctggagaagagcgtccggcgcctccgggagaagtttcatgggaaggtatcctccaagaaggcgggggctctgatgaggaaattcggcagcgaccacacgggagtggggcgctccatcgtgtacggggtaaagcaaaaagatggccaagaactaagtaacgatctggatgcccaggatccaccagaagatatgaagcaggaccgggacattcaggcagtggcgacctccctcctgccactgacagaagccaacctacgcatgtttcaacgtgcccaggacgaccttatccctgctgtggaccggcagtttgcctgctcctcctgcgaccacgtctggtggcgccgcgtgncccancggaangaggtatcccggtg

SEQ ID NO: 4875 - DNA, 760 bp, Homo sapiens
  misc_feature (618)..(618): "n" may be a, t, c, g, other or unknown
  misc_feature (670)..(670): "n" may be a, t, c, g, other or unknown
  misc_feature (693)..(693): "n" may be a, t, c, g, other or unknown
  misc_feature (727)..(727): "n" may be a, t, c, g, other or unknown
taaaataaaataaaataaaaataaaagtttgcagtttacacaatcaatcctggaagcattttatttacactgtgggtcccactgctgagctaacttgcatttacaaagcacctctagatactgtcataatgtatccagaaattcaattagagagagtgtgtgtttctgggccaacagaggcaaggttagggggcagaggtaatataagtgagctggcccaagccatgcaacttagcctcatagattgaagtcatcacatgaattaaccccaaactggtacccagtgatgtcagagcatgagtccagatgtgctctgtgcgtgcatgggatggcttccaataaagtcaaatgacacagtcacgtgtcagtttaggtcctctaggaaacagacaccagagagaatgagaagtgcaagtgacatattgggggatgcctatgaaagacaaaggggagagggagcaggatgaggtgggaaggcttcagactgtgacacaggtgtgccacctgtgaaaagtgaaggggaaagaagcagcattctcagggagagcctcagaccacagtgccactctgagcaagtggccaggctgatggagcctgacactaaagggtgcccattanagaagtctcgggcctagtgtcccagccacatggagtgtcccagagagcgcanctttggtgtgagctctgagggancaagtcctccttgagggtctctgaaaggaagatntaagctgtgcacttcttgggctgccttaattta

SEQ ID NO: 4876 - DNA, 767 bp, Homo sapiens
  misc_feature (684)..(684): "n" may be a, t, c, g, other or unknown
  misc_feature (696)..(696): "n" may be a, t, c, g, other or unknown
  misc_feature (735)..(735): "n" may be a, t, c, g, other or unknown
cttctaacagtatttctcaagtacttaacaaaaagatgaaaacttgaagtccaagccgtgctgctgattccgtctcacagtttaaagactgtccagaaactttaagctttcaaaactgtacattttaaaatcctgtgcgtttatcttcattttgctgggcagaaagccaaagtactggactgcctggttcagggctgaacgcctagtacacctgctaacttggagcttcagagccatggcaaccaaggagtcaagagacgccaaagcacagttggccctctcctcatcggccaatcagagcaaggaagtgcctgaaaacccaaactatgctctcaaatgtactcttgtgggacacacggaagcagtgtcatcagttaagtttagtcctaatggagaatggctagcaagttcttctgctgataggctaatcataatttggggagcatatgatggaaaatatgagaaaacactctatggtcataatttggaaatatcggatgttgcctggtcatcagattccagtcgtcttgtttctgcctcagatgataaaactctaaaattatgggatgtgagatctggaaaatgtttgaaaacactgaaggggcacaagtaattatgtcttttgttgtaacttcaatccgccatccaaccttataatctcgggatcttttgatgaagactgtnaaaatatgggangtgaaaacaggaaagtgtctcaagactttgtctgctcantctgacccatttctgctgttcattttaatgta

SEQ ID NO: 4877 - DNA, 785 bp, Homo sapiens
  misc_feature (652)..(652): "n" may be a, t, c, g, other or unknown
  misc_feature (736)..(736): "n" may be a, t, c, g, other or unknown
  misc_feature (759)..(759): "n" may be a, t, c, g, other or unknown
  misc_feature (766)..(766): "n" may be a, t, c, g, other or unknown
gtgagagaatgcttgtctgtgaaagtcacctgtaagatgagaacttaaaaatgattgagttggctgggcacggtggctaatgcctataatcccagaactttggggggctgaggtgggtgaatcactttgagctcaggagtttgagaccagcctgggcaacatggggagacccttcctctactaaaaacacaaaaattaatcaggcatggtggctaacacctgtaatcccagctactcagctggctgagtctgaaggatcacttgagcctgggaggcagaggttgcagtgagcggagactgcaccaccgcactccagcctgggagacagagtgagaccctgtctccaatatatatatatattaaataaatggttaagagctaaccaaagcatatagaggaatagctttatagcaaataatgtaatgtggaaatgcatagggcaggatagaactttgcaacttcaagaaaatagaacacaggaggctaatgcctgtaatcccagcattttgggaggccaaggtgggagaattccttgagcccaggagtttaagtttaagaccaagcctgggaaaagtagcaagacctcatcattatgaaaaaattaaaaatcagccaagtgcagtggtgcttgcccaaagtcctagctactcangaggctgaggcaagaggacccagcatgaggcacaaggagttcaaggctaagggtgaagctatgaataatgccctgcaacttcanccttgggtgacaagaccaagaanttccaanctcaaattttttaaacgaa

SEQ ID NO: 4878 - DNA, 722 bp, Homo sapiens
  misc_feature (647)..(648): "n" may be a, t, c, g, other or unknown
  misc_feature (698)..(698): "n" may be a, t, c, g, other or unknown
cagaagaaaaattattaaacaactcattttaagattcaaattaactaattcctgcatatatgacattccttacataagcgaacactaaacaaaaatggctagaaatgtctttttctttcttttctctctttgttgtttaaggtattaagcacgaattattacatgagactggcagatagctattaatcctcttacagatttgagaaagttgattctcaaatatttatgcaccttctccttcattgttttctttaaatctgtcctcttaaaaagcttcttaagagctcagttaatgcttttgacttaactaggagaaaaaggcatgataatacaggcaagatggcattgttagcaattctggtagtggtttggaatgaatcctaagaggcagggatcttaaggacaaggaagagaagagagagagggagggatctttgatctctttctctggtaatcttaatgcataattttactaaaacatgttctcaattcattcatattattaagctcttcctgcagttgatatctgagcagagtaagatttgtatttccatttttacttttttgaaagagaatatatggacagattattagtacaatttgggcactgtggttttaagaatatctgagtaaaataacaatatganntaataaacagaagctctaacgtcaggtaacaaatagacagcaagaaaggnttgcaccatcctcctaagggctaa

SEQ ID NO: 4879 - DNA, 719 bp, Homo sapiens
  misc_feature (652)..(652): "n" may be a, t, c, g, other or unknown
  misc_feature (691)..(691): "n" may be a, t, c, g, other or unknown
  misc_feature (706)..(706): "n" may be a, t, c, g, other or unknown
aatttatattttacttatgccaaattatttatgataatttgccattgctatactgtaccagtgtcaaatgctgcagcctgccaagctgtgattttgtgaggcttgtccctatgtaggatgcaccgcaggcccctggccactgaaagagtgtgcagtggactgtgggtctcccatatgcggtgccgcccaaaggtggctttgcctcaagcaacctaccctgatgttttactcattggaatgtttttccccgattgtggatgacttcttttctgatggagagagtccaggagggatggaaaactcctggatttaagctcagcatcccccacatgggcttttcgatcatcttcaggcctgaagctgcacgacctgaagttcgcctgcatttatcagccctctttgtgctgctccttgccaccttgaggttcctgctggggaccatgtgtggttgtggcatgtgtgagcagaagggaggatgaggaaaaagagaagaaaccccggtactgacaagctgtttttgagtgccactgtttgccatcatctaagccactgaatcaagtgtatttcaggcttatttcaacattccaatgccctggttttcctgcttgaatctgttcgtgggcaaaggtttgggggaatttgtgaccctggnacatccccagagtgaaagatggagctggggccacatcangaataaggccttggnccatcctcctcaa

SEQ ID NO: 4880 - DNA, 751 bp, Homo sapiens
  misc_feature (550)..(550): "n" may be a, t, c, g, other or unknown
  misc_feature (646)..(646): "n" may be a, t, c, g, other or unknown
  misc_feature (726)..(726): "n" may be a, t, c, g, other or unknown
  misc_feature (728)..(728): "n" may be a, t, c, g, other or unknown
  misc_feature (749)..(749): "n" may be a, t, c, g, other or unknown
agttctctgtagtgtttgccaatgttggagccgtctgcaaagtgtccccggcaagaagaggctgcctaccacaaggactttagcttactttttaaagattgaagaaaaaaaagaagacagaaaaagaagaactcaaagatacacaaagtaatttgaaccaaggctcagaagtttttggagccgtgagggatacagcagtttggtcaatattgtcttaacatgcttcaaataaatcagcttctctccaagataaaatggcaaacccaaaagagaaaactgcaatgtgtctggtaaatgagttagcccgtttcaatagagtccaaccccagtataaacttctgaatgaaagagggcctgctcattcaaagatgttctcagtgcagctgagtcttggtgagcagacatgggaatccgaaggcagcagtataaagaaggctcagcaggctgttgccaataaagctttgactgaatctacgcttcccaaaccagttcagaagccacccaaaagtaatgttaacaataacccaggcagtataactccaactgtggnactgaatgggcttgctatgaaaaggggagagcctgccatctacagggcattagatccaaagccattcccaaattatagagctaattacaactttcngggcaatgtacaatcagaggtatcattgcccaatgcctaagatcttttaagttcagcctcactggtgggaaattaatggnanttttttgggggaaaggaaagnac

SEQ ID NO: 4881 - DNA, 716 bp, Homo sapiens
  misc_feature (550)..(550): "n" may be a, t, c, g, other or unknown
  misc_feature (635)..(635): "n" may be a, t, c, g, other or unknown
  misc_feature (646)..(646): "n" may be a, t, c, g, other or unknown
  misc_feature (711)..(711): "n" may be a, t, c, g, other or unknown
atctttcgacagaatgaccaccctaaaacaaatactgaatgcctttaaaaaaaaaaaagttgtggttttttgttttttttttttttttttttttggtcgagaactactaatttcatgctatttctttctctctccctttgttgttatttgatttgggggaagggagtgaggcttgtgcagatttgagctatctgaagacatgaacagaagtcaaataccagccatatcagtagagccttccattcaaaagtgaacacacttggtagctgaaccatatctgagcagcgtgattctgttgtcttgcatatgttattctctcaggctgtggatctttgttacagctctaggaaactgtagaaatacaatgctatgtagcttttccaccccatggtctctagtgctgcctatcaacttgtccccttttttcccaataacctgtcttccaggtggtacagttagctgtcactcagctgacaccatgatgtggcagcagagagggaaacctacaagtggtttgcctcattgcctttgccacatctgaagttctcancagcactaccttagacttcaggagctaataggaaactttttatggtgtaaatgctgtaagactttgtacatacttcagttgttangaaatccttanagaaaaaaagaaaaagttacgctaataaattgctgtggtgcaaggcactaatgggggtgggttcnccttg

SEQ ID NO: 4882 - DNA, 818 bp, Homo sapiens
  misc_feature (721)..(721): "n" may be a, t, c, g, other or unknown
  misc_feature (734)..(734): "n" may be a, t, c, g, other or unknown
  misc_feature (778)..(778): "n" may be a, t, c, g, other or unknown
taatttaaaccaagtgtttgtgcggttctgattcatctgctgtggttcccgaagcttgagatctaaggagtacagggtcttttgtgatgacaatatgactaatagtaaaggaagatctattaccgataaaacaagtggtggtccaagtagtggaggaggttttgtagattggactttacgtttaaacacaattcaatccgacaagtttttaaatttactcttgagtatggttccagtgatttaccagaaaaaccaagaagacaggcacaaaaaagcaaacggcatttggcaagatggatatcaactgcagtacagacttttagtaatagatctgagcaacacatggagtatcacagtttctcagagcagtcttttcatgccaataatgggcacgcatcatcaagctgcagccaaaagtatgatgactatgccaattgtaattactgtgatggaagggagacttcagaaaccactgccatgttacaagatgaagatatatctagtgatggtgatgaagatgctattgtagaagtgaccccaaaattaccaaaggaatccagtggcatcatggcattgcaaatacttgtgccctttttgctagctggttttgggacagtttcagctggcatggtactggatatagtacagcactgggaggtgttcagaaaagttacaggagttttcattttaggccctgcacttcctgggctcaaagggaacnttggaaattgcantgggatccagattatccactgcagtaaattattgggaaaatggnttcacccattgaaaagtggacctaataattggcaacttgg

SEQ ID NO: 4883 - DNA, 816 bp, Homo sapiens
  misc_feature (629)..(629): "n" may be a, t, c, g, other or unknown
  misc_feature (778)..(778): "n" may be a, t, c, g, other or unknown
  misc_feature (791)..(791): "n" may be a, t, c, g, other or unknown
  misc_feature (800)..(800): "n" may be a, t, c, g, other or unknown
ctatgtccagaagagcgacatcatattgggagatcgcagtctttccttatgtaatatgttcctagatgaaatggccaaacaagctcgaaatctcatcactgatatttgcacagaacagtgtacccttagtgaccagttgctacccaagcattgtgccaaaactatcagtcaagcagtgaataagaaatcaaaaaagcagactggtaagaaaggggaacctgaaagggagaaaccaggtgttgagagcatgaggaaaaacaggctggttgtgaccaaccttgataaattgcacactgcactttctgagttatgcttctctataaattatgtaccaaacatggtggtatgggaacatacctttaccccacgagaatatttgacttctcatctggaaatacgctttaccaagtcaattgttgggatgactatgtataatcaagccacacaggaaattgcaaaaccttcagaacttctaacaagtgtaagagcatacatgaccgtactccagtcaatagaagactatgtgcagattgatattacaagagtatttaataatgtgcttcttcaacaaacacaacatttagacagtcatggagagccaaccattacaagtctatacacaaattggnatttggaaactttgttacgacaagtcagcaatgggcatatagcatattttcctgcaatgaaaagcgtttgtgaacttacctacagaaaatgaattaacattcatgcaagagggaatattctgacatatcagaaatgaggtcattatcangaactactaaggnccatatggnattgaagtttccaagt

SEQ ID NO: 4884 - DNA, 643 bp, Homo sapiens
  misc_feature (36)..(36): "n" may be a, t, c, g, other or unknown
  misc_feature (570)..(570): "n" may be a, t, c, g, other or unknown
  misc_feature (610)..(610): "n" may be a, t, c, g, other or unknown
  misc_feature (618)..(618): "n" may be a, t, c, g, other or unknown
aatctttttattaatatgagaacataattgttccangatctggaggccatcctttaagcttcttgcaacagtctgggagcaaagagtttactcgccactgggtagtgggccatggacaccccagtctccaccagaagttcgggattgcaaaatgggactctggcagcaaatttcaaactgtatgccagacctggccctttgcagtgatataaaatttttcttgaggtgtctggaaagatggctgaataggaacagctctgctctgcagctcccagcgagatcaacgcagaaggagataatttctgcatttcctactaaagtacccagctcatctcattgggactggttagacagtgggtgcagcccacagaaggcaagcagaagcagggtggggtgtcgcctcacccgggaagcgcaaggggtcagggaactccctcccctagccaagggaagctgtgagggactgtgccgtgaggaacggggcattccggcacagatactatgctttccccacggtctttgcaacccacagaccaaggagattcccttgggtgcctgcaccaccagggncctgggtttcaagcaaaaaactgggcagccatttgggcanacactgangctagcagcaggagtttttttcaaa

SEQ ID NO: 4885 - DNA, 701 bp, Homo sapiens
  misc_feature (12)..(12): "n" may be a, t, c, g, other or unknown
  misc_feature (557)..(557): "n" may be a, t, c, g, other or unknown
  misc_feature (629)..(629): "n" may be a, t, c, g, other or unknown
  misc_feature (663)..(663): "n" may be a, t, c, g, other or unknown
  misc_feature (679)..(679): "n" may be a, t, c, g, other or unknown
gacagtttccangacacagaagctccagctacctctgagaccagtaactctaggagttactctgaagtttcaagaaatgaaagccttgaatctcctatgggagaatggggattccaaaaaggacaagagatatctgctaaagcagctacatgttttgcagagaagttgccttctagcaacctgctcaagaacagagctaaagaagaaatgagcctctctgatttgaacagtcaggaccgggttgaccacgaggagtgggaaatggtgcctaggcactcatcttggggggatgttggtgtgggtggcagtcttaaggctccagtgttaaacctaaaccagggaatggacaatggaagaagcactttggtggaagcaagaggtcagcaagtgcatgggaaaatggaaagggtagcagtgatgcctgcagggtctcagcaagttagtgtcaggttccaggtccattatgtcacaagcactgatgtgcaattcattgcagtaactggagaccatgagtgtcttgggagatggaacacttacatcccactccactataacanggatgggttctggtctcattccattttcctgcctgcagatacagtggtggagtggaagtttgtgttgggtanagaatggggggagttacccgctgggaaagaatgnagcaatagattcctanaaaactggccatgagggataaa

SEQ ID NO: 4886 - DNA, 790 bp, Homo sapiens
  misc_feature (613)..(613): "n" may be a, t, c, g, other or unknown
  misc_feature (723)..(723): "n" may be a, t, c, g, other or unknown
  misc_feature (749)..(749): "n" may be a, t, c, g, other or unknown
  misc_feature (786)..(786): "n" may be a, t, c, g, other or unknown
gttcggtggcccataggggaagatggcggctgctcctttggaggagcgggattgagaggatcggggtggggagaccaaacaagagagacatttctggctctgaaggcgaacgcttcgctggccatttaggagctctgctcaaagccagacgtatcctagaaggaaaacatcaccatggctacagaaattggttctcctcctcgttttttccatatgccaaggttccagcaccaggcacctcgacagctgttttataagcgacctgattttgcacaacagcaagcaatgcaacagcttacttttgatggaaaacgaatgagaaaagctgtgaaccgaaaaaccatagactacaatccatctgtaattaagtatttggagaacagaatatggcaaagagaccagagagatatgcgggcaattcagcctgatgcaggttattacaatgatctggtcccacctataggaatgttgaataatcctatgaatgcagtaacaacaaaatttgttcggacatcaacaaataaagtaaagtgtcctgtatttgttgttaggtggactccagaaggaagacgcttggtcactggagcttctagtggggagtttaccctgtggnatgggactcactttcaattttgaaacaattattacaggctcacgacagcccagtgaggggcatgacgtggtcacataatgacatgtggatgttgacagcaagaccacggnggatatgttgaaatattggcaagtcnaacatggaacaacgtcaagatgttccaggcacataangggg

SEQ ID NO: 4887 - DNA, 765 bp, Homo sapiens
  misc_feature (690)..(690): "n" may be a, t, c, g, other or unknown
  misc_feature (702)..(702): "n" may be a, t, c, g, other or unknown
  misc_feature (765)..(765): "n" may be a, t, c, g, other or unknown
agcctctgtgcctcgttgtcccctggcgctacccggacatctctcagggtgccggcaccatgaagatctggacttcggagcacgtctttgaccacccgtgggaaactgttacaacagctgcaatgcagaaatacccaaaccctatgaacccaagtgtggttggagttgatgtgttggacagacatatagatccctctggaaagttgcacagccacagacttctcagcacagagtggggactgccttccattgtgaagtctcttattggtgcagcaagaacgaaaacatatgtgcaagaacattctgtagttgatcctgtagagaaaacaatggaacttaaatctactaatatttcatttacaaacatggtttcagtagatgagagacttatatacaaaccacatcctcaggatccagaaaaaactgttttgacacaagaagccataattaccgtgaaaggagttagcctcagcagttaccttgaaggactgatggcaagtacgatatcctcaaatgctagtaaaggccgagaagcaatggaatgggtaatacataaattaaatgctgagattgaagaactgacagcctcagcaagaggaaccataaggactccaatggcagcagcagcgtttgcagagaagtgatcgtgacagttgggaaacaacatcgggtactccaaggtctctcccnaactggactaanataatttaatttggtaattttaaaaaaattacaaacctaaaattttggggtaagttttttttn

SEQ ID NO: 4888 - DNA, 744 bp, Homo sapiens
  misc_feature (574)..(574): "n" may be a, t, c, g, other or unknown
  misc_feature (661)..(661): "n" may be a, t, c, g, other or unknown
  misc_feature (675)..(675): "n" may be a, t, c, g, other or unknown
  misc_feature (719)..(719): "n" may be a, t, c, g, other or unknown
gttcccaatcagtttccaagccaacaccagggtgtcctagtccgcagaggtgtgggggacacactccataatctctacttttctttttgtgcagctgagtcatggagctttcagccccagcacatggctcctccttaactgcgtctgctcaacctccctcagccctgtgaacagcatccccgcacacagacgcagagcaggactctctctgctgccacttcaccttcctgagagaggaccagcggccagagcctcagtgactgccaccctggaggacagggcacaacaaccgtttctgaagagaatgggaggattccagaggggcaaatatggaactatggctgaaggtagatcagaagataacttgtctgcaacaccaccggcattgaggattatcctagtgggcaaaacaggctgcgggaaaagtgccacagggaacagcatccttggccagcccgtgtttgagtccaagctgagggcccagtcagtgaccaggacgtgccaggtgaaaacaggaacatggaacgggaggaaagtcctggtggttgacacgccctccatctttgagtcacangccgatacccaagagctgtacaagaacatcgggggactgctacctgctctctgccccggggccccacgtcctgcttctggggatcanctgggggcgttcantgctcaaggacacaatgggccatcaggaaaggtgaaaagagggncttttgggaacaagggggccaatgg

SEQ ID NO: 4889 - DNA, 612 bp, Homo sapiens
  misc_feature (536)..(536): "n" may be a, t, c, g, other or unknown
  misc_feature (578)..(578): "n" may be a, t, c, g, other or unknown
  misc_feature (601)..(601): "n" may be a, t, c, g, other or unknown
gaacaatatggcggatggcgaggagccaatggctgttgatggtgggtgtggggacactggagactgggaaggtcgctggaaccatgtaaagaagttcctcgagcgatctggacccttcacacaccctgatttcgaaccgagcactgaatctctccagttcttgttagatacatgtaaagttctagtcattggagctggcggcttaggatgtgagctcctgaaaaatctggccttgtctggttttagacagattcatgttatagatatggacactatagatgtttccaatctaaataggcagtttttatttaggcctaaagatattggaagacctaaggctgaagttgctgcagaatttctaaatgacagagttcctaattgcaatgtagttccacatttcaacaagattcaagattttaacgacactttctatcgacaatttcatattattgtatgtggactggactctatcatcgccagaagatggataaatggcatgctgatatctcttctaaattatgaagatggtgtcctanatccaagctccattgtccctttgatagatggggggacagaangttttaaagggaatgcccgggtnattctgcctgg

SEQ ID NO: 4890 - DNA, 811 bp, Homo sapiens
  misc_feature (628)..(628): "n" may be a, t, c, g, other or unknown
  misc_feature (744)..(744): "n" may be a, t, c, g, other or unknown
  misc_feature (775)..(775): "n" may be a, t, c, g, other or unknown
  misc_feature (790)..(790): "n" may be a, t, c, g, other or unknown
tgtgtccagcgcctatcttaaaagaagttggcatgaaagctgcactccaggtcagcatgaacgatggcctctcttttatctccagttctgtcatcatcaccaccacacactgtagcctccacaaaattgcatcaggccccacaacagctgcttgcatggaatagcagagaataccgcctgctccctccggacagcacactcctgaaaacggggagagaggagccaaacatgctcggtttacactttccttatttactgaatgagtggagggcagagacaggcctggagttacgcacactgagtgccccaacatggaaggaaacatcaggagggacaggaaacgttccctccttaaccaacagttttcaagaccttactggaggcactttattggctacataatcactccatgcggtgggcatcaggcagaatcctggtgcagacccaactttgaggtggaggatttcacagtttctttattttgaacttcccccaggctcccactaattcctctccattctatcctcctccctttcccacaaaagaaaacagaaaggagcagcagtgtttgataccgtatcatccagaggcctggttctctcccattatagggcaaacaagccctggnaaggatatttcactcccgccccatgccatgcattaaaaatccaaaattgcctatattccacctgccaagcaagaagatgctttcattaatgaagttccaaatgtatacctttgagnaacagtgccttctcgtcttaaaaagaaaggncccaattttgtgaanttgggaagcaaagggaattaa

SEQ ID NO: 4891 - DNA, 838 bp, Homo sapiens
  misc_feature (666)..(666): "n" may be a, t, c, g, other or unknown
  misc_feature (803)..(803): "n" may be a, t, c, g, other or unknown
  misc_feature (836)..(836): "n" may be a, t, c, g, other or unknown
  misc_feature (838)..(838): "n" may be a, t, c, g, other or unknown
gaaaatgtgaagccttctggaagacaaattgggaaagttgagccacagcaatccaaccattttgtttgattatatcttgtcacaaatacagaagtatgataacttaataacacctgtagtagattcattgaaatacctcacttcactgaattatgatgtcttggcctattgtatcattgaagctttagctaatccagaaaaggaaagaatgaaacatgatgacacaaccatctcaagctggcttcagagtctggctagtttctgtggtgcagtttttcgtaaatatccaattgatcttgctggtcttcttcagtatgttgccaatcagctaaaggcgggcaaaagttttgacctgcttatattgaaagaagtggtacaaaaaatggcaggaatagaaattacagaggaaatgacaatggagcaactagaggctatgactggtggagagcagctaaaagctgagggtggttattttggtcagatcagaaacactaaaaaatcctctcagagattaaaggatgctctattggaccatgatcttgcccttcctctctgtctgcttatggctcagcagagaaatggggtaatctttcaggaaggtgggagaagaaacatttgaaacttgtgggaaagctctatgaccagtgtcatgataccctggtgcantttgggtgggtttttagcaatcctaaatcctgagcacaagaagattatataaagcgaagtggccttcaatttgatgttcccccggtaatgaatcccaatacaccccaatggaggcaagcaattttccccggtccaangggcaaatggtttggcccaatcaaaaattttcngn

SEQ ID NO: 4892 - DNA, 729 bp, Homo sapiens
  misc_feature (599)..(599): "n" may be a, t, c, g, other or unknown
  misc_feature (643)..(643): "n" may be a, t, c, g, other or unknown
  misc_feature (704)..(704): "n" may be a, t, c, g, other or unknown
  misc_feature (719)..(719): "n" may be a, t, c, g, other or unknown
gaatgctgggagagtccgacgagcgctgcactaacgcaggatccggctgccgaaggtcctcgccagcaggatgaagttaaaggaagtagatcgtacagccatgcaggcatggagccctgcccagaatcaccccatttacctagcaacaggaacatctgctcagcaattggatgcaacatttagtacgaatgcttcccttgagatatttgaattagacctctctgatccatccttggatatgaaatcttgtgccacattctcctcttctcacaggtaccacaagttgatttgggggccttataaaatggattccaaaggagatgtctctggagttctgattgcaggtggtgaaaatggaaatattattctctatgatccttctaaaattatagctggagacaaggaagttgtgattgcccagaatgacaagcatactggcccagtgagagccttggatgtgaacattttccagactaatctggtagcttctggtgctaatgaatctgaaatctacatatgggatctaaataattttgcaaccccaatgacaccaggagccaaaacacagccgccagaagatatcagctgcattgcatggnacagacaagttcagcatattttagcatcagccagtcccagtggncggggccactgtatgggatcttagaaaaaatgagccaatcatcaaagtcagtgaccatagnaacagaatgcattgntctgggttgg

SEQ ID NO: 4893 - DNA, 592 bp, Homo sapiens
  misc_feature (452)..(452): "n" may be a, t, c, g, other or unknown
  misc_feature (482)..(482): "n" may be a, t, c, g, other or unknown
  misc_feature (518)..(518): "n" may be a, t, c, g, other or unknown
  misc_feature (560)..(560): "n" may be a, t, c, g, other or unknown
  misc_feature (591)..(591): "n" may be a, t, c, g, other or unknown
tccattctctgggacacatgacgcctgtcctgtcgccccagaacctgctgtcttgtgacacccaccagcagcagggctgccgcggtgggcgtctcgatggtgcctggtggttcctgcgtcgccgaggggtggtgtctgaccactgctaccccttctcgggccgtgaacgagacgaggctggccctgcgcccccctgtatgatgcacagccgagccatgggtcggggcaagcgccaggccactgcccactgccccaacagctatgttaataacaatgacatctaccaggtcactcctgtctaccgcctcggctccaacgacaaggagatcatgaaggagctgatggagaatggccctgtccaagccctcatggaggtgcatgaggacttcttcctatacgagggaggcatctacagccacacgccagtgagccttgggaggccagagagatancgccggcatgggacccactcagtcaagatnacaggatggggagaggagacgctgccagaatggaangacgctcaaatactggactgcgggcaaactcctgggggccancctggggcgaaagggggcaacttccgcatcnt

SEQ ID NO: 4894 - DNA, 756 bp, Homo sapiens
  misc_feature (738)..(738): "n" may be a, t, c, g, other or unknown
  misc_feature (740)..(740): "n" may be a, t, c, g, other or unknown
  misc_feature (742)..(742): "n" may be a, t, c, g, other or unknown
ctttaaaatccccttatcagcatgcctaacaagatttttctaatttattctaaatctttcacataaagaattcagtgagttttaaattcatttattacataagaatattataactttttattagtttatagaaaagtttagtgacatcaggataaattgatatttattatatgaaagttatgaaaacttttgtatagttgctaagtaggattaaaaaatgagtatcagaatttggtaaacacagccagagatacatttcatttgcacacaaatgtttttgtgaggtttctttttcagttaggaaaatcattaaaatcatgtactgatgtaaactaaacttagtaccggactttcaaatcacttgattccaaagtttaaatcaaggtttttaaaaataaagtattttcaattataaaatgattaataattttctagtgagagtaaagatgtttgaaatattaggcttagtttatttgatgtatatatttaatcctataaaatttcttttgtaataactatctgcagagtagcatatttgtgatttataaatattatatgctcagaatccttgattgataagagcatatgattaaaaaatgaaaacacattgtagagttattcatagtcacatatggtatgtaactgaatatatatgatatatataatataaataaatatatttaaaatacatatttatatataaatatgtattatatataaatatatatcatatattananantaatataaccaaat

SEQ ID NO: 4895 - DNA, 716 bp, Homo sapiens
  misc_feature (522)..(522): "n" may be a, t, c, g, other or unknown
  misc_feature (660)..(661): "n" may be a, t, c, g, other or unknown
  misc_feature (683)..(683): "n" may be a, t, c, g, other or unknown
gtacgtctatgagagggaataatgtggatggatggaagtggagtagaaactacccctttgcctgtgagccccctgtcccgtcctttttcactcacataccagtcaccataccttcagtatccatcctacttcctttatagctgtttcacttggaaactaatgtgtgggagcacctcctgcagcaaactgctcttgaatcttaattcgatgagtcagtgactcttaaataccgattaagccttcaccctctcccccctcccccttttaaacttatgacctgtaagattcttgtaaaaaatagggttagggaaacatttttagaatttaataggattaaggacacctggagtgtgggcgatgttgagctagagtttacctttgtgaatattggacgtgtcttcaggaacggagaagaattttgaatgctaatttttacctttcagctatgtgaaaacacatgatttacgttgatgtaaccgaatttacattgctgaatatgttggtgatttcattaacttttanagcattccggtttaagttttagcttatttgggctttctccttgctttccaaacgaaatacttcgtcttttaaatgttttgctttaacgtgacagctgcgtggaagaaataatggttgggcaaacacttttctattgannaaagggatttaaattcccaagncaagaaatattaagcaatccggtttttccctgg

SEQ ID NO: 4896 - DNA, 770 bp, Homo sapiens
  misc_feature (714)..(714): "n" may be a, t, c, g, other or unknown
  misc_feature (729)..(729): "n" may be a, t, c, g, other or unknown
  misc_feature (748)..(748): "n" may be a, t, c, g, other or unknown
gcttttgctacattttggtggcattttaactagttatctgaatatttattaatcgtacttcctcttgtaaagttaactacttacttttttgttgttgtttttttaacatcaggttctgtatctaataggagatgtaacactttatttcatggcaggcttttattgcagagacttgaagtcttagttttttaaactggcacataaaacactttttgctgttatttttatttatgtcaatactgcagagtatctttatgccttattcaagtggattctgagcctgtatgtcacaatgtaaacactggaggttcactcacctacgcactcacccaccacctctgaaagaaacagaaactgcagagaaagacagcatcttagctcattttgtttttaaatgaggttttagacgcttgccacttcctaagggaaatcctaaaacagagcaagtgatgctcccaggtatcactgtgaacttttttctttcaaagtgtgaatttttacactggctttttcatttttttaaagtaattgaagcttgtggctttacaacttagtgttttttgctatccagataacaagtttcattgtttagaacccagtgacacttaataggtagataaattgtcctttaaaatatcccagatgatatacacaatatggtacatttgtgctctctctctctgtttttctcccttctctttccaagttaagatnaagataacgatgacntgtaccctccctgaatccngttacagtaggggccggggcaa

SEQ ID NO: 4897 - DNA, 744 bp, Homo sapiens
  misc_feature (719)..(719): "n" may be a, t, c, g, other or unknown
  misc_feature (721)..(721): "n" may be a, t, c, g, other or unknown
  misc_feature (743)..(743): "n" may be a, t, c, g, other or unknown
aaactgcacgcgccgagccgggaagcttcgtccagcggtcgtgttgccatgggccggaggagagccccggccggtgggtcgctgggacgggcccttatgcgccatcagactcagcggagccgaagccatcgtcacactgactcctggttgcacacaagtgaactcaatgatggctatgattggggtcgtcttaatcttcagtcagtgactgaacagagctcccttgatgacttccttgctactgcagaacttgcaggaacagagtttgtagctgaaaaacttaatattaagtttgtgcctgctgaggctagaactggactactgtctttcgaggagagccagagaattaagaagctccatgaagaaaacaaacagttcttgtgtataccgaggagaccaaactggaaccaaaatactaccccagaagaactcaaacaagcagagaaagataactttctagaatggagacgtcagcttgtccggctagaagaggaacagaagctgatattgactccatttgaacgaaatttggacttttggcgccagctctggagagtcattgagagaagtgatattgtggtccagatagtagatgctcgaaacccactcctgtttaaatgtgaggatttggaatgttatgtgaaagaaatggatgcaataaggagaacgtcattccgatcaacaagggaagacctggctgaactgctgaagcaaccggnantgcctggggccatgttccttcna

SEQ ID NO: 4898 - DNA, 742 bp, Homo sapiens
  misc_feature (648)..(648): "n" may be a, t, c, g, other or unknown
  misc_feature (709)..(709): "n" may be a, t, c, g, other or unknown
  misc_feature (717)..(717): "n" may be a, t, c, g, other or unknown
tctgtaattcatggctaatccgaagagtttgattgagttgatggcggcagggaccagatagacaccttggtgattgtctttggccataagaatagaccaaggataggttttccagagacaccttcatactgtaaacatggtttagacacggtcatagggaaggctgctggtccatcatttgttctgaacaaatggcatttcctgctcctgaccctggcagttggccccagattccttgtcgatgacttggaaacgtccattctgggtaaggtcagcactccctgagagatgttaacaaagtttacctatgagtcttactgtgtagacaatctgaagtcaattttagttacacaatcagcattcccatgtgtcctcagtgtcttatcaatgaactatgtgtatcaagccatactaaactggagtttagcaggacagaggcaaactaaatgtagaacataacatatcagctgaatatgtctatccaggactgtttttctagaacataaatcatggagctccttgacagtgtatccactgtttttggggtttaataaaaccaactagaatttagacttaaaagaaattattattccttttggttgtccacataaagtaagtccaagggctatcatatggctaaaatcaagnttatttgggtcaacccctggtatgtatttataaagtcaacttatcagccatttaagatggngatttgcnttaaatttttgcaatgtgtgtggca

SEQ ID NO: 4899 - DNA, 757 bp, Homo sapiens
  misc_feature (568)..(568): "n" may be a, t, c, g, other or unknown
  misc_feature (623)..(623): "n" may be a, t, c, g, other or unknown
  misc_feature (675)..(675): "n" may be a, t, c, g, other or unknown
  misc_feature (680)..(680): "n" may be a, t, c, g, other or unknown
  misc_feature (752)..(752): "n" may be a, t, c, g, other or unknown
gattgcagcataatcgtggttcagcagcctccaagaccagggctgatgtgggcggctacagggagaaattcaagaggaagttcttggtggtgccctccatgagtacaaagaagcctcagtccccaggacacccttccgtgcatggtgtcactgacatctttatttcttttgtcacgttctgtaaatcacaatgaatggggtattcttcttctattatatatttgttaagtcttttttggcatctttaaaaaaaagtggtaactttatcctatgtaatatccctgttaagtcctaaaagtcttttctgatgtctattttgtctgaaatttgcacagctactatagctttatttcggttcatattttcataatccatgttttctcatccttttatatttgtgaatgtgtaaagtaactttcttgtgcatagctaagagtttggtcttgcttttttaaatcgactataagttctatttttaaactaatattttctcttattttttgtttaagatagcatttcataatgatgtttatttctccattaacatattacctaattcactttttanaaatattatatttgttaccataaggtttgcaaaaggagcgattcttcattttggnaccctttccttattttctgggtaccatgagaaattgtagactttactcctanattcnctttccaagccctaaggattaagccatttttccaagaaaatggttgcataccattctgccaatgaaaggaancaaaa

SEQ ID NO: 4900 - DNA, 702 bp, Homo sapiens
  misc_feature (618)..(618): "n" may be a, t, c, g, other or unknown
  misc_feature (668)..(668): "n" may be a, t, c, g, other or unknown
  misc_feature (681)..(681): "n" may be a, t, c, g, other or unknown
tatctagatcagaaacttggaggatcttcaggcccactgccccaggtcattgggctgactgcctcggttggtgttggggatgccaaaaacacagatgaagccttggattatatctgcaagctgtgtgcttctcttgatgcgtcagtgatagcaacagtcaaacacaatctggaggaactggagcaagttgtttataagccccagaagtttttcaggaaagtggaatcacggattagcgacaaatttaaatacatcatagctcagctgatgagggacacagagagtctggcaaagagaatctgcaaagacctcgaaaacttatctcaaattcaaaatagggaatttggaacacagaaatatgaacaatggattgttacagttcagaaagcatgcatggtgttccagatgccagacaaagatgaagagagcaggatttgtaaagccctgtttttatacacttcacatttgcggaaatataatgatgccctcattatcagtgagcatgcacgaatgaaagatgctctggattacttgaaagacttcttcagcaatgtccgagcagcaggattcgatgagattgagcaagatcttactcagagatttgaagaaaagctgcangaactagaaagtgtttccaagggatcccaacaatgaggattctaaacttngaagacctcctgnttcaaccctacaaggaagagt

SEQ ID NO: 4901 - DNA, 783 bp, Homo sapiens
  misc_feature (698)..(698): "n" may be a, t, c, g, other or unknown
  misc_feature (710)..(710): "n" may be a, t, c, g, other or unknown
  misc_feature (766)..(766): "n" may be a, t, c, g, other or unknown
aatgaaccaaattcacaatcaaaatttccaatttttcggtttccttcatcattctcttctcccgttggaatggtatttcatccccgaagccactttttgtatgcttatggcaatcaggaatgggaagatacagtgcagtcggaagtgttactgagagaattttcacattatactatgatcacttgggattcctacataagctgactctgggtcgctttgaagctagtggaccacccacagcctttggaaattctagaaatctttttggacagcctccagatatgggctttgagactgcgcttgccccacagcacacctccttagatgaaattatcttttttgcatatgtacctgagaacgaaccccaggaaacgatctacagcaagaagttcggcaatatacactatggaaaagtgatacactctgggaaaactggaagagcttacataagaaaggtattgcaacatacgactcctaaaggatttttgtcctcagttattgcagaaatgaaagagccctttggattagaagaagtgaatgagagctcttgtttgtctagttcccttttgattaataaagctggaaatgtctataaactcactcttgattcacaagttgttcaagccttgtttgaagatacaagatatagagaagactgtagtgcttcccgggtacagcagcttcctcatcacaagcantttagattaatnaggaatgcattaggccattgctaccaagcctgaaagttgcacccaacaatatgacnttccaaaagagcacaat

SEQ ID NO: 4902 - DNA, 609 bp, Homo sapiens
  misc_feature (603)..(603): "n" may be a, t, c, g, other or unknown
  misc_feature (609)..(609): "n" may be a, t, c, g, other or unknown
gtgacttcgcgccgctgtgtgcgcctccccgagcgccggctgcgccccccagcccggcccggggcctaccgcctgcccggccccctgccactgccaggaggacggcatcatgctgtctgccgactgctcttgagcttgggctgtccgccataccgggggacctggatcccctgacggcttacctattccatgtcagtagtggcaaacctttacaggattatgaatacaaaatgccactggtctcctgaagatacagcagcaaaatgaaacatccacaaatatgacttaaattgagaatatgtgcatgtctataactccacccttcactgtgctgcggttgttctctggaccactcctatttcatcagtgttattgtcaacctgaagaacaagcagaaagaggctctctgaaatgaaatggatgcttatttgggaagagagcattgcaacgggaatacacatgccatcgtaaatgacaagaatattcagggaggaccccatcacatttggctgccatatctccttggactcctcttggctgtgacagggtctcagacggcccttgccgttgatgaccttgatggtttgaagagccctaaaaaanttcccn

SEQ ID NO: 4903 - DNA, 620 bp, Homo sapiens
  misc_feature (537)..(537): "n" may be a, t, c, g, other or unknown
  misc_feature (583)..(583): "n" may be a, t, c, g, other or unknown
  misc_feature (614)..(614): "n" may be a, t, c, g, other or unknown
aagatctatgtcctggggggccgccagggcaagctcccggtgactgcttttgaagcctttgatctggaggcccgtacatggacccggcatccaagcctacccagccgtcgggcctttgctggctgcgccatggctgaaggcagcgtctttagcctgggtggcctgcagcagcctgggccccacaacttctactctcgcccacactttgtcaacactgtggagatgtttgacctggagcatggtgagcagtggctgttctgggctgtcctcccgctctctgtgggatggaggggcatagtgtgtacatgactagatctgacctcccctctcctgcagggtcctggaccaaattgccccgcagcctgcgcatgagggataagagggcagactttgtggttgggtcccttgggggccacattgtggccattgggggccttggtaagtctctatggggctggggagaggagggagtcccaagacaggaaagactagcccccaacatgtgtgtcaccttctgcccatctccaggcactccangggtcagggctttggtgaagctcttttcccctaatccaatgaaagntagggcaagggatggtgggtcctgccctttngggggg

SEQ ID NO: 4904 - DNA, 705 bp, Homo sapiens
  misc_feature (631)..(631): "n" may be a, t, c, g, other or unknown
  misc_feature (671)..(671): "n" may be a, t, c, g, other or unknown
  misc_feature (689)..(689): "n" may be a, t, c, g, other or unknown
gaaaaaaaaaaaaaaaagtagacgctcgggcaccaagccgcggcaaggatggagctgggttgctggacgcagttggggctcacttttcttcagctccttctcatctcgtccttgccaagagagtacacagtcattaatgaagcctgccctggagcagagtggaatatcatgtgtcgggagtgctgtgaatatgatcagattgagtgcgtctgccccggaaagagggaagtcgtgggttataccatcccttgctgcaggaatgaggagaatgagtgtgactcctgcctgatccacccaggttgtaccatctttgaaaactgcaagagctgccgaaatggctcatgggggggtaccttggatgacttctatgtgaaggggttctactgtgcagagtgccgagcaggctggtacggaggagactgcatgcgatgtggccaggttctgcgagccccaaagggtcagattttgttggaaagctatcccctaaatgctcactgtgaatggaccattcatgctaaacctgggtttgtcatccaactaagatttgtcatgttgagcctggagtttgactacatgtgccaagtatgactatgttgaggttcgtgatggagacaaccgcgatggccaaatnatcaagcgtgtctgtggcaacgagcggccagctcctatcnagagcataggattctcantccaagtcctcctcca

SEQ ID NO: 4905 - DNA, 828 bp, Homo sapiens
  misc_feature (564)..(564): "n" may be a, t, c, g, other or unknown
  misc_feature (622)..(622): "n" may be a, t, c, g, other or unknown
  misc_feature (707)..(707): "n" may be a, t, c, g, other or unknown
  misc_feature (771)..(771): "n" may be a, t, c, g, other or unknown
  misc_feature (818)..(818): "n" may be a, t, c, g, other or unknown
  misc_feature (828)..(828): "n" may be a, t, c, g, other or unknown
aaaaaaaaaaaaaaagtgtgttaagttcccggtcacctgagctccgggtgacgcggctgcggtagctgcggatacaagccttccgcgggtcctgcctggcgaccccgacctcctcctgctgtctctccgctccgccaccccgaacccgccaaggtcctgtccttttcctcctgtcctttgccagcgttgggccggaccgggccgagccgggccgcccgggcgcagtctttaaccatggcgtccctcttcaagaagaaaactgtggatgatgtaataaaggaacagaatcgagagttacgaggtacacagagggctataatcagagatcgagcagctttagagaaacaagaaaaacagctggaattagaaattaagaaaatggccaagattggtaataaggaagcttgcaaagttttagccaaacaacttgtgcatctacggaaacagaagacgagaacttttgctgtaagttcaaaagttacttctatgtctacacaaacaaaagtgatgaattcccaaatgaagatggctggagcaatgtctaccacagcaaaaacaatgcangcaagttaacaagaagatggattcacaaaagacattacaaaccaagcagaatttccanaaggaaaacatgaaaatgggaatgactggaagaaatgatcaatgatacacttgatgacatccttgacgggttctgatgacgaaanaagaaagccaagatattgtgaatcaaagttcctggatgaaaattgggaattgaaaatttctggnaaagatgggcaaaagctccatcaagctggctcccaaagctttacaancctggcctcn

SEQ ID NO: 4906 - DNA, 702 bp, Homo sapiens
  misc_feature (611)..(611): "n" may be a, t, c, g, other or unknown
  misc_feature (629)..(629): "n" may be a, t, c, g, other or unknown
  misc_feature (694)..(694): "n" may be a, t, c, g, other or unknown
gactaaaaagctcaagggagaattagccaaagagtttgcacctgctacaccaccttctactccacacaactcatctgttggtagtttgtctgagaatgaacaaaatactatagaaaaagaagagttcatgttgaaactcatgcgatctctttctgaagaagttgagagtagtgaaagtggagagctcccagaagtggatgtgaagtcggagcactcagggaagaaggttcagtttgcagaagcattagctacacacatcctttctcttgcaactgaaatggcagcttcccatttagataacaaaataattcaagaacccaaggttaaaaacccttgcttaaatgtgcaaagtcaaagaagtgtgtcgcctacttttttaaacccctcagacgaaaatttgaaaacattatgcaattttgcgggtgatctggcagcagaagtcattacagaagctgagaaaatagcaaaagtccgaaattgtatgcttttcaagcaaaagaagaacagttgttatgctgatggtgacgaagattataaagtagaagagaggttggatatagaggctgtagtgcacccaagagaagtggatccgtttaatctttcattaccancaagttcttgtatgtcangtctgatgtataagtatcccagctgtgaaagtgtgacagatgaatatgcaagtcaccttattcangatactaa

SEQ ID NO: 4907 - DNA, 759 bp, Homo sapiens
  misc_feature (744)..(745): "n" may be a, t, c, g, other or unknown
  misc_feature (753)..(753): "n" may be a, t, c, g, other or unknown
gtagggggtggcgctctccgttcggcggcgctcccatggcgcacattaccattaaccagtacctgcagcaggtgtacgaagccatcgacagcagagatggagcatcttgtgcagagttggtgtcttttaaacatcctcatgttgcaaacccacgacttcaaatggcctctccagaggagaagtgtcaacaagtcttggaacccccttatgatgaaatgtttgcagctcatttaaggtgcacttatgcagtggggaatcatgacttcatagaggcatacaagtgccagaccgtgatagtccaatatcctttgtcgttcatggcagctgtcccgcatagaacacatgcagtggattacttgggacttgagacccggaaacactgggccagttgctcatttctgcagttagaaaggaatgacagtgttttggaacagaagctcgtttcagctctttcacttggtacatcattcttgcgagcattccaggcccacaaagaagaaaactgggctctgcctgtcatgtatgcagtagcgcttgaccttcgagtgtttgccaataatgcagatcaacagttggtaaagaaaggaaaaagcaaagttggggacatgttggaaaaagcagcagagttactgatgagctgtttccgggtctgtgccagcgacacccgtgctggtatagaggactctaagaagtggggcatgctgtttctgggtgaaccagctgtttaaaaaccacttcaagatnnacaaactncattta

SEQ ID NO: 4908 - DNA, 752 bp, Homo sapiens
  misc_feature (685)..(685): "n" may be a, t, c, g, other or unknown
  misc_feature (694)..(694): "n" may be a, t, c, g, other or unknown
  misc_feature (740)..(740): "n" may be a, t, c, g, other or unknown
atggagttggggagttgcctggagggcgggagggaggcggcggaggaagagggcgagcctgaggtgaaaaagcggcgacttctgtgtgtggagtttgcctcggtcgcaagctgcgatgccgcggtggctcagtgcttcctggccgagaacgactgggagatggaaagggctctgaactcctgcttcgagcctccggtggaggagagcgccttggaacgccgacctgaaaccatctctgagcccaagacctatgttgacctaaccaatgaagaaacaactgattccaccacttctaaaatcagcccatctgaagatactcagcaagaaaatggcagcatgttctctctcattacctggaatattgatggattagatctaaacaatctgtcagagagggctcgaggggtgtgctcctacttagctttgtacagcccagatgtgatatttctacaggaagttattcccccatattatagctacctaaagaagagatcaagtaattatgagattattacaggtcatgaagaaggatatttcacagctataatgttgaagaaatcaagagtgaaattaaaaagccaagagattattccttttccaagtaccaaaatgatgagaaaaccttttatgtgtgcatgtgaacgtgtcaggaaatgagctttgccttaagacatcccaattgggngaacaccanagggcatctgcgggaacgaatgaatcagtttaaaatgggtttaaangaaaatgcaaga

SEQ ID NO: 4909 - DNA, 691 bp, Homo sapiens
  misc_feature (652)..(652): "n" may be a, t, c, g, other or unknown
  misc_feature (654)..(654): "n" may be a, t, c, g, other or unknown
  misc_feature (686)..(686): "n" may be a, t, c, g, other or unknown
tcgatgaaagatcctccggacttattggacaggcagaaatgcccgaacgccttggcgtctcttcgacatgccaaatggtttcaggcaagggcaaatggattaaaatcatgtgtaattgtcctccgcattctgcgtgatttgtgcaacagagtccccacatgggcaccattgaaaggatggccactagaacttatatgtgaaaagtctataggtacttgtaatagacctttgggcgctggggaggccttgagacgagtaatggagtgtttggcatctggaatactacttcctgggggtcctggtcttcatgatccttgtgagcgagacccaacagatgctctgagctatatgaccatccagcaaaaagaagatattacccacagtgcacagcatgcactcagactatcagcctttggccagatttacaaagtgctggagatggacccccttccatctagtaagccttttcagaagtattcctggtcagttactgataaagaaggtgctgggtcttcagctctaaagaggccatttgaagatggattaggggatgataaagaccccaacaagaagatgaaacgaaacttaaggaaaattctggatagtaaagcaatagaccttatgaatgcactaatgaggctaaaatcagatnangcctggggcttcagtataagctcctatctcantctgg

SEQ ID NO: 4910 - DNA, 831 bp, Homo sapiens
  misc_feature (22)..(22): "n" may be a, t, c, g, other or unknown
  misc_feature (665)..(665): "n" may be a, t, c, g, other or unknown
  misc_feature (753)..(753): "n" may be a, t, c, g, other or unknown
  misc_feature (790)..(790): "n" may be a, t, c, g, other or unknown
  misc_feature (808)..(808): "n" may be a, t, c, g, other or unknown
tttctatgggtaataagagganacctttatagtttcatgatgtggagaccaagatacataagaaagcaagaatgagtctccgggtgttccctctgatcagcaaacatgaattcataatttcatttactctcatttttgtaatgcactctgagcaatcctccaggcagatcctatttactaagcttcaggcttttgtcccattttataatgcccaaacacatggagaaaacattttgttgtttttaaaaacaggtatgggatttctgatataatcaattttattgacttcttgggagttgtaatgatctgtgactcactgcataatattgtagttttatagggtggcacatcaccctgtgtaaaacaactttaatgacctgaggactgatgagtacaggaagtgaggtttatcatgagtagcatttattaagcatctgctagaatcaaagcactgcattagctactaaggtacaaagtaagacacagtttaataaggaagacagggcatctacccaagtcaacagttcagtgacatctgttatttgaaccacacaccaatgcaaccgaagtaaatgctgaaagggtgagaagaaggaatagattactatgcatttttgagaggatgaagaaggcttcttggagaaggttctgaaaagagatacggnattaaagagaaatagaaaagagcactgacgaagcactcaggatggctattcaagggaattgggggattcacagcaactggtgcacaancatccccaaatgccaagaaaaatgggggtaaagggtnaaagggaaactggggtcnagaagctttgcatggttttttcc

SEQ ID NO: 4911 - DNA, 793 bp, Homo sapiens
  misc_feature (711)..(711): "n" may be a, t, c, g, other or unknown
  misc_feature (769)..(769): "n" may be a, t, c, g, other or unknown
  misc_feature (786)..(786): "n" may be a, t, c, g, other or unknown
gaagatggcggccgagagggaacctcctccgctgggggacgggaagcccaccgactttgaggatctggaggacggagaggacctgttcaccagcactgtctccaccctagagtcaagtccatcatctccagaaccagctagtcttcctgcagaagatattagtgcaaactccaatggcccaaaacccacagaagttgtattagatgatgacagagaagatctttttgcagaagccacagaagaagtttctttggacagccctgaaagggaacctatcctatcctcggaaccttctcctgcagtcacacctgtcactcctactacactcattgctcctagaattgaatcaaagagtatgtctgctcccgtgatctttgatagatccagggaagagattgaagaagaagcaaatggagacatttttgacatagaaattggtgtatcagatccagaaaaagttggtgatggcatgaatgcctatatggcatatagagtaacaacaaagacatctctttccatgttcagtaagagtgaattttcagtgaaaagaagattcagcgactttcttggtttgcacagcaaattagcaagcaaatatttacatgttggttatattgtgccaccaactccagaaaagagtatagtagggatgaccaagggtcaaagtggggtaaagaagactcatcatccactgagttttgtagaaaaacngagaagcaactcttgaaaggtatcttcaaagaacagtaaacatccaactttactacangatcctgaatttaaggnaagttcc

SEQ ID NO: 4912 - DNA, 760 bp, Homo sapiens
  misc_feature (570)..(570): "n" may be a, t, c, g, other or unknown
  misc_feature (669)..(669): "n" may be a, t, c, g, other or unknown
  misc_feature (697)..(697): "n" may be a, t, c, g, other or unknown
  misc_feature (733)..(733): "n" may be a, t, c, g, other or unknown
tttaagacatgaattacatttaaaattagaatatggttaatattaaataataggcctttttctaggaaggcgaaggtagttaataatttgaatagataacagatgtgcaagaaagtcacatttgttatgtatgtaggagtaaacgttcggtggatcccctgtctttgtaactgaggttagagctagtgtggttttgaggtctcactacactttgaggaaggcagcttttaattcagtgtttccttatgtgtgcgtacattgcaactgcttacatgtaatttatgtaatgcattcagtgcacccttgttacttgggagaggtggtagctaaagaacagttgagtataggtttttctccatttacagatgtctttggtcaaatattgaaagcaaacttgtcatggtcttcttacattaagttgaaactagcttataataactggtttttacttccaatgctatgaagtctctgcagggcttttacagttttcgaagtccttttatcactgtgatcttattctgaggggagaaaaaactatcatagctctgaggcaagacttcgactttatangtgctatcagttccccgatacagggtcagagtaacccatacagtattttgggtcaggaagagaaagtggccatttacactgaatgagttgcattctganaatgtcctatctcttaaacgtagaatanatttggaaagacatttgatcttaaaaccaaagtaantttaagaatgaagtggcatattacata

SEQ ID NO: 4913 - DNA, 728 bp, Homo sapiens
  misc_feature (671)..(671): "n" may be a, t, c, g, other or unknown
  misc_feature (707)..(707): "n" may be a, t, c, g, other or unknown
  misc_feature (713)..(713): "n" may be a, t, c, g, other or unknown
gcaagtacacggagaataagctgaaggccatcaaagcccggaatgagtacttgctggctttggaggcaaccaatgcatctgtcttcaagtactacatccatgacctatctgaccttattgatcagtgttgtgacttaggctaccatgcaagtctgaaccgggctctacgcaccttcctctctgctgagttaaacctggaacagtcgaagcatgagggtctggatgccatcgagaatgcagtagaaaacctggatgccaccagtgacaagcagcgcctcatggagatgtacaacaacgtcttctgcccccctatgaagtttgagtttcagccccacatgggggatatggcttcccagctctgtgcccagcagcctgtccagagtgagctggtacagagatgccaacaactgcagtctcgcttatccactctaaagattgaaaacgaagaggtaaagaagacaatggaggccaccctgcaaaccatccaggacattgtgactgtcgaggactttgatgtgtctgactgcttccagtacaagcaactccatggagtccgtcaagtccacggtctctgaaaccttcatgagcaagcccagcattgctaagaggagagccaaccagcaagagacagagcagttttatttcacaaaaaatgaaaagagtacctggangggcaaggaacctcatcaccaagttacaagcccaangcatgncctttctgcaaaaaa

SEQ ID NO: 4914 - DNA, 726 bp, Homo sapiens
  misc_feature (532)..(532): "n" may be a, t, c, g, other or unknown
  misc_feature (641)..(641): "n" may be a, t, c, g, other or unknown
  misc_feature (659)..(659): "n" may be a, t, c, g, other or unknown
  misc_feature (725)..(725): "n" may be a, t, c, g, other or unknown
accaggaaactgtcaaagtgcaaatacacagcagagcttcagaatatatcactgatgtccattcgaatgacctgtctacaccacagatccttccatcaaatgaaggtgttaatccacgtttatcggcaagccctcctaaatcaggcaatttgtggccaggattggcaccaccacacaaaaaagctcagtctgcatctccaaagagaaaaaaacagcacaagaaatacagaagtgttatttcagacatatttgatggaacaatcattagttcagtgcagtgtctgacttgtgacagggtgtctgtaaccctcgagacctttcaagatctgtccttgccaattcctggcaaggaagaccttgctaagctgcattcatcaagtcatccaacttctatagtcaaagcaggatcatgtggcgaagcatatgctccacaagggtggatagcttttttcatggaatatgtgaagaggtttgttgtctcatgtgtccctagctggttttggggtccagtagtaaccttgcaagattgtcntgctgccttctttgccagagatgaactaaaaggtgacaatatgtacagttgtgaaaaatgcaaaaagttgagaaatggagtgaagttttgtaaagtacaaaactttccngagattttgtgcatccancttaaaaagattcagacatgaactaatggtttccaccaaaatcagtaccaaggtttcaatttccgnc

SEQ ID NO: 4915 - DNA, 700 bp, Homo sapiens
  misc_feature (609)..(609): "n" may be a, t, c, g, other or unknown
  misc_feature (672)..(672): "n" may be a, t, c, g, other or unknown
  misc_feature (677)..(677): "n" may be a, t, c, g, other or unknown
gaagtttttatacagccattgcacaagcatttttatcaaatgaaaaattgccaaatctagagtgtatccaaaatgccaacaaaggcacccacacaagtttaatgcagagattaaggaaccgaggagagagagaccgggaaagggagagagaaagggaaatgaggaggagtagtggtttgcgagcaggttctcggagggaccgggatagagactttagaagacagctttccatcgacactaggccctttagaccagcctctgaagggaatcctagcgatgatcctgagcctttgccagcacatcggcaggcacttggagagaggctttatcctcgtgtacaagcaatgcaaccagcatttgcaagtaaaatcactggcatgttgttggaattatccccagctcagctgcttctccttctagcaagtgaggattctctgagagcaagagtggatgaggccatggaactcattattgcacatggacgggaaaatggagctgatagtatcctggatcttggattagtagactcctcagaaaaggtacagcaggaaaaccgaaagcgccatggctctaatcgaagtgtagtagatatggatttagatgatacanatgatggtgatgacaatgcccctttggtttaccaacctgggaaaaagagggattttaataccnccaanggcctgggcaaggaacacagaaa

SEQ ID NO: 4916 - DNA, 668 bp, Homo sapiens
  misc_feature (524)..(524): "n" may be a, t, c, g, other or unknown
  misc_feature (532)..(532): "n" may be a, t, c, g, other or unknown
  misc_feature (618)..(618): "n" may be a, t, c, g, other or unknown
  misc_feature (626)..(626): "n" may be a, t, c, g, other or unknown
  misc_feature (638)..(638): "n" may be a, t, c, g, other or unknown
tgaaaataatgtactgccccatgtattactgttccaaaaggagaaagctatgtagaaagatacattaagggtgaaaatagcaatacagtagatttgaataccttgatgttttgcattacttcatttatgtttacatcatgtttagaaatgttttcatttactgtggtctttggtcacttcagctcaaagacctagtgatggatatttctttgaggctttcatttatataattttattttgtacaatgttttttttaaatgtgcaaatactgtattcaagtgaaaaaaatacagtatttgtagataaccatagctactacacagttcttcggtagtcccagtgtagttatatcagtgtttactgaagggaacatcaaaatattaatggtatattataaaataaagactttcttaaaggaaaattgcacctattttacctttttaagagtaagccatgaaatcttgtaacatgtctcttaactatttataatgaaaagtggcatttgggtatagtcaccacagcantgttctanatccctaagattatctaggtaggacatgtcaaagatgacggttgtcattctggaggccctattatgagaatattataaaagggtgnccttgtangaaggatcttgngtcctccccctgaggttctctttttcttgg

SEQ ID NO: 4917 - DNA, 724 bp, Homo sapiens
  misc_feature (649)..(649): "n" may be a, t, c, g, other or unknown
  misc_feature (681)..(681): "n" may be a, t, c, g, other or unknown
  misc_feature (724)..(724): "n" may be a, t, c, g, other or unknown
aaaactatttgagacataaacagttgtgtgatgtaattttagtcgctggtgatcgcagaattccagctcacagattggtgctctcctctgtctcagactattttgctgccatgtttactaatgatgtcagagaggcaagacaagaagaaataaaaatggaaggtgtagaaccaaattcgttgtggtccttgatccagtatgcttatacaggccgccttgaattaaaagaagataatattgagtgcctgttatctacagcttgccttcttcagctttcacaggttgtagaagcatgctgtaagtttttaatgaaacagcttcatccatccaactgtcttggaattcgttcttttgctgatgcccaaggttgtacagatttgcataaagtggctcacaattatactatggagcatttcatggaagtaatcagaaaccaggaatttgtattattaccagccagcgaaattgcaaagctcttggctagtgatgacatgaacattcctaatgaggagacaatattgaatgcacttcttacttgggtccgtcatgatttggaacagagacggaaagatctaagtaaacttttggcttatattaggctactcttcttgcaccacagttcctgggcagacatgggaaataatgtacnttttcgggatgatatagatgtcagaaactcantatgggagcaatgaaataccatttattaccagagagaaccgan

SEQ ID NO: 4918 - DNA, 732 bp, Homo sapiens
  misc_feature (406)..(406): "n" may be a, t, c, g, other or unknown
  misc_feature (678)..(678): "n" may be a, t, c, g, other or unknown
  misc_feature (716)..(716): "n" may be a, t, c, g, other or unknown
aaaaaataaaagatttcattttatgtgaggaattattttaataaaaaaaagagggtttatgctctatagtaataaaatttaccagtaacacccaatcagaaaattttggttccttagtatttagggaagacttttgtctcttatggaattttacatgttttgatttagaaaagtagatgcaatataatatatttcaagttttatacatattagatgaattgcatggtattttaggcaacttaactataaacaaatttattcatagaagcattgttgccaacaatttagatgacctcgatgaaaaaacacaccaattgacaaaactggctcaaaaggaaataaaaaatccaaacagacctgtaacaagtaaagagattgaaccagtaatcaaaaatctcccaacaanagaaagtccaggactaaatgagtttactggcaaactatgccaaacatataaagaagaattaacactaatccttctcgaactctcccaaaaaatggaagagaaaggagcaccctgtgacattctataaggcggacattaccttaacaccaaagccagacaaagacctcacagggaagctacagaccaatatcccttatgaatatagatgcagaaaaacttcaaaatactagcaggccaaatccagcagcttattaaaaatgtcacacaggcangaccaagtgagatttatcacggaaatgcaggggatggntctcatacaaaaagtt

SEQ ID NO: 4919 - DNA, 811 bp, Homo sapiens
  misc_feature (694)..(694): "n" may be a, t, c, g, other or unknown
  misc_feature (738)..(738): "n" may be a, t, c, g, other or unknown
  misc_feature (789)..(789): "n" may be a, t, c, g, other or unknown
  misc_feature (800)..(800): "n" may be a, t, c, g, other or unknown
ataagcacacgagctggaggactgggtatcaatctcactgctgcagacacagtgattttctatgatagcgactggaaccccactgtggaccagcaggccatggacagggcccaccgcttagggcagacaaagcaggttactgtgtaccggctcatctgtaaaggcaccattgaagaacgcattctgcaaagagccaaggagaagagtgagattcagcggatggtgatttcaggtgggaacttcaaaccagataccttgaaacccaaagaggtggttagtcttcttctagacgacgaagagttggagaagaaactgaggctgcggcaggaagagaaacggcaacaggaggaaaccaaccgagtgaaagagcgcaagcggaagcgggaaaagtatgcagagaagaagaaaaaagaagatgaattggatgggaaaaggagaaaagagggtgtgaacctggtgatcccatttgttccctcggctgataactccaacctctctgctgacggagatgactccttcattagcgtggactcagccatgccaagccctttcagtgagatctccatcagcagtgagctgcacactggctccattcccctggacgagagcagcagtgacatgctggtcattgtggatgacccagcctcctcagcccctcagtctcgagctaccaactctcccgcatccataacangctccgtctcagataccgtgaatggaattccattcaggaaattncaactgcaggacttggtcactcaaccccgaaagccgaaggccgccccaaanggtcaagaaancacaagccaaa

SEQ ID NO: 4920 - DNA, 851 bp, Homo sapiens
  misc_feature (802)..(802): "n" may be a, t, c, g, other or unknown
  misc_feature (812)..(812): "n" may be a, t, c, g, other or unknown
  misc_feature (846)..(846): "n" may be a, t, c, g, other or unknown
gatgtagaagagaattctaagctctgaaagtgtctgttctggtcggaagctgcctcaccgcaatgcttctgctgtagctagaaaaaagttattacataattctgaagatgaacagagcttaaagtcagaaattgaagaagaggagctaaaagatgaaaatcaactattaccagtgtccagttctcacactgcccagagcaatgttgatgaatctgaaaacagagactcagagtcagaaagtgatttgcgggtagcccggaaaaattggcatgctaatggttacaagtcccatactccagcaccttcaaagacaaaatttcttaaaatagagtcttctgaggaagactctaaaagtcatgattcagatcatgcatgtaacagaactgctggcccatcaacgtctgtgcagaaacttaaggcagagagcatctcagaggaagcagattctgaaccaggaagatctggtggtaggaaatacaatacatttcacaagaatgcgagtttctttaaaaaaaccaagattctgagtgactcagaagactctgaatctgaagagcaagatagagaagatgggaaatgtcataaagtggaaatgaacccaatttcaggaaatctgaactgtgaccctattgctatgtcccagtgttcctcagatcatggatgtgaaactgatttagattcagatgatgacaaaatagaaaaaccaaacaattttatgaaaagattctgcatcacaaggacatggactaagcagaaaaatttccaaggaaaaagggtctgttccagtgactcagacagttantttacagggnggttaagaaatcatcaaaagccagaacaaggtcncctga

SEQ ID NO: 4921 - DNA, 805 bp, Homo sapiens
  misc_feature (672)..(672): "n" may be a, t, c, g, other or unknown
  misc_feature (689)..(689): "n" may be a, t, c, g, other or unknown
  misc_feature (763)..(763): "n" may be a, t, c, g, other or unknown
  misc_feature (783)..(783): "n" may be a, t, c, g, other or unknown
  misc_feature (799)..(799): "n" may be a, t, c, g, other or unknown
gtggttatgagggctggcgaatcgacacatatcttgatattccattggtcatccgaccttatgggtccagccaagcatttgctagtgtggaagaagcattgcatgcatttattcagccagagattctggatggcccaaatcagtatttttgtgaacgttgtaagaagaagtgtgatgcacggaagggccttcggtttttgcattttccttatctgctgaccttacagctgaaaagattcgattttgattatacaaccatgcataggattaaactgaatgatcgaatgacatttcccgaggaactagatatgagtacttttattgatgttgaagatgagaaatctcctcagactgaaagttgcactgacagtggagcagaaaatgaaggtagttgtcacagtgatcagatgagcaacgatttctccaatgatgatggtgttgatgaaggaatctgtcttgaaaccaatagtggaactgaaaagatctcaaaatctggacttgaaaagaattccttgatctatgaacttttctctgttatggctcattctgggagcgctgctggtggtcattattatgcatgtataaagtcattcagtgatgagcagtggtacagcttcaatgatcaacatgtcagcaggataacacaagaggacattaagaaaacacatgggnggatcttcaggaagcanagggatattaatcctagtgctttcgcaaagttccacaaaatgcatatatgccggatccaatagactggaagggntcaagccaggaaatgcaaantttctagaaagtgggnggaatt

SEQ ID NO: 4922 - DNA, 509 bp, Homo sapiens
  misc_feature (466)..(466): "n" may be a, t, c, g, other or unknown
  misc_feature (507)..(508): "n" may be a, t, c, g, other or unknown
gaaagaaaccccagaaaacctaaataaatggagagataagaaggctcaacctagtaaagacgtatgttctttttaaattgatctgtagacttaataaaattccaattagaatccaagcaggatttgttcttatagataagctcattatgaaatgtatatggaatgtaaaggaactagtgctatggtttgtccccaccaaatctcatgttgaaatttgatcctcagtgtggtggtgttgggaggtggggcctagtgggaggtgtttgggtcatgggtgtggatccctcatgaatagatgaatgcccttcctcgtgggtagataagtgagttctagctctttcaggtcccaacaagagctggttgtgaaaaagagcctggcacgcccacttgcctctgctcccaccctgtggtctctgcacgtgccagctcccctttgctttccaccgtgaggggaaatagcctgaanccctcactggatgcccaatcctgaactttcccaaccagcanna

SEQ ID NO: 4923 - DNA, 682 bp, Homo sapiens
  misc_feature (562)..(562): "n" may be a, t, c, g, other or unknown
  misc_feature (617)..(617): "n" may be a, t, c, g, other or unknown
  misc_feature (636)..(636): "n" may be a, t, c, g, other or unknown
  misc_feature (680)..(680): "n" may be a, t, c, g, other or unknown
agaagatgcttcaaattcaacccgagaaggatatcattgtagagtttatcaaaaatggagatttcaagtatgtccgcatgctgggggcactttacatgaggctgacaggcactgcaattgattgctacaagtacttggaacctttgtacaatgactatcgaaaaatcaagagccagaaccgaaatggggagtttgaattgatgcatgttgatgagtttattgatgaactattgcacagtgagagagtctgtgatatcattctgccccgactacagaaacgctatgtattagaggaagctgagcaactggagcctcgagttagtgctctggaagaggacatggatgatgtggagtccagtgaagaggaagaagaggaggatgagaagttggaaagagtgccatcacctgatcaccgccggagaagctaccgagacttggacaagccccgtcgctctcccacactgcgctacaggaggagtaggagccggtctcccagaaggcggagtcgatctcccaaaaggagaagcccctcccctcgccgagaaaggcatcggagcaagantccaagacgtcaccgcagcaggtcccgaaatcgggggcacagatcccgttccaantccccaggtcatcaccgtngcacagacacaggagccactcaaagtctccccgaaaggtccaanga

SEQ ID NO: 4924 - DNA, 693 bp, Homo sapiens
  misc_feature (618)..(618): "n" may be a, t, c, g, other or unknown
  misc_feature (668)..(668): "n" may be a, t, c, g, other or unknown
  misc_feature (675)..(675): "n" may be a, t, c, g, other or unknown
gcaaatgaaggcctgggagagcctgggctgattccatggagagggcttctaagaatcttaagggtcggtgtacccgagagaactgcaagtaccttcaccctcctccacacttaaaaacgcagctggagattaatgggcggaacaatctgattcaacagaagactgccgcagccatgttcgcccagcagatgcagcttatgctccaaaacgctcaaatgtcatcacttggttcttttcctatgactccatcaattccagctaatcctcccatggctttcaatccttacataccacatcctgggatgggcctcgttcctgcagaacttgtaccaaatacacctgttctgattcctggaaacccacctcttgcaatgccaggagctgttggcccaaaactgatgcgttcagataaactggaggtttgccgagaatttcagcgtggaaattgtacccgtggggagaatgattgccgctatgctcaccctactgatgcttccatgattgaagcgagtgataatactgtgacaatctgcatggattacatcaaaggtcgatgctcgcgggagaaatgcaagtactttcatcctcctgcacacttgcaagccagactcaagggangctcatcatcagatgaaccattcagctgcctctgccatgggccctgcagnctggganactgcaactgataccaaa

SEQ ID NO: 4925 - DNA, 719 bp, Homo sapiens
  misc_feature (518)..(518): "n" may be a, t, c, g, other or unknown
  misc_feature (625)..(625): "n" may be a, t, c, g, other or unknown
  misc_feature (686)..(686): "n" may be a, t, c, g, other or unknown
  misc_feature (708)..(708): "n" may be a, t, c, g, other or unknown
ttgcttgagtcatcttctgaagctttaaaaacaattgatgaattggccttcaagatagacctaaatagcacatcacatgtgaatattacaactcggaacttggctctcagcgtatcatccctgttaccagggacaaatgcaatttcaaattttagcattggtcttccaagcaataatgaatcgtatttccagatggattttgagagtggacaagtggatccactggcatctgtaattttgcctccaaacttacttgagaatttaagtccagaagattctgtattagttagaagagcacagtttactttcttcaacaaaactggacttttccaggatgtaggaccccaaagaaaaactttagtgagttatgtgatggcgtgcagtattggaaacattactatccagaatctgaaggatcctgttcaaataaaaatcaaacatacaagaactcaggaagtgcatcatcccatctgtgccttctgggatctgaacaaaaacaaaagttttgggaggatggnacacgtcaggatgtgttgcacacagagattcagatgcaagtgagacagtctgcctgtgtaaccacttcacacactttggagttctgatgggaccttccaagaagtgnctcacagttagatgcaagaaacactaaagtcctcactttcatcagctatattgggtgtggntatctgctatttttcaagcagnaactctcctga

SEQ ID NO: 4926 - DNA, 811 bp, Homo sapiens
  misc_feature (670)..(670): "n" may be a, t, c, g, other or unknown
  misc_feature (702)..(702): "n" may be a, t, c, g, other or unknown
  misc_feature (716)..(716): "n" may be a, t, c, g, other or unknown
  misc_feature (783)..(783): "n" may be a, t, c, g, other or unknown
  misc_feature (810)..(810): "n" may be a, t, c, g, other or unknown
aaaaagtgtagggagggtacctctcacagaagagtcttatgactggcatcaggggaaggtcaccaagtctttcctgtacatgctgtttatcaaattcattcatctcgaagtattcagtatgccagaaagggctattgcaagacacgaagtccgagaaattgagcagcgacatacaatggatggccctcggcaagatgccactttagatgaggaagaggacatggtgatcatttataacagagttcccaaaacggcaagcacttcatttaccaatatcgcctatgacctgtgtgcaaagaataaataccatgtccttcatatcaacactaccaaaaataatccagtgatgtcattgcaagatcaggtgcgctttgtaaagaatataacttcctggaaagagatgaaaccaggattttatcatggacacgtttcttacttggattttgcaaaatttggtgtgaagaagaaaccaatttacattaatgtcataagggatcctattgagaggctagtttcttattattactttctgagatttggagatgattatagaccagggttacggagacgaaaacaaggagacaaaaagacctttgatgaatgtgtagcagaaggtggctcagactgtgctccagagaagctctggcttcaaatcccgttcttctgtggncatagctccgaatgctggaatgtgggaaacangtgggctatgggtnaagccaagtttaacctaaataatgaataatttctggtgggagttactgaagaacttgaagattttancatgttattggagggaacattgccccng

SEQ ID NO: 4927 - DNA, 750 bp, Homo sapiens
  misc_feature (713)..(713): "n" may be a, t, c, g, other or unknown
  misc_feature (716)..(716): "n" may be a, t, c, g, other or unknown
  misc_feature (748)..(748): "n" may be a, t, c, g, other or unknown
tttatattttataaaaaccggctgcaagaaagattcagaaagaatacttagtaagtcatcatatgaaaaaccaacaaaaccatagagtgcagattttttcctaactataagtcacctcatagttgtccaaagccatgataatgatatctcttacaaattgacttctgtaacccccctagaaataacccttttccttatttgattttagtcatcaaacatagtatgatatgggaaaagtcagccatttaccagaaattatcttattttgattttaaaaactcatttctatatgtagttattgtaatgtctatttttttagacttaaagatttatagaagactatagttatctgatttgttattttgcatttttcattctgtaaatctttgcttatggcacattgtgctctctgttttccatggttttattcatttatctcctcctattttgaggggacaacatgggtagttaaatctttgtcaatagtattggagataacactaactgctattatcataacatcttcatttttactgcatgccaaaaccaatgcctgccaaacaaaatcttagacatcccaatataatatgttagttatatttccattcacatcattattgaaaatacccagctcagtgcctggcttaataaatgtttaattcccttacctactcctgctccatttttttaattgaaatgggagatgagcaaantancacattcaatggctggaagcatttttttgggnca

SEQ ID NO: 4928 - DNA, 759 bp, Homo sapiens
  misc_feature (607)..(607): "n" may be a, t, c, g, other or unknown
  misc_feature (745)..(745): "n" may be a, t, c, g, other or unknown
  misc_feature (752)..(752): "n" may be a, t, c, g, other or unknown
  misc_feature (754)..(754): "n" may be a, t, c, g, other or unknown
agaagtgacttctccaaaaagtgtgttagttcccggtcacctgagctccgggtgacgcggctgcggtagctgcggatacaagccttccgcgggtcctgcctggcgaccccgacctcctcctgctgtctctccgctccgccaccccgaacccgccaaggtcctgtccttttcctcctgtcctttgccagcgttgggccggatcgggccgagccgggccgcccgggcgcagtctttaaccatggcgtccctcttcaagaagaaaaccgtggatgatgtaataaaggaacagaatcgagagttacgaggtacacagagggctataatcagagatcgagcagctttagagaaacaagaaaaacagctggaattagaaattaagaaaatggccaagattggtaataaggaagcttgcaaagttttagccaaacaacttgtgcatctacggaaacagaagacgagaactttcgctgtaagttcaaaagttacttctatgtctacacaaacaaaagtgatgaattcccaaatgaagatggctggagcaatgtctaccacagcaaaaacaatgcaggcagttaacaagaagatggatccacaaaagacattacanacaatgcagaatttccagaaggaaaacatgaaaatggaaatgactgaagaaatgatcaatgatacacttgatgacatctttgacggttctgatgacgaagaagaaagccaggatattgggaatcaaagttcttgatgnaattggnantgaaa

SEQ ID NO: 4929 - DNA, 722 bp, Homo sapiens
  misc_feature (687)..(687): "n" may be a, t, c, g, other or unknown
  misc_feature (691)..(691): "n" may be a, t, c, g, other or unknown
  misc_feature (717)..(717): "n" may be a, t, c, g, other or unknown
gaaaaatatgatcatttcataatgatgaaggagtcaattcaccaagaagacataataatcctaaatgtttatgcacccataatggagcttcaaaatatatgaagcaaaaacatacagaaccagatacatcacaattatactagaagatttcaacacccctttagcaatagttgatagaatagttagaaaattagtaaagttataaaaggcttgaacaatactatcaaccaacctgacctaatttttttgttttttgagacagggtctcattttgttacccagagtggagtgcagtggcatgatcatggctcactgcagcttcaacctctcaggttcaggtggttttcccacttcagcctcccaagtggctgagagtacaggcatgcaccaccatgcccacctagctttttaattttttgtggagactggctcccactatgttacccaggttagtttcaaactcctgggctcaggtgatcctcctgcattggtctcccaaagtgctgggataataggtatgaagcactgtgcctagccaacctgacttaattgatatgtatagaacatgccaccaacagcagaatatacattctcttcaaggtacacacagaacatttagtaaggataggcattctgaattataaaatacatctcagtagatttaaaggacttaaatcaaggtccccngacnacaggtgaaattaaattttggggatnaagta

SEQ ID NO: 4930 - DNA, 455 bp, Homo sapiens
  misc_feature (396)..(396): "n" may be a, t, c, g, other or unknown
  misc_feature (417)..(417): "n" may be a, t, c, g, other or unknown
  misc_feature (432)..(432): "n" may be a, t, c, g, other or unknown
gtttttgtgttgctagccggggccagcggcggtggcggcggcggcggaggcgtcggtggaggaggggaggcggcgaggaggcgcagctcccgctgcaccgcgatcgacgctgcggagcgagcccacccgccccgggagctcgcctccccggtgctcccccgccctccccgcccccccagcggcgctgcctcctccaaatgagcgattcgcccgctggatctaacccaaggacacccgaaagcagcggcagctgcagcggcggcggcgggaagaggccggcggtgccggcagcggtgtccctcttgccaccggcggaccccctgcgccagggcgaaccggctcccgatcagggtcctgaagatgctgagcgctcacaccggtcacctcctgcacccngagtacctgcagccgctgtcntccactcccgtcaancccattgaactggacgccaagaa

SEQ ID NO: 4931 - DNA, 733 bp, Homo sapiens
  misc_feature (494)..(494): "n" may be a, t, c, g, other or unknown
  misc_feature (681)..(681): "n" may be a, t, c, g, other or unknown
  misc_feature (693)..(693): "n" may be a, t, c, g, other or unknown
  misc_feature (705)..(705): "n" may be a, t, c, g, other or unknown
gcgggcgcccagtgcaccgggaggaggtgagcgccaggtcgccttcgcggcccggggacacaggcagggacgcgggagctgatgcggctggaccggccggggaaacagtattttctggaagggggcccctctgaagcggtccaggatcctgcacatggcgctgaccggggcctcagacccctctgcagaggcagaggccaacggggagaagccctttctgctgcgggcattgcagatcgcgctggtggtctccctctactgggtcacctccatctccatggtgttccttaataagtacctgctggacagcccctccctgcggctggacacccccatcttcgtcaccttctaccagtgcctggtgaccacgctgctgtgcaaaggcctcaagcgctctggccgcctgctgccctggtgccgtggacttccccagcttgcgcctggacctcagggtggcccgcagcgtcctgcccctgtcggtggtcttcatcggnatgatcaccttcaataacctctgcctcaagtacgtcggtgtggccttctacaatgtgggccgctcactcaccaccgtcttcaacgtgctgctctcctacctgctgctcaagcagaccacctccttctatgccctgctcacctgcggtatcatcatccggggggcttctggcttggtgtggaacaagnagggggcaaaanggaaccctgtcntggctgggcaccgtcttcggcgtgctgg

SEQ ID NO: 4932 - DNA, 734 bp, Homo sapiens
  misc_feature (549)..(549): "n" may be a, t, c, g, other or unknown
  misc_feature (693)..(693): "n" may be a, t, c, g, other or unknown
  misc_feature (698)..(698): "n" may be a, t, c, g, other or unknown
  misc_feature (714)..(714): "n" may be a, t, c, g, other or unknown
acagatgttctgaactgaatggtgtggcctctttttgtgtaaattccttttgccgtaatggatgcagtggaataacaatgtttacaggtaccgatcccgatccctgctcaatgtagcatttttttggttttattttcttaataaaagcaggggtaggtttctttaaactgcacaaacatgcaaggattttttaaaaatggaaacttctctcatgttattcaactagagcacttcagtttacaaaacagcaagtccatctttatggaagccagcacaaggaactgtgtgcaaataatgaagacgcttgcttggatcctgtttcaaaattctagaccagggctaccttacacagaattggtcatgttactgccaggagatttctgtgtaacttcatttattggctacagttttggcatttgaagatgtggtactcagatggggttttgtccaccattgtcaagattgtaatcttaaaaatcataccagtcattgataatttaagttatcctgaggcagtcgacttgcagaggcacagtctacaaagcctangatgttgccactcaatgggtttacattctgggacatcttttaagttgtttgtagcactgcagttcaaaagtgttaatatttaaagggacttctagattttatacctaatgcagtagaaccttgaagtatattaagcttttttgntaaancttgaacaagttgggnaagaataatggtgagttccc

SEQ ID NO: 4933 - DNA, 858 bp, Homo sapiens
  misc_feature (707)..(707): "n" may be a, t, c, g, other or unknown
  misc_feature (747)..(747): "n" may be a, t, c, g, other or unknown
  misc_feature (801)..(801): "n" may be a, t, c, g, other or unknown
  misc_feature (837)..(837): "n" may be a, t, c, g, other or unknown
  misc_feature (850)..(850): "n" may be a, t, c, g, other or unknown
tatttaatgaaatgccaaggtgctattagatgttttttgaatatgtatacttcttttcaaatgatcacagatgtgaccatccctaatgagtgcatttcttgaaatagagcagaaactcaagtaacaagaatgggcaggataccaaggaaacagactaatcaggcagatggtgactattttgtagggaaagtctgagtaaaccaatagctctacaacagggatctgaaaataaaggaacattagtgagcatgaaaaaaatgtttttttcatattttttcattaccttataaaaattagatttacatacacatttttacctattaccacagactatatgatgaaacttagtttttctttcattataatgttttcatattagcaaaattttgtcaaaaaacaactttttcataattaagatgcagtaatggatttccttttttttgctctaccttctgagttcttgcaatactttttgaaacctattggtcttttaaaatttcttaatcattttgaaatgaattgatttttaaattgaataaaatagatttatattttgtgtaaaatataaacatcacaataaactgaaatacatttgccaaagaacaacatttttttgtaaaaaaacagaagtaaaaaaacatcctagcaggaaaccaggaacgggataaaaacacaaaaaggtatctcgggcacaatgccctgaaggncaacaaccatggccaagaacatgagggtaatggccagggnataagaaaacacccctggggttgggatcccttgacaactcctgattcctaaggntcaattagggggattggtgcaaaaaaaatggtaaanggtgtaaaaggtngaccttaa

SEQ ID NO: 4934 - DNA, 784 bp, Homo sapiens
  misc_feature (702)..(702): "n" may be a, t, c, g, other or unknown
  misc_feature (722)..(722): "n" may be a, t, c, g, other or unknown
  misc_feature (724)..(724): "n" may be a, t, c, g, other or unknown
ccttatggtttattatgggtaaaggtcatttttaaaatagaagaattagaaaaacaggaaaaatagaagtaatacagttttttaaatcctctttttttttaagagttaggaaatagaacagaagcttgggaactaatagttttagagttttaagataccacgttttagtataacatttacattttaaacattctcacagttaatataggcttaacttggaaatattaagcttttaggatttagtatgtagtagttctctgctggcactaagtctttccccttcgctcctttccaacaggtattgcccaagctctcataagccgttcttttctttctattatgattattattttgtagagatggggtcgcactttgttgcccaggctggtcttgaactcttgggctcaagcagtccttttggcctcccaaagtgctgtgattacaggtgtgagctgctgagaccagccttttcttttaattctgatggtcagtactgatgaagtcctttccagctttgggtacacagccttctgttattcctgctgtcaattttttgtctttctactgggcttttcaaccttgggtattcatggtatcaccttcatctgtgcgattattaccatttaactgcagcaagtaaagacgttaatagtgagggttttggggaatgtggtaaaaccggggaggtatatttgactttgnccaagttatccggatgaggnangttagctaaagcaaaatacaagtggggtgctccctacaatcactgggacctagagattca

SEQ ID NO: 4935 - DNA, 788 bp, Homo sapiens
  misc_feature (726)..(726): "n" may be a, t, c, g, other or unknown
  misc_feature (745)..(745): "n" may be a, t, c, g, other or unknown
  misc_feature (774)..(774): "n" may be a, t, c, g, other or unknown
gttttttaggaagagtgtcccgcagagacccggcgggagctgccaggagctctgggattccagcggctggaagccacctgggaagcctggcctcagtgtggaagagaaggcagcaggattattacagaaccttgtgaagccaacgcgggcagccgccaggagctgcagaccgagaggatctcgtcctttcttgcggcccagggagaccaggcctttcattctgggctcgagaccaacaattcgaattccgaactccccctgcgtgtgggactcaaggttgcccagggctcacctctgatgggtgggcaggtgagcgcttccaacagcttctcgaggctgcactgcagaaatgccaacgaggactggatgtcggcactgtgtccccggctctgggatgtgcccctccaccacctctccatcccagggagccacgacacgatgacgtactgcctgaacaagaagtcccccatttctcacgaggagtcccggctgctgcagctgctgaacaagggcttgccctgcatcacgcgccctgtcgtgctgaaatggtccgtcacccaggcactggacgtcacagagcagctggatgccggggtgcggtacctggacctgcgggatagcccacatgctggagggctcggagaagaacctgcactttgtccatatggtgtacacaaaggggctggtggaggacacactcacgggaaatctcggagtggctggganccggaatccacgccagggngtcatcctgggccttgcaaaaaactttcnaggggggttgaacc

SEQ ID NO: 4936 - DNA, 711 bp, Homo sapiens
  misc_feature (621)..(621): "n" may be a, t, c, g, other or unknown
  misc_feature (681)..(681): "n" may be a, t, c, g, other or unknown
  misc_feature (696)..(696): "n" may be a, t, c, g, other or unknown
gaaaatttgataatctgaatcaccagcattcaaacaaatatttcggcaataaagtttacaaaatctggatttttacaaccttttctattgatgttttgtagaaataagacagggtactaatttttatactggtttttagaaaaatatttatattgttggtgctcaaatcaccaatttctagctagatcattttgcagccttcttttcagtgtttaataacaaagtttttcctaatggcccttcttttagtaaactggacatgttattccactacaaaaaccacaagttatctggccttttagatctttttggaatcggacctggttgagtaaggacctcttaaaagggaaaaataaattttgccgtcagcttcttcataacgttttcaaggaaattctaggcaatcattcctgtcaccaaagaactaaaattttggttgactggaactagtgagctgtgtccatggtgtgtcatgaaggatgtaccccagagagtaacatgagccactgggcagatcccagggaccagtacttgctgcaggatctagtctgtaataagcttgggcatggctctgctgaaagcaagccattcagtttcttgtttgtacctaaaacaccaaanaagaaacactcaaatccagctgctttgtcaattgtcagttctgactccttttgctgtggncttaaccgtacatantgggggtagagtaac

SEQ ID NO: 4937 - DNA, 776 bp, Homo sapiens
  misc_feature (619)..(619): "n" may be a, t, c, g, other or unknown
  misc_feature (643)..(643): "n" may be a, t, c, g, other or unknown
  misc_feature (712)..(712): "n" may be a, t, c, g, other or unknown
  misc_feature (740)..(740): "n" may be a, t, c, g, other or unknown
  misc_feature (765)..(765): "n" may be a, t, c, g, other or unknown
tgagaatggaagtaataggcaagaagccaaggggcttcccaggacaagctaaaaaagagcagatccagactacaactacagaatcctgtaagattctgaaactttgtcacttcctttctaaggcttccttcctaagcctctctgtgaaactctttgaaaaggggtatgtgggctagcttgcaaggacagccagaagggagaaggatcacatccccctccgtggccaggctctgagagacagaaatccagtgaaggacagagcatggggctgagtgtctgtagcccactgcattgagggcaggagagctcagggcaggtctgagtcatcaccattttctgtgtgtttcttcctaataagtgaaataatgtgtagtgtctagcacggtgcctgacagctcacagaaaatccccaacttcccctcccccaccgccatgccttctaactctcggtgagatgaacatctctactgggaggggaagccattgagggaagaaatgctggcaccttgacatttggggaaagaaagggaaggaattgttttccaagtatctactttgtgccagaaatggtgttgggcaatttactgattgcctcatttaatcctttgacgtatcctangagttaggtattctcaagccccanttccaagaaagcaaaccaaggtgaaaaagagttaataatttgttcaaaagacatatggaaaaatgccangcatgggggctcacgcctgtaatcctancactttgggaaggcaaggggggcanatcactttagg

SEQ ID NO: 4938 - DNA, 788 bp, Homo sapiens
  misc_feature (611)..(611): "n" may be a, t, c, g, other or unknown
  misc_feature (642)..(642): "n" may be a, t, c, g, other or unknown
  misc_feature (670)..(670): "n" may be a, t, c, g, other or unknown
  misc_feature (734)..(734): "n" may be a, t, c, g, other or unknown
  misc_feature (764)..(764): "n" may be a, t, c, g, other or unknown
  misc_feature (788)..(788): "n" may be a, t, c, g, other or unknown
acaaagtcagcttcctgccagcccagggagaaatctggagggattccttggattgcaaccccgtcatcttccaatggacagaaaagccttggtctgtggacaactagtcctgaatcaagttccagagaagatgcaaccaagacagatgcagaatcagactgccagggtgttgcttcggtcactagcccaggagacatttccccacccataggcctagtcaagaaagagccttatgggctttcaggactgaaaagagcttctgcttcttctctcagatccatctctgcagctgaaggaaacaagagctacagtggatctattcaaagcttaacttctgtaggttccaaggagacacccaaagcttcaccaaacccagacctgcctccgaaaatgtgcaggagattaagactagacactgcctcaagcaatggctatcagcggcctggctcagtagtggcagcaaaagctcaactgtttgaaaatgttggttcacctaaaccagtttcttctgggcgccaagccaaagccatgtactcctgtaaagcagagcacagtcatgagctttccttcccacaaggagcaatattttctaatgtgtacccatcagtggnaccaggatggttaaaggcaacttatgaaggnaaaacaaggactagttccagaaaattangttgtcttcctctaatactatttaagtggatggcaagtatcttcaagggatccatgggaacgantaaatgctatgattttatctgacacagatncacggggattaagcccactaagtn

SEQ ID NO: 4939 - DNA, 776 bp, Homo sapiens
  misc_feature (714)..(714): "n" may be a, t, c, g, other or unknown
  misc_feature (727)..(727): "n" may be a, t, c, g, other or unknown
  misc_feature (736)..(736): "n" may be a, t, c, g, other or unknown
gatgtttatggaaaggtggttcaagtatgatggctatgatcggtttgaattctctcatagctattccaaagtctatgcacagagagccccctatcaccccgatggtgtgtttatgtcttttgaaggctacaatgtggaagtccgagacagagtcaagtgcataagtggggttgaaggtgtgccattatctacacaatggggacctcaaggctatttctatccaatccagattgcacagtatggattaagtcattacagcaagaatctaactgagaaacctcctcacatagaggtatatgaaacagcagaagacagagacaaaaacaagcctaatgactggactgtgccaaagggctgctttatggcgaatgtggctgataagtctagattcaccaatgtcaaacagtttattgcaccagaaaccagtgaaggtgtatccttgcaactgggaaacacaaaagattttattatttcatttgacctcaagttcttgacaaatggaagtgtgtccgtggttctagaagaccacagaaaagaatcagctcttcactatacattatgtctcaaatgctcagctaattgcttttaaagaaagagatatatactatgggcattgggcccagaacttcatggagcacagttaccagggacctggtcactgacctcaggaaaggagtgggtctttcaaacacaaaagctgtcaagccaaccaanataatgcccaagnaaaggtggntaggttgatttgcaaaaggtaaggggattcccccgaacaa

SEQ ID NO: 4940 - DNA, 702 bp, Homo sapiens
  misc_feature (646)..(646): "n" may be a, t, c, g, other or unknown
  misc_feature (670)..(670): "n" may be a, t, c, g, other or unknown
  misc_feature (687)..(687): "n" may be a, t, c, g, other or unknown
aaatcgatgaagattgtatttttgcaccttaactccacattgctttattggttaatttatattctttccatgtaattcatgtaattgtatgtctgtgtgtgttttatgtgtcaccacctttcatgtttttgattgccctacaaagagaaaccaaatgagctgattactgactataagttctcagcctttatggacctaatcttatttttatttacttgagtaatgtttattctctgcatgaaccatgatttctcctgtgagccattccagcataagctgtgaatatgtattaacaaatatatacatttctatttttataatccataaggatatgcctgttttaaataacatacatattaacaatatctatcaggaaaaccctcaagacagcttctagttaaaacctttgttgctgtcctctcaaactatatttataaaaatttgctagggccaaatccatacttgcagaataattcatcaaattttatttttaagtgaaaagtaacctttcaggcatttcagcagcatacattgacaatctagggtatatatgtatgtatgtttcttattgtatgtctatatatgtatgtggggaggacaggagtgaatgttcacacacttttcttgcgtactcaactaaattggngaatgtttccgaagaaaattgggntgaaattagctgctganattgagtttcctgcc

SEQ ID NO: 4941 - DNA, 572 bp, Homo sapiens
  misc_feature (487)..(487): "n" may be a, t, c, g, other or unknown
  misc_feature (563)..(563): "n" may be a, t, c, g, other or unknown
  misc_feature (565)..(565): "n" may be a, t, c, g, other or unknown
tgattgcaaacgagcaaaagacttctctcccaaatttgttccaggataaaaacagaccgtgtctcagtaactggccagaggatacggatgtcctctacatcgtgtctcagttctttgtagaagagtggcggaaatttgttagaaagcctacaagatgcagccctgtgtcatcagttgggaacagtgctcttttgtgtccccacgggggcctcatgtttacatttgcttccatgaccaaagaagattctaaacttatagctctcatatggcccagtgagtggcaaatgatacaaaagctctttgttgtggatcatgtaattaaaatcacgagaattgaagtgggagatgtaaacccttcagaaacacagtatatttctgagcccaaactctgtccagaatgcagagaaggcttattgtgtcagcagcagagggacctgcgtgaatacactcaagccaccatctatgtccataaagttgtggataatanaaaggtgatgaaggattcggctccggaactgaatgtgagtagttctgaaacagaggaggacaaggaagaagctaanancagatgg

SEQ ID NO: 4942 - DNA, 587 bp, Homo sapiens
  misc_feature (276)..(276): "n" may be a, t, c, g, other or unknown
  misc_feature (493)..(493): "n" may be a, t, c, g, other or unknown
  misc_feature (561)..(561): "n" may be a, t, c, g, other or unknown
  misc_feature (567)..(567): "n" may be a, t, c, g, other or unknown
acactgctcagggaagagcctgctacggtggactgtgagactcagtgcactgtcctcctcccagcgaccccacgctggaccccctgccggaccctccacccttcggcccccaagcttcccaggggcttcctttggactggactgtccctgctcatccattctcctgccacccccagacctcctcagctccaggttgccacctcctctcgccagagtgatgaggtcccggcttctgctctccgtggcccatctgcccacaattcgggagaccacggnggagatgctgcttgggggtcctggacaggagcccccaccctctcctagcctggatgactacgtgaggtctatatctcgactggcacagcccacctctgtgctagacaaggccacggcccagggccaacccaggccaccccacaggccagcccaggcctgccggaagggccgccctgctgtgtccctgcgagacatcaccgcacgtttcagtggccancagcccacactgcccatggctgatactgtggaccccctggactggctttttggggagtcccaggaaangcagcnaagccagagggacctgccaa

SEQ ID NO: 4943 - DNA, 684 bp, Homo sapiens
  misc_feature (578)..(578): "n" may be a, t, c, g, other or unknown
  misc_feature (634)..(634): "n" may be a, t, c, g, other or unknown
  misc_feature (672)..(672): "n" may be a, t, c, g, other or unknown
  misc_feature (681)..(681): "n" may be a, t, c, g, other or unknown
tatataaacaaaccaaaattatttcttcaaatcaagaacttatctacgaagggcgacgcttagtcttagaacctggaaggctggcacaacatttccctaaaactactgaggaaaaccctatatttgtagtaagccgggaacctctgaataccataggattaatatatgaaaaaatttccctccctaaagtacatccacgttatgatttagacggggatgctagcatggctaaggcaataacaggggttgtgtgttatgcctgcagaattgccagtaccttactgctttatcaggaattaatgcgaaaggggatacgatggctgattgaattaattaaagatgattacaatgaaactgttcacaaaaagacagaagttgtgatcacattggatttctgtatcagaaacattgaaaaaactgtgaaagtatatgaaaagttgatgaagatcaacctggaagcggcagagttaggtgaaatttcagacatacacaccaaattgttgagactttccagttctcagggaacaatagaaaccagtcttcaggatatcgacagcaagattatctccaggtggatnactggcagacgcatgggcacatcaagaaggcactcatccgaaagacagaaatgtanaaaaactacaagtcctgttaaattgcatgaccagagantttactaancag

SEQ ID NO: 4944 - DNA, 826 bp, Homo sapiens
  misc_feature (761)..(761): "n" may be a, t, c, g, other or unknown
  misc_feature (785)..(785): "n" may be a, t, c, g, other or unknown
  misc_feature (815)..(815): "n" may be a, t, c, g, other or unknown
gttaatgacgtcacgttgtttcgcgggagaaattcgaaagtggattttgtgcaatttgacaggtggtataaatagttgaatatttcctattttctggacccagctggtttataacttcagaagaaataatggaaagccaagaatttattgttctatatactcatcaaaagatgaagaagtcaaaagtgtggcaagatggaattctgaagatcactcacttaggaaacaaagcaattttatatgatgacaaaggagcatgtttggagagtctgtttcttaaatgccttgaggtgaaacctggagatgacttagaaagtgatcgatacttaatcacagttgaagaggttaaagttgctggagccataggtattgttaagcagaatgtcaataaagaagcaccagagttaaattcaaggacatttatatcctctggccgatctcttggatgtcagccctctggcttaaaaaggaagtttactggttttcaaggaccacgtcaggttccaaagaaaatggttattatggaaagtggtgaatcagctgcatcacatgaggctaagaaaactggccctactattttttctccattctgcagcatgcctcctttgtttcctactgttggcaagaaagatgtaaataatatactggcaaaccctgagaacatgtgacttacaagaacagggagagaaatgccatgggtttttcctcgggtttttccccaaacccttccaagatttaaccccaaaaaagtgcctggggtngaaagaaaaaattattttttggcnccaacctgttcaaaattcccggggaaaatnaagccttttaa

SEQ ID NO: 4945 - DNA, 723 bp, Homo sapiens
  misc_feature (615)..(615): "n" may be a, t, c, g, other or unknown
  misc_feature (699)..(699): "n" may be a, t, c, g, other or unknown
  misc_feature (713)..(713): "n" may be a, t, c, g, other or unknown
  misc_feature (722)..(722): "n" may be a, t, c, g, other or unknown
tgcaaatattccaaagacatgattgtaagcctttgttccctgtaaaagattgctctgtattaaaacaaatccaccaaacaacaagtcatagacccgttagaaaccagcattctaaagcatggtttaagtgtgaacaggtgtttgtagcttatctgagactgacagtaggtaaaggggccaaggagagactgctacatggtggtacccaagataattctctgaagagagagacttttgtgtgaggaagacatttattatacagagtgatttattgcaattcttagctactccatcaagctagacttgtcaccatgtcccattaaaagggtttaagaagaattctttctcagaatcctgcattacagtagcatctgcaataaggagaaaattttcttctgggaatcactccaggaaaccttgacccatcctctacttagtcactcttatagagccctgcattttcttttgtagcatttatgacatgtgtaatgttacatttgtttgtgggattatttaaggaatgtctgtcatgtgagacaaataagctttatgaagtacaggcacctcttctgtcttaattcctatgccccaagcacagtccctgacatctagtanaccttcaaaaagttttacggaatgaatgagtgaacaaatgatgcaaagtgttggttgcaggatatctctctcaagtcttccaantccttaaggagatnagaggcaana

SEQ ID NO: 4946 - DNA, 748 bp, Homo sapiens
  misc_feature (620)..(620): "n" may be a, t, c, g, other or unknown
  misc_feature (673)..(673): "n" may be a, t, c, g, other or unknown
  misc_feature (722)..(723): "n" may be a, t, c, g, other or unknown
agactgagctcagtagccaggcatgaaagagactgggcaagttgcaggggctaattggaaaggggctgtcggttgcacttggggtttaaacaagaggtttcttttgcaatgagaatttttaggtggctaagatcagtcttcttggcaaaaaaataaactaagcatagagtgcagttggatatgaccgaggaaattacaaaaagggctccaggagcaaagtctgagctttccttatcagtgttgcagtggaatagctgggggcctgatgctgtttgtgctgatcatactttgcaaatgcccacactttgttgctgtttgtctccttggacgaggtttgctgcaacttcaattccttgacttcggccttactttgttttcatagcagcaagaattgaagacttaagggtttgagcagatggttttctacctaaattgaataattcaattacgtattctcaactagcatggatttgggtcatggaattaaagtagaaacgtatccggcatgacttctttgtgcttatcaaaagtgatcctgataaacagatcttgctctttcatgtaaagaagtaaaagttatttatgattccatctgatatacataggagagaaactgatanaagaattctgaagggcaactgtatgataaaaagctatataaagtccaagtgtncaatttccttcaaccataattttgagcaaacccaaggatttaaagtccnnggggaacctgaacaatttaatttgg

SEQ ID NO: 4947 - DNA, 560 bp, Homo sapiens
  misc_feature (298)..(298): "n" may be a, t, c, g, other or unknown
  misc_feature (542)..(542): "n" may be a, t, c, g, other or unknown
  misc_feature (546)..(546): "n" may be a, t, c, g, other or unknown
  misc_feature (557)..(557): "n" may be a, t, c, g, other or unknown
aacgtatgagctcgccctccaaacaggaaaagtgattgaacaaatgggcaaattttaccctgaactgaagctagcttatgctgttcgaggcaataaattggaaagaggccagaagatcagtgagcagattgtcattggcacccctgggactgtgctggactggtgctccaagctcaagttcattgatcccaagaaaatcaaggtgtttgttctggatgaggctgatgtcatgatagccactcagggccaccaagatcagagcatccgcatccagaggatgctgcccaggaactgccanatgctgcttttctccgccacctttgaagactctgtgtggaagtttgcccagaaagtggtcccagacccaaacgttatcaaactgaagcgtgaggaagagaccctggacaccatcaagcagtactatgtcctgtgcagcagcagagacgagaagttccaggccttgtgtaacctctacggggccatcaccattgctcaagccatgatcttctgccatactcgcaaaacagctagttggctggcancaanggctctcaaangaa

SEQ ID NO: 4948 - DNA, 710 bp, Homo sapiens
  misc_feature (588)..(588): "n" may be a, t, c, g, other or unknown
  misc_feature (667)..(667): "n" may be a, t, c, g, other or unknown
  misc_feature (690)..(690): "n" may be a, t, c, g, other or unknown
  misc_feature (694)..(694): "n" may be a, t, c, g, other or unknown
aggcctcagaaagatggcgtcctcggagcaggcagagcagccgagccagccaagctctactccaggaagtgaaaatgtgctgcctcgagagccgctgattgccacggcagtgaagtttctacagaattcccgggtccgccagagcccacttgcaaccaggagagcattcctaaagaagaaagggctgacagatgaagagattgatatggctttccagcagtcgggcactgctgccgatgagccttcgtccttgggcccagccacacaggtggttcctgtccagccccctcacctcatatctcagccatacagtcccgcaggctcccgatggcgagattacggcgccctggccatcatcatggcaggcattgcatttggctttcaccagctctacaagaaatacctgctccccctcatcctgggcggccgagaggacagaaagcagctggagaggatggaggccggtctctctgagctgagtggcagcgtggcccagacagtgactcagttacagacgaccctcgcctccgtccaggagctgctgattcagcagcagcagaagattcaggagcttgcccacgagctggncgctgccaagggcaccacatccaccaactggattctggagtcccaaaatatcaacgaactcaagtccgaaattactccntgaaagggcttcttttaatccgngganttcctccatcccatca

SEQ ID NO: 4949 - DNA, 648 bp, Homo sapiens
  misc_feature (526)..(526): "n" may be a, t, c, g, other or unknown
  misc_feature (609)..(609): "n" may be a, t, c, g, other or unknown
  misc_feature (629)..(629): "n" may be a, t, c, g, other or unknown
  misc_feature (632)..(632): "n" may be a, t, c, g, other or unknown
ttttgtatgaaattggaggaaatattggggaacgctgccttgatgatgacacttacatgaaggatttatatcagcttaacccaaatgctgagtgggttataaagtcaaagccattgtagaagacttaacaagctgcagataaccatgtggacttctgtcataattcttgctgagtcaagagtgtaaataaaagaaatggcaggactcatattattcagttgtacccaagtatttaaaaatgactctcttaagccttaaaaagtcatagatttgtgctgctgccagaattatattaattattattaatgttattattagaaaaaaaatttctggagtgagagtaaagaggcttaattagtttgtgggcagttttcatatgctctgtgaaatgtgtccggatgtgacatagtttttttttttaatatgtggaaatgtcttctcttcccattcttttctcctaaaatcatatatactgtaatatatgctctctcacctctattacctcctcacatctaccctttcccangttaggtttgctttttgaccaaaaagataacaaataccaaggtatggcaagttgtgaagacagcacattaaaacatacctaanttcacagtattcctgtcacnacngaatggttagtattca

SEQ ID NO: 4950 - DNA, 823 bp, Homo sapiens
  misc_feature (766)..(766): "n" may be a, t, c, g, other or unknown
  misc_feature (769)..(769): "n" may be a, t, c, g, other or unknown
  misc_feature (807)..(807): "n" may be a, t, c, g, other or unknown
gactgagctacggttctggctgcgtcctagaggcatccggggcagtaaaaccgctgcgatcgcggaggcggcggccaggccgagaggcaggccgggcaggggtgtcggacgcagggcgctgggccgggtttcggcttcggccacagctttttttctcaaggtgcaatgaaagccttccacactttctgtgttgtccttctggtgtttgggagtgtctctgaagccaagtttgatgattttgaggatgaggaggacatagtagagtatgatgataatgacttcgctgaatttgaggatgtcatggaagactctgttactgaatctcctcaacgggtcataatcactgaagatgatgaagatgagaccactgtggagttggaagggcaggatgaaaaccaagaaggagattttgaagatgcagatacccaggagggagatactgagagtgaaccatatgatgatgaagaatttgaaggttatgaagacaaaccagatacttcttctagcaaaaataaagacccaataacgattgttgatgttcctgcacacctccagaacagctgggagagttattatctagaaattttgatggtgactggtctgcttgcttatatcatgaattacatcattgggaagaataaaaacagtcgccttgcacaggcctggtttaacactcatagggagcttttggagaacaactttactttaatggggggatgatggaactaacaaaagaaaccacaagcacaaggaaaatttaaccaangangaaatgagcaaaatccaataaacctgttgggggttccnggtccaaattttcccg

SEQ ID NO: 4951 - DNA, 595 bp, Homo sapiens
  misc_feature (416)..(416): "n" may be a, t, c, g, other or unknown
  misc_feature (541)..(541): "n" may be a, t, c, g, other or unknown
  misc_feature (582)..(582): "n" may be a, t, c, g, other or unknown
  misc_feature (595)..(595): "n" may be a, t, c, g, other or unknown
gagcgacgcccacggcctgtctcggccaccagcgtgttccagcgagcgcccagccacctcgctcgcagcctccccagcgcagcagcccggctgtgggcctgcggcagccgggtcttcctggtccccacctcctggggccgacgggcggcaggaaggggctcggcgggacgcgccgtcagggacctgaggaggaacaacggaacgcgttcggaacggcctggactcccgagactcacccgactcgtggccacaccgggagaactgaagcggcagtagccggcggagacgcccgacccgaaggccggctgctatggagcagacagctgaaccgcttgccagacgccgaaacccagtgacgccctccaccgctccaccgtgctcccggctccccgcccccgccgcccgcgggccccaangcgcatgcgccgcctgtcctggaggggcccatttccttccgtcgtggggggaaggcacagtgagtccactggggcacggcagcgtctaagccacaagcccgagcacataagccaagtcctaacgngagcctatgttgtaagtccactactggtgcaaggtttcaanacttctaaagaan

SEQ ID NO: 4952 - DNA, 704 bp, Homo sapiens
  misc_feature (503)..(503): "n" may be a, t, c, g, other or unknown
  misc_feature (633)..(633): "n" may be a, t, c, g, other or unknown
  misc_feature (672)..(672): "n" may be a, t, c, g, other or unknown
  misc_feature (684)..(684): "n" may be a, t, c, g, other or unknown
tctgtgttaactctgagagaacaaataatggctttttaaagactgttaatagaataatgaagacttactgtgtttttaacgtgaaaattttaggtgaccaagggtcctgctataacatactgggggtcataggatagtagaatggtcaacatctcaatttagacatgttacttcctgctctaaatacacttgtggacgctacttgtggtgtaactccttatgtatttaataattatctgactctggttttcttggttgatttttttaaatgggtgaagaatctagttatgaattctttgccctttatggaatgtgatatcttggtttttattccatctgttacttcccttttacttaattttatcttattgttttgcgttgtgtttctaaaataatggctttggcttgttttttcctgaatgtttctgcagtttggtttgagtatctgggtttgggcaccactcctgaacttggactccatctgtacttgtgacttttggaangcagagtcagtgttttctgtggaaagatgacatttttttatattatatatgtgtatctccccctcccctttttggtttctcttaaaaagactggaaagaaagcagttaaagcagttctgtggggtctcancaagatggactcaaaagttgtgggatgaaaaaaactaanggacctcaatanttgaccaagaccaataggaa

SEQ ID NO: 4953 - DNA, 756 bp, Homo sapiens
  misc_feature (620)..(620): "n" may be a, t, c, g, other or unknown
  misc_feature (703)..(703): "n" may be a, t, c, g, other or unknown
  misc_feature (705)..(705): "n" may be a, t, c, g, other or unknown
  misc_feature (723)..(723): "n" may be a, t, c, g, other or unknown
ggagaatgcgcgggtcgagtggtgtagttcgatttttgcgtgtgtgcgttgcttgcggcctttgtgcctttttattctttgcttacctttatgatataaagaccttatttcttacaaggaggaaaagaccgctgacttcagaaacagcgggaaccccagctcgtcaccggtaattcaagaggaaacgcttgagcaattactgatgttgtaaactgggatcagaagacatacatggtatcgtatcccaggcaaggcacagtggctcacacctgtaatcccagcactttgggaggctgaagaaggcagatcacttgaggtcaggagttcgagaccagcctggcttacatggtgaaacccatctctactgaacatacaaaaattagctggacatggtggttagctgcacctctactccacgtgttcctcccttcaggtcccaggctgatggagtagcctctgtgtgtttgggatgttgtcagtcataatggtggacacaaaagagattatgacaaaccgtgtattgtctcctacaatttctgctcacagaagtggacaacatcacttctttccacatttcattgaccagagcaagtcatgtgaccaagcctgattcaaaatangctggagcaaggaggagcaacaaacataacattcccaagtttacagctgaaggaaattaagcttcaaagttgcccaagtttananaatgaagtcaatgggaanaggtttgaactcaagatgacaaaaattgggggc

SEQ ID NO: 4954 - DNA, 695 bp, Homo sapiens
  misc_feature (479)..(479): "n" may be a, t, c, g, other or unknown
  misc_feature (546)..(546): "n" may be a, t, c, g, other or unknown
  misc_feature (598)..(598): "n" may be a, t, c, g, other or unknown
  misc_feature (621)..(621): "n" may be a, t, c, g, other or unknown
  misc_feature (651)..(651): "n" may be a, t, c, g, other or unknown
ttctgatgaatgtgtgaaagagttgattatttcaacagtattggttaagtcacaacgacgaagtgctgagaaggttatgggtaccaggaagaaacaaacagaagtcttaagattagaatgagaaccaaagagaatttaaccctgccattttttttttttttaacaccaagatcctaagtaattccaaatgccttagatatcaatgaaagctacacaccattgagatgggcaaaattctttctctacaaagggagtaatcaagtaaatacctgttctctttcaatggactgttgcctattgagcattgtggatgatgtgttttcagatttccaggtgaagttctgaccctacctgtttggccaaagacgtaaattgagaggaaaggccttggtcttcctgatcaaccagcatttaacgaacagtggcttaatgcagatcactcaagaggcagcatagcaatgtaaaaggaatataagtangtgttggatgcctttttcctagaccaggaatggggaatatataacacctgtgccaccgctcttttanggaggcattatgaatgagtgcagcattcctgtcctctgtgccaggatttggncttagaatccatgtcagattggngcttccagacatctattcccagtccatcanagtgaaatgaaggctatttgccatccctgccttagacagaggag

SEQ ID NO: 4955 - DNA, 776 bp, Homo sapiens
  misc_feature (532)..(532): "n" may be a, t, c, g, other or unknown
  misc_feature (685)..(685): "n" may be a, t, c, g, other or unknown
  misc_feature (749)..(749): "n" may be a, t, c, g, other or unknown
  misc_feature (770)..(770): "n" may be a, t, c, g, other or unknown
caatttaccaacttccaaatttgaatgtggagataatgttaaaacatcatccaatctttataatttacctcttaagacattagaaagtattgcatttgttccaccgcagtccgacctaagtaattcattaggaactccatcagtgcctccaaaagctccagttcagaaattcagctgccaggtcgagggatgtactcgaacctataattcttcacagagtattgggaaacacatgaagacagcacaccctgaccaatatgctgcatttaaaatgcagcgcaaaagtaaaaaaggtcagaaagctaacaacttaaatacaccaaataatggaaagtttgtttattttttgccatcaccggtgaacagctcaaatccattttttacgtcacagaccaaagccaatgggaatcctgcttgttcggcccagttgcagcatgtctcgccacccatttttccagctcatttagcaagtgtgtcaactccattgttgtcctcaatggaaagtgtcataaatccaaatataacttctcangataaaaatgaacaaggtggtatgttatgttcccaaatgggaaatttacctagtactgccttgccagcacaaatggggggatctaaccaaaacagttctgcctttgaatattgacaagtggctcaagatcctttccttccctttacctggcangaaaggtaggtcaaatggtctctccttccccttcaaccaagcaagattagtgggggacctaaanttccggttttttttccccaanctgggg

SEQ ID NO: 4956 - DNA, 720 bp, Homo sapiens
  misc_feature (492)..(492): "n" may be a, t, c, g, other or unknown
  misc_feature (606)..(606): "n" may be a, t, c, g, other or unknown
  misc_feature (672)..(672): "n" may be a, t, c, g, other or unknown
  misc_feature (718)..(718): "n" may be a, t, c, g, other or unknown
  misc_feature (720)..(720): "n" may be a, t, c, g, other or unknown
gtacaacgggaatccgggacgccgggcgcgagtggagctcagtgccagaggaggggattcccggcgccgggggacagagcccctttttttttttttgccgaaagaccctttctgctggggagcctcttgtgtccagcctaggcccgcgtgcagcgccgacggatgatcgtcttcttggaaagtgaataaacttaattgagaatgtctgaaaaccttgacaagtccaatgtaaatgaagcaggaaaatcaaaatccaatgattctgaggaaggccttgaagatgctgtggaaggtgctgatgaagccttacaaaaagcaataaagtcagactcctccagcccccaaagagtgcagagacctcactctagtcctcctcgctttgtgacagtagaagaacttctagagacagcgagaggcgtcaccaacatggctctagcccatgaaattgtagtaaatggagactttcagattaaaccagttgaattaccaagnaaacagcttgaagaagagagtaaaggagattgtacataaagcgttttgggattgcttgaagtgtgcagctaagtgaagattccccaacatatgaccatgctatcaaacttgtangagaaatcaaaagagactctcctatctttccttgctgcctggtcatactagactgagaaaaccagntaacaagaagtcctggatctgggattctgataaagcaggaagcaanan

SEQ ID NO: 4957 - DNA, 535 bp, Homo sapiens
  misc_feature (251)..(251): "n" may be a, t, c, g, other or unknown
  misc_feature (303)..(303): "n" may be a, t, c, g, other or unknown
  misc_feature (394)..(394): "n" may be a, t, c, g, other or unknown
  misc_feature (465)..(465): "n" may be a, t, c, g, other or unknown
  misc_feature (471)..(471): "n" may be a, t, c, g, other or unknown
  misc_feature (505)..(505): "n" may be a, t, c, g, other or unknown
gaacagcgagtaataacttctttgtggatgattatgctagatttactatcttgggattcccaaggcaagactgctgctgtagccaatagtatgaactatctgacaaagaaaggaatgtcctccaaggaaatctatgatgattcttttattaggccagtaactttttggattgttggggattttgatagcccttctggacggcagttactgtatgatgccatcaaacatcagaaatccagtaacaatgttanaataagcatgatcaataatcctgccaaagagataagctatgagaacactcanatctccagagcaatctgggcagctctccaaactcagacttccaacgctgctaagaacttcatcaccaaaatggccaaggagggggctgcanaggccctggctgcaaggagctgacattgcgggagttctctgttgggggaatgggatttcagtctttttaanagaggnctttgagtcttccaaaatggatttcattttgtcncatgcccgtgtactgcagggatgttctgaa

SEQ ID NO: 4958 - DNA, 718 bp, Homo sapiens
  misc_feature (513)..(513): "n" may be a, t, c, g, other or unknown
  misc_feature (521)..(521): "n" may be a, t, c, g, other or unknown
  misc_feature (604)..(604): "n" may be a, t, c, g, other or unknown
  misc_feature (642)..(642): "n" may be a, t, c, g, other or unknown
  misc_feature (681)..(681): "n" may be a, t, c, g, other or unknown
  misc_feature (710)..(710): "n" may be a, t, c, g, other or unknown
agtagttcccggtgactgtcgcagcctctgttgccctctgacttgcagatgctgtgagatccagagctaagactccacgacatcccggaagccgaaaaatgctatgtcttctcattacactgaagaccttttgccagaacagtgcatgcaagattcattccaaaaagtgatactgagaagatatggaagctgtggacttgaggatttacacttaaggaaggatggggaaaatgtgggtgagtgtaaggatcaaaaagaaatttataatggacttaaccaatgtttgtcaactctacctagcaaaattttcccatataataaatgtgtgaaagtctttagtaaatcatcaaatctaaatagagaaaacataagacatactacagagaaacttttcaaatgtatgcaatgtggcaaagtctttaaatctcactcaggcctttcttatcataaggataattcacactgaagagaaactctgcatatgtgaggaatgtggcaaaacctttaagtggntcccaaancttactaaacataagagaattcacactggagagaaaccatacaaatgtgaagaatgtggcaaagcttttaactggggctcgantcttactaaacataagagaatccatactggtgagaaancctacaaatgtgaagaatgtggaaaagcctttcactggngttcaacctttgttaagacataagaaaantcatcagg

SEQ ID NO: 4959 - DNA, 815 bp, Homo sapiens
  misc_feature (545)..(545): "n" may be a, t, c, g, other or unknown
  misc_feature (722)..(722): "n" may be a, t, c, g, other or unknown
  misc_feature (778)..(778): "n" may be a, t, c, g, other or unknown
  misc_feature (796)..(796): "n" may be a, t, c, g, other or unknown
gagaccacatgttattatgcaaattatcaggcttttaactctgcttgaggtttgggccttatgaagatcaagatttcttaggcatttatataaaaccactttcttatttctggttttatatcaacaaccacataacctagatacgaaaggagcattctcgcggatttagtgttgacctaagttaacagacttttaaaagacagaactcttacaaaggggcttgagtttttttttttttttgctttttggaagacgtttaaatttagggtttccagaccctgaacctcaatagtgtgcagtagatttccaaagtatgaatcttagaccttgaaaaattctgtatctctgaccttaaaagttttgattattttattctgtttccaaagtgtataaccagttctccaagttctaattggagagctcattagttatcagcctcacagtcacggactctgggatgtcttatttcatatgcctgtaaatttgtgacttgcagtgtgactggccttctcctgtgtgtttatgtagcacaaccacatttgtcntgttggaaggagagccaggtatcatagacagcacattcatttagagccagtcttgactttagattgacctccatgttctccagggagaaaataattatgcaactgtgaacagagaaaaagggcaaaggcacactaaccaaggggataataagggatgtagtggcatttctaactccngtatttaattggttttggtgggttttggagaatagatgcttaaatgttaatttccnggggcaagttttttaaanaaaaggaggatgaaaatcc

SEQ ID NO: 4960 - DNA, 756 bp, Homo sapiens
  misc_feature (678)..(678): "n" may be a, t, c, g, other or unknown
  misc_feature (685)..(685): "n" may be a, t, c, g, other or unknown
  misc_feature (729)..(729): "n" may be a, t, c, g, other or unknown
attttcgagtgaaggacccggagccgaaacaccggtaggagcggggaggtgggtactacacaaccgtctccagccttggtctgagtggactgtcctgcagcgaccatgccccgtaaaggcacccagccctccactgcccggcgcagagaggaagggccgccgccgccgtcccctgacggcgccagcagcgacgcggagcctgagccgccgtccggccgcacggagagcccagccaccgccgcagagactgcaagtgaggaacttgataatagaagtttagaagagattttgaacagcattcctcctcccccgcctccagcaatgaccaatgaagctggagctcctcggcttatgataactcatattgtaaaccagaacttcaaatcctatgctggggagaaaattctgggacctttccataagcgcttttcctgtattatcgggccaaatggcagtggcaaatccaatgttattgattctatgctttttgtgtttggctatcgagcacaaaaaataagatctaaaaaactctcagtattaatacataattctgatgaacacaaggacattcagagttgtacagtagaagttcattttcaaaagataattgataaggaaggggatgattatgaaagtcattcctaacagtaatttctatgtatccagaacggcctgcanagataanacttctgtctatcacataagtgggaaagaaaaagacattttaangggatgtttgggaaatcctccttcgaa

SEQ ID NO: 4961 - DNA, 792 bp, Homo sapiens
  misc_feature (561)..(561): "n" may be a, t, c, g, other or unknown
  misc_feature (614)..(614): "n" may be a, t, c, g, other or unknown
  misc_feature (758)..(758): "n" may be a, t, c, g, other or unknown
  misc_feature (761)..(761): "n" may be a, t, c, g, other or unknown
  misc_feature (770)..(770): "n" may be a, t, c, g, other or unknown
cctaaagtctcagctggtaagtaataaaaccaaggtttggaccaagactgtgcccctaacggctatcctatactgtatctgaatacttgaggaaataaaatatacaactgaaattattttgcattttttaaagaaacagtagcaataggggcatagaatcttaaaatttaaaaggtcttagaggtcagattatagagaaaaaaatggaagtccagggagagttcctaaactgtgtcatggggtaccttggaaaattttttacctttgtattcaacttcccaaaaaccataaaatgcataattttctctgtcaatttttttccagttttttgttcattatgaatgtcggggaaggtatctattttaaattggactctgtcataagtaatgcttgaagaattacatgttgtgcttggcaatttgcactgcatgcaaagctggaatgtagggaatttttctgttttgtactctctcttattatgtgtagggtaaggagaatggagccctaatgcagtttctttaggaagtgtagtacaccaccagtagttaaaatgattattangcggtaatgccaagggctgtagaatagaatttaaacattacttgatgttttcnagatagatcttaaaatagatatcgatataaaacaaactggaagggacagaaaattaattttagaatgtcaattctgggtatattttgatgagaatatgagaaagtagccacaaatcacaccgtgcaacatggaaatttgcaacnagnaaatttcanaagcccaaatatatttaaagtg

SEQ ID NO: 4962 - DNA, 782 bp, Homo sapiens
  misc_feature (677)..(677): "n" may be a, t, c, g, other or unknown
  misc_feature (753)..(753): "n" may be a, t, c, g, other or unknown
  misc_feature (779)..(779): "n" may be a, t, c, g, other or unknown
  misc_feature (782)..(782): "n" may be a, t, c, g, other or unknown
caccttgtcaaggtggccctgctcgaggatgtcaaccgcatgtcacctggggcgctggccattatcttcgcaccctgcctcctgcgctgccctgacaactcggacccgctgaccagcatgaaggacgtcctcaagatcaccacgtgcgtggagatgctgatcaaggagcagatgaggaaatacaaagtgaagatggaggagatcagccaactggaggctgcagagagtatcgccttccgcaggctttcgctcctgcgacaaaatgctccatggcctctcaaactggggttttcgtctccctatgagggggtcctgaacaagagccccaagacccgggacatccaggaggaggagccggaggtgctgctggaggaggaggcagccggcggcgatgaggaccgggaaaaggagattctcattgaacggatccagtccatcaaggaggagaaggaggacatcacctaccggctgccggagctggacccaaggggctcggacgaggagaacctggactcggagacgtcggccaagcaccgagagcctgctggaggagcgggccgggcggggggcctcggaaggtcagtattaaggtagcgtctgcttttctccttcccgtccatcccagcaggccccagggcgagggtcctccggctgccggccctgaaagctgcagtaancctgccatctgtctctcaaaaagggcccctgcgcctgctctcccttgccccggcgcgcccaaccccgagccccctncccaaccgttgggccgcccctccaanaan

SEQ ID NO: 4963 - DNA, 710 bp, Homo sapiens
  misc_feature (587)..(587): "n" may be a, t, c, g, other or unknown
  misc_feature (686)..(686): "n" may be a, t, c, g, other or unknown
  misc_feature (700)..(700): "n" may be a, t, c, g, other or unknown
  misc_feature (702)..(702): "n" may be a, t, c, g, other or unknown
gtcttgtcggctcctgtgtgtaggagggatttcggcctgagagcgggccgaggagattggcgacggtgtcgcccgtgttttcgttggcgggtgcctgggctggtgggaacagccgcccgaaggaagcaccatgatttcggccgcgcagttgttggatgagttaatgggccgggaccgaaacctagccccggacgagaagcgcagcaacgtgcggtgggaccacgagagcgtttgtaaatattatctctgtggtttttgtcctgcggaattgttcacaaatacacgttctgatcttggtccgtgtgaaaaaattcatgatgaaaatctacgaaaacagtatgagaagagctctcgtttcatgaaagttggctatgagagagattttttgcgatacttacagagcttacttgcagaagtagaacgtaggatcagacgaggccatgctcgtttggcattatctcaaaaccagcagtcttctggggccgctggcccaacaggcaaaaatgaagaaaaaattcaggttctaacagacaaaattgatgtacttctgcaacagattgaagaattagggtctgaaggaaaagtanaagaagcccaggggatgatgaaattagttgagcaattaaaagaagagagagaactgctaaggtccacaacgtcgacaattgaaagctttgctgcacaangaaaaacaaatggnantttgtgaa

SEQ ID NO: 4964 - DNA, 799 bp, Homo sapiens
  misc_feature (608)..(608): "n" may be a, t, c, g, other or unknown
  misc_feature (727)..(727): "n" may be a, t, c, g, other or unknown
  misc_feature (733)..(733): "n" may be a, t, c, g, other or unknown
  misc_feature (751)..(751): "n" may be a, t, c, g, other or unknown
gaataagatggcggggaagaagaatgttctgtcgtctctcgcagtttacgcggaagattcagagcccgagtctgatggcgaggctggaatcgaggcggtgggcagcgcggctgaggagaaaggcggattggtatctgatgcctatggggaggatgacttttctcgtctagggggtgatgaagatggttatgaagaagaagaagatgagaacagtagacagtcggaagatgacgattcagagactgaaaaacctgaggctgatgacccaaaggataatacagaagcagaaaagcgagacccccaggaactcgtggcctccttttctgaaagagttcggaacatgtcgcctgatgaaatcaagatcccgccagaaccccctggcagatgttcaaatcacttgcaagacaagatccagaagctttatgaacgaaagataaaggagggaatggatatgaactacattatccaaaggaagaaagaatttcggaaccctagcatctacgagaagctgatccagttctgtgccattgacgagcttggcaccaactacccaaaggatatgtttgatccccatggctggtctgaggactcctactatgaggcattanccaaggccagaaaattgagatggacaaattggaaaagggcaaaaaggagcgaacaaaattgagtttgtgacgggcaccaaaaaaggcaccacgaccaacgccacgtccaacaacactancactgncaacacaagctgttgcanatgcccagaagagaaagagcaagtgggattccgctatcccagtgcaac

SEQ ID NO: 4965 - DNA, 694 bp, Homo sapiens
  misc_feature (310)..(310): "n" may be a, t, c, g, other or unknown
  misc_feature (400)..(400): "n" may be a, t, c, g, other or unknown
  misc_feature (421)..(421): "n" may be a, t, c, g, other or unknown
  misc_feature (429)..(429): "n" may be a, t, c, g, other or unknown
  misc_feature (581)..(581): "n" may be a, t, c, g, other or unknown
  misc_feature (679)..(680): "n" may be a, t, c, g, other or unknown
  misc_feature (687)..(687): "n" may be a, t, c, g, other or unknown
gaaaggacaaaagccagacacatttcaacatgagggacccactgacagattgtccgtataataaagtatacaagaacctaaaggagttttctcaaaatggagagaatttctgcaaacaggtcacatctgttcttcagcaaagggcaaacctggaaattagctatgccaaaggacttcagaaactggcaagcaagctgagcaaagcattacagaacacgagaaaaagttgtgttagcagtgcctgggcctgggcctcagagggaatgaaatccacagcggacctgcatcaaaaacttggcaaagcaattgnattggaagcaataaaaccgacttatcaagtcctaaatgtacaagagaagaagagaaaatcacttgacaatgaagttgaaaagacagcaantcttgtcattagcaactgggnatcagcanattaaggccaagaagaaattaatggttagtaccaagaaacatgaagcacttttccagcttgtagaaagctccaagcaatctatgactgagaaggagaagcggaaagctcctcaataaactgacaaaatcaactgaaaagttggaaaaggaanatgaaaattactaccaaaaaaacatgggggggttattctaccagactgaaatgggaaaacacactagagaactgctaccagagcattctggagctggnnaaggaangaattca

SEQ ID NO: 4966 - DNA, 906 bp, Homo sapiens
  misc_feature (603)..(603): "n" may be a, t, c, g, other or unknown
  misc_feature (665)..(665): "n" may be a, t, c, g, other or unknown
  misc_feature (716)..(716): "n" may be a, t, c, g, other or unknown
  misc_feature (856)..(856): "n" may be a, t, c, g, other or unknown
  misc_feature (867)..(867): "n" may be a, t, c, g, other or unknown
  misc_feature (892)..(892): "n" may be a, t, c, g, other or unknown
aactacgaagatggcggttgcgcgcttggcagctgtggcggcctgggtaccttgtcggagctggggctgggcagccgtccccttcggtccccaccgtggcctcagcgtgctgcttgcacggatacctcagcgggcgccacggtggctcccagcttgtagacaaaagacgtcactctcattccttaatcgaccagaccttccaaacctggcttataagaagctaaaaggcaaaagtccaggaattatcttcatccctggctatctttcttatatgaatggtacaaaagcgttggcgattgaggagttttgcaaatctctaggtcacgcctgcataaggtttgattactcaggagttggaagttcagatggtaactcagaggaaagcacactggggaaatggagaaaagatgttctttctataattgatgacttagctgatgggccacagattcttgttggatctagcctcggagggtggcttatgcttcatgctgcaattgcacgaccagagaaggtcgtggctcttattggtgtagctacagctgcagataccttaagtgacaaagtttaatcagcttcctgttgagctaaaaaaggaagtanagatgaaaggtgtgtggagcatgccatcaaaatactctgaagaaggagtttataacgttcantacagtttcattaaaggaagctgaacatcactgcttgttacatagcccaantcctgtgaactgccccattaagattgctccatgggcatgaagggatgacattgttaccttgggatacatcaatgcaaggtttcccgattcgaagtactcagcacagatgtgggatgttaatcctcccgaaaaacacaggngattaccgaantgaggggaaaaaggagacattcaanctccttggttaaac

SEQ ID NO: 4967 - DNA, 795 bp, Homo sapiens
  misc_feature (760)..(760): "n" may be a, t, c, g, other or unknown
  misc_feature (782)..(782): "n" may be a, t, c, g, other or unknown
  misc_feature (791)..(791): "n" may be a, t, c, g, other or unknown
aaaaagtgccggtcaaaatggaaagtgaatccccctaaacaggagcacctgctggcgctaaaagtgatgcggctgactaagcctactttattcaccaatatcccagtaacatgtgaagagaaagacttacctggagatctctttaaccagctgatgagagatgatccttcaaccgttaatggtgcagaagttttaatgttgggataaatgctgactttaccacagaattttgggaatatatttttgggagagaccttttccagttatatcagcgttcataatgatagcaatcaagttgtaaaagacatattagtaaaagctgatcttcagacaagttctcagcgtttaaatctttcagcctccaatgctgcagtggctgaacttaaaccggattgttgtattgatgatgtcatacatcatgaagtcaaagaaattggaacacacatcttggtatgtgctgtgagttatacaactcaggctggagaaaaaatgtatttcagaaaattcttcaaatttcaggttctcaaaccattggatgtgaaaaccaaattttacaatgcagagagtgacctcagttctgtgactgatgaagtatttctggaagcccagattcagaatatgacaacctcacctatgtttatggagaaggttcactggagccatctattatgtacaatgtaacaagaattaaattcagtcagccaagctgggagaatgtgtgtctacgtttgggtcaagagcatattttgcaaccaatggntacacgccaagtacttaaaccngcctaaagncaaa

SEQ ID NO: 4968 - DNA, 794 bp, Homo sapiens
  misc_feature (718)..(718): "n" may be a, t, c, g, other or unknown
  misc_feature (778)..(778): "n" may be a, t, c, g, other or unknown
  misc_feature (794)..(794): "n" may be a, t, c, g, other or unknown
atattatggtcagtgaagatatgaaattaactgactcagagctaggaaagctggcaaataatatccaggaattattatatagtgcctcagatatatgccatgatcgagctgtcaaatttctcatgtcaagagcaaaggatggttttcttgagaagctaaattccatggaattcataacactttctagattaatggaaacattcattttagacaccgaacagatctgtggaagaaaaagcacgtcattacttggagcacttcagagccaagctattaagtttgtaaataggtttcatgaagagagaaaaaccaagctcagcctcctcttagacaatgagcgctggaagcaagcagatgttcctgcagaatttcaggatcttgttgattctctgtcagatgggaagattgctttacctgaaaaaaaatcaggagccacagaagaaagggaaccagctgaagttcttattgtcgagggacaacagtatgcagttgttggaaccgtattgctgttaataagaattatccttgaatattgccagtgtgtggataacatcccatctgttactactgacatgcttactcgtctgtcagatttattgaagtacttcaattcaagaagttgccagttagttcttggagctggtgcactgcaagttgttggactaaaaacgataactacaaaaaatttggctctttcttcacgatgtttgcagttaantgtgcactacattccctgtgatccgggctcaatttgaagctcgactaccaactaagcaantatagcatgcttaggn

SEQ ID NO: 4969 - DNA, 646 bp, Homo sapiens
  misc_feature (508)..(508): "n" may be a, t, c, g, other or unknown
  misc_feature (594)..(594): "n" may be a, t, c, g, other or unknown
  misc_feature (600)..(600): "n" may be a, t, c, g, other or unknown
  misc_feature (608)..(608): "n" may be a, t, c, g, other or unknown
gagtgttgtagagcctcgagcctgcgaggagcgcgccgcccgccagctccctgcgtcccgtcccgcgtccccgcgttcccgcgtcctgcgatccgccgccatggccagtgaggagctggcgtgcaagctggagcgccggctgcggcgcgaggaggccgaggagagtggcccccagctggctcccctcggcgccccagccccggagcccaagcccgagcccgagcctcccgcccgtgcgcccacggccagcgccgacgcggagctgagcgcccagctgagccggcggctggacatcaacgagggcgctgcgcggccccggcgctgcagggtcttcaacccctacacggagttccctgagttcagccgccgcctcatcaaggacctggagagcatgttcaaactgtatgacgctgggcgggatggcttcatcgacctgatggagctgaagctgatgatggagaagctgggggccccccagacccacctgggcctgaagagcatgatcaangaggtggatgaggacttcgatggcaagctcaacttccgggaattcctgctcattttcacaagggcgccgcaagggaactgcaagangacatnggctgatngcctggaaagtttctgaatcatgtgcctggaggttcaa

SEQ ID NO: 4970 - DNA, 863 bp, Homo sapiens
  misc_feature (471)..(471): "n" may be a, t, c, g, other or unknown
  misc_feature (495)..(495): "n" may be a, t, c, g, other or unknown
  misc_feature (713)..(713): "n" may be a, t, c, g, other or unknown
  misc_feature (748)..(748): "n" may be a, t, c, g, other or unknown
  misc_feature (760)..(760): "n" may be a, t, c, g, other or unknown
  misc_feature (862)..(863): "n" may be a, t, c, g, other or unknown
ataactatgacaaagcttacatgagaattagaagaccactttacatttttacattccttctgctgttcatattaaccttgcacaattacttcattttttctttgactcttttaccacaatgttttggttatttataatttatcagccatatgtttatcagccatataaccaactagatcccaaatagatccatgtatttgtttccgtgatttggccacattaataaattcataaatttcaatcaaatatcttatatatacacacatatggtttaagctacagccctgtgtatgccgtttaactttatttgacgttgcccacttacttctttgctgaccacttggataaccgtaataaaaatcctataagcctaaatggcatttcttttgggatatttttcctgcattttattccctttttatataagtaggaattaattatttattttatgtcttaatctatttgataaanaagactacattataataatctcanagatcatattaccaaaggttgcccacttgagcatattttcattttgacacagaaacaaaatttagtacaacctttcctagttcccatgtcttgattttcatcattacatgcacagcagacctttacctattgtgataccagaacacatcattgtctttgggttcccgtcaaagagaattttattgttgttttgtattttcaagtccttaaataggtcntgaaactcccagttgtttccctggttgaaagcagncacacatttagngcacggtttattttacctttcgggtgaaagatcaggagttttttattccctcacttgggtcaaatatatttgggaaaggaatgttatcaaaaagtctagggnn

SEQ ID NO: 4971 - DNA, 668 bp, Homo sapiens
  misc_feature (468)..(468): "n" may be a, t, c, g, other or unknown
  misc_feature (611)..(611): "n" may be a, t, c, g, other or unknown
  misc_feature (657)..(657): "n" may be a, t, c, g, other or unknown
  misc_feature (660)..(660): "n" may be a, t, c, g, other or unknown
agtcctcttgtgtagcctgaggcggcggtagcatggagggggagagtacgtcggcggtgctctcgggctttgtgctcggcgcactcgctttccagcacctcaacacggactcggacacggaaggttttcttcttggggaagtaaaaggtgaagccaagaacagcattactgattcccaaatggatgatgttgaagttgtttatacaattgacattcagaaatatattccatgctatcagctttttagaatgtggtaggttggtacaaattccgtcgtcattcagatcagatcatgacgtttagagagaggctgcttcacaaaaacttgcaggagcatttttcaaaccaagaccttgtttttctgctattaacaccaagtataataacagaaagctgctctactcatcgactggaacattccttatataaacctcaaaaaggactttttcacagggtacctttagtggntgccaatctgggcatgtctgaacaactgggttataaaactgtatcaggttcctgtatgtccactggttttagccgagcagtacaaacacacagctctaaattttttgaagaagatggatccttaaaggaggtacataagatanatgaaatgtatgcttcattacaagaggaattaaagagtatatgcanaanagtgggaa

SEQ ID NO: 4972 - DNA, 531 bp, Homo sapiens
  misc_feature (439)..(440): "n" may be a, t, c, g, other or unknown
  misc_feature (446)..(446): "n" may be a, t, c, g, other or unknown
aacaatgcaggcctcaaagtccacaggaggctccatactggggaaaaaccatataagtgtgatgtgtgtgggaaagcctatatctcacgctctagccttaaaaatcacaaaggaatccaccttggggagaagccctataaatgtagctattgtgagaaatccttcaactacagctctgcccttgaacagcataaaaggattcataccagggaaaaaccctttgggtgtgatgagtgtggtaaagctttcagaaataattctggccttaaagtacataaacgaatccacactggggaacgaccttacaaatgtgaagaatgtgggaaagcatacatctctctctcgagccttataaatcataaaagtgtacaccctggggagaagccctttaagtgtgacgagtgtgagaaggccttcatcacataccgaacccttacannccacangaaagttcatcttggggagaagccctacaaatgtgatgtgtgtgagaaatcttttaattacacatcgctcctttctcagcacaag

SEQ ID NO: 4973 - DNA, 694 bp, Homo sapiens
  misc_feature (627)..(627): "n" may be a, t, c, g, other or unknown
  misc_feature (673)..(673): "n" may be a, t, c, g, other or unknown
  misc_feature (682)..(682): "n" may be a, t, c, g, other or unknown
gataattctctcgatacggttctaaaccgtcctcccgggtttcttcaggtttgtgactggttatatcctctagttcctgatagatctccggttctgaaatgtactgcgggagcctacatgtttcctgatacaatgctacaagcagcaggatgctttgtgggggtcgtcctgtcctctgagttaccagaggatgatagagagctctttgaggatctgttaaggcaaatgtctgaccttcggctccaggccaactggaacagagcagaagaagaaaatgaattccaaatccctggaagaactagaccctcctctgaccaactaaaagaagcctctggcactgatgtgaaacagttggaccaaggcaataaggatgtacgtcataaaggaaaacgtggaaaaagggctaaagatacttcaagtgaagaagttaacctgagtcacattgtaccatgtgagccagttccagaagaaaagccaaaagaattacctgaacggagtgaaaaagtggctcacaacattttgtcaggtgcttcctgggtgagttggggtttagtcaaaggtgctgagattactggtaaaggcaatccagaaaaggtgcttctaaactccgagagcggattcaaccanaagaaaaacccgtggaagttagtccagctgtcaccaagggacttanatagcgaancaagctacaaga

SEQ ID NO: 4974 - DNA, 607 bp, Homo sapiens
  misc_feature (456)..(456): "n" may be a, t, c, g, other or unknown
  misc_feature (497)..(497): "n" may be a, t, c, g, other or unknown
  misc_feature (524)..(524): "n" may be a, t, c, g, other or unknown
  misc_feature (593)..(593): "n" may be a, t, c, g, other or unknown
  misc_feature (605)..(605): "n" may be a, t, c, g, other or unknown
ttgctaaaatattagcctcttaaattctctaggaaccccctcccccgcttttttttttcctttcgctggtcgttatttttctaaacctatcctgaaatcatgtcaattttcttttgtatggttgaagacaactagatcacttgataatggttttgctcaggtcacattgtgacaaggttttaatgtagtcctactttgcagaaggaggccaagaagatgggctgttagaaccccctttaaaagcatttgtctattcagaaaattttcctgagtagatctctgcaaaggctcttttaatagtgatttcaagatcacgtttgcaggactctggtctattcgttcagacgtctactgtgcacaattacaaggagactacaactgaggcatctcaaagagcactgtcaaggtgtgtagggagccgggtgggtggagggaggctgggctctgacctagaanccatgcttatgaatgctgttaatgtttaaagcaagcctaanggcactgctgaaggacaggggaacatntagaactgaccaagactgaggtataacaggaacccccaggctattcacctgctcaaggtaaagtgtggnattacataaggnaa

SEQ ID NO: 4975 - DNA, 606 bp, Homo sapiens
  misc_feature (564)..(564): "n" may be a, t, c, g, other or unknown
  misc_feature (567)..(567): "n" may be a, t, c, g, other or unknown
  misc_feature (584)..(584): "n" may be a, t, c, g, other or unknown
atttgaagtcctcgttccacgccttctcatcatcctgaacaccgagctctgggactccggcggagaatctaaacgtaaagcatcacccacggtcgtgaactgtaggctctcctggcatccgggatcttattctggccttggcggagttggggatggtgtcgcctagcagccgctgccgctttggcttgctcgggaccatttggctggacccagagtccgcgtggaaccgcgatagggatctgtcagggcccgcggccgggtccagcttggtggttgcggtagtgagaggcctccgctggttgccaggcttggtctagaggtggagcacagtgaaagaattcaagatgccacctaatataaactggaaagaaataatgaaagttgacccagatgacctgccccgtcaagaagaactggcagataatttattgatttccttatccaaggtggaagtaaatgagctaaaaagtgaaaagcaagaaaatgtgatacaccttttcagaattactcagtcactaatgaagatgaaagctcaagaagtggagctggctttggaagaagtanaanaagctggagaagaacangcaaaatttgaaaatcaattaa

SEQ ID NO: 4976 - DNA, 710 bp, Homo sapiens
  misc_feature (679)..(679): "n" may be a, t, c, g, other or unknown
  misc_feature (698)..(699): "n" may be a, t, c, g, other or unknown
ttattacagccaacagactggcctctttcttccctttgactgggaatgggtcaaaggcggtgcaggaggaggatctggtccagataattcacaagcagggtgcattttcctctcattattgagaactgtgagtgttaatcaagaaggcagagcaggagaagatgaaccagtcttcttcccctcactacccagatctctgcctgccaacaagccccgtgttcaccctggcaaagagtctttacattcagaccaaggagagtgtgactccttctcagcactagctagaaacctcaagcccttgcttaagggcctttttcagagagacccaatgcccagaaggctagatgcgtggggaggagccacatacgagaaactgcctccctgcttcgggtcagaacaagccccaggaagaaagtatttcaaacaacaaggtgcatctgccccaacccatccagcctgcatgttggtgctgagaacagccttttatggggcttgcactgagccatgggcatgtctgaacacaacaaggaagaggccagagcagcaacagcacgcaaagggttgatgggcatttcttttaaggacagagcagaaaactcttagatactttgcgtccttcctaattgactcagtctatgaaagccaagttaagcttgctttcttcctccctaaatcctcnatcctcatgaccaaacaanngaatagtttga

SEQ ID NO: 4977 - DNA, 587 bp, Homo sapiens
  misc_feature (505)..(505): "n" may be a, t, c, g, other or unknown
  misc_feature (580)..(580): "n" may be a, t, c, g, other or unknown
  misc_feature (582)..(582): "n" may be a, t, c, g, other or unknown
atctaaagaaaaaaaagaagaaaagggaaagctcaggtgtttcagggtcccagaatgtatgttgtagagaacagtcattagctcaggcccatggtaaccgcctctactgtgcactcgaccagtagaggcgatgatgacggcacttgattctcttgtgtgtaactcagccatcctccctagacccacgtcccaggaggcagggctggtaaagctatgactgggcagtgtttgacccagctgtgcttttactctgtgcctcctctttatattgtggcatttctctcttctcctttatgttctttttctttttatgccaaaattcttgctgttgccaaaacaaaaacagaaaaacacacccacacccaattacaacctgcagttcaaagaaccactctaggtcggctttaaagtattgtctttctctggtaaccaaatctgtacctgctgcctaatttagtgtttgggggcattgtttacagtatttctgtttgtaatgtgcttttantatagaaatcctcttttttgttcttaaatctatgaatgctgtgtttccaagcttatacttactactgcgtgttangnggttc

SEQ ID NO: 4978 - DNA, 861 bp, Homo sapiens
  misc_feature (666)..(666): "n" may be a, t, c, g, other or unknown
  misc_feature (730)..(730): "n" may be a, t, c, g, other or unknown
  misc_feature (788)..(788): "n" may be a, t, c, g, other or unknown
  misc_feature (808)..(808): "n" may be a, t, c, g, other or unknown
  misc_feature (861)..(861): "n" may be a, t, c, g, other or unknown
tccacatgcccatcacagtaatctggggcgtgtccccagaagacaatggcaacccactaaatcccaagagtaaagggaagttgacattagatagcagttttaacatcgccagcccagcttcccaggcctggattttgcacttctgtcaaaaactgagaaaccaaacattcttttaccagactgatgaacaggacttcaccagctgcttcattgagacattcaaacagtggatggaaaaccaggactgtgatgagcctgccctgtacccatgctgcagccactggagcttcccctacaagcaagagatttttgaactgtgcatcaagagagctatcatggagctggaaaggagtacagggtaccatttggatagcaaaaccccagggccgaggtttgatatcaatgatactatcagggcagtggtgttagagttccagagtacctacctcttcacactggcttatgaaaagatgcatcagttttataaagaggtggactcgtggatatccagtgagctgagttcggcccctgaaggcctcagcaatggttggtttgtcagcaatctggagttctatgacctccaggatagcctctccgatggcaccctcattgccatggggctgtcagttgctgttgcatttagcgtgatgctgctgacaacttggnacatcatcataagcctttatgccatcatttcaattgctggaacgatatttgcactgttgggtcncctgtcctgctggggctggggagcccaatgtgttgggatctgtcaacaatttcgggtngccgtcgggttttccggtanacctttgccgtccaattatgggggttgcctaacgcctgggtccaaaattccgn

SEQ ID NO: 4979 - DNA, 738 bp, Homo sapiens
  misc_feature (675)..(675): "n" may be a, t, c, g, other or unknown
  misc_feature (727)..(727): "n" may be a, t, c, g, other or unknown
  misc_feature (730)..(730): "n" may be a, t, c, g, other or unknown
gtaaaaatgacttggattgaaaatatgtggtagcctttttatttctacattaagttctacctaggatatttccaaggactgccacaaaacccatatgtgcagtactttactactttgggaaagctgcatctttctaccacattttaacatctaatatatttaatttctttgaagagggttctgtgtacgttattgtagttcccagtttaatatagttctttgtatctcttaacaggttgaagttattgcaaaacactctggaaagtaataattacatcataatcatttattttttaaacttaaaagcctagaaatttcctagaaagaaaataggagacatctcagagcaatttggttttggtgtatatgttctcaacagaaaaccagtgttaatgaatatcatgcctcagcactgtcacttttaaaacctgtcaggatcccaccgtaaaattggaaatgggcagttctgaattttcacgtttgaaatgtaaaatataaacttcagtcaatatccaggtttattgtgtcctactatttaataatgagagaagtaatggcaaggcctttactttcaggaaaggatagaagtatagattaatgactggaaagttttaatatatttagcccaaagggtactttgaattgaagtccttgcattgactggttgtgtttggntaattgttagctttacaaggtacacataaagttaggttgagggggtgttaanccntccgtggg

SEQ ID NO: 4980 - DNA, 672 bp, Homo sapiens
  misc_feature (445)..(445): "n" may be a, t, c, g, other or unknown
  misc_feature (526)..(526): "n" may be a, t, c, g, other or unknown
  misc_feature (634)..(634): "n" may be a, t, c, g, other or unknown
  misc_feature (653)..(653): "n" may be a, t, c, g, other or unknown
  misc_feature (662)..(662): "n" may be a, t, c, g, other or unknown
attttgctgtggagcggcggggaggaggagccgccgaggagaccccgggcgaggagctgcgagccggaggaggccgcgcggactccgggctttccgccgtcgcggggatctcggggggcaaagggatcgccggggagggggaccagagagccgcgcccgccgcgcggagcgccccttcgcgtcccctgcaccatgagctggggcaccgagctctgggatcagtttgacaacttagaaaaacacacacagtggggaattgatattcttgagaaatatatcaagtttgtgaaagaaaggacagagattgaactcagctatgcaaagcaactcaggaatctttcaaagaagtaccaacctaaaaagaactcgaaggaggaagaagaatacaagtatacgtcatgtaaagctttcatttccaacctgaacgaaatgaatgattacgcanggcagcatgaagttatctccgagaacatggcatcacaagatcattgtggacttggcacgctatgttcaggaactgacacangagaggaaatcaaactttcacgatggccgtaaagcacagcagcacatcgagacttgctggaagcagcttgaatctagtaaaaggcgatttgaacgcgattgcaaagangcggacaggggcgcatcanttactttgngaaaatggac

SEQ ID NO: 4981 - DNA, 676 bp, Homo sapiens
  misc_feature (586)..(586): "n" may be a, t, c, g, other or unknown
  misc_feature (669)..(669): "n" may be a, t, c, g, other or unknown
  misc_feature (671)..(671): "n" may be a, t, c, g, other or unknown
acttatgggcggagatggatggtggatggggggcgggggaggcagcggagggagatgaggagataggcgggagcgagggagcgagggagggagcgaaggaggtagagaagagtggaggcgccaggggagggagcgtagcttggttgctccgtagtacggcggctcgcgaggaagaatcccgagcgggctccgggacggacagagaggcgggcggggatggtgtgcggggctgcggctcctgcgtccctcccagcggcgcgtgagcggcactgatttgtccctggggcggcagcgcggacccgcccggagatgaggcgtcgattagcaaggtaaaagtaacagaaccatggctcagtttccaacaccttttggtggcagcctggatatctgggccataactgtagaggaaagagcgaagcatgatcagcagttccatagtttaaagccaatatctggattcattactggtgatcaagctagaaactttttttttcaatctgggttacctcaacctgttttagcacagatatgggcactagctgacatgaataatgatggaagaatggtcaagttgagttttccatanctatgaaacttatcaaactgaagctacaaggatatcagctaccctctgcacttccccctgtcatgaaacagcaaccagttgcnanttcta

SEQ ID NO: 4982 - DNA, 800 bp, Homo sapiens
  misc_feature (584)..(584): "n" may be a, t, c, g, other or unknown
  misc_feature (729)..(729): "n" may be a, t, c, g, other or unknown
  misc_feature (742)..(742): "n" may be a, t, c, g, other or unknown
  misc_feature (756)..(756): "n" may be a, t, c, g, other or unknown
attccagagccagcagcgcgtcctggccgctcctgcgctctcccgcctcccggggctcggaggagccggggcacgttccaggagctgcctagggctgaggttccaggcctgggggtcgcttccagctgccagatcccgtgcagtcctggggaccctgagaagcaccgagccatccctgacccaggaactttccgcagactcgccgccatctgggagtgaagcaacatggatgcagtcagccaagtccccatggaagtcgtgcttcccaagcacatcctggatatctgggttattgtcctcatcatcctggccaccattgtcatcatgacctcgttgttgctgtgcccagccactgcagtaatcatctatcgcatgcggactcatccgatccttagtggggctgtttgagagcctcccaagagggccgggtgagggatgaggacaggcatcctatccccagcctcttcctgtcttcagaaaagcagcaggagggactttggggcatggacctgagttctggttttgattctgccacgagccagctgtgtgaatttggtcaagggacctaactctctgagttccangttccttatctttcaaatggggatggtgatccctgccctttctacctcatagggatgtgagaaccacctgacttagtggatgtgaaagctgtttgtgatcagtaaagctaccacagatataagggtgttatgctgaatcctgagnagcttttaaggancaagagaacctgantgctgatgatggccttaaaggtggtaagggaaataatgggggca

SEQ ID NO: 4983 - DNA, 711 bp, Homo sapiens
  misc_feature (532)..(532): "n" may be a, t, c, g, other or unknown
  misc_feature (648)..(648): "n" may be a, t, c, g, other or unknown
  misc_feature (705)..(705): "n" may be a, t, c, g, other or unknown
  misc_feature (710)..(710): "n" may be a, t, c, g, other or unknown
atcaaaacaatgactaatgctgggcaacatatagcagaagtcaaacaaaaatgattcctcctgaaatggtaccttcattggttctgatgttcttttgcaaaaaatgtccggaagcagtatagaaaaccccctgtatgtgaaccttagattgtaaggcaagccagtgcactgtgtaatatgcaaagggagtggtgcaaaagagaaggcacccgtcccagctctccatgccctttccctggcaggcgctgactgagatggcgctgagtgaatgtggaaggtgctaagacccagtctcttcactgcagggctgtttacagccagtttcttttactctgaccttaaggtttccactgagctcatgaaacttcaacatatggtgtttaaaagtttcccactcaaatgcacacttgaaaattgggtccctcagcctcattactgaactaaataagtgaagaagttgtatctttggggtaaaactttccagggccacttaattttttaaccagttaagtacgcatcttcctgggtgggntcagactttttaagtcagtgctaaagctgaaaagcgccttctaaatatgactgtgagtttagtttgtatcttacatttagtaactgttctgttgggccaggactatgacttttaantactatgtacttattcatccacactctgcactaaatacaccatagctactatagcantgtgna

SEQ ID NO: 4984 - DNA, 667 bp, Homo sapiens
  misc_feature (655)..(655): "n" may be a, t, c, g, other or unknown
  misc_feature (665)..(665): "n" may be a, t, c, g, other or unknown
  misc_feature (667)..(667): "n" may be a, t, c, g, other or unknown
aatcgtccgccgctcccgttaccggggcaaccgcggcgcctcctccgtgtcggccccgatcgtccctccgcgccattttcaaactgctctagcgccggagcccgtgcctggacggaaggagctagtgggggactcgaggcctgagggcaatgcggctggaggcggaggcaacggcggctggagctgccggactttaatttttggaagtgaataaaacttgttttagaagacgagatgactacagctgtagagagaaagtatattaatattaggaaaaggctggatcagctgggataccgccagactctgacagtggagtgtttacctttggtagaaaaacttttcagcgacttagttcatacaactgagagccttcggcaatcaaaattatctgctgtgaaagctgaaaaagaaagtgccaattttgattttgttttggaaccctataaacttgaaaatgcaagattgagtagagaaaataatgaattatacctagagttaatgaaactgagagaacattcagaccaacacgttaaagagttgaaaacttcattgaagaaatgtgcacgtgaaacagctgatctgaaatttctgaataaccaatatgctcataaactcaaactgttggagaaagagagcaaagctaagaatgaangaattcaacnan

SEQ ID NO: 4985 - DNA, 781 bp, Homo sapiens
  misc_feature (688)..(688): "n" may be a, t, c, g, other or unknown
  misc_feature (700)..(700): "n" may be a, t, c, g, other or unknown
  misc_feature (734)..(734): "n" may be a, t, c, g, other or unknown
aaaaacaactacggctgcggtgtggttggtggtgagatgacggccttagtgctggataatggagcttacaacgccaaaatcggttacagccatgaaaatgtgtcggttattcctaattgtcagttccggtcaaaaacagcacgtcttaaaacttttactgccaaccagatagatgaaataaaagacccttctggactcttttacatcctcccttttcaaaagggctacttggtgaattgggatgttcagagacaagtttgggattacctttttggaaaagaaatgtatcaggtaacaaattagagttgattttttagatactaatattattatcactgaaccatactttaacttcacttcaattcaagaatcaatgaatgaaattctatttgaagaataccagtttcaagcagtattaagagtaaatgctggggctctcagtgcacataggtatttccgagataatccttccgaattatgctgtatcattgttgatagtggatattcctttacacatatagttccttattgtagaagtaaaaagaaaaaagaagcaattattcggataaatgtgggaggaaaactcttaaccaatcatctaaaggagatcatatcttacaggcagctacatgttatggatgaaacacatgtgattaatcaagtgaaagaagatgtatgctaagtgtcncaggatttttanagagacatggatattgcaaagttgaaaggagaangaaaatacagtaatgataagactatgtcctgcctgacttcagtacaa

SEQ ID NO: 4986 - DNA, 820 bp, Homo sapiens
  misc_feature (768)..(768): "n" may be a, t, c, g, other or unknown
  misc_feature (808)..(808): "n" may be a, t, c, g, other or unknown
  misc_feature (819)..(819): "n" may be a, t, c, g, other or unknown
gcacaaaattactacagaaaaaaggaacaaagtgctttatacatttcataatatatccccttttattataattagttaattcccttttatctaaatggcctaaatttgccatgatggtagcagtgtccaaagtgaataattactgccagtactgcatcacagagaaaggaagggatccctcaggagacactgctgtctccttctgggttgtgctaaacaacatagggaggaaagctggacctggagtcaaaggaattgagttagtgtgctggctctgccatacttacggcacccttgggcaggatatacaaaggttcctcacttataaaatgggacagtctaaaactaccttttagtagagaagtcaaatgggaaggtatgtgaaaactctgtcaactaaatataaagactaataatttgggtattaagaggctagtttgagaagccacctgaattacacaaacacagctacagacatcattctgtctagagaaagataagagagaacaggttggttgaacttgggcagaatcacagatacaattccacactaaagaatgaaaataagcaatgaactagacagaaggaagaaatcatgaagacttaggaagcagaattacaatctgtcatattaacaaatggagtttgccttctaagatcagatgttgctcagaaactttcaatgtttacctaataatttaatatcactaagtttcctagtgggtcaagcaagatgcaaaatccagcttaatttcctccatgtgctcncaagccttaatgcttaatttaaagtaaaatcctgaaaaanggaaatattang

SEQ ID NO: 4987 - DNA, 744 bp, Homo sapiens
  misc_feature (685)..(685): "n" may be a, t, c, g, other or unknown
  misc_feature (718)..(718): "n" may be a, t, c, g, other or unknown
  misc_feature (724)..(724): "n" may be a, t, c, g, other or unknown
tttcagcactaaagaagaatttaaatacaaaatagaatgttatatatcttgtagacagtcaaatatttgatgttttatgggacataatcatttgggaagtttttgttgtaaatgaagagttagtttgttgctattaatttgtttgacacataagttcattcctaaaagttagggatgttacataaagaagggttgaggactttatttcagaagtcatttaattttttctttattttctttcagattttgtatggtttattcagaagtgccaaatttcagtgaacccaacccagattatcgaggacagcagaacaaaggggcacagagtgaacagaagaataattccatgaatagtaatatgggtacaggtacatttggaccagtgggaaatggtgttcacactggccctgaatcaagggaacaccagttttcacatgctggcagaagcaatggccggggacttataaatccacaactacaaggaacagctagtaatcaaacagtgatgaccacaataagtaatggcagggaccctcggagagcctttaaaagatgacctatgctaaatactcatgtgtagtttttatactacatgccctacttgaacacttattgcacttttatttaagtgttaactgtgaaaaagtacgtcctttattggggtttccttttaaaactccttggntttgttaagaaaaaatgggtttggtttttaaangcaaanactggttaaacccggcctcc

SEQ ID NO: 4988 - DNA, 698 bp, Homo sapiens
  misc_feature (532)..(532): "n" may be a, t, c, g, other or unknown
  misc_feature (578)..(579): "n" may be a, t, c, g, other or unknown
  misc_feature (679)..(679): "n" may be a, t, c, g, other or unknown
  misc_feature (683)..(683): "n" may be a, t, c, g, other or unknown
  misc_feature (698)..(698): "n" may be a, t, c, g, other or unknown
taaagacacagtgcccctttttaatgaagtctgattcaagatgaatgccagaccatgtttccttgtacagaggaatttgacctgcagagggaagaataaggcccagggtgtcaggactagcattaaggagcacctctgattttctggtggagtcgtgctaaagctggcccaaacccactcgggccgttgttcaccttttgcctcatctctgtgttcagtgacatcatgttggtggatgttgggggatgaacaccagtacaccactgtgtatgttgtgctctgggagccatagcttgggcacccattctagagcaaggatcagccaaccccagcctgagcctgtgcagcccattgcctgttcttgtaaataacgttttatccaaaggcagccatgccatgcccacgtatttacatgttgtctaaggctgctttgaccaaaaggccaaaagtgctcaatatctggctcttgaaggaaaaaatttgccagcctctcttctggagtttaccaggaatctggttctggacacatgangatatcttgggttaaaaagagattaggggccaggcttatgtttgtnntcccagcactttgggaggctgaagcgggatcacttgagcccaaggagttttttggtaattttttatacgaagacagggtcccactcttatccagggcaanaaanggcatgcacctgtan

SEQ ID NO: 4989 - DNA, 542 bp, Homo sapiens
  misc_feature (454)..(454): "n" may be a, t, c, g, other or unknown
  misc_feature (470)..(470): "n" may be a, t, c, g, other or unknown
  misc_feature (475)..(475): "n" may be a, t, c, g, other or unknown
gtggttcgggtccgctttcgtctccgtcctgctgccgttaccgccgctgctgccgccgcttgcgtcccccgctccggtctgtggtgcagccgggacccaggaccatgtctctgtctcgctcagaggagatgcaccggctcacggaaaatgtctataagagggtggaagagaagtaccagcggaacctttttcctattttttctccttctgcgctgaaaccagaaagcaggaactttcgtggtgagagttggcaggggaccatcatggagcagttcaaccctagcctccggaacttcatcgccatggggaagaattacgagaaggcactggcaggtgtgacgtatgcagccaaaggctactttgacgccctggtgaagatgggggagctggccagcgagagccagggctccaaagaactcggagacgttctcttccagatggctgaagtccacangcagatccagaatcanctggnagaaatgctgaagtcttttcacaacgagctgcttacgcaagctggagcagaatgtggagctggactc

SEQ ID NO: 4990 - DNA, 578 bp, Homo sapiens
  misc_feature (412)..(412): "n" may be a, t, c, g, other or unknown
  misc_feature (429)..(429): "n" may be a, t, c, g, other or unknown
  misc_feature (555)..(555): "n" may be a, t, c, g, other or unknown
  misc_feature (559)..(559): "n" may be a, t, c, g, other or unknown
  misc_feature (576)..(576): "n" may be a, t, c, g, other or unknown
ttacaaatttcacttgataatttacatggaaatatgaaagggttctttctccaagtgtcttgcaattgacttggaatcagcgagttaaacaaaagggactgagcctctaactctgggaatttcaaggctccagttacagcaaatgacatgctgtcccctccacctatgtctatgcaggtctgccttgggaaccacctcacacatcagtgccttcgctgtccatctgtgtatgttattcaaattcacataagttaagataaagatccaggatgataaaaaccaatcctgataggtgggattagagaattacttctttctgtagttaataacacaaagcaatcctgttcaggttctttggataagcctccctactttccttcttctgttcttgttctcccttagcccaaagcancaagccaagatggcggngtactgccgactgatctttggggatgcccttctcatggagcccctggaaaaatatccactggaatctggagttcctcttccaagccctatggatttaatgtataaaattttggtgaaaaataagangaantcacacaagtcatcatnaa

SEQ ID NO: 4991 - DNA, 638 bp, Homo sapiens
  misc_feature (593)..(593): "n" may be a, t, c, g, other or unknown
  misc_feature (606)..(606): "n" may be a, t, c, g, other or unknown
  misc_feature (620)..(620): "n" may be a, t, c, g, other or unknown
ttggctatgaagaagacttgaggtggatagctctctatcttttaaggtgaaaatcatgcaattttgtttatatctcgagagaaagaggctgtgagtgttgctggagggctcgggaaggtctctggatgccagtgagaccccagccccagccggttttccaggttcttgacagcatcacaagaacgaattcaggggggagtcgagtcagaatgaagcgcaaggcgagaagcttccattgcaaagcgaaagtgtgctcttgagaggagcgtagccatgcccgtgagaacaagtcaggcacaacggaggctgggtttcttattttagggatgtttctttctctttctttctttctttctatttctttctttctttctttctttctttctttctttctttcttcctttctttctttctttctttcctttctttctttctttcttctttctttctttctttctgtcttttttttttgagacggagtctctctttcgcccaggctggagttcagtggcgcgatctcggctcactgcaagctccgcctcccgggttcacgccattctcctgcctcaagcctcccgagtagcggggactanaggcgccggccancacacccggctganattttgtattttttagta

SEQ ID NO: 4992 - DNA, 474 bp, Homo sapiens
  misc_feature (368)..(368): "n" may be a, t, c, g, other or unknown
  misc_feature (454)..(455): "n" may be a, t, c, g, other or unknown
  misc_feature (470)..(470): "n" may be a, t, c, g, other or unknown
tctcacttgcagactctcctctgaaactgcggaaaagttcagggaagggtccggggaaccctcggcccaaagctcccagaaaaaccacaagcaagggccccaagtgtctgactcgcaaaggccctggggctggaccccgacgaggctctgggcaccagagcaaaaccaacagagccactgggtcccccagtgtccggcgaatgaaagggggctctgccctgggcaccaaaacagcccaggccaaggtagctcgaacactggccaaagctgctcgtgcccaagccaaggtggctcgaacacaggccaaggctgctaaggcccgggccaaggccaaggcagcactggtcaaggctaaggccaaagctaangcagcacaggtcaaggccaaggccaaagtcatggcagcacgggccaatgccaaggctaaagccaaggcattacgggccaaggccanngtggctcggacccanccca

SEQ ID NO: 4993 - DNA, 625 bp, Homo sapiens
  misc_feature (558)..(558): "n" may be a, t, c, g, other or unknown
  misc_feature (586)..(586): "n" may be a, t, c, g, other or unknown
  misc_feature (616)..(616): "n" may be a, t, c, g, other or unknown
acacgtgaagatttgtttaaaagtaccattctaatacttcttcaaaagtggctcctcattgtacttcagcgtaaatatgagcactggaaacagtttcatggagtttaagttgagtgaacatcggccatgaaaatccatcacgaatacttttggatcaatagtctatttttaaaaagaaagaaaaaaaccacttttttatagtccctagctttgccatatgcccgccttaagtggaaggaaagttaatcacttaactatgttttataaaaagaaaaaagggcttggaatgctattactgttcacacaaagtatgattctgtttgaataaggcaaatgctcctttttttaaaaaaaaagacattactgtaatatcaaaaaccgtggcagtttgtatacaactcggggcttgattttttttaaaaaaacagaatgaattgatgtcttattttataaatgttctatatttattaggaggaaactttatattgccttttttatcaatcatgtaacaggcttatagctttccaacagagctgcttgccaaacaattttttttgnttattaaacagtgctgaaacattcaggntcaagcatttacttaagatgttaagaatgnggactttta

SEQ ID NO: 4994 - DNA, 682 bp, Homo sapiens
  misc_feature (552)..(552): "n" may be a, t, c, g, other or unknown
  misc_feature (607)..(607): "n" may be a, t, c, g, other or unknown
  misc_feature (669)..(669): "n" may be a, t, c, g, other or unknown
  misc_feature (672)..(672): "n" may be a, t, c, g, other or unknown
gtttttttcccttctgagcaatggagcttaccatctttatcctgagactggccatttacatcctgacatttcccttgtacctgctgaactttctgggcttgtggagctggatatgcaaaaaatggttcccctacttcttggtgaggttcactgtgatatacaacgaacagatggcaagcaagaagcgggagctcttcagtaacctgcaggagtttgcgggcccctccgggaaactctccctgctggaagtgggctgtggcacgggggccaacttcaagttctacccacctgggtgcagggtgacctgtattgaccccaaccccaactttgagaagtttttgatcaagagcattgcagagaaccgacacctgcagtttgagcgctttgtggtagctgccggggagaacatgcaccaggtggctgatggctctgtggatgtggtggtctgcaccctggtgctgtgctctgtgaagaaccaggagcggattctccgcgaggtgtgcagagtgctgagaccgggaggggctttctatttcatggagcatgtggcanctgagtgttcgacttggaattacttctggcaacaagtcctggatcctgcctgggnaccttctgttttgatggggtgcaacctgaccaagagagagctggaagggcctggagcggggncancttcctctaa

SEQ ID NO: 4995 - DNA, 627 bp, Homo sapiens
  misc_feature (494)..(494): "n" may be a, t, c, g, other or unknown
  misc_feature (611)..(611): "n" may be a, t, c, g, other or unknown
  misc_feature (620)..(620): "n" may be a, t, c, g, other or unknown
  misc_feature (625)..(625): "n" may be a, t, c, g, other or unknown
ttttattaacaaattggaccgaatgggctccaacccagccagggccctgcagcaaatgaggtctaaactaaatcataatgcagcgtttatgcagatacccatgggtttggagggtaattttaaaggtattatagatcttattgaggaacgagccatctattttgatggagactttgggtaagtgctaaaaatacattattaaaattttaaattttaaaaagcattaaaaagaaggaaaggataagttcatcaaacgcagagtaactatctttttgaaatgcgactgcaagaatactctgagatggttttgttttaatacctttaatcctaatcgctccccattttatttagtatttattctgtgagagactatgttactttttgggtaatatacccatatcacattatggcatgcatggtgtggtagaaggaggccttcagtttgggttagtaaatttgggttagtgaatgtattgtatctttttgcacttggntcatttattcattcattctgtggacttttatagagcagctgccaagtctggggtaatggtgataaaaattaggaagaaaatagagatcataaatatttgctcctcctgctttaaaantaccatggncaagnaa

SEQ ID NO: 4996 - DNA, 514 bp, Homo sapiens
  misc_feature (349)..(349): "n" may be a, t, c, g, other or unknown
  misc_feature (484)..(484): "n" may be a, t, c, g, other or unknown
  misc_feature (493)..(493): "n" may be a, t, c, g, other or unknown
  misc_feature (509)..(509): "n" may be a, t, c, g, other or unknown
agcaaagtattcctgtgttgctggaaggcagagatgctctcgtgagatcccagacgggctcaggtaaaactcttgcctattgcatccctgtggtccagtcccttcaagcaatggagtcaaaaatacagcgcagtgatggcccctatgccctggtgctcgtgccaacgagagagctagctctacaaagctttgacactgtccagaaactgcttaagcctttcacctggattgtgcctggagtgttaatgggaggagagaagagaaaatcagaaaaggccagactccgcaaaggaataaatatccttatctcaactcctggacgcctggtggatcatataaaatccacaangaacattcattttagtcggctgcggtggttggtgtttgatgaagcagacagaatcttggatttgggttttgaaaaggacatcacagtgatacttaatgctgtaaatgctgaatgccaaaaaacgacagaatgtcntgctatcancgacactcacagaagngtaac

SEQ ID NO: 4997 - DNA, 670 bp, Homo sapiens
  misc_feature (218)..(218): "n" may be a, t, c, g, other or unknown
  misc_feature (402)..(402): "n" may be a, t, c, g, other or unknown
  misc_feature (417)..(417): "n" may be a, t, c, g, other or unknown
  misc_feature (578)..(578): "n" may be a, t, c, g, other or unknown
  misc_feature (597)..(597): "n" may be a, t, c, g, other or unknown
  misc_feature (641)..(641): "n" may be a, t, c, g, other or unknown
cttacttacaaaaacaggtggctggctcagactgtagtttgctaaccctgagaacttgacagcaaaaagaagagataaatagtagttaaaacataaagcagaatcaaataaattttttttccatataggtgagatctgataatgtttttaggtagaaaggaagaaacttgtgaagcaggagagactaaacctgtttgatgtttttggttgggggccangttagagataggatcgggtgtatgtgttgttgaattattcctaaaagggaagagagacaccagtaattgcaaaatcatcaagtatttatagaggtagaggagaaagaataaattcagatgtgttgagatagatgagagtacctatgaggatttgtttgatttgggaaaatgaaagcagaagtangagaagcagaagtangagaaattcagatgtgttgagatagatgagagtacctatgaggatttgtttgatttgggaaaatgaaagcagaagtaggagagggcagaggataattggaagcttagaatggggaaaggatgtctgtgctgtggggaatactttcaggcaattgttaccantattttgaagatgacaacntggttaacctccaaacaatttgtggaccaccccatgattgtagntacattttttaagtattcaacaatgggag

SEQ ID NO: 4998 - DNA, 655 bp, Homo sapiens
  misc_feature (629)..(629): "n" may be a, t, c, g, other or unknown
  misc_feature (646)..(646): "n" may be a, t, c, g, other or unknown
  misc_feature (654)..(654): "n" may be a, t, c, g, other or unknown
acatgcgaagaaaatgcccatgcatttctttaagcagaaatataagttagtgaatttgtttcttcttgataaaatggttagaatttgcttagaaattccttttatcataaaagtaaaaattatcagctttaaccttctcatttgtctcctactgcttcttttcttgttctttattctcatccatccccttctctgtctttgcctctactcttcctctattccttcataagaatctaaacaactcctttaaacatcaattcaaatgttcttcccttggatagagatcacttccatccccttcataactagctgggcctagtacctttgggttagcaattttgccagagatgttggagaaaaagggggtagcatttcctcttgaaaatccagcctgcaaggcatttacaatctcatgctggtttcgtaaggccctgctgtccctccagaatagaggcccacagcactcactaggtaccaggcatggtgaacttgcttgcccaagctctctaagtaggtggcagatttacccaggtctgcctgactttagagcctattcttttaatcattgtaccttactgtctttatagacaaggtcaggctctctatgcttctgtgagataattttcccnaaggagtggtaaatagntactatana

SEQ ID NO: 4999 - DNA, 735 bp, Homo sapiens
  misc_feature (648)..(648): "n" may be a, t, c, g, other or unknown
  misc_feature (686)..(686): "n" may be a, t, c, g, other or unknown
  misc_feature (717)..(717): "n" may be a, t, c, g, other or unknown
agggcgtttctaggcctggtcggctggcggcggtccttatgtcgtcagaagatcgagaagctcaggaggatgaattgctggccctggcaagtatttacgatggagatgaatttagaaaagcagagtctgtccaaggtggagaaaccaggatctatttggatttgccacagaatttcaagatatttgtgagcggcaattcaaatgagtgtctccagaatagtggctttgaatacaccatttgctttctgcctccacttgtgctgaactttgaactgccaccagattatccatcctcttccccaccttcattcacacttagtggcaaatggctgtcaccaactcagctatctgctctatgcaagcacttagacaacctatgggaagaacaccgtggcagcgtggtcctgtttgcctggatgcaatttcttaaggaagagaccctagcatacttgaatattgtctctccttttgagctcaagattggttctcagaaaaaagtgcagagaaggacagctcaagcttctcccaacacagagctagattttgggaggagctgctggatctgatgtagaccaagaggaaattgtggatgagagagcagtgcaaggatgtggaatcactgtcaaatctgatcaaggaaaacctggnctttgatcaagctcagcaagataaaatgctttaataanaaaattgttcccggtgcaataaccggttccngtgaaaagctggggttag

SEQ ID NO: 5000 - DNA, 754 bp, Homo sapiens
  misc_feature (539)..(539): "n" may be a, t, c, g, other or unknown
  misc_feature (582)..(582): "n" may be a, t, c, g, other or unknown
  misc_feature (688)..(688): "n" may be a, t, c, g, other or unknown
  misc_feature (701)..(701): "n" may be a, t, c, g, other or unknown
  misc_feature (747)..(747): "n" may be a, t, c, g, other or unknown
attataaagattctgaacaacccaagagcatatacgttgcccatatccaaggaagaatcaagattatcaagactagcaacaaagactccaagcaaaggctaccaagaaacctcatgaagtgaaacaggactttgagaagttcctacataaactgcgttccgaagctgaaattgagagagaatgtgtggcatcactatcgtcatcatcatcatcatcaccatcatcaacagacaactacaactttgaggaagaagaatactaagagaaaccagaaatgaactctattcaagaataatgcatacaattcagtggtatcagtttaattgtaacaatatatttaattcaagtccaatccatgtaatcagtattaagagtgtgttttaccattcatctttaaaatcttcaaatcaataaatctcagtaagttattcttaaaagatctgtccaagcatgatcttggctcttaatagtaaaaccatattttaagatggaaaaagaatcattatgaagcatagagagctttcaaccatttctttggnaaatatatcttgatataatagcaaccgttcatcataatacaanacagaagggagattaatttactgtggcacaagaaagtcctgccaattcctaagtgccccaagtagtttctctcagactttttacattttttcaaggctcaagcaanaccaaaggcccanctccagggtttgggagcaaacaaacttttgctccccggtgctaaanttccaat

SEQ ID NO: 5001 - DNA, 748 bp, Homo sapiens
  misc_feature (637)..(637): "n" may be a, t, c, g, other or unknown
  misc_feature (673)..(674): "n" may be a, t, c, g, other or unknown
  misc_feature (741)..(741): "n" may be a, t, c, g, other or unknown
ctctcaattttttttgtttttgtttctttttacagggtttcaccatgtcacccaggctgagtgcagtggcgtaatcgctcactgcggcctcaacctcttgggctcaagcaatcctcctaccacagcctcccaagtcccaagtgcttgggactccaggaacatgccaccatgcctgactaattttttatttttttaattttatagagacagagtctcattatgttgtccagactggtcttgaactcctggacctaggcagtcctcctgccttggccccccaaagtgctgagattacaggtgagagccactgtgctcagcctactcagctgttaatcttagactttattctcttttcgttttgtgtatttgtggtagaaatttcattcactccgatgacttcacttattatctatacataatgctgatgactccagatccagaagccaggagtttgagaccagcctggtcaacatagtgacacgtctctacaaaaaaagaaaggaaaaaattagccaggtatggtggcatatgcctgtagctccatacctgtataatcaacagctattaaatatctgctaagcaaactaaactaagcattttcaaaagtaaacttgtgaaacctgatggatttcagtanttgacatcaagcatctacttttgctgaaagtcagtnncctggacattatttatgacacttatttttttttcccaaccttgcccttatccattcaattcaccaangccctgg

SEQ ID NO: 5002 - DNA, 789 bp, Homo sapiens
  misc_feature (706)..(706): "n" may be a, t, c, g, other or unknown
  misc_feature (725)..(725): "n" may be a, t, c, g, other or unknown
  misc_feature (732)..(732): "n" may be a, t, c, g, other or unknown
tttaaaaattagatgtgttgcagttttgcatgtaatcggttatacctttattggacttttatagacattttttatttgcatgaaaaaaactcactaaatttacatcactaaacaaaggttaacccttgtgtgaaatgaaggaactgtcaataattgacagccaactaatacagtaaactgttatactagttttgagctttagacctcagccttttgtgtggaagaagtcacagctttcttaggctttaaaggaaaagaaggaaggacttaaatagcttttcttcctaccgggattacctatgtttttccttgcttgcaatctcatctgattttgctagaaatcacaaccatattgtttatgcatattgcatgagtattaccaagaaaaatcttaaaagttgtgatgtgacatgatataaaggatctctttatgttaaatgtctttccatgtacctctggtgtgtcagggattttgtgcctcaaaaaatgtttccaaggttgtgtgtttatactgtgtattttttttaaattcacggtgaacagcacttttattatttccagttcagaagagccaaaaaaaagtatcttcatttaaaaagaaatcaagtcagttttttttaaaagaatgatctatggaagaaaacccaatagtacttataatatacaaatgaattatactattaagataaagaattaaatattccanttttataaagataaatacntaagtanataaaaacaaattttaagtttaagttttcaagacatagaattcacttttggagggga

SEQ ID NO: 5003 - DNA, 753 bp, Homo sapiens
  misc_feature (599)..(599): "n" may be a, t, c, g, other or unknown
  misc_feature (691)..(691): "n" may be a, t, c, g, other or unknown
  misc_feature (748)..(748): "n" may be a, t, c, g, other or unknown
  misc_feature (753)..(753): "n" may be a, t, c, g, other or unknown
tccaagggaggtttttctgtgtttatccagctgatgcccataattgtattgatcctcgtgtcattattaagccagttgatggtctctaatcctccttattccttatatcccagatctggaactgggcaaactattaaaatgcaaacagaaaacttgggtgttgtttattatgtcaacaaggacttcaaaaatgaatataaaggaatgttattacaaaaggtagaaaagagtgtggaggaagattatgtgactaatattcgaaataactgctggaaagaaagacaacaaaaaacagatatgcagtatgcagcaaaagtataccgtgatgatcgactccgaaggaaggcagatgccttgagcatggacaactgtaaagaattagagcggcttaccagtctttataaaggaggatgaactggaatttttatttataccttttagcgtactctttattttttctgtaagtaagtttggtttcatcatgagggatgaaggaaaagatttgatactgaaaactaaactgaatagttggttcctgaaatcttggactgtttatgacctactggctcctttaaatagtaactgaaaactaaaatggnatattttagttaacgcttctacaagtattttcattttaaaagcttacatgatcctaactaaagtgtcatgagaaagggatatcacacctgtngccaatttccaagttttaagtgaatccccaattttttcccttggccatggtaaatantttan

SEQ ID NO: 5004 - DNA, 746 bp, Homo sapiens
  misc_feature (683)..(683): "n" may be a, t, c, g, other or unknown
  misc_feature (692)..(692): "n" may be a, t, c, g, other or unknown
  misc_feature (702)..(702): "n" may be a, t, c, g, other or unknown
gaggccgcgccgggagcgcggtggggctaggcgtggggcgctcccggcatgtccctgtaccgcagcgtcgtgtggttcgccaaggggctgcgcgagtacaccaagagtggctatgaatctgcatgtaaagactttgtccctcatgacttggaggtccagattcctggaagagtctttttggtcactggaggaaacagcggcattggcaaagcaactgcccttgaaatcgccaagcgagaacatttttctgcacattgtggacttgtctgatcccaagcaaatctggaaatttgttgaaaatttcaagcaggaacataaactccatgttctgatcaataatgcaggttgcatggtcaataaaagagagctcacagaagatggacttgaaaaaaactttgctgccaatactctgggtgtgtacattctcacgaccggcctgatccctgtgctggagaaagaacacgacccccgagtgataaccgtctcctcaggaggaatgttggttcagaaactgaacaccaatgatctccagtccgaaagaacaccatttgatggaactatggtctatgcacaaaacaagaggcagcaagtggttctgacggagcggtgggcccaaaggcacccggccatccatttttcttccaggcatcctggctgggccgacaccccaagtgtgaggcaangcgattccnggggttcaanccaagttcggggaaacgcctgcgctccgagggccaagggggcgg

SEQ ID NO: 5005 - DNA, 698 bp, Homo sapiens
  misc_feature (643)..(643): "n" may be a, t, c, g, other or unknown
  misc_feature (680)..(680): "n" may be a, t, c, g, other or unknown
  misc_feature (694)..(694): "n" may be a, t, c, g, other or unknown
aaaaaatggcagcgctggaggaagaattcacgttgtcttcggtagtcctgagcgccgggcctgaaggactcctaggcgtggagcagagcgacaaaacagaccagtttctagtgacagacagcggcaggacagtcatcctctataaggtttctgatcagaaacccttggggagctggtcagtgaaacaaggtcaaattataacatgtccagctgtgtgcaactttcaaactggagagtatgttgttgtacacgataataaggttttaagaatatggaataatgaagatgtaaacctggataaagtatttaaagctacattgtcagcagaagtatataggatactttcagtgcaagggacagaacccttggtgctcttcaaggaaggtgctgttcgtggtttagaggccttgcttgcagacccccagcagaaaattgaaactgttatctctgatgaagaagtgattaaatggacaaagtttttcgtagtattcagacatcctgttttaatttttattactgaaaaacatggaaattactttgcttacgtgcaaatgtttaactcacgtatcttaaccaaatatacactcttacttggacaagacgaaaactctgttataaagagttttactgcatctgtagatcngaaattcatctctttgatgtcattaagctctgatggntgtatatatgaaancttg

SEQ ID NO: 5006 - DNA, 889 bp, Homo sapiens
  misc_feature (680)..(680): "n" may be a, t, c, g, other or unknown
  misc_feature (718)..(718): "n" may be a, t, c, g, other or unknown
  misc_feature (862)..(862): "n" may be a, t, c, g, other or unknown
  misc_feature (865)..(865): "n" may be a, t, c, g, other or unknown
  misc_feature (875)..(875): "n" may be a, t, c, g, other or unknown
taccgctagtggaagaagatggcggaaggcggagcggcggatctggacacccagcggtctgacatcgcgacgctgctcaaaacctcgctccggaaaggggacacctggtacctagtcgatagtcgctggttcaaacagtggaaaaaatatgttggctttgacagttgggacaaataccagatgggagatcaaaatgtgtatcctggacccattgataactctggacttctcaaagatggtgatgcccagtcacttaaggaacatcttattgatgaattggattacatactgttgccaactgaaggttggaataaacttgtcagctggtacacattgatggaaggtcaagagccaatagcacgaaaggtggttgaacagggtatgtttgtaaagcactgcaaagtagaagtatatctcacagaattgaagctatgtgaaaatggaaacatgaataatgttgtaactcgaagatttagcaaagctgacacaatagatacaattgaaaaggaaataagaaaaatcttcagtattccagatgaaaaggagaccagattgtggaacaaatacatgagtaacacatttgaaccactgaataaaccagacagcaccattcaggatgctggtttataccaaggacaggtattagtgatagaacaagaaaaatgaagatggaacatggncaaggggtccttctactcctaaaaagccactagagcanagttgctaatgaacaatttaatttccacatacgtcacagaaagagagctaaagggctctgggtatcatccacagacctgacaatcaacccctaaataacctgatattaactccacaaatgttaactagattgggccaatgtttnaanccgagtccanaagtccggaatcaa

SEQ ID NO: 5007 - DNA, 663 bp, Homo sapiens
  misc_feature (606)..(606): "n" may be a, t, c, g, other or unknown
  misc_feature (634)..(634): "n" may be a, t, c, g, other or unknown
  misc_feature (662)..(662): "n" may be a, t, c, g, other or unknown
gagctcgcccgctgtccgccagcccgcgggagggaggagagaagcgaagcgtttccgcggttggctactcagtgtcttggtctcaagttgcctcattgcggctggcgttcccaatacagacgcatcgtttcttttttaatactccctaagaaagggaataaccttcaagctggcgggagcaatggttcacataaagaaaggcgagctgacccaggaggagaaggagctactggaagtcatcgggaaaggtactgtccaagaagctggaacattattatccagcaagaatgttcgtgtcaactgtttggacgagaatggaatgactcctctaatgcatgcagcatataaaggaaaactcgatatgtgcaaattactactgcgacatggagccgatgtaaattgtcatcagcatgaacatggatacacagccctcatgtttgctgcactttctggtaataaagacatcacatgggtaatgttagaagctggtgctgagacagatgttgtcaactctgtgggaagaacagcagctcagatggcaacctttgtgggtcaacatgattgtgtgaccataatcaacaatttctttcctcgagagagactggnttattacactaagccccaaggactgggntaaagagccaaaaactgccccaaagttng

SEQ ID NO: 5008 - DNA, 632 bp, Homo sapiens
  misc_feature (21)..(21): "n" may be a, t, c, g, other or unknown
  misc_feature (559)..(559): "n" may be a, t, c, g, other or unknown
  misc_feature (588)..(588): "n" may be a, t, c, g, other or unknown
  misc_feature (613)..(613): "n" may be a, t, c, g, other or unknown
attgtgttcacctgacttganattgggaagtatagccttgttaaagctttgctaaacaggacttcttcttatgacttcaaccacatcctgtggtaggtgtcacattatggggctcaaaaagtcatagaaaaaagtcttcagttctcctctgttttagtcacactctttgtgctatggaagtgcttcctcttgcactaccttctccacctcgtcaattatcagaatcagaaaaaagtcgaatggaggaccaggaggaaaatactttaagagagttgcggttgtttctcagggatgtaaccaagaggctggccacagataaacgctttaacatcttcagcaaaccggtggatattgaagaggtcttgtttcagtagtgtgcaaacagtgaagttgaactggctaaaagaaaaaaatattgacatctttttttggaaggaaaaaaaagcaaaggcatggatgaatattacccctagcctataaaattttaatccatgtgataactaccgatgtcatcagcaaacatctggtgacttttggatgaaattagcgaccaatttanattggctcttaattaatattaacctttgnggtctcctactcctcgatttaagangattaaagggttgccttaa

SEQ ID NO: 5009 - DNA, 706 bp, Homo sapiens
  misc_feature (669)..(669): "n" may be a, t, c, g, other or unknown
  misc_feature (683)..(683): "n" may be a, t, c, g, other or unknown
  misc_feature (702)..(702): "n" may be a, t, c, g, other or unknown
acaccgagtccgcggcggcgtccagggtcggcagcaaccgcagccgagcccgagcgggtggcggcgccatggcgtgcgcggggctgctcaccgtgtgcctgctccggccgcccgcgccccagccccagccccagaccccgcggcacccccagctcgcgcccgacccggggcccgccggacacacgctcttccaggacgttttccgcagagcagacaagaatgctctcatttgaggaattccagaattactttgccgatggggttctcagcctgggggagctgcaggaactgttcagcggcattgatgggcatctcaccgacaatttagaaacagaaaaactgtgtgactacttctcagagcacctgggtgtctaccggccggtgctggctgcattggaatcgctgaaccgtgcagtgctcgctgccatggatgccaccaagctggagtacgagagggcctccaaagtggaccagtttgtgacacgcttcctgctgcgggagacggtgagccagctgcaagcccttcagagctcgctggagggggcgtcagataccctggaggcccaagcccatggctggcggtatgtaagggtgctgtcaacctgtggggctagtgcacaagcgcccattgttcccccattccaaatccccacaatcccagcatcctanagcctgcattttcnggcggggaaaccattgcanggta

SEQ ID NO: 5010 - DNA, 716 bp, Homo sapiens
  misc_feature (555)..(556): "n" may be a, t, c, g, other or unknown
  misc_feature (690)..(690): "n" may be a, t, c, g, other or unknown
  misc_feature (700)..(700): "n" may be a, t, c, g, other or unknown
  misc_feature (715)..(715): "n" may be a, t, c, g, other or unknown
tatttcacccttccgttgcttcctgccttgaatacaggtgtaatgcctggtgcttgggcagccagattaaaaccatgaggcaacaagcctgcacgctaaggattgtttgggggcagggggacagcagtggagagagtgaaaagaaccagcagctaagagacacaaatcctaaagctcaaagcctgtcccagatacaatctttgcagtgattcacacaggaaatgttaccgaaagtattcctaactgataaatagctcgcgagatgcatgtggagatagtgtctccttaaatgaagggaatgaataggagagaagacattgcacagggatgggggttccttattctgagttgattgtggtcctgcagtgaaatcattctcgaagaattcattcactccctggctgtggccattaggcttgaaccagcagggcctagggtttatgagaggaagtcaacaactactatttgatcagcatctactgatttgacctaagccccttccctcctctcccctctccttcccatctcttcccttccgttccttctttttttttnntttttttgctttgccagcccaaagcttgaggagactatattttcaggaattaatacaactttatctcatttccacctttagacccaggcaaccagatcctcttcccgtgccaaaacctagaagcccctgttccnttaaccaacngttctctctccatana

SEQ ID NO: 5011 - DNA, 793 bp, Homo sapiens
  misc_feature (713)..(713): "n" may be a, t, c, g, other or unknown
  misc_feature (742)..(742): "n" may be a, t, c, g, other or unknown
  misc_feature (770)..(770): "n" may be a, t, c, g, other or unknown
agttagtgggtaggcctgagagccgaggaaaactgagcgtgggcctcagaaagaagtcaaggcacccgcgagccgggcaactgccctccttccgcgccggcggagcgattaaagtgaagaaacaatggccagcaatcacaaatcttcagcagctcgccctgtttcaagaggtggagttgggttaacaggaaggcctccttctgggatacgacccctatcaggaaatattcgagtggcaactgcaatgccacctgggacagcaagaccaggttctcgtggttgtcccatagggactggtggagttctgtcttctcaaatcaaagttgcccatcgccctgtaacacaacaaggtttgactggaatgaaaactgggacgaaaggtccccagaggcaaattttagacaaatcttactatcttgggcttcttagaagtaaaataagtgaacttacaactgaagttaataaacttcagaagggaatagaaatgtacaatcaagagaattcagtatatttgtcatatgaaaagagggctgagactttagctgttgagataaaagagcttcaaggacaactagcagactacaacatgttggtagattaacttaataccaacactgaaatggaagaataatgaatgggtacaatatgcttaaagctcaaaatgatcgagaaacacaaagtttggatgtcatatttactgaaagacaagcganagaaaaacaaatcagaagtgtccaagaanaaattgaacagggaaaaacaagcaacangatgacattatcaaaaatatgtc

SEQ ID NO: 5012 - DNA, 745 bp, Homo sapiens
  misc_feature (672)..(672): "n" may be a, t, c, g, other or unknown
  misc_feature (705)..(705): "n" may be a, t, c, g, other or unknown
  misc_feature (708)..(708): "n" may be a, t, c, g, other or unknown
ggaagttgcaggcaatgagggacattgctatattaaaggaaaagcaggagaaagaaatacagacattacaggaggagacaaagaaagtccaagctgagacagcttcaaagacacgggaagtacaggcccagctcctccaggagaaaagattactggagaaacaactgagcgagccagacaggaggctactgggaaagagaaaaagaagagagcttaatatgaaggcccaggccttgaagttggcagcaaagcggtttatttttgaatactcctgtggcatcaacagagagaaccagcagttcaagaaggaattactgcagctaattgagcaagcccagaaactaacggctactcaaagccacttagaaaacaggaagcagcagctgcagcaggaacagtggtatctggagtccttaatccaggcgaggcagagactgcaaggaagtcataatcagtgcctaaatagacaggatgttccaaagaccacacccagtcttccccaaggcaccaaatcaaggattaatccaaagtaacttctaaaataacactgattaaataagaactggagcaagtactcttaagtgctacattaacctggttagaaaggctgttggattccagattgctattgtaaaatctccatcatgatgtgttggagtgaaggattagatngggtttaccaacagtcctactagatattttggnaancagcttcccttaactaactttttccttaaataccccg

SEQ ID NO: 5013 - DNA, 738 bp, Homo sapiens
  misc_feature (709)..(709): "n" may be a, t, c, g, other or unknown
  misc_feature (717)..(717): "n" may be a, t, c, g, other or unknown
  misc_feature (728)..(728): "n" may be a, t, c, g, other or unknown
atttctgacatgctggtgattgaagcaatcttggctctgaagggcttgactgtacaacagtgggatgctctctatacagatcttccaaacagacaacttaaagttcaggttgcagacaggagagttattagcactaccgatgctgaaagacaagcagttacacccccaggattacaggaggcaatcaatgacctggtgaagaagtacaagctttctcgagcttttgtccggccctctggtacagaagatgtcgtccgagtatatgcagaagcagactcacaagaaagtgcagatcaccttgcacatgaagtgagcttggcagtatttcagctggctggaggaattggagaaaggccccaaccaggtttctgaagataattttcatattcctgagaaactggactttttacaagtctttacaaaactgtcaataataatggcagtactaagagatttataatcataatgtttacaatgcagcctactggattgtctctagatctgtttttcttaaacactaacagaataattctttataaataggtaagccttacacttgttgaagaaatttacctctaatttcagtctcactaatgcaaaatactgggacttaagtatacaattcagtcactaactgtacagttttatgtggggaacaattcatgcaggctactgggaaaattaaatcctattaccaaactcccttggngataaccntttgccatcancaatcacatg

SEQ ID NO: 5014 - DNA, 697 bp, Homo sapiens
  misc_feature (615)..(615): "n" may be a, t, c, g, other or unknown
  misc_feature (659)..(659): "n" may be a, t, c, g, other or unknown
  misc_feature (687)..(687): "n" may be a, t, c, g, other or unknown
taaaaagcatagtatttgcatataacctacatacatcctcccatatgctttaagtcatttctagattacttataatacctaatacaatgtaaatgctatatacatagttgttatactgcattttttttaagttgtattttttattgtaatgctgtttgttttgttttgagacggagtttcactcttgttgcccaggctggtctcaaactcctgacctcaggtgatccgccggcctcccaaagtgctgggattacaggcatgagccaccatacctggccagtgctgttattttttattgtggcattttccaaatagtttttgatccactgtgggttgaatccgcaggtgcggaatccggggatacagagggctatgtttttaattcagaaaaatacatggcttatatgtcataaaaggtaaaactgcaagcagtcattctcttaccgtgtttggctattctgttcctttcttttctgataaccaatattattactttttcgtaagttcttatatgagtaatgccaatatatatatatgtagattttctcacttatcaagtatgcaaatgtatgtatataaaatgtgctttaaaaatagagacagataatagactanagggtaccaagggaccggggaagggaaagaacgggggaagttantgtttaaatggagggacagctggtgggnttccaagtgg

SEQ ID NO: 5015 - DNA, 745 bp, Homo sapiens
  misc_feature (679)..(679): "n" may be a, t, c, g, other or unknown
  misc_feature (711)..(711): "n" may be a, t, c, g, other or unknown
  misc_feature (722)..(722): "n" may be a, t, c, g, other or unknown
aatttttaaacctactgtagtacaacaagccaggattgcccagaatggaattttgggagactttatcattagatatgacgtcaatagagaacagagcattggggacatccaggttctaaatggctattttgtgcactactttgctcctaaagaccttcctcctttacccaagaatgtggtattcgtgcttgacagcagtgcttctatggtgggaaccaaactccggcagaccaaggatgccctcttcacaattctccatgacctccgaccccaggaccgtttcagtatcattggattttccaaccggatcaaagtatggaaggaccacttgatatcagtcactccagacagcatcagggatgggaaagtgtacattcaccatatgtcacccactggaggcacagacatcaacggggccctgcagagggccatcaggctcctcaacaagtacgtggcccacagtggcattggagaccggagcgtgtccctcatcgtcttcctgacggatgggaagcccacggtcggggagacgcacaccctcaagatcctcaacaacacccgagaggccgcccgaggccaagtctgcatcttcaccattggcatcggcaacgacgtggacttcaagctgctggagaaaccgtcgctggagaactgtggcctcacacggcgcgtgcacgangagggaggacgcaagctcgcagctcatcgggntctacgatganatcaggaccccgctcctctctga

SEQ ID NO: 5016 - DNA, 582 bp, Homo sapiens
  misc_feature (508)..(508): "n" may be a, t, c, g, other or unknown
  misc_feature (566)..(566): "n" may be a, t, c, g, other or unknown
  misc_feature (571)..(571): "n" may be a, t, c, g, other or unknown
gtgctctttaaacacagagacctgccaagacgccctctcgtccaactatgcccaggctgaagtcctcaccctctcttaaagcggcaccaacgtgagagagacaggcagacagacagaaagccagaggcttagggaaactctggaacccagacaagaatcttttcgctgggaaagactcagatatccttgtttgcacaggactggtggaaaatctcccatgcgaccctcggggcccagagccatctgggtctgatgttctgttccattgtacatcgaagagatatatatgcacatatagtatctatattcatacatattatactcttgtgtgtagtgcacgtgctattggtggtttgtcttctttgttaggctgtgtctccctaagcccttgccccacccagagtttcccgtccccttcactgatttctgttgtttctgctgactgtgtgggtggaatgtcccaagaaaagtgcatctgggaattgccagtccagctgggtagtcccangctcctgtcttggggatgtttcccctgtcagcaagtaacctggtgaagtctattgaangccanactgcccccta

SEQ ID NO: 5017 - DNA, 779 bp, Homo sapiens
  misc_feature (652)..(652): "n" may be a, t, c, g, other or unknown
  misc_feature (738)..(738): "n" may be a, t, c, g, other or unknown
  misc_feature (769)..(769): "n" may be a, t, c, g, other or unknown
  misc_feature (778)..(778): "n" may be a, t, c, g, other or unknown
gctattttagattttattcctgtgaaaatatatccatggaatactgttattgaatatgcttcctattttatgagaggttatgcaatctaactcatttgattattaaatttgataacctaccatgttcagctatcatgtaaatattgttatctctatatttatgtttatgtagttacctgtgaaagtagctttgaaaatgtgacacatatttttattagtgtaattacattttaattaatttttaatacttcacatgttttgcgtttttcctttggaggattggatagctttagtcaaagcagctgctgcagctgcagccaagaacaaaacagggagtaaacctcgaaccagcgctaacagcaataaagataaggataaagatgagagaaagtggtttaaagtaccttcaaagaaggaggaaacttcaacttgtatagccacaccagacgtagagaagaaggaagatctgcctacatctagtgaaacatttggacttcatgtagagaacgttccaaagatggtctttccacagccagagagcacattatcaaacaagaggaaaaataatcaaggcagctcgtttcaagcaaagagagctcgacttaacaagattactggtttgttggcatccaaagctgttggggttgatggngctgaaaaaaagggaagacctacaatgaaacagctccaatggctgggagcaaggtatgaaatgggaagcatttggtttttttcaangggtcccaactgggaatggatcaaccggggnctcctaggna

SEQ ID NO: 5018 - DNA, 791 bp, Homo sapiens
  misc_feature (658)..(658): "n" may be a, t, c, g, other or unknown
  misc_feature (763)..(763): "n" may be a, t, c, g, other or unknown
  misc_feature (778)..(779): "n" may be a, t, c, g, other or unknown
gagtttatcttgacaccaaatttgacctaaatcctatagtgaatcaggcttgatagatagttgctttatacgttaagatttggcttagatcttttaagtagtctttgaaaaacatggttttcatattatggtacttctgtctttggatcaccaagccattcaaagttattcataaagctgtggaggagattttgttttttaattttctgggactctgggagtaatatcagatgactataactatcctgtcaaaaattatcccacttattttgtagtttccaaacaaatacatgctgttagaaaagattacacagtcaaaataagagattttcttttttcaattgtttaccatctgctttgtttttattctttcagatgtaatacacattggatgacatttagcctgatgttagttttgccttgacgttgagaatgttgagccctcattccactgtcgtagtctgtatgtcagttaaatacctcacaatagataatcatactgtaacgttaaacagctccctgaaaatactgacacagatcttaagagtttaggttagaaccataagaattggttcattcagctttcagaaagcactggcaggggagtcaaatgaaattgtgaatctcagcccacacatgaaagaacgattaagattantgtcactaagaagcccagaaatgggtatcagccattgataatttaagaagtgtccttgccttcctttgctggattcacaaggtttggggaaatatttttaaggcnttaggcaatttaacnnagaggaacaata

SEQ ID NO: 5019 - DNA, 743 bp, Homo sapiens
  misc_feature (684)..(684): "n" may be a, t, c, g, other or unknown
  misc_feature (699)..(699): "n" may be a, t, c, g, other or unknown
  misc_feature (727)..(727): "n" may be a, t, c, g, other or unknown
tcaatttaatgacaaagttaataaaccctttgtgtgtcaaaaccaaggctgtaactacagtgctatgacaaaggatgcactatttaagcactatggtaaaattcatcaatacactccagaaatgattcttgaaattaagaagaatcaattgaaatttgctccctttaaatgtgtagtacctacatgtacaaaaacatttacaagaaattctaacctccgggcacactgtcagttggtgcatcattttacaactgaagaaatggtaaagttaaaaattaaaaggccttatggaagaaaatctcagagtgaaaatgtgccggcctcacgaagtacacaagtgaaaaaacagctagctatgacagaggaaaataaaaaggaatctcagcctgctttagaattgagagcagagacccaaaatacccacagtaatgtagcagtgatcccagaaaaacaacttgtagaaaaaaaaagtcctgacaaaacagaaagttctttacaagtgattacagttacttcagaacaatgtaatacaaatgcactcacaaacacacaaaccaaaggacggaagattaggaggcataaaaaagaaaaggaggagaaaaaacgaaagaagccagtttcccaatcccttgagtttccaacaagatacaagtccttacagacccttatcgatgtgttcaacangggatgctttgctgnctttacgatacagcaaaactttgattcnccattaccaaggctgt

SEQ ID NO: 5020 - DNA, 690 bp, Homo sapiens
  misc_feature (573)..(573): "n" may be a, t, c, g, other or unknown
  misc_feature (618)..(618): "n" may be a, t, c, g, other or unknown
  misc_feature (650)..(650): "n" may be a, t, c, g, other or unknown
  misc_feature (677)..(677): "n" may be a, t, c, g, other or unknown
taaaaccatagtgagataccatctcacatcagtcaagaatggccattattaaaaaactgaaaaacagcaaatgtttgtgaggatgaagagaaaagggaacacttatacactgtttgtgggaatgtaaattagtacaacctctgtggaagacaggatgggtatttctcaaagaactgaaagtaggatctaccatttgacccagcaatcccactgttgagtatctacccaaaggaaaataaatcattttatcaaaaagacacctgcacttgtatgtttattgtgacactattcacaatagcaaagtcgtgaaatcagcctaagtgtccatcaatgaatgattggataaagaaaacgtggtatatatactccgtgaaatgctactcactcataagaaagaataaaatcatgtctttgcagcagcatggatggatttggaggccattattctaagtgaaaaactgcaatggaaaatcaaatactgaaggggtgcgttgcccctccacacctgtgggtgtttctcattaggtggaatgagagacttggaaaagaaaaagcacagagacaaagtatggngaaagaaataagggggcccaagggaccagcgttcagcatacgggnggatcccgctgggcctcttgagttcccttagnatttattggtcattcctggggggttcncggaaagggggat

SEQ ID NO: 5021 - DNA, 755 bp, Homo sapiens
  misc_feature (600)..(600): "n" may be a, t, c, g, other or unknown
  misc_feature (669)..(669): "n" may be a, t, c, g, other or unknown
  misc_feature (678)..(678): "n" may be a, t, c, g, other or unknown
  misc_feature (744)..(744): "n" may be a, t, c, g, other or unknown
ttgtgttacaggtgaggagtaggaagttcaaaaagtttataaggtcaaagtcacacaactagtcagatgtagaactaacctttggatttgggactgttcaccatcaaatcctatatgcttttgatacagacaggagacccagaaatgctgggtagaagagggtggttccctggcaaaggccctaccctcaaacctggaaacctgcagccctaaatgggaagaggcattcctgttttcatgcccaaaagttgccttttggcccgtcatgtcccctatcctatacctgtataaaccccagaccccaggctccagaagcagatgaggagacaaacagaagagcagaagaatggcagaatggcacagcagagagaagaaaaggaacatctgaatgttgagaggaatttggctgggggcggttggagaggagattagccactggacagccaaactccaggggaaggtcatcttcccactccatcccccttccagctccccatccatcctgctgagagccacctccaccactcagtgaaaccgctgcattcatccttcaagtttatgtgtgacctgattcttcctggacattggacaaagacctangtccagtgaactgtctaacacttaagtcatccacggacagcaaggctaacagaatgctgtaacatgtgnccacttggnctctggggagttgcagacaccacccgtaggtgctgccatgggtccggagcccaaaaaagtgcttgncctggctcctg

SEQ ID NO: 5022 - DNA, 703 bp, Homo sapiens
  misc_feature (455)..(455): "n" may be a, t, c, g, other or unknown
  misc_feature (628)..(628): "n" may be a, t, c, g, other or unknown
  misc_feature (659)..(659): "n" may be a, t, c, g, other or unknown
  misc_feature (671)..(671): "n" may be a, t, c, g, other or unknown
gtgaagcacacctacacctcatgggatcttgaggacatggaaaaataccgcatgcagtccatccggagagagagccgtgctcggcagaaggtgaaagggcctgtcgtgtcccaatatgataacatgaccccggcggtgcaggacgacttgggtgggatctatgtcatccatctgcgtagtaaatcagatcctgggaaaactggacttctctcagtggcagaaggaaaggagagccgccatgcagccaaggccatcagtcccgagggagaggaccgcttctataggaggcatcccgaggcagagatggacagagcccaccatcacggaggccatggtagcacgcagccggagaagccatccctgcctcagaagcagagcagcctgaggagcaggaagcttcctgacatgggctgcagtcttcctgagcacagggcacaccaagaagcaagccatangcagttctgtgagtcaaagaatgggcccccttatccccagggagctggccagttagattatgggtccaaagggattccagacacttctgagccagtcagctaccacaactctggagtaaaatatgctgcatccgggcaagaatctttaagactgaaccacaaagaggtaaggntctccaaagagatggagcgaccctgggttangcagccttctgncccagagaaacactccagagactgctacaagg

SEQ ID NO: 5023 - DNA, 781 bp, Homo sapiens
  misc_feature (548)..(548): "n" may be a, t, c, g, other or unknown
  misc_feature (656)..(656): "n" may be a, t, c, g, other or unknown
  misc_feature (711)..(711): "n" may be a, t, c, g, other or unknown
  misc_feature (718)..(718): "n" may be a, t, c, g, other or unknown
  misc_feature (778)..(778): "n" may be a, t, c, g, other or unknown
gtgacgggtccgcgaggcccagctcgcgcagtcgttcgggtgagcgaagatggcggccgagagggaacctcctccgctgggggacgggaagcccaccgactttgaggatctggaggacggagaggacctgttcaccagcactgtctccaccctagagtcaagtccatcatctccagaaccagctagtcttcctgcagaagatattagtgcaaactccaatggcccaaaacccacagaagttgtattagatgatgacagagaagatctttttgcagaagccacagaagaagtttctttggacagccctgaaagggaacctatcctatcctcggaaccttctcctgcagtcacacctgtcactcctactacactcattgctcctagaattgaatcaaagagtatgtctgctcccgtgatctttgatagatccagggaagagattgaagaagaagcaaatggagacatttttgacatagaaattggtgtatcagatccagaaaaagttggtgatggcatgaatgcctatatggcatatagagtaacaacanagacatctctttccatgttcaagtaagagtgaattttcagtgaaaagaagattcagcgactttcttggtttgcacagcaaattagcaagcaaatatttacatgttggntatattgtgccaccagctccagaaaagagtatagtagggggattgtacccaaaanggggggnttccaaaaaaaagggttttgggggggggggtttttaaaaaaaagggggaaaaaagggggnaaa

SEQ ID NO: 5024 - DNA, 740 bp, Homo sapiens
  misc_feature (334)..(334): "n" may be a, t, c, g, other or unknown
  misc_feature (452)..(452): "n" may be a, t, c, g, other or unknown
  misc_feature (598)..(598): "n" may be a, t, c, g, other or unknown
  misc_feature (601)..(601): "n" may be a, t, c, g, other or unknown
  misc_feature (665)..(665): "n" may be a, t, c, g, other or unknown
  misc_feature (714)..(714): "n" may be a, t, c, g, other or unknown
  misc_feature (724)..(724): "n" may be a, t, c, g, other or unknown
tcgtcagcgccctcgccgccacgctgtgcttctcgcttcagaacattttctccaaaaaggtcttgcgagattcacggatccaccatctccggctgctcaacatcctgggctgccacgccgtcttctttatgatccccacctgggttctggtggacctctcggctttcctggtcagcagcgacttgacctacgtctaccagtggccctggacgctcctgctcctggctgtcagcggcttctgtaactttgcccagaatgttatcgccttcagcatcctcaacctcgttagccccctgagctactcggtcgccaatgccaccaaaagaatcatggncatcacggtgtccctgatcatgctgcgcaacccagtcaccagcaccaacgtcctgggcatgatgaccgccatcctgggggtcttcctctataacaagaccaagtacgatgcaaaccangcaagccaggaagcacctcctccccgtcaccacagcagacctgagcagcaaggagcgtcaccggagcccactggagaagccccacaacgggctcctcttcccccagcacggggactatcagtacgggcgcaacaacatcttaacangancacttccaatacagccgggcagagctacccaaactcgtacagtttgaaccgctatgatgtgtanaggtccaaaaggacaggaccagactgtttggggactcccctttcccccnggggggggcnccccccccccaaaaag

SEQ ID NO: 5025 - DNA, 705 bp, Homo sapiens
  misc_feature (537)..(537): "n" may be a, t, c, g, other or unknown
  misc_feature (593)..(593): "n" may be a, t, c, g, other or unknown
  misc_feature (664)..(664): "n" may be a, t, c, g, other or unknown
  misc_feature (673)..(673): "n" may be a, t, c, g, other or unknown
  misc_feature (701)..(701): "n" may be a, t, c, g, other or unknown
tatcactgctaccttggctctccaaggaatgggcttgtgctagaccgctgccctacttaacagctgcctcattgcaagggcagtttttcttgcatgggttctctatattcccagagtatgtggcacaatctgtgttgtttatatgataccagatgccccacaagaacccttattcctctcatttcacattcttcctttaatagcctccttcagatcccatacctgacccctctctaacacaaaacttattgggtaagtgactttgaaaagttttgtggcacctgacccaccccagacactagggcaatcagaaggtctcctttttagcccagcacaggcccaggccactttgtcgtgtttgttttaacttctaaagaaaatatgtttcagcattataagaaaggcagaatgcagaacacctacatttttgttttagtttggtgccaaggctcaggctgtattggcaaattcccgaaagttttcccactttgcctggccctgcttctgtcttttctttctcagtaaacagttctgaangcaggagtggaacccgggaagtattttcatgtctttcatccttgaaagatttttangtgcctgcattttttttttaattaaaaaatgcttttcattgggcttaagagaccgcattggagaatttcangcttttganaaatgcttcttcaaagagaatttttccnttcc

SEQ ID NO: 5026 - DNA, 718 bp, Homo sapiens
  misc_feature (694)..(694): "n" may be a, t, c, g, other or unknown
  misc_feature (699)..(699): "n" may be a, t, c, g, other or unknown
  misc_feature (702)..(702): "n" may be a, t, c, g, other or unknown
acttgaatatctgctatatgctgggttctagagctgcaaaagagaacaagagtagtctttacctttaggattttccagggaactgggggagacagacagatacatacacatacaccccatcctcagtgtgtaggtgccatgacaaatcaaggcttttgatgcagatgctatgctttcacttctcatggtcgatactttttgaatcttaaagtctgattgttcagatatctagaaaaggagatgtctggctttgctctgccctctgactcactgtgttggtttatctttaggcgtggtggagggggccagaactactggctaatgagagaaggcagaccttgttagtgacatgtacaaatgggcacatctgctatattcactttcattactgattattaatagtttattaaatggagtttactgaattactattattttggcttaaaatatatatatataatttatgtagttctatgtttatagatgtgttttcagaggtgtatttgttttagaatttcactctgtcctggaagtgatttttcaaatgtggatattaaaatggataggacataatttcccaactagtacagtatgctagtgccaaccttataccactgttgtaggacccatgaaaaataatttttaaaaagctgtaaaagtcccagtgctttgaggcttcctcaaaatttgaggnaaatngantgggaaaaaaaaaaaa

SEQ ID NO: 5027 - DNA, 715 bp, Homo sapiens
  misc_feature (688)..(688): "n" may be a, t, c, g, other or unknown
  misc_feature (709)..(709): "n" may be a, t, c, g, other or unknown
  misc_feature (713)..(713): "n" may be a, t, c, g, other or unknown
agtgcctgccgcccacggccgcaggagtcgggcttcggtcgcaccagagacagcggactttcctccgatggttgcagcagagggatcatgacggggaaaaagtcctcccgggagaaacggcgcaaacgtagcagtcaggaggcggctgcagcgctcgcggccccggacatcgtacccgcgttggccggcggcagcagtggaagcactagcggctgcgggagcgccgggggctgcgggagcgtcagctgctgtgggaacgccaattttagtggaagtgtcaccggcggtgggagcggcggcagctgttggggcgggagcagcgtggagcgcagcgagcgccggaagcggaggagtaccgactcttccagcgtctcgggctccttgcagcaggaaactaaatatattttgccaactttggaaaaagaattattcttggcagagcacagtgaccttgaagaaggtggactggacctgactgtgtcattgaaaccagttagtttctatatatcagacaaaaaagaaatgcttcagcagtgcttctgtattataggagagaaaaagttacagaagatgcttcctgatgtgttaaagaactgttcaatagaagaaattaaaaaactatgccaggaacagttagagctcctgtctgaaaaaaaaattttgaagattcttgaggggtgacaatggnatggactctgatatggaagangaanca

SEQ ID NO: 5028 - DNA, 705 bp, Homo sapiens
  misc_feature (512)..(512): "n" may be a, t, c, g, other or unknown
  misc_feature (680)..(680): "n" may be a, t, c, g, other or unknown
  misc_feature (691)..(692): "n" may be a, t, c, g, other or unknown
tcagctcttgaatcaagaattttcaaagactcacctctcttacctgggcttgcacatatttgtcctaagtaattctctatcccttaaacctctgagtccctctgttttattacttgccccactcctcctacttgaatatgtttgttttcccagttgaatgtgatttttatctactgttcatattatcttttatacccatgagtataatttcatagtcctttcaggttccacatcatcaaagagatgaccataatttcactttttttgaaatgaagtcttgctctgttgcccaggctggagtgcagtggcacaatctcagctcactacaacctccgcctcccaggttcaagcgattctgccttagcctcccaagtagctggaattacaggtgcctgccaccatgtctggctaatttttgtgtttttagtagagatggggtttcaccatgttggccaggctggtcttgaactcgtgaccttaggtgatccacccacctcaacctcccaaagtgntaggattacaagagtgagccaccgcacctggccaattcacttttaaatactaaaaggcacacagcagacagacattttcggggcagttttctttgggagggtctttgataaattttgtaatcacctctcggaagaaagcccaaaatgacatgtgaaaataatattaanccatttaccanntgtccaagcaata

SEQ ID NO: 5029 - DNA, 519 bp, Homo sapiens
  misc_feature (472)..(473): "n" may be a, t, c, g, other or unknown
  misc_feature (484)..(484): "n" may be a, t, c, g, other or unknown
tttttggcggggcctttgtccctcgctgtggcctgagctccaggtctcgtcttcagcgctctgtgtcctctgctcctagaggtccaggctctgtggccctgtgacctgcaggtattgggagatctacagctaagacgccaggaacccctggaagcctagaaatggagaacctgaagtctggagtgtatcctctcaaggaagcaagtggatgccctggggctgacaggaatcttctggtgtactctttttatgaaaaggggccattgacatttagggatgtggccatagaattttctctggaggagtggcaatgcctggacactgctcagcaggatttgtatagaaaagtgatgttagagaactacagaaacctggtcttcttgggcaggtattgctgtttctaagccagacctgatcacctgtctagagcaaggaaaagagccctggaatatgaagagacatgcgatggtanntcaacccccanttacatattctcattttgcccaagacctttggcca

SEQ ID NO: 5030 - DNA, 653 bp, Homo sapiens
  misc_feature (375)..(375): "n" may be a, t, c, g, other or unknown
  misc_feature (405)..(405): "n" may be a, t, c, g, other or unknown
  misc_feature (505)..(505): "n" may be a, t, c, g, other or unknown
  misc_feature (526)..(526): "n" may be a, t, c, g, other or unknown
  misc_feature (606)..(606): "n" may be a, t, c, g, other or unknown
  misc_feature (646)..(646): "n" may be a, t, c, g, other or unknown
  misc_feature (650)..(650): "n" may be a, t, c, g, other or unknown
cttgttggcctactgggcgggccacagtctccagcctgaagcggaagtggaggaaagatggaggaccatcagcacgtgcccatcgacatccagaccagcaagctgctcgattggctggtggacagaaggcactgcagcctgaaatggcagagtctggtgctgacgatccgcgagaagatcaatgctgccatccaggacatgccagagagcgaagagatcgcccagctgctgtctgggtcctacattcactactttcactgcctaagaatcctggaccttctcaaaggcacagaggcctccacgaagaatatttttggccgatactcttcacagcggatgaaggattggcaaggagattatagctctgtatgaganggacaacacctacttagtggaactctctancctcctggttcggaatgtcaactatgagatcccctcactgaagaagcagattgccaagtgccaacagctgcagcaagaatacagccgcaaggaggaggantgccaggcaggggctgccganatgcgggagcaattctaccactcctgcaagcagtatggcatcacgggcgaaaaatgtccgaggagaactgctggccctgntgaaggacctgccgagtcaactgggctgaaattggggcancggntca

SEQ ID NO: 5031 - DNA, 752 bp, Homo sapiens
  misc_feature (663)..(663): "n" may be a, t, c, g, other or unknown
  misc_feature (732)..(732): "n" may be a, t, c, g, other or unknown
  misc_feature (746)..(746): "n" may be a, t, c, g, other or unknown
agttcgcctctgcagcctctgcggggaagtgccggggctgctcgaggctcagttcttaggactgcaaggaggcagccccggcgtgcggcggtgcgcacagtctagagtggccagggcgcgagagtgcaacgtcctcctggccccgagcgcgtcgtcgcgccccgggagcagaccctcgcccagcagttaccgccgtcccgactttccgttccagttgcagctcctgccgggcaacatgtcaagagccgccgccgctacagctgccgccgccacctggggaagagcagcagcagcagtggcggccgcgggcacacgggggcaataaaccgagccacccgggcgtccagcgtgccggggaaccctctctgcgctcactgcccggcgggacccacgccatgtgctgagccatgtccctggccgcgcccgcgggcagcgcatggggcagcgcctgagtggcggcagatcttgcctcgatgtccccggccggctcctaccgcagccgccgccgcccccgccgccggtgaggaggaagctcgcgctgctcttcgccatgctctgcgtctggctctatatgttcctgtactcgtgcgccggctcctgcgccgccgcgccggggctgctgctccctgggctctgggtccgcgccgcacacgaaccgccaancctgggcaaaactccggacgggacgcccccaagctgccctttcggggcgccgcaagcaacccaactggnttaaggcaaagganatggcc

SEQ ID NO: 5032 - DNA, 686 bp, Homo sapiens
  misc_feature (12)..(12): "n" may be a, t, c, g, other or unknown
  misc_feature (594)..(594): "n" may be a, t, c, g, other or unknown
  misc_feature (672)..(672): "n" may be a, t, c, g, other or unknown
  misc_feature (682)..(682): "n" may be a, t, c, g, other or unknown
tttatttgctangaagcaagttactaacgcagcccttattcaagggaaggaattatccaagggcatcctaacaggagcaggtatcactgagagtcatttttaagtctgcttcttagaaaaataaaatttctggtttttgtatagccatagtgacaggtagccaccataccaattttaaacacattaaatagatcaactgtaatgtgtctcagtgaacatgcttttgcaagcccaaccagtcaatattaacccctcatttctgtaaatccatcagtcaggaatgtattcaccagaagaagcacatctctgagtatgccaaccaatcaactaaagtctcacccaagtaactgtggttcaacaagtgatgtcaactcacttgatgacaatgagtttcagataatgaccctgaaaatccaccaatctctgaactccatgtatcccccaaacattctatgaggtcagcagtctgctcagctaggagagatggcttgatcagcactgtccttccctaccatgtcagcgataagttgagccttgtgttttttgtttggttcacatattgataatggtctatcaacttctaacagttcaatnagatgttggttttaaccactaaagttttgggaacaaagctgttaggcagcaaaagttaactgatatactgggaaaatngcaagtttcntcca

SEQ ID NO: 5033 - DNA, 553 bp, Homo sapiens
  misc_feature (491)..(491): "n" may be a, t, c, g, other or unknown
  misc_feature (493)..(493): "n" may be a, t, c, g, other or unknown
  misc_feature (529)..(529): "n" may be a, t, c, g, other or unknown
agaatcgaaactgagagctcctgggcaggctcggcagggcgggcagctccaggagggcttcgaaccgtggccaacagttccagtggactgcgtggacccgtgagctcaggagcctcagacgcctccctggagagccaagctggtgttcgaggtggcgcctccagggtccaccctgctgcccaacagccccgcggccaccagagggccgtccctggcccggctgtgtgccctggtggacctgtgtctgggctgctcccgctgcacccagcggctcaatgaaagcacctacgtcctccgtagggtggagcatgactgctcccgcgagatcctgctggcccgctttaagcaggccaccaagagcaaggtctggcgcgtggtgggctgccggcccaccttcccaaggcccctgtgctaccaagtctgccactactacagccctgggctcggctgccggcgccaccgaaaccggtgcacctttgcccgcagtcgcnangaggccctggtctggaccttcgagcgtcagcacaanctccagcgcctatggctgaaaggc

SEQ ID NO: 5034 - DNA, 517 bp, Homo sapiens
  misc_feature (429)..(429): "n" may be a, t, c, g, other or unknown
  misc_feature (504)..(504): "n" may be a, t, c, g, other or unknown
  misc_feature (509)..(509): "n" may be a, t, c, g, other or unknown
gtggcatattgaagtgatctataaatatcttcagtcctctctgaagtgtgggtatttcttctatctaaaaaatacatacagtgactgtcttcaaatctacttggttcttgaccaaataggagctaatgggtaatgaatacctttttgtttgtttgtttgtttgttttgttttttttttttttaagggtctcactcttttgcccaggctggagtgcagtggcacaatcacggctcccaggctaatgtttttatttttaatttgtaatttttttttttattttttttgttgagatggagttgctccatgttgcacaggctgttctcaaactcctaagctcaagccatctgcctgccttggcctcccaaagtgctgggattgtagacataagccacctcacccagcctatgaatatctttctaacattgtangaatgaggtaatgtttccatcagtctaatacagatatatttcttccctccaaaacagtttattttgattgtttantttantttgattg

SEQ ID NO: 5035 - DNA, 539 bp, Homo sapiens
  misc_feature (455)..(455): "n" may be a, t, c, g, other or unknown
  misc_feature (482)..(482): "n" may be a, t, c, g, other or unknown
  misc_feature (524)..(524): "n" may be a, t, c, g, other or unknown
atcacgctgaggtccgcgcgcccccggagtctggggagcagggctccgccaatccgaggggagggcgaaggaagtaccatttatttagcgctgtgtgtgtgctcttatttccactggccttacaagaccgtgcactgtgtagatgaggaaactgagtcataataaatatgtgctgaaccgttcgggggtcacacggtgctgaaatggtttcgagtcaactcgctcggacggcactcggcctcagcctccggccctggaaccctctccagggacgggaccagcccttgttctgttccctaccggtaccacaggaatcttgacgaacggcccaaatgcctggccgctgtcagagtgacgccgcgatgagagtaaacgggccagcatcccgtgcaccagcggggtggaccagcgggagtctgcacacaggcccccgagcaggacgccctcgtgcgcangcgcggggtgtacgttggccgggggcntctcctccggccccgcccagcgaaggagcttcctcttccgangaaaagcggggcctg

SEQ ID NO: 5036 - DNA, 622 bp, Homo sapiens
  misc_feature (584)..(584): "n" may be a, t, c, g, other or unknown
  misc_feature (590)..(591): "n" may be a, t, c, g, other or unknown
ttcattctgtcatcagatacctccaaatttagaacaatatctatccgtagccattggttttcggatatgctttaccctgggaacgtgcgtaaaatacatttccgtgtttggctatttctttcccagctgcatagagggtgtcaccattattttagataatagccatggccggtgcccactttaatcacttttccaatcacttttcactgattgcttctaaggcacttgatttcagatgtcactttttgctgaaatacctggataactgtttcagggggccttgtggactaccgagaagtttgcctccaggggttggtaaacttctaaaagtgccaagtcatgaatattttatgctttgcaggcccaagaagcaaaagtaagactattatgtagatacccataaaacgatttaaagtgaaatcatttaaaaatatgaaaaccattcttcacttgcaggctacgaacaagcagcctcctgtttgactggggttgctcagcgagccttctggcttctccggcacacacacattcaggtctccatctatgcaaatggagacctccttcttccttctcaccactggtantaaggnngaaaaacaggacagtgggaaagggtttggta

SEQ ID NO: 5037 - DNA, 655 bp, Homo sapiens
  misc_feature (598)..(598): "n" may be a, t, c, g, other or unknown
  misc_feature (608)..(608): "n" may be a, t, c, g, other or unknown
  misc_feature (651)..(651): "n" may be a, t, c, g, other or unknown
gatggagtggcagcctgaggagcaagcctggcactcctacatcaactttgagctgagatacaaagaggtggatcgggcccgcaccatttatgagcgatttgtcctcgtgcaccctgatgttaagaactggatcaagtatgcccgctttgaagaaaaacatgcttattttgcccatgcacggaaagtgtatgagagagctgtggaattctttggagatgaacatatggatgagcacctttatgttgcctttgccaagtttgaagaaaatcagaaagagtttgaaagggtacgagtgatttacaagtatgccctggacagaatttcaaaacaagatgcccaagaactctttaaaaattataccatctttgagaagaagtttggtgataggcggggtattgaagatatcattgtgagcaaacggagattccagtacgaagaagaagtgaaggcgaatccacacaattatgatgcatggtttgattacttgcgcttggtagaaagtgacgcagaagctgaagccgtgagagaagcctatgaaagggccattgccaatgtcccacccattcaggagaagaggcactggaagcgctacatttanctttgggatnaactatgcactcctatgaagaatgggaggcaaaggatcctganaagg

SEQ ID NO: 5038 - DNA, 595 bp, Homo sapiens
  misc_feature (531)..(531): "n" may be a, t, c, g, other or unknown
  misc_feature (587)..(588): "n" may be a, t, c, g, other or unknown
attacatggtgtctaaccaaatgagcaggcttaggaatttagatgagatgtgtaagattcacttacaggcagtagctgcttctagcatttgcaagatcctacacttttaccttctttaagggtgtacattttgatgttgaacatcagttttcatgtagacttaggactcatgtgcagtaaatataaataagtgtagcatcagaagcagtaggaatggccgtatacaaccatcctgttaaacatttaaatttagctctgatagtgtgttaagacctgaatatctttcctagtaaaaataggatgtgttgaaatatttatatgtactttgatctctccacatcacttataacttatgtgttttatttctccaagtgcggtgttcctgaatgttatgtatgcttttttttctgtaccacaggcattatctatacctggggccagattttctgcactttgaaatgttgcctttgcctaatgtaggttgactttctgaattgtggagaggcacttttccaagccaatcttatttgncactttttgttttaatatcttgctctctgacaggaaagaaacaattcacttaccannctcctca

SEQ ID NO: 5039 - DNA, 638 bp, Homo sapiens
  misc_feature (315)..(315): "n" may be a, t, c, g, other or unknown
  misc_feature (496)..(496): "n" may be a, t, c, g, other or unknown
  misc_feature (619)..(619): "n" may be a, t, c, g, other or unknown
  misc_feature (630)..(630): "n" may be a, t, c, g, other or unknown
  misc_feature (638)..(638): "n" may be a, t, c, g, other or unknown
caaattgatgctgaggggtgacaaaggtgctcttgcattggtggagaggggctcagtaggcctaaatgttgctccaagatctaagattttatcattcaacagacagactcatgtgagagggctcatcagtctctgtaaatattggttgcagaatttaggggcagaagcaatggcttgtgagtgagcaagttactcttaacataggttgccctacacagtggctcctgcagtgtgatcagcaggagtctctgtcctacaaatctacacttttaaggatgtatgaaattgtggaattcattccctcaggatctgaanatctcagttctcaaaaatcacaagttgcaagaatatgatacctaaaattgaaagtttttcacatgttttcactgtatactgaaaatactcccctggaagcagggctgcatcataatttttgtgggctttatgtacttttgcctttgcgaaccatttcctacattcaaaatagtagtaacanatatatatatatatatacacacacacacacagaaatatatatttataactgcattgataaaaggtgaatatattagcattttcttcaacctaaaagtttatgtattttcttccgattttaatngaaattaaagncattttan

SEQ ID NO: 5040 - DNA, 698 bp, Homo sapiens
  misc_feature (617)..(617): "n" may be a, t, c, g, other or unknown
  misc_feature (629)..(629): "n" may be a, t, c, g, other or unknown
  misc_feature (646)..(646): "n" may be a, t, c, g, other or unknown
ttttttttatcctatttgattatcttgagggcttgattttggtataaggtggattcaactgactagcttcatttctggaagattttagagggccaacattcagctcccaactcctgcactgtgtactctaactctgggggacttctattgggccccagctttgttctttggctccccaaggttaggaatccactgcggtgaaggggcctgaggtgtggcagctgtggcagagtgctagcaggtgtcggggtgcctgcctccatgtgggtgttcaccacagtggcagaaacaatgcagctgttgggggagctcctgctggcaactatatgtatggttgtgctggacatggtgttggcttgggggtggggtgctggcagatgcaggcctgggtgccttctctgtgccccataagcaggagtgattggtcagcatgggggaggactgttgttctctgcaaaaatgtttaaaaaagaaattgtttcaaaaatctatataaagctttggattctgtaaatccaaaattcattactggtttattactttactggccagggattatggcaccaagaagagagatctgtgggtctgacaataagccatgaatgtggtttgcccantacatggtttanctttgtttctgtatcanacacgctagtttaatttacaaatggagttttgatatactcaggactgtgaat

SEQ ID NO: 5041 - DNA, 609 bp, Homo sapiens
  misc_feature (484)..(484): "n" may be a, t, c, g, other or unknown
  misc_feature (591)..(592): "n" may be a, t, c, g, other or unknown
  misc_feature (609)..(609): "n" may be a, t, c, g, other or unknown
tgaggtccgcggcctatttacccaagttggaggtaggggcctgtggaaacatgaagagggtaaacagctgtgtgaagagtgatgagcatgtcctggaggagctggaaacagaaggggagaggcagctgaaaagcctccttcagcatcaacttgatacttctgtctccattgaggaatgtatgtctaagaaagagagctttgctcctggtactatgtacaagccctttggggaggaagcagctgggactatgactttgtcccaattccagacactgcatgagaaggaccaggaaactgcttctctcagggaattagggcttaatgaaacagaaatcttgatctggaagagccatgtttctggtgaaaagaagacaaaactgagggcaactcctgaagcaatacagaaccgtcttcaagatattgaagaaaggatctcggagcgtcagcgcattctttgcctgccacagagatttgcaaagagcanacagctgacccggcgagaaatggaaatagaaaagtctttatttcagggagctgatcgtcactccttccttaaggctctttattaccaagcataccacaaaaagacanntgcagacaagtacatgn

SEQ ID NO: 5042 - DNA, 653 bp, Homo sapiens
  misc_feature (451)..(451): "n" may be a, t, c, g, other or unknown
  misc_feature (610)..(610): "n" may be a, t, c, g, other or unknown
  misc_feature (614)..(614): "n" may be a, t, c, g, other or unknown
  misc_feature (619)..(619): "n" may be a, t, c, g, other or unknown
gaggcaaatggcattgtataatatgtctgtacaaaaaacaaacaaaaaaccaaacaagggcaaatagaaccctttggattggtattgtactatctgtttctgaagacccagaaacagaaaacaaacttttccccagacttactgtttccttgagaatcctttttctttgttcttcatactttaacttccataaggagctggctcctctgcctataaataagagcttagagaaatacttcaaaaagctacctgcagttagctaaatattaccaagtctgcctggtacatgtttcattatatttccttgcctcagtttgttatctagatttaatttacactccatgtgatatagctgttaaattagaaatgagattctttcttctgctttagcaaaattcagtgacaatttttagctccatttccaatttttacatatgtgcgatcacttggntcatactgataactgaactgactcagtctcatatttatcaggtcagataactgtgcttaaccgtgcatagtgggccagtcatcatttatgtgtcatcttctttatttgctttgtgaacactcaccacagcacctatttttctctggtattttttatacnaaantttcntgttagaataggttccttaaatgtacagaaattg

SEQ ID NO: 5043 - DNA, 686 bp, Homo sapiens
  misc_feature (448)..(448): "n" may be a, t, c, g, other or unknown
  misc_feature (649)..(649): "n" may be a, t, c, g, other or unknown
  misc_feature (654)..(654): "n" may be a, t, c, g, other or unknown
  misc_feature (675)..(675): "n" may be a, t, c, g, other or unknown
actagctaaaggaaaaagttttcttctcacaaaaacacagacacgtgattgttttcacaggttccattaattaactcaggtctggaagacataggacaaaatggagtttctgaagaagtccaggtgaattcagctttggagtcacttatgttcattttttttccttttcttttactattatcctaaaggttatttttcttgttgatatagagatttttgtaaaagattgctacattatttcaggattatatcctacatttcgattgctctcaaatgttttatccctaaagagtgagttttccacagactgtttggaagcaactagaaaaatctttgtgaaaaatctgaacaaattatcataatggctctcttgaaattttgcactttcacccttattaaggaaattataattagttactaacctttaaaaatagatatattctaatangatagaaagttaacttcctggcaaacaaaatactaagatctcaagggctactgcaggaaaatacctttttcgcacattaaaatgtttataaaattttcccctctcatttcaaatgcatggcaagaataacatttttggtggtccttaaaggtgatggacagatttactgtcacttaacgattttatggaaaataaattggntatcntaattttaaaacaatcctaanttttctcaaaa

SEQ ID NO: 5044 - DNA, 714 bp, Homo sapiens
  misc_feature (565)..(565): "n" may be a, t, c, g, other or unknown
  misc_feature (676)..(676): "n" may be a, t, c, g, other or unknown
  misc_feature (700)..(700): "n" may be a, t, c, g, other or unknown
  misc_feature (703)..(703): "n" may be a, t, c, g, other or unknown
aggttacgtcagcggcggacggcaaggcggggagaggggcagcccgctcgcggccctcccgcctggctctcgcctcggcctgcggccgggatcctccgcccgggtcgcgcagcggaggccgagggctgggacgggcggctgggaagtgggaaagggagctccttttgtcttctcttcccatcccccaggtttgggaaagttttccttttgggaaagcccctctcttcagcctgctggcgggtgtcggattggttagcgaccaccggcccccgcctcccccaacaggattctcctttgggccacaggtcttccggaagttgccaaaccccggtagcggcagcgtccggctgggggctttattagggggcaccggggtctgctttccgactcccttccgactccgcgcctgcgcaggaagcgattgggggagtgttgtgaattccgagggctccacacttaagaggttgtacactcacctgtctacctggactccaatttccatatttccagccacttgaggactgagaggtggatgataaaccctgtcatagtggagcaagttcangtgtttaaccgctgttatgggggatctgccttttctccctcttctttcttacttccataagtatgtatgtgcagagattgaaaaataaccttgagaaagtccatccatctnactccaagttttggtatcaagatnaanctgacctcata

SEQ ID NO: 5045 - DNA, 640 bp, Homo sapiens
  misc_feature (610)..(610): "n" may be a, t, c, g, other or unknown
  misc_feature (623)..(623): "n" may be a, t, c, g, other or unknown
  misc_feature (633)..(633): "n" may be a, t, c, g, other or unknown
tgtgtaaaatattgtccttagttttcacctttcctaggagacacaggcagagcctgtgacactacagcttctggcacacagtaggtaggtgcatcacaaacatctgcttagttcacacactcttgccttctcaaaacttcttgtcaagtcttcagtgaaaaggaattgctgattgagcaagaattaaacttctagagactcctggatccactgaagtttgagacaaggtgagatttgtttactgtcatattcctagctcataacatattgtagtcacttaaaaaagtttgttgaataagtgagtaaattgattcatacgtcatacttagctatatattttctgagtagaattgataaagttaatagtttaagtctagtataattttgctttactcattcaacgaacctgacaattcaactaggtgccaggcacactgctgctgaagaaaaagaggtataagatataatttctgtctacaagaaagccacagtctaaaaagtagaaacatatgaacaaatcataacaataaataggctaaattcaaaatcagaggagtttgtttctattttaaacagctctagtcaggaagtgttagagagttctaaacanggaaatattccancacatcatcnaagcatg

SEQ ID NO: 5046 - DNA, 506 bp, Homo sapiens
  misc_feature (441)..(441): "n" may be a, t, c, g, other or unknown
  misc_feature (468)..(468): "n" may be a, t, c, g, other or unknown
  misc_feature (488)..(488): "n" may be a, t, c, g, other or unknown
cttgagtttcatcagttctttctaagatcgatcagcacacctgaaagtttctgttcctgatgaaatgtctgcagatctagaaaagagaagacctgagctcattcctgaggatctgcatcgccactatatccaaactatgcaagaaagagtccatccagaagttcaaaggcacttagaagattttcggcagaaacgtagtatgggactgaccttggctgaaagcgagctgactaaacttgatgcagagcgagacaaggaccgattgactttggagaaggagcggacatgtgcagaacagattgttgccaaaattgaagaagtattgtaagtaatagaagtatatgtggaaatgccctctctgctgagatactagttatgcttgaagtgtcctttgggtaggtttagaaaaactggcagattgtgtatgtggagcccgtttantttgtcataagtacttgagaaactggntttttttttcctttttctgngacttttagataaatttc

SEQ ID NO: 5047 - DNA, 785 bp, Homo sapiens
  misc_feature (485)..(485): "n" may be a, t, c, g, other or unknown
  misc_feature (723)..(723): "n" may be a, t, c, g, other or unknown
  misc_feature (738)..(738): "n" may be a, t, c, g, other or unknown
  misc_feature (779)..(779): "n" may be a, t, c, g, other or unknown
agacgatccgctagccacattaggcgctcggtctctgcgtccgcccctcccgtgcctcagagacttgcgctccccaggcccgagcccctgtcggcccatcctcgagcccgtgtggctcgcgaacctctaactccagccgctgcagccccctcccaggcccggcgtccccgagccccgcgggcgccgcgcctgcccttctttggctacgctgcagccgcggtgtcggcgagtcctcccgggttgcccccgcgggcgtcagagggagggcgggcgcccgcgtggtgacggcgacgcctgcagcccaaggagcgctccactcgctgccgccggaggggccggtgacctcttggctaccccgcgtcggaggcttagatggctcaggcgaagatcaacgctaaagccaacgaggggcgcttctgccgctcctcctccatggctgaccgctccagccgcctgctggagagcctggaccagctggagctcanggttgaagctttgagagaagcagcaactgctgttgagcaagagaaagaaatccttctggaaatgatccacagtatccaaaatagccaggacatgaggcagatcagtgacggagaaagagaagaattaaatctgactgcaaaccgtttgatgggaagaactctcaaccgttgaagtgtcagtagaaacaattagaaaacccccaagcaagcaaagaatccctaaaagctttgccacaanggaattatttgattnaagggtggtcaataaagttttctgggaatgaattttggggnaaaatt

SEQ ID NO: 5048 - DNA, 679 bp, Homo sapiens
  misc_feature (406)..(406): "n" may be a, t, c, g, other or unknown
  misc_feature (522)..(522): "n" may be a, t, c, g, other or unknown
  misc_feature (630)..(630): "n" may be a, t, c, g, other or unknown
  misc_feature (642)..(642): "n" may be a, t, c, g, other or unknown
  misc_feature (676)..(676): "n" may be a, t, c, g, other or unknown
tcaaattagtgtaattcttgggatatttaatatataggtaatattttaaacaagtttctgtaaaatttagtgttcccattaactccgtacagaatcccttgtatttccaatatgtcaggttccatgaatgtacatgctatctggttgtttaaacattacttagttgattataatgactgtgagtataactacttttactgcttatggtagatatcatgtgagttacaatattatattacatactcttaaacaactgttgtagaaaagttgcttgaaattaaaatacacacttgtacaagttattcacatagaacaagtttgcagttactccccttttattcttgataaatatttcagtttagttcaaatcattccaaggaatgtaaaaattgaatcaacttattanattcctaaaatcagtgccctgcaggtagcaagatatacctagagtggaggtttccaaaatctacagtctcaatttaattttgaataaaatgacgaagcccagaaaagtgaatcagnagttgaagtgtcccataataagctgtcatggcttcaagatcatttgtgtatgtaattattataaaaatgcatttgcatttttaatgcttgtgtcatgactagcctggnctttcccttccntttctgcacacactgaactaagggagaataaccntgg

SEQ ID NO: 5049 - DNA, 806 bp, Homo sapiens
  misc_feature (715)..(715): "n" may be a, t, c, g, other or unknown
  misc_feature (790)..(790): "n" may be a, t, c, g, other or unknown
  misc_feature (793)..(793): "n" may be a, t, c, g, other or unknown
atcatagcaaccaaacaatgaattgagacctggaggtcttgggttgtaatttaaattcacataaaccaggccttttgtgcctattgcctaattcatggcataattattattagccgccttaggataaaaggaatacagactttatcccatacatgaaattatcagactttcactcattttaatagctagaatcttattttctttccttaagatgtatattttcttttaatgaccaggctctatgtgctgctgtagtgaaaccggatgttctagaaacaatggctttgctgttcagtggagcagatgtcatgtgtgccaccggagaccccgtgcatagcaccccctatctgctagccaagaaagctgggcaaagtctgcaaatggaatttctctaccataacaaattctcagatttccctcaacatgatattcattccgagggtgtattaagtcaagagtcttcccagtccacattcctctgtgactttttatatcaagctccttctgctgcttctaaactctcttcagagaaaaaactgcttgaagagacaaataaaaaatggtgtgttttggaaggaggcttcttgagttactatgaaaatgataagtctaccacacctaatggcaccattaatatcaatgaagttatctgcctgggctatacacaaagaggacttctatttaaatactgggcccatctttaacctttgagatntacttaccctccgaacggtgtgtttttaattggggctgaaacaacctttttttcccaagtcctcaaaaagggaanagnagaaaaagggtcc

SEQ ID NO: 5050 - DNA, 626 bp, Homo sapiens
  misc_feature (448)..(448): "n" may be a, t, c, g, other or unknown
  misc_feature (532)..(532): "n" may be a, t, c, g, other or unknown
  misc_feature (600)..(600): "n" may be a, t, c, g, other or unknown
  misc_feature (620)..(620): "n" may be a, t, c, g, other or unknown
aaaatgggccaagggccccgggcttggaagggcaggtggcgcctagacccagcgttcccgctccacaggtctccaggagttcgcccggcgtttcctctgcagcgggtgctactctagggtctgcgacctcccgctggactgcccagttcaggatgtgacagtgactcggggcgaccaggctatgttttcttgcatcgtaaacttccagctgccaaaggaggagatcacctattcctggaagttcgcaggaggagctccggactcaggacttgtcctatttccgagatatgccgcgggccgaaggatacctggcgcggatccggccggctcagctcacgcaccgcgggacgttctcctgcgtgatcaagcaagaccagcgccccctggcccggctctacttctttcttaacggtggggcggggcgcggccgcgtgagtgagcggggtcnggagaggggtggggctcgtgcctggctgacgtgcgcgcccccgcagtgacgggcccgcccccgcgggcggagacagagttgcangccccgttccgggaagtgctgcgctgggcgccgcgggatgccgagctgatcgaaccctggaggcccancctgggcgagctgctggcangcccga

SEQ ID NO: 5051 - DNA, 747 bp, Homo sapiens
  misc_feature (712)..(712): "n" may be a, t, c, g, other or unknown
  misc_feature (715)..(715): "n" may be a, t, c, g, other or unknown
  misc_feature (718)..(718): "n" may be a, t, c, g, other or unknown
acagtcacttactctacaggcagtggggcccgacacagacagcgccgcccccgccagccagcctcgcacgccctcggaagcgcaggctcccggcgctgcgctggagggttccccggcaccccagcctcccgtccccagcccgctgcacctccgggccccccttacccttgagaggcaccgggagttgtcgcgggggggcctcgggaaattccccggacccctgtgccaggaggtgcccggttcgcccgctcttcaccccccgccccccccgagggcggtgcccgggggtgctgccccatggagcggggaggcgggcgccgtctgctccgggagccctgacccgagtcggagctgtgtgtcgcagccgccccgaccccccgccgatcatgcgccggcgcccctggctctccagtcccactgggctgtgagccccccactcccagcccgtcagggcctgcgcgccatgggcaagcgcccaccctcgcccctggctgcggctccgaccccagccccagccgcggccagcgctctgggtgctcctgttcttcctactgctgctggctgctgccaatgcccaggtcagcacccaatgacattctggacctccgcctccccccggggcccgtgctcaatgccaacacagtgtgcctaacattgccaaggcctgaaccgggcgggaaaatggaagttttgttgtgcgttaaccctgaanttngcntgcctcaagccaatacaaggggaatccaa

SEQ ID NO: 5052 - DNA, 623 bp, Homo sapiens
  misc_feature (546)..(546): "n" may be a, t, c, g, other or unknown
  misc_feature (548)..(548): "n" may be a, t, c, g, other or unknown
  misc_feature (591)..(591): "n" may be a, t, c, g, other or unknown
acgcaagtccctttcctcccgacacgagtgcagtaaagaaaaacggttatgagcgtaaagtgacagcctcggccgatgggaatagggggaagtccgacactgagcaacgaacgcattcccgcgcctccaaaacctaggccgggggcgctggaaacccttaccggcactcggccaccgcggcagacgcttgctcctgccacgcccccccccctcccccgcatcacgtgtctgcactcgctttcctcggattcccggatgtggttgccaaaacaaaggggatttggtgatggaggctttgctagaaggaatacaaaatcgagggcatggtgggggatttttgacatcttgtgaagcagaactacaggagctcatgaaacagattgacataatggtggctcataaaaaatctgaatgggaaggacgtacacatgctctagaaacttgcttgaaaatccgtgaacaggaacttaagagtcttaggagtcagttggatgtgacacataaggaggttggaatgttgcatcagcaggtagaagaacatgaaanantcaagcaagagatgaccatggaatataagcaggagctgaaganactacatgaagaattatgcatactgaacagaa

SEQ ID NO: 5053 - DNA, 668 bp, Homo sapiens
  misc_feature (554)..(554): "n" may be a, t, c, g, other or unknown
  misc_feature (602)..(602): "n" may be a, t, c, g, other or unknown
  misc_feature (654)..(654): "n" may be a, t, c, g, other or unknown
  misc_feature (668)..(668): "n" may be a, t, c, g, other or unknown
acaagtggaccggggtgttgggtgctaagtcggcaccaggaggcaagggtgcgaggaccacggccggctcggacgtgtgaccgcgcctagggggtggcagcgggcagtgcggggcggcaaggcgaccatggagcttttgcggactatcacctaccagccagccgccagcaccaaaatgtgcgagcaggcgctgggcaagggttgcggagcggactcgaagaagaagcggccgccgcagccccccgaggaatcgcagccacctcagtcccaggcgcaagtgcccccggcggcccctcaccaccatcaccaccattcgcactcggggccggagatctcgcggattatcgtcgaccccacgactgggaagcgctactaccggggcaaagtgctgggaaagggtggctttgcaaaatgttacgagatgacagatttgacaaataacaaagtctacgccgcaaaaattattcctcacagcagagtagctaaacctcatcaaagggaaaagattgacaaagaaatagagcttcacagaattcttcatcataagcatgtantgcagttttaccactacttcgaggacaaagaaaacatttacattctcntgggatactgcagtagaaggtcaatggctcatattttgaaaagcaaagaaangtgtttgacaagan

SEQ ID NO: 5054 - DNA, 621 bp, Homo sapiens
  misc_feature (580)..(580): "n" may be a, t, c, g, other or unknown
  misc_feature (593)..(593): "n" may be a, t, c, g, other or unknown
  misc_feature (619)..(619): "n" may be a, t, c, g, other or unknown
attgtggcggtgaggaacaggaagccctgaagggtcaaaagaaatacaaaagcaaaggctattttctttttttttttctttctttcattccttccttcctctgtttctttctttcttcctttcatttttttttcttttttaagagcgagcggctctgcggtggcggtttggggtgggcgccgccgaggtgaggtcgtctcgcctcccgcgcgccggtagaataaacagccattggactcttcaaacaaaaacgctgtctccatcaagtactgctttcgcaggataagtgaccatttttaatcagttgaaattaacggaaagtagcagttatttctgaaagatgacatcaattatataatatagcctggatttggttctcagctctaccattcaccacctgtatcaccttagacaaataatctaactcctctggacctcaacttcatctgtaaacagataatatttctcatagggtcaatgatcatgtaaattagataatatccataaaaggaatataatacatgattggatgtttcattatggatggaggggatgatggtaaccttattatcaaaaagangtttgtgtctgangcagaactagatgaacggcgcaaaanga

SEQ ID NO: 5055 - DNA, 727 bp, Homo sapiens
  misc_feature (647)..(647): "n" may be a, t, c, g, other or unknown
  misc_feature (664)..(664): "n" may be a, t, c, g, other or unknown
  misc_feature (699)..(699): "n" may be a, t, c, g, other or unknown
agtctgtgagctgggagcctgttggcaggtccctctttttattttcgctgagagctttcttttactaaatgccaccatccttacctttcaaggtgtctgcgtgcctaatttttcctggttgttagacaagaacccggatcttagttgaactctggagcaaaaatcctgcatcatttgtaggtgggtgtcattgtgactggctgctacctccccatgagtcttctaaaataaaacctgcaaattcacatcttccccatgcttccagagaatgcatattcttcctttgaaaaaagaaaaccagcactgttcataatagccaagatttggaagccacctaagtgtccatcaacagatgaatggagaaactgtggtacatatacacaacggagtgctattcagccataaaaaagaatgatactctgtcatctgcaacaacatgaatggaactggagatcattatgttgttaaataagccagacacagaaagacaaacatcacatattttcacttattttggggatataaaagtcaaaacaaactcatggagatagagaacagatagacggttaccagaggctaggaggaggagtggtggggggcagttagtgatggttaattggtacaaaaaaatggttagaaataataanataagacctagtattangtaggacaacaaggaggactatagtcaaaaataantttatttgtacattcaaagtaactaaaa

SEQ ID NO: 5056 - DNA, 712 bp, Homo sapiens
  misc_feature (604)..(604): "n" may be a, t, c, g, other or unknown
  misc_feature (624)..(624): "n" may be a, t, c, g, other or unknown
  misc_feature (685)..(685): "n" may be a, t, c, g, other or unknown
  misc_feature (709)..(709): "n" may be a, t, c, g, other or unknown
acaaggatgataggatgagaaaaagaaaggacaaatgcaccagaggaggtatgccaaatgggaaacttttcatcactttccagataaaaactagcagtctgtgaaggcaactggtctgatttttcaggtaagaacatatgagaggcaggctgagaccaattttctaccaggccagctaattcttcacaatgacaagctatgggtcatatgctttcaggaaccagacactggaacatgtcgtctgatgtacatcacaccaagaaataaaaaaagaattggaaagccaatgtccaattatttactaaaacagaatctactggagagaaatgcaaaggcaggtaaaaaggcaatctcttaacatgaaaactcacaactgtaaaatgagaacctaaactatacagcgacaaactcaggaaaaagtctccagctactgctgtctctcagactctcacagtatgtgtaaccacttcctcctctgcacgggatcaccccagaagatcaactctactagatcatttgaggacaatgaacaaagtctcaagactgaattcccacagaaaacattctcatgaaaccacccaatattctggtgaagttaaagaanggcatgtgttcggagacaancaagaagcagcaatgctcaaaaccacaaaactctgggattgccgactctgcacatcctggntcctctagatacagttcaagtggnaca

SEQ ID NO: 5057 - DNA, 817 bp, Homo sapiens
  misc_feature (764)..(764): "n" may be a, t, c, g, other or unknown
  misc_feature (804)..(804): "n" may be a, t, c, g, other or unknown
  misc_feature (808)..(808): "n" may be a, t, c, g, other or unknown
aatgaatacaaattattataagataaaatataaagtatttgataatcatacaaatgcaaaataataagaaatgttgtatgaaagtgcttagagagtctgccttattgaatattgtttgtttttgaactgtgtgttggtaggaggtactcctgacaattttcactttacaaacatttatttcttgatttaacctaccaccaggatgacggctgtcactcactgattcaccaaaaattggacaaattgcttacttatttttgttgatttttcttaaatgtatgtatagcttacatttatatcaatattcaacattagaagtgtttcaagtcttcacttagaaatttgttgatgtttttgtgatacaaatatgccataggaactaattcttgtttatattaattagcctatagtaaaactggttttgttacatggcatctcacttgaagttgaagtttccaagaccctatcaacaacgttgagaacttactgtcataggttgaaaaactgtacaccaggaaccggaccaaaatagatctgacagtaatattgatattagaaaacaactttaagtctaataatgatttttctctaaagaggttgattacttcatgatagaaggatcatgtcaccatggatgacacagactgttagtgcacatcaatatccattttgtcctcttcttttttggcatacaaccaaaacttacatagggctttttaacattttaccggggcctatgtaactggagtttttagccagtgggnaaaatgtccaagtggacattttgccactttctaaggtccngggnacaattaac

SEQ ID NO: 5058 - DNA, 691 bp, Homo sapiens
  misc_feature (622)..(622): "n" may be a, t, c, g, other or unknown
  misc_feature (647)..(647): "n" may be a, t, c, g, other or unknown
  misc_feature (681)..(681): "n" may be a, t, c, g, other or unknown
gaaagatgatcaagtgaaaggtacagcagaagatcttgtagataccttctttgaagttgaagttgaaatggagaaggaggtttgccgtgatctagtgtgcacttcccccaaagatgaagaaggattcctaagggatttgtgtgaggtcttactatatttattgctacctcctggagatttccagaacaagatcatgcgatactttgtcagggaaatccttgcacgaggaattcttcttccattaataaatcaactcagtgatcctgattatattaatcagtatgtcatatggatgatccgtgattctaactgcaactatgaggcctttatgaacattattaaattgagtgacaatattggagagctagaagcagtcagagataaggcagcagaagaattacagtatcttagatctctagatacagctggtgatgatatcaacactatcaaaaatcaaataaatagcttactattcgtaaagaaggtatgtgactcaagaatacagcgattgcagtcaggcaaagaaataaatactgtgaaacttgcagcaaactttgggaaactttgcacagtccccctgggacagcattcttgtagacaatgttgcactacaattttttanggattacatgcagcaaactggaggncaagcacatctaatcctttggatgacagtggaangatacccggg

SEQ ID NO: 5059 - DNA, 492 bp, Homo sapiens
  misc_feature (433)..(433): "n" may be a, t, c, g, other or unknown
  misc_feature (452)..(452): "n" may be a, t, c, g, other or unknown
  misc_feature (485)..(485): "n" may be a, t, c, g, other or unknown
tttgttttgagacggagttttgctcttgttgcccaggctggtgtgcaatggcacgatctcggttcaccgcaacctctgccttccaggttcggacgattctcctgcctcggcccccagagtggctgggattacaggcatgtgccaccacacctggctaattttgtatttttggtagagatggggtttctctgtgttggtcaggctgctcttgaactaccaacctcaggtgatctgcctgcctcggcctcccaaagtgttgggattgcaggcgtgagccaccatgcccggccagtttttaaagaactccttcttactactcagattactcctttttaaatagtggtttttaaaaaatatcaaagtagactgggcacagtggctcacacctgtgatcccggcactttgggaggctgatgcgggctgatcacctgangtcaggagttcgagaccangctggccaacgtggtgaatccctgctctactanaaatgca

SEQ ID NO: 5060 - DNA, 801 bp, Homo sapiens
  misc_feature (666)..(666): "n" may be a, t, c, g, other or unknown
  misc_feature (709)..(709): "n" may be a, t, c, g, other or unknown
  misc_feature (721)..(721): "n" may be a, t, c, g, other or unknown
  misc_feature (797)..(797): "n" may be a, t, c, g, other or unknown
ctggcctcccgaaggcgggaggaggggagccgggggctgggctgagaaaggaccctgggtagggagcagtgcgagggagacagcgccctcagagggaggactattgggaggcggcaggagggacagcgaacgtttcctcctctgctcctgaatcggaggaagccctaggggacctctttctcctggacattgaagatatggccctttggaggtgacccaggagagaagggatgaaggcctttggtcctccacatgagggccccctccaaggactcgtggcctcccgcattgagacttatgggggccggcatcgagcctctgctcagagcactgctggcagactctatccccgaggataccctgtgctggatcccagtcgccgacgcctccagcagtatgtcccctttgccaggggttctggccaggcccgaggcctgtcacccatgagactgcgagatccagagcccgagaagaggcacgggggccatgtgggggctggcctgcttcactcccccaaactcaaggaactcaccaaggcccatgagctggaggtgaggctgcacactttcagcatgtttgggatgccccggctgcccctgaggaccggcggcactgggagataggagagggtggcgacagtggcctgaccatcgagaagtcctgganggagctggtgcctgggcacaaggagatgagccaggagctctgncaccaacaggangccctgtgggagcttctgacaccgagctgatctacgtgagaaacttaagatcatgactgatctgctaaccgccggncttg

SEQ ID NO: 5061 - DNA, 762 bp, Homo sapiens
  misc_feature (702)..(702): "n" may be a, t, c, g, other or unknown
  misc_feature (705)..(705): "n" may be a, t, c, g, other or unknown
  misc_feature (740)..(740): "n" may be a, t, c, g, other or unknown
cgtactatctgaatgcccaggatggggctgggggcgaggaagagaaggccgagggcggggatggggaggagcacgacctgtttgctgggctgatgccactggaacaggagagtcgcatggaggtactgtctgcctgtgctgaggccctgcatgcgcatggctatagcagtgaggcctcccgtctcactgtggagcttgcccaggatctgctagccaacccacccgacctcaaggtagagccgccccctgccaagggcaagaagaacaaggtatccacgagccgtcagacctgggtggctaccaacaccctgagcaaggcggccttcctgttgacagtgctaagtgagcgtccagagcaccacaacctggccttccgagttggcatgtttgccttggagctacagaggcctccggcttctaccaaggccttggaggtgaagctggcataccaggagtctgaggtggctgccctgctcaagaagatccctctgggtccaagtgagatgagtaccatgcggtgccgggcagaggaacttcgggaggggacactctgtgactatcggcctgtgttgcctctcatgctggccagtttcatctttgacgttctctgtgctccagtggtttctcccacaggttcccggcccccaagtcgcaactggaacagcgagacacctggggatgaagagcttggatttgaagcancanttgctgccttgggcatgaagacaacagtgagcgangcagacatccctcttatgtgaa

SEQ ID NO: 5062 - DNA, 489 bp, Homo sapiens
  misc_feature (297)..(297): "n" may be a, t, c, g, other or unknown
  misc_feature (472)..(472): "n" may be a, t, c, g, other or unknown
  misc_feature (485)..(485): "n" may be a, t, c, g, other or unknown
  misc_feature (488)..(488): "n" may be a, t, c, g, other or unknown
gtgtgtgtgttttgttttttttactggggtctggtcatgcagataacctctgccttacagtggccaagattttactggggtctggtcatgcagataacctctgcctgacagtggccaagattccagactcccagaagaaaagcagaggttcagtataaactatactgttggcacacttctgttttttggttttttgagatggagttttgcgcttgcttcccaggctggagtgcagtggcacgttcttggctcactgcagcttctgcctcctgggttcaagcgattctcctgcctcancctcctgagtagctgggactgcaggcgcccgccaccatgcctggttaattttttttgtattttagtagagatgagatttcaccatgttgcccagggtggttttgaactcttgatctcaggcattccacccacctcatactcccaaagtgctggaattacaggcgtgagccaccgngcccggccccacncang

SEQ ID NO: 5063 - DNA, 850 bp, Homo sapiens
  misc_feature (804)..(804): "n" may be a, t, c, g, other or unknown
  misc_feature (835)..(835): "n" may be a, t, c, g, other or unknown
  misc_feature (838)..(838): "n" may be a, t, c, g, other or unknown
tgtgctctgtggagagagatacaatgatttagagaagcatatatgttcagtaaaacatgatgatgtttattttgatcattttcatccctgtgctgcgctaacgacagatattattgaaaagtatggattcccacctgatcttaccctcacccctcaagaaagcatccagctttatgataccatggctcaagtctgggaaacttggcccagggctcaggaattgtgtccagaggaattcattctttttaagaataagatagtcattaagaagttggatgctagaaaatatgaagaaaacttaaaggcagaattgacaaattggattaaaaatggccaagtgaagaaggtcaaaagagtactgaagaaccttagtccggattcattgtctagttcaaaagatatggtgaaaatgtttcctcttcttgttgaaaagttaagacaaatggataagttgcctgcaatattttttttgtttaagaatgatgatgtgggaaaaagagctggaagtgtgtgcacttttctggagaagacagagacaaaaagccatccccacactgaaagtcatagttatgtctttgcaatagatgaagtacttgaaaaagtgaggaagacacagaaaaggatcactaaaaaaaaacccaaagaaggctgaaaaactggaaagaaaaaaagtgtatagagctgaatatattaatttcctggagaatctgaagattctggaaatttctgaggactgcccgtatgctgatgtcaaagccctacacactgaaattaccaggaattaagactcactttggatagggnattacccgcgagtgcgaattacagacacggnaanactgaagcttta

SEQ ID NO: 5064 - DNA, 740 bp, Homo sapiens
  misc_feature (576)..(576): "n" may be a, t, c, g, other or unknown
  misc_feature (628)..(628): "n" may be a, t, c, g, other or unknown
  misc_feature (683)..(683): "n" may be a, t, c, g, other or unknown
  misc_feature (716)..(716): "n" may be a, t, c, g, other or unknown
  misc_feature (730)..(730): "n" may be a, t, c, g, other or unknown
cgtattaatttatttaccattagaaatggagggcttcctgtatgtggctgggcttggtggctcacacctgtaatcccagcactttgggaggccgaggcaggcggatcacttgaggccaggagttcaagaccaacccggccatcatgttgaaacaccatctctacaaaaaatacaaaaattagccgggcctggtggcgcatgcctgtgatcccagctactcgggaggtacgagtgctgaggcacgagaattgcttgaacctgggagtcggaagttgcagtgagctgagattgtgccactacactccagcctgggcgacagagcaagatttttgtctcaaaaaaagaaaaaaaaaaaaaaaagaggacttcctgtactttaagttgattttgataattatttgctcaagcactaacatctgctcacacttttgtctttctggtacaagtgggctccttggaggcaggtgagactgatctttgtctccctgcaaagacactgccccaccatgggagactcctgccacactcaggcagcagctaggatgaaggacaagacccggggccagggcctccctnccgaggaccttggctcccagatccgaggttgccataacgttatttccttcanggtatatgttcactttggaaaccaaggggccaagactggtctaagatcattttgngcttttagccaagggtgatgatgggtccgtggncattttcacttggntttcggcaaa

SEQ ID NO: 5065 - DNA, 786 bp, Homo sapiens
  misc_feature (756)..(756): "n" may be a, t, c, g, other or unknown
  misc_feature (767)..(767): "n" may be a, t, c, g, other or unknown
  misc_feature (769)..(769): "n" may be a, t, c, g, other or unknown
tcagcataggagttaagagggacacaatttagccaatcacagcttcataacagatgctctgcagacacctctccatcaatcatagcccggtgtgtttaacttagagtagatggtggcaccacccgataacaatggtggtggcattcagcagcagctcagagggttccagaagcattcctccagccttgaggggaaatggtgcctctggctaacggagggaaccatcaaagccgggtatggtttctttgatcgtgtttagccgctttgtggctgagtagagattcttccttcttcctgtccaggtaattaatgagggacttcaaaggcatgaggcttttctgctccaatcaattattcagattggcatatccaaaggtctctgaacaggaaatagagaggaaatggattgctaagtggttatgatggagactaaatgaattacttgttaatcacccttgtctgctctggtagtatctgtgcaagccaggatagctgctcggggcacactcaccatcaaacacgggaggggaagggcagggtggggtaaatttcactcttagaaacaccagaatttcttccttttcaggatcaatgtcacccatatcttgtcaattgtgactgcaaacttcagaaggactcagagtggaaagtcttggcaaccatgttggggttcaaacagtgggagccatgcttctgcgaatgagcctggggactggggactgtggtcccagccctggatttgatgaagggagtatncctgtcctgcnanggtgcaatgtcactttt

SEQ ID NO: 5066 - DNA, 838 bp, Homo sapiens
  misc_feature (719)..(719): "n" may be a, t, c, g, other or unknown
  misc_feature (722)..(722): "n" may be a, t, c, g, other or unknown
  misc_feature (770)..(770): "n" may be a, t, c, g, other or unknown
  misc_feature (823)..(823): "n" may be a, t, c, g, other or unknown
  misc_feature (831)..(831): "n" may be a, t, c, g, other or unknown
cagccagcagtcttgacaacttatctgggagtttttcagaactgtcttcagtagttagttcaagtggaacagagggtgcttccagtttggagaaaaaggaggttccaggagtagattttagcataactcaattcgtaaggaatcttggacttgagcacctaatggatatatttgagagagaacagatcactttggatgtattagttgagatggggcacaaggagctgaaggagattggaatcaatgcttatggacataggcacaaactaattaaaggagtcgagagacttatctccggacaacaaggtcttaacccatatttaactttgaacacctctggtagtggaacaattcttatagatctgtctcctgatgataaagagtttccgtctgtggaggaagagatgcaaagtacagttcgagagcacagagatggaggtcatgcaggtggaatcttcaacagatacaatattctcaagattcagaaggtttgtaacaagaaactatgggaaagatacactcaccggagaaaagaagtttctgaagaaaaccacaaccatgccaatgaacgaatgctatttcatgggtctccttttgtgaatgcaattatccacaaaggctttgatgaaaggcatgcgtacataggtggtatgtttggagctggcatttattttgctgaaaactcttcaaaagcaatcaatatgtatatggaattggangangtctgggtgtccagttcacaaagaccgatcttggtacatttgccacangcagctgctcttttggccgggtaacccttgggaaagtcttttctgcagttcantgcaatgnaaatggc

SEQ ID NO: 5067 - DNA, 861 bp, Homo sapiens
  misc_feature (828)..(828): "n" may be a, t, c, g, other or unknown
  misc_feature (848)..(848): "n" may be a, t, c, g, other or unknown
tttcctggcagttccccttatgagggttacaactatggctcctttgagaatgtttctggatctaccgatggtctggttgacagcgctggcactggggacctctcttacggttaccagggccgctcctttgaacctgtaggtactcggccccgagtggactccatgagctctgtggaggaggatgactacgacacattgaccgacatcgattccgacaagaatgtcattcgcaccaagcaatacctctatgtggctgacctggcacggaaggacaagcgtgttctgcggaaaaagtaccagatctacttctggaacattgccaccattgctgtcttctatgcccttcctgtggtgcagctggtgatcacctaccagacggtggtgaatgtcacagggaatcaggacatctgctactacaacttcctctgcgcccacccactgggcaatctcagcgccttcaacaacatcctcagcaacctggggtatatcctgctggggctgcttttcctgctcatcatcctgcaacgggagatcaaccacaaccgggccctgctgcgcaatgacctctgtgccctggaatgtgggatccccaaacactttgggcttttctacgccatgggcacagccctgatgatggaggggctgctcagtgcttgctatcatgtgtgccccaactataccaatttccagtttgacacatcgttcatgtacatgatcgccggactctgcatgctgaactctaccagaacgggacccggacatcaacgccagcgcctacagtgctacgcctggctgggcatggcatcttcttctctggctgggcgtggnctttgcaaagggaacacggngttctggatcgtt

SEQ ID NO: 5068 - DNA, 740 bp, Homo sapiens
  misc_feature (665)..(665): "n" may be a, t, c, g, other or unknown
  misc_feature (711)..(711): "n" may be a, t, c, g, other or unknown
  misc_feature (728)..(728): "n" may be a, t, c, g, other or unknown
agctctacaccccaccctccgatgtcctgggccatttgcgcatctggggaatccatctgtgagatttctccactgtcttccccagtctaactccttctgatattctcttttgtccagctggggtgatgatggtccctcagaggaaaaccagagatggattcgaagaacatttcggcctgaactacctagggcacttcctgctgaccaaccttctcttggatacgctgaaagagtctgggtcccctggccacagtgcgagggtggtcaccgtctcctctgccacccattacgtcgctgagctgaacatggatgaccttcagagcaggtaggtgcaccctgtgaataatcataacagcatctcaggtgggttaaaggttattcatctccctctgtctgtgcggtgtggcgctccctgcatctgctggacgctggtgctctgggaacagtgctccctgcgtctgccgagcactggtgctttggggacagtgctccctgcatctgccggacactggtgctctggggacagtgctccctgcatctgccgagcactggtgctctggggacagtgctcactgcgtctgccgagcactggtgctctgggaacagtgcttcctgcgtctgccgagcactggtgctctgggaacagtgctccctgcatctgctgnacactggtgctctggggacagtgctcctgcatctgccgactctggngctctggggacaagtgnttcctgggtctg

SEQ ID NO: 5069 - DNA, 756 bp, Homo sapiens
  misc_feature (695)..(695): "n" may be a, t, c, g, other or unknown
  misc_feature (708)..(708): "n" may be a, t, c, g, other or unknown
  misc_feature (724)..(724): "n" may be a, t, c, g, other or unknown
aaaagtgctcgggacaaggacatagggctgagagtagccatgggctctggaggagacagcctcctggggggcaggggttccctgcctctgctgctcctgctcatcatgggaggcatggctcaggactccccgccccagatcctagtccacccccaggaccagctgttccagggccctggccctgccaggatgagctgccaagcctcaggccagccacctcccaccatccgctggttgctgaatgggcagcccctgagcatggtgcccccagacccacaccacctcctgcctgatgggacccttctgctgctacagccccctgcccggggacatgcccacgatggccaggccctgtccacagacctgggtgtctacacatgtgaggccagcaaccggcttggcacggcagtcagcagaggcgctcggctgtctgtggctgtcctccgggaggatttccagatccagcctcgagacatggtggctgtggtgggtgagcagtttactctggaatgtgggccgccctggggccacccagagcccacagtctcatggtggaaagatgagaaacccctggccctccagcccggaaggcacacagtgtccggggggtccctgctgatggcaagagcagagaagagtgacgaagggacctacatgtgtgtggcaccaacagcgcaggacacagggagagccgngcacccgggtttncattcaggagccccangactacacggaacctgtggaacttttggcttg

SEQ ID NO: 5070 - DNA, 820 bp, Homo sapiens
  misc_feature (733)..(733): "n" may be a, t, c, g, other or unknown
  misc_feature (783)..(783): "n" may be a, t, c, g, other or unknown
  misc_feature (816)..(816): "n" may be a, t, c, g, other or unknown
aatggagagcgcctcagtcttccacccaaggtgagaataatgtttgaggtacaggacttgaaatacgcgaccttggccacagtgtcgcgctgcggcatggtctggttcagtgaggatgtgctgagcaccgacatgatcttcaacaacttcctggccaggctgcgcagcatcccgctggatgaaggggaggatgaggcacagcggcggcgtaagggcaaagaggatgagggggaggaggccgcttcccccatgctgcagatccaaagagatgcagctacgatcatgcaaccgtacttcacgtccaacggcctggtcaccaaggcgctagagcacgccttccagctggagcacatcatggacctaacacgcctgcgctgcctgggctcgctcttctccatgctgcaccaggcctgccgcaacgtggcgcagtataacgccaaccatcccgacttccccatgcagatcgagcagctggagcgctacattcaggtcagggggcatcaggggcttcacagagctcaccactgcgccagaccacaggtctgaggacctctgaaatgctgcacctgtggggatgtgcgctctctcctaggcgaggcagagccttcgttgaggggctaggaaaggtgcagtgggtgtctgtgatgcaagaagactgggaaccactgtctttaggttaactttgcttgtaagtggctttcttttggtggtgaaattttataaaaatcaaagnttaattccctttttaatagcgatatcttgggttatgccatacttctgggnccctggcttggaaaaaagccgggttaaaatganaacc

SEQ ID NO: 5071 - DNA, 705 bp, Homo sapiens
  misc_feature (617)..(617): "n" may be a, t, c, g, other or unknown
  misc_feature (657)..(657): "n" may be a, t, c, g, other or unknown
  misc_feature (690)..(690): "n" may be a, t, c, g, other or unknown
aatgaatgcatctaaggcacttagacaggacctggcacacagtaattattcaacaaatatgttgtcactattgttataataacagaggtgaggtttctgtaggtgattcagcaataggaatcaactctatgttgtttgggggcactgaggatgatatcaaaaggctagagtgttattttctccaattttacattttggctagtccttgttgaacacagagcagttttttccaaagttatgtcctaaatcaagtcatgtcaaatgccattgtttaggttctgttcaacagccatccaatgagcacatattaagtgccagactctcctaatgaacactggggagatttaaatgtatgagaaatgacacatcccccatagaagtgcatataatttactggagaagacaggcttatgaacaaattatttcaaaacaatttcagccaggcatggtgcctcatgcctataatcccagcactttgggaggccaaggcatgaggactgtgctgagctcaggagtttgagaccagcctgggtaacatagcgagatcccatctctactaaaaataaagaaaatcagctgggccgtcggggtgcttacgtgtagtcccgcctactcangaggctgaggtgagaagatcgcttgagccctgcagttgangctgcagtgagccatgattgggccattgcattncacctgggtgacaga

SEQ ID NO: 5072 - DNA, 840 bp, Homo sapiens
  misc_feature (620)..(620): "n" may be a, t, c, g, other or unknown
  misc_feature (625)..(625): "n" may be a, t, c, g, other or unknown
  misc_feature (659)..(659): "n" may be a, t, c, g, other or unknown
  misc_feature (753)..(753): "n" may be a, t, c, g, other or unknown
  misc_feature (779)..(779): "n" may be a, t, c, g, other or unknown
  misc_feature (788)..(788): "n" may be a, t, c, g, other or unknown
aacaaacaggtctgttcttattaccattttccaatctgtcacttcatgtcccatgtcccacatgggcagacaacatggcctgcccatgtggcggcacctccccaggccttccacctcgtgctcctctgcagccccttgcctgtccctgccatcttgccatgcccacgcctgcattgctaagaacacagtttacagcccgtgttttttgtgctgccattctgctggcatacggccaggactggaaagcttgattcagtattagaccatcatatatggacaataagtgcttaatttgttctaggcactgtgttaagggggcagaagcaaccatgagtaacatggattcaggccctgccaggttcttcttgtcctaagggaaccacagacacacagctgagtgcgattcagatcatgggcaccacaatgccctatccagaggtgggggacactcagtgctgcatctctctctgcggagtggctctgtgaccatggccaggcttcctgctgcagagcagccctgcacggcctcccccactgtccggggtctttctgtatctccacccccccattttttttttttttttttggagatggagtcacactttgtcgccaggctggantgcantggcgtgatctcggctcactgcagccttcacctnccaggtttcaagcaattcacctgctcagccttctgagtagctggaactacaggcacacaccaccatacccagctaatttttggatttttagcanaaacgggatttcaccatgttggccangatgggctngactcttgactcttgatccactgcttgggcttccaaaggctgggattacagg

SEQ ID NO: 5073 - DNA, 761 bp, Homo sapiens
  misc_feature (711)..(711): "n" may be a, t, c, g, other or unknown
  misc_feature (713)..(713): "n" may be a, t, c, g, other or unknown
  misc_feature (722)..(722): "n" may be a, t, c, g, other or unknown
tgtatcacaggaaaggtcagtttcctggcatcacatttcaaaaccacatcattaggcgatgacctagacaagctgctggaaaaaatgcaacaaagaagaggagacagtgtggttacccctttcgatggagaccttaatgaatgtgtgtcaccccaggaggctgctgctatgattcccacacaaaacctggatttagataatgaaaccttccacatttatcaaccgcagcaacagttgccagaaaactcttatcccaggtgtgtgctatagcggacagtggcagccagagcctggacctcggtcacttcagcaaagtagacttcatcatcattgttcccagatcggaggtgttggttcagcaaactcttcagcggattcgacaatcagtgtcatttcaggctctttgtcacatagcgaacccagtcatgggctagctgatagagtcattaattgcagagaagttctggaagctttcaacctcctggtgctccaggtcagctccttcccatacactctgcagacccaacagtcccgcattagctctagcaatgaggttcactggatacagctggatactggggaggacgtgggctgcgaggagaagctgtctttggcttgagtgagtacagcaagtctctgcagtgggggatcacgagcccacttctgagatgtgacgagacttttgaaaaaatggtgaacacactcttgganangtaccccangcttgcacaagcatgggccgtccgctgctatcttctcat

SEQ ID NO: 5074 - DNA, 792 bp, Homo sapiens
  misc_feature (659)..(659): "n" may be a, t, c, g, other or unknown
  misc_feature (721)..(721): "n" may be a, t, c, g, other or unknown
  misc_feature (751)..(751): "n" may be a, t, c, g, other or unknown
  misc_feature (767)..(767): "n" may be a, t, c, g, other or unknown
aaaaaacatgagtgactccaaggaaccaagggttcagcagctgggcctcctggtgtccaaggtccccagctccctaagtcaggaacaatccgagcaagacgcaatctaccagaacctgacccagcttaaagctacagtgggtgagctctcagagaaatccaagctgcaggagatctaccaggagctgacccagctgaaggctgcagtgggtgagttgccagagaaatccaagctgcaggagatctaccaggagctgacccggctgaaggctgcagtgggtgagttgccagagaaatccaagctacaggagatctaccaggagctgacccggctgaaggctgcagtgggtgagttgccagagaaatccaagctgcaggagatctaccaggagctgacccggctgaaggctgcagtgggtgagttgccagagaaatccaagctgcaggagatctaccaggagctgacggagctgaaggctgcagtgggtgagttgccagagaaatccaagctgcaggagatctaccaggagctgacccagctgaaggctgcagtgggtgagttgccagaccagtccaagcagcagcaaatctatcaagaactgaccgatttgaagactgcatttggtgagttcctgcacatcaagggtccttgggcctganatggtctctgtgtgatgtgactttacttgagttaccaacccttgctgagcctcaatttcctnccctgtgaaatgagaacacggggtaactgngatcattgcacttggnggttacagtgggccagcacacagta

SEQ ID NO: 5075 - DNA, 789 bp, Homo sapiens
  misc_feature (737)..(737): "n" may be a, t, c, g, other or unknown
  misc_feature (755)..(755): "n" may be a, t, c, g, other or unknown
  misc_feature (777)..(777): "n" may be a, t, c, g, other or unknown
gctgtttcggtcgggagtgggtgggagagaagccggggcaggggaggagccgccggagctgtcggagccggcccttggaagaaaatcctcgctgtgtccaggctgaggcggggggctaatgacagtgtgagctctagatggtgtgagaccaccccaaagccaagaaatggctacagccgtggaaccagaggaccaggatctttgggaagaagagggaattctgatggtgaaactggaagatgatttcacctgtcggccagagtctgtcttacagagggatgacccggtgctggaaacctcccaccagaacttccgacgcttccgctaccaggaggcagcaagccctagagaagctctcatcagactccgagaactttgtcaccagtggctgagaccagagaggcggacaaaggagcagatcctagagctgcttgtgctggaacaatttcttaccgtcctacctggagaactacagagctgggtgcggggccaacggccagaaagtggcgaggaggcagtgacgctggtggagggtttgcagaaacaacccaggagaccaaggcggtgggtgactgtccatgttcacggccaggaagtcctgtcagaggagacggtgcatttaggagcggagcctgagtcacctaatgagctgcaggatcctgtgcaaagctcgacccccgagcagtcttctgaggaaaccacacagagcccagatctgggggcacccggcagagcancgtccacaccaggaagangacttcagaccctgcaggaaancgaggtccaatg

SEQ ID NO: 5076 - DNA, 274 bp, Homo sapiens
  misc_feature (263)..(263): "n" may be a, t, c, g, other or unknown
  misc_feature (268)..(268): "n" may be a, t, c, g, other or unknown
  misc_feature (271)..(271): "n" may be a, t, c, g, other or unknown
acttagatatgcagctgaaggggttcctgggtttatttctcctgagaactggcatgggctccgagttttgccattcctggcttcggtcctagcattctaagctgcctgaccttgggcatttgtcaacctgtctgaaccttagtatcctttcctctctgtagagtgggaagagatggagtctgtgaagcgcctggtgcaagctgtactaatacacctaacaatgagctcctccctccctccctccctccctgcctccttgcctncctgnctncct

SEQ ID NO: 5077 - DNA, 814 bp, Homo sapiens
  misc_feature (765)..(765): "n" may be a, t, c, g, other or unknown
  misc_feature (781)..(781): "n" may be a, t, c, g, other or unknown
  misc_feature (786)..(786): "n" may be a, t, c, g, other or unknown
catttgctgatttaaaaaaaaaaaaaagattttggaaaaagtaaggcctgggtcaccagatacacacctgccaggtgttcagatgctggtccttccctggccccttaagtgagccatgaaaaggacctggtgattcacccacagataacggaagaaagttctgttacctcttgatagcagcctttgtgtccaccccatttccccaggtgggccgagagcattggtagctaattgtaatcactccacacaattagagctgtgctgccccttcccctagccagtggacttcggtacccagagtgaagcctgcagcctgtgtcagacaccagcatgtgtaatgggaggaaacagcttccatgtccagagcgctggttccaagggcatcttcaggcactgaaattggcactgaataggcatggggaagtttcagtggaagtgaatggggagcactggggggacttactgaaagactttcagatacagggagtatttgacacagctcacctccaactggcctggttttattctgaattgtttggagcagaggaagggagagggaaaacataaagatcagggtaataggttctaggagctgacggagctgatggagctgaacagggtagggaccatggaaggtagagctattgcgcaaaaattaggcagcctctaggcaggcaggcacttggctggatccaagtggcagtgttaagtgcttgtgggtgaatgcacacccacaagtatatgcccatttccttggcttctggnaagcttacaatttaanccagngatccatgggattagaaattttggaagc

SEQ ID NO: 5078 - DNA, 831 bp, Homo sapiens
  misc_feature (677)..(677): "n" may be a, t, c, g, other or unknown
  misc_feature (754)..(754): "n" may be a, t, c, g, other or unknown
  misc_feature (760)..(760): "n" may be a, t, c, g, other or unknown
  misc_feature (831)..(831): "n" may be a, t, c, g, other or unknown
aaggagcgtccctgcttcacccccaacttggctggagaagaaaggacaagaggcagcagggtgaagaagaagccccccatcccagctggtggagatagttctggaactggaccccgcagctgcgtgggcagccgacacacccaccccagcactggcaccagaccagagccagagccaggacctgggcaaagtgcagccgtgcaccctgcctggtcactgctctcccagccctgcctgggcctacctcctgcccagctctgcttgggaccctctgggcatgcagcagcagtagcctaagggctctggtcacttccagggctctatagggcagcagagcagagcaaaagggtgcatatgctgggagctgtcacctccactcctaggcttttctgcctagagcagaattataggggcagtatacatccaggggtctgtgcggtggggctgggggattccttaagtgactttgggaaggatttgttttcccgagcatcaatttcacacctgggcattgcaccccaggctatgcagtctttcagtgtgaggaaggggcagaacaagaatgaggcggccccgtggcctcaaggaagcttgtggctttggaggatctgactccgcagagtctgtgccaatgtggggtgagcagggcccctgccatggagcagcaggaatttganggacggagcaggttaaagaatgggaaacatcttcacttggttttttttcttgcaaactactcctgctactcattganactggntactggaagcaacttgggtaagaattttctttctgggccggccccggtggctttacgcctggaatcccagn

SEQ ID NO: 5079 - DNA, 734 bp, Homo sapiens
  misc_feature (709)..(709): "n" may be a, t, c, g, other or unknown
  misc_feature (724)..(724): "n" may be a, t, c, g, other or unknown
  misc_feature (727)..(727): "n" may be a, t, c, g, other or unknown
aatgaatccctgcggttggctgggggcagtgggtcccacactgcctaacttccctaaatgggcagcttcacttttagaaccccgggtccttccctggcaggcccaggtggcacatcctgtgtcgggtgggccctcaccttggatctccaggcctgacactgcccagctggatggaaccatggccccagccttcctgctgctgctgctgctgtggccacagggttgcgtctcaggcccctctgctgacagtgtatacacaaaagtgaggctccttgaaggggagactctgtctgtgcagtgctcctataagggctacaaaaaccgtgtggagggcaaggtttggtgcaaaatcaagaagaagaagtgtgagcctggctttgcccgagtctgggtgaaagggccccgctacttgctgcaggacgatgcccaggccaaggtggtcaacatcaccatggtggccctcaagctccaggactcaggccgatactggtgcatgcgcaacacctctgggatcctgtaccccttgatgggcttccagctggatgtgtctccagctccccaaactgagaggaacattcctttcacacatctggacaacatcctcaagggtggaactgtcacaactggccaagcccctacctcaggccctgatgccccttttaccactggtgtgatggtgttcaccccaggacttatcacctttgcctangctcttaaccttcancanaaccttg

SEQ ID NO: 5080 - DNA, 706 bp, Homo sapiens
  misc_feature (645)..(645): "n" may be a, t, c, g, other or unknown
  misc_feature (664)..(664): "n" may be a, t, c, g, other or unknown
  misc_feature (685)..(685): "n" may be a, t, c, g, other or unknown
ctagcatcagtaggtttaccatagaaggattcagtggagatagcgagggtggtgagtgttgctggattgagcccgtccctgcagcctgggcacgggagcactgcagtgccatgaaggagagggctgggggataatagcacagccggttcctatttccttttccacctggttaagactcccggggaggccctgcccagcagtccttatgagatgctgccttcctcttttttgaaaggcatagatgataaggaggtggacatgttttgagaagagaacctagagctcattacttgtatttgaggcatgtattgcttcactcccactttgggagagttttttctggggaagttaaaggctattcaggatcagagagtttcctgcatggtcccaggggctgggaggagccacctgctcagctggtggttagctgatagcacccagcctacccaccaagataggaggcagctcagatgtcactgggattcgcagtaccacaggctgtccctgggcccaagcagttagctagctgcaccccgggagggggtgttgagagcactgaagctcctgtgggagagtgcctttgacatccccccactccccactgcccagaactaggaggtagtgaaaggtgtcagtggcaagaangctgggccagagcatgganggaggccaacctgggcttcanacccaccttcttcaccaccgg

SEQ ID NO: 5081 - DNA, 720 bp, Homo sapiens
  misc_feature (456)..(456): "n" may be a, t, c, g, other or unknown
  misc_feature (491)..(491): "n" may be a, t, c, g, other or unknown
  misc_feature (627)..(627): "n" may be a, t, c, g, other or unknown
  misc_feature (695)..(695): "n" may be a, t, c, g, other or unknown
  misc_feature (705)..(705): "n" may be a, t, c, g, other or unknown
aactaacatgttttgggaggaagttttctcccttctgaggcacatgcctgtctctcagtaaacactggcctaaagcaaggttgggaagtgactttctccccgacaatatgtcaggctggtgggaagtctcctctcaggaacgtctgtgagaagaagcaagtgattacaagctggtggatgcataaggagctcttgatcttgggagtgggaaggggccactcccatctgcacatggcctcttgctgtttccctggcttgtagcatggagatttatgggcatgtaacttttacagtcacttttttttttttttgaaacagagtctcgctctgtcagccaagctggagtgcagtggcacaatctcagctcactgcaacctccgcctcccgggttcaagcgattcttctgcctcagcctcctgactagctgggattacaggtgcacgccaccacgccagnctaatttttgtatttttagtggagatggggtttcnccatgttggctaggctggtcttgaactcctgacctcaagtgatctgcccgccttggcctcccaaagtgctgggattacaggtgtgacccaccatgccctgccatgatgtcacttttctagcaagaggtctccttgnctgtattcaagtggggggaggtagaatggggagcaacaggtgtgaccagaaaacagcttcccacccancccacccatntgtttccccatccca

SEQ ID NO: 5082 - DNA, 860 bp, Homo sapiens
  misc_feature (609)..(609): "n" may be a, t, c, g, other or unknown
  misc_feature (768)..(768): "n" may be a, t, c, g, other or unknown
  misc_feature (789)..(789): "n" may be a, t, c, g, other or unknown
  misc_feature (832)..(832): "n" may be a, t, c, g, other or unknown
gagagggtccttcagggtctgcttatgcccttgttcaagaacaccagtgtcagctctctgtactctggttgcagactgaccttgctcaggcctgagaaggatggggcagccaccagagtggatgctgtctgcacccatcgtcctgaccccaaaagccctggactggacagagagcggctgtactggaagctgagccagctgacccacggcatcactgagctgggcccctacaccctggacaggcacagtctctatgtcaatggtttcacccatcagagctctatgacgaccaccagaactcctgatacctccacaatgcacctggcaacctcgagaactccagcctccctgtctggacctacgaccgccagccctctcctggtgctattcacaattaacttcaccatcactaacctgcggtatgaggagaacatgcatcaccctggctctagaaagtttaacaccacggagagagtccttcagggtctgctcaggcctgtgttcaagaacaccagtgttggccctctgtactctggctgcagactgaccttgctcaggcccaagaaggatggggcagccaccaaagtggatgccatctgcacctaccgncctgatcccaaaagccctggactggacagagagcagctatactgggagctgagccagctacccacagcatcactgagctgggcccctacaccctggacagggacagtctctatgtcaatggtttcacacagcggaactctgtgcccaccactagcattnctggggacccccacagtgganctgggaacatttgggacttcagtttctaaacctggccctcggntgcagccctttctggggctattcatctt

SEQ ID NO: 5083 - DNA, 818 bp, Homo sapiens
  misc_feature (602)..(602): "n" may be a, t, c, g, other or unknown
  misc_feature (706)..(706): "n" may be a, t, c, g, other or unknown
  misc_feature (762)..(762): "n" may be a, t, c, g, other or unknown
  misc_feature (805)..(805): "n" may be a, t, c, g, other or unknown
  misc_feature (809)..(809): "n" may be a, t, c, g, other or unknown
ctcaaaaaaaaaaaaaaaaaaagtttacttaattgatgtactgttagtctggttctatttccaacttttgccattgaacccttttgagctctcccatcctgctgtttcttgtgttgcttctgcataggaccccatcgtgtgtaccattcacattttacttctctgtttcccaaacaaagggcgtgtagactgacacaaactccctggtaccacacacagtgcccagatgaccttcttatatgtgtcccggcacagacctgccctgtatgagactcagggccataaacccaagagtgggatcaattgaaggtatattcttgattttgctaaataaccaaacagctgtactcatttatacttctcatggagaacagggagttttctgacatcccacatcctcaccaatagtgattgttccctccctttctggttttgcccttttggagacagaggtaaaatagtatctcatttttatttgcattctctgcttaacagtaaatttgagcctctcttcatatatgttagccattcagacttccctgactgtgaattgcatgctcatatcttttgtatcatctgccattttctcaactgcttcttgntatttccgtattgattttccaggggttctttgtatacagtaatttgcaggagttgtttggtacaaactttataaatatcttctcctagtctctcttaactctgngctatgatactatttaataaccctgggggttttggggtaagtttattatatattgnacatgttccatggctttaaaaaatttaattgggttttactacntaantttaaaggg

SEQ ID NO: 5084 - DNA, 799 bp, Homo sapiens
  misc_feature (577)..(577): "n" may be a, t, c, g, other or unknown
  misc_feature (614)..(614): "n" may be a, t, c, g, other or unknown
  misc_feature (720)..(720): "n" may be a, t, c, g, other or unknown
  misc_feature (743)..(743): "n" may be a, t, c, g, other or unknown
  misc_feature (750)..(750): "n" may be a, t, c, g, other or unknown
cttgcttccctctttgcctggtccaagtgagtgtctgctgcctctgtcctgccttgttttcctggctctaaaccaactccacccactcttaatggaaactcagtctggctttgtgtgtttctgggaagcacatgacttctgggaatgggcaaggaagaggagtgaaacaaaaactgtcagctatgtgtgcctggtctgggatccttctctgggtgacagtggcatcatgaatcttagaatcagctcccctttaactagggacaattgtaagcacttggcctcagagttgaggttcttgaatgtttgctaattttatgtgcatgatccttgcccaaatatttgtcatccgtccacatagattcacgtgtgcatacaacatgtacaagtaatatttgggctgcccataagaactggaagattcatagggaatgcatatacccttctcagtatggttaggattctgtttttgcttcatttaattccagagttcctcagcctcagcaggttctgcttttacctgtcacagaaatgtccagtgtttaatgcatttggttgctggggcttacatgccagcctnctctgatatgtacttggtttttaaaaacccattttgntctctcttggttcctctctatttcagcctagtatcagaaggccaggcgagactgcaacactgctcatcaccccgcggcgtgatccctgctcttaagtgctgggcanaagggaaaggtggtcaaggtgangatggtnaaggaaggctggtgaaggggctcaaaaggaatactttggaacaaccaca

SEQ ID NO: 5085 - DNA, 800 bp, Homo sapiens
  misc_feature (706)..(706): "n" may be a, t, c, g, other or unknown
  misc_feature (720)..(720): "n" may be a, t, c, g, other or unknown
  misc_feature (761)..(761): "n" may be a, t, c, g, other or unknown
gaaactacaggctgaaaagcatgacgtaccaaacaggcacgagataagtcccggacatgatggcacatggaatgacaatcagctacaagaaatggcccaactgaggattaagcaccaagaggaactgactgaattacacaagaaacgtggggagttagctcaactggtgattgacctgaataaccaaatgcagcggaaggacagggagatgcagatgaatgaagcaaaaattgcagaatgtttgcagactatctctgacctggagacggagtgcctagacctgcgcactaggctttgtgaccttgaaagagccaaccagaccctgaaggatgaatatgatgccctgcagatcacttttactgccttggagggaaaactgaggaaaactacggaagagaaccaggagctggtcaccagatggatggctgagaaagcccaggaagccaatcggcttaatgcagagaatgaaaaagactccaggaggcggcaagcccggctgcagaaagagcttgcagaagcagcaaaggaacctctaccagtcgaacaggatgatgacattgaggtcattgtggatgaaacttctgatcacacagaagagacctctcctgtgcgagccatcagcagagcagccacgagacgctctgtctcttccttccagtcccccaggacaatgtggatctcatcctggttctggtaaagaaatganggtaccagctctgncttgggggcttcgatgcacatgatggggaagtcaacgcttngccagttaatccaggttccggtactggccctggagcttg

SEQ ID NO: 5086 - DNA, 807 bp, Homo sapiens
  misc_feature (676)..(676): "n" may be a, t, c, g, other or unknown
  misc_feature (769)..(769): "n" may be a, t, c, g, other or unknown
  misc_feature (787)..(787): "n" may be a, t, c, g, other or unknown
  misc_feature (802)..(802): "n" may be a, t, c, g, other or unknown
catacaatatggagtgattgtgatggtgggacccctcttagctaattgctctgtggcgccatccgtctggaatgcagaggggtcttgcttactgcctatgctgccttcatgatatgctctctcgttaattcagactgtaaatttcaggctgaaacagactgcctgtgcatgttgccttaataagtcaaatgcagctaatctcaaatttgccctctctcgaagtgtacattaaacaatttagggtgtgcctaaattcacaactgcaaccagcttgcacatccttaagtgggccatacatattcaagcctctggggctttgttatagagtgccactcatttccccttttctgcttgtcagaatcctcattggccttcaagaccaacatgaaacgcctctgcgatgaagctataggagttagcagtggctacctgtcttcgctgtgctcagagcatgccaagggtttctttcccagcattccgatcatgcttccccgtggcctggttaattgtgtgctaggctgtattcctcaacaggctcctaaagactaagaattacatttaattcatttttgtgcccttcacagacccaggagagaggtctgaattctcccaggctgataagatggggagcatccactgagataaagcaagcatcatgtggtgtggtggctggaanagtgtaggatactgccagagagagaaagttgagttatactgtgaaaggcccaaatgtcagctcaaggaatcggaactttaccctacagaaaanggagaaattgttaacggntggctaaatgctcantttcc

SEQ ID NO: 5087 - DNA, 685 bp, Homo sapiens
  misc_feature (594)..(594): "n" may be a, t, c, g, other or unknown
  misc_feature (606)..(606): "n" may be a, t, c, g, other or unknown
  misc_feature (658)..(658): "n" may be a, t, c, g, other or unknown
attttgcaattgtgggttggctgaagaaaagaagacaacatgggaaaggaaaatctgggtgataaacggattaaacctttaggttaccgctgctctagataaacccatgatgtgactttttgtttttctcctaggtcagctgagggaacagctcagttaccttaagggtgataatttttttaggtttacttgttcggattgctcagcagatggcaaggagcagtatgaaaggctgaagctgacatggcagcaagtcgtcatgttggcaatgtacaacttgtctctggaaggaagtggacgtcaaggttatttcaggtggaaagaagatatctgtgcttttattgagaaacattggacttttttactagggaataggaaaaagacgtctacctggtggagcaccgtggcaggttgcctcagcgtgggaagtcccatgtacttccgttcaggtgctcaggaatttggagagccaggatggtggaaacttgttcataacaagcccccaacgatgaaacctgaaggagagaagttgtctgcctctactttgaaaataaaagcagcctcaaaaccaactttagatcccatcattactgntgagggacttanaaaacgagcaagtcggaatcctgtggaatctgccatggaattaaaagagaanaggtctcgaactcaggaagcaaaagac

SEQ ID NO: 5088 - DNA, 709 bp, Homo sapiens
  misc_feature (640)..(640): "n" may be a, t, c, g, other or unknown
  misc_feature (655)..(655): "n" may be a, t, c, g, other or unknown
  misc_feature (699)..(699): "n" may be a, t, c, g, other or unknown
tcatcaagaagctgcagtacagatatcctttccttcctgacccagggcccctgcaccatgggcattttggagagagagggaccctcttgcccttcagtcctcgtgggggaagccgagcagcatattgggtggcagtgtgattgaagtagggacacaggagccccatggaccgaggttcccacctctaccctcccgcattccagctttgagctcaggcaagttcctcatctctaaaagggccgagtgaaatgatgtgaagaggctggaacatagtctgggaatgtgtgtctggtggcagttgtggtcattggatgactctaaaaacgaattagacatgccccagactgggaggggtaaatgtgccggtcctgcagacgcctcggagagaccctcatggtcggctccggcagcttctcagagctgagccccagggcgttgggcacgaaggataccaagacccaaaaagacagctcaggggtcagcacagtcaccttccctggagcggaccctgcgactgccacatccacaactggaatgggctcctgtccccagatctaccccatgggcccaccctcagtaaatgtcaccctctgcagtagtggctgaggaggaccccaggggtttggaaggacccacttgngtgacccattgcctnttcaagtccaaacctgcccatctaagaagctgacctgcacttgntgctctagga

SEQ ID NO: 5089 - DNA, 794 bp, Homo sapiens
  misc_feature (689)..(689): "n" may be a, t, c, g, other or unknown
  misc_feature (747)..(747): "n" may be a, t, c, g, other or unknown
  misc_feature (751)..(751): "n" may be a, t, c, g, other or unknown
  misc_feature (792)..(792): "n" may be a, t, c, g, other or unknown
agctctcactcctttcgtgagaaatgtattctcttccagatatatcccttcctcagcttttctgctctggcctatctttgaaccaccatgtaagctggtgagccagttcttcatggaaactgcatggtacccatcagtcttggctaaaaatgtctgttgacaaagatgaaagtcctgccatcccctcaagacttagccttatccgcaggtagaaggcctagagaggctatgtcccaaatcctacctcaatgctgaattagactgggctcttgcttgtgctagtctgtattgaagagattagtcaagttaagaaccaaagggttcttaaactgctaggagaagaatagtggtcaaaagaatggcttctttctatcttgaactgaagccctggacttcacgggcctctgatgaggattccgcttgcagccctaagagggtctacctatggagatgacccttagctgtgtgatgcatgcacctgaccttctcctctcccctgtcatccgtccccattcctgccctgttccctgttggtatgtgtctgagtttatttcactggtaaatcgtgcgtttgcctgtctttcgcagatatctccatgtctcctcaacaaactggagctaagtagtggggagcagaccaaagccctgaaccagttagagagggtactactctttaagaacctcaaggnctctctccctctctttccttccctttttatttctttcaatggttattttttatatatnacanctgggtcccatttccattggggtaaaagccccaacttactnct

SEQ ID NO: 5090 - DNA, 738 bp, Homo sapiens
  misc_feature (676)..(676): "n" may be a, t, c, g, other or unknown
  misc_feature (702)..(702): "n" may be a, t, c, g, other or unknown
  misc_feature (723)..(723): "n" may be a, t, c, g, other or unknown
aagtcttttttcctaataatccattttccacattgccatgagggtaaagggttccaatcaaaaccaccattaaactgcatagtttctagtcttccctcagccctgatgctaattatgatagtttgcatagacataacttaaacttgtgattctccctccttccagagctttttgtagccctttttccccccaaaattagttttgttcaaaatcaagcattgggcccagccattaagataagacctaataagtgagagatacagttcccaagagtttacagatccaggtgttcacatggtggtggccagtctaccgtttatcttgtcaaggttgttactgctaatttggtgtcactttggtcttgggcagcggtggtgggcgacgtatctaatgagcgtgccattgacttctccatgtttgtctgtgtacgaggggtgcaggttgtctgtaatccactaaagtgtcagccacacccagctttagtaactcgctaatcgcacaccctgggtatatcagccaggggctgctacagttaatggtacacagttgatggtacacaggctgaaaatgataacgaatcaagaccctactacatttccaaagccgaaaagccatgagggttacaatttaaatgagcttgggaaggaacgctcccgaagacgtcttcagcctgaanggtcagagccgctggaagcctgctgnctctgggctttctcggctcantgcagcaaggcaccg

SEQ ID NO: 5091 - DNA, 778 bp, Homo sapiens
  misc_feature (698)..(698): "n" may be a, t, c, g, other or unknown
  misc_feature (704)..(704): "n" may be a, t, c, g, other or unknown
  misc_feature (756)..(756): "n" may be a, t, c, g, other or unknown
ttgacactgttaactcctccctgtttcttgaaatcctctcttctcttgttttctctgtggcaccctttgctcctgtgttcctcctttttctatgcatccttaggggttcccgggggttttgttcatggtcctcttctttctcaatctgttttcgagaaacttgcaaaagtacaactcagcctaacatgcctgtccaagttccagacctgaagagctccagcctcctcgtggatccctttatctcaacacgtctggaacagaactcatgtgggtctctttctgggcttcttatctcagtaaatttcaccaccaaatatccagttctgaagcaagaaacactgggcttcacttttgattcctccctccctctcaatgcccaaatctcatgggtctaaagtcccatcaatgttatcacttgcatatttttgaaatccacaccattgcaacccatttccaaagtagactactgattgccaggggctgggggctaggcggggcaggggaaatagggaaatgcttccattttcattctcaccaatgctgtcctggaccactgcaaagccttctgactggtcttcatgctctcctcacctcctctttctaaagcatcctgcttaacattgctaaaataatttgtctaaatggaaatttgaccgtattactccctagcttaaaatactccgggggttccgcattgnctcctncatagcatggccataaagtcctgcaagaatcacatgctttggcctttgcctncttcagcgtgtcattccttgca

SEQ ID NO: 5092 - DNA, 837 bp, Homo sapiens
  misc_feature (715)..(715): "n" may be a, t, c, g, other or unknown
  misc_feature (791)..(791): "n" may be a, t, c, g, other or unknown
  misc_feature (807)..(807): "n" may be a, t, c, g, other or unknown
  misc_feature (823)..(823): "n" may be a, t, c, g, other or unknown
tctaatatgctggtgctatggtttggatatttgtcccctctaaacctcatgttgaaatttgatccccatgttggaggtgggcctcatggaaggtatttgggtcatgggggtagatacctcatgaatagattaatgccttcccttagtggtgagggagtttttcttctattaattcccacaagagctggttgttaagcagagcctggcactttcccctttttcactgtttcttcttctctcaccatgagagaagccttttgccttccaccatggatggaagcaacctgaagctttcaccagaagtcaagcagatgccagtgccatgcttcttgtacagcctgcagaaccatgagttaaataaacctcttttctttataaactacccagtctcagttattcttttatagcaatacaaaacagactaagacagctgggtttctatagaagtagtcaactgtagatttgtagcaacagcctttacaagcaaagcaaggtgcagaaattagtagttaactaggtcatttccagaaatatatctggcactattacataaggattaatagtactgcctctggaactagttctgggtttgcattccagctttgcctctcactagcagtgtgaacttctgggtaagtttcctctttgtgcctcaattttctcacctgtaaaaagggaatgacagtaatagtcccaacctcatagaattattacncaaattaatatttggaatatgcctggcatgggcaaggccaggtggctcacgccctgtaatcccacacttttgggangcttaagtgggaaggnaaaccttgagggcccngaagggcaaagaac

SEQ ID NO: 5093 - DNA, 713 bp, Homo sapiens
  misc_feature (615)..(615): "n" may be a, t, c, g, other or unknown
  misc_feature (655)..(655): "n" may be a, t, c, g, other or unknown
  misc_feature (666)..(666): "n" may be a, t, c, g, other or unknown
agttgcagcggccggggaagatggtggaggacggcgcggaggagctggaggatctggtgcacttctccgtgtctgagttgcctagtcgcggctacggcgtcatgggtgagatcctgcggcagggcaagctgtgcgacgtgaccctcaagattggggaccacaaattcagtgcccaccggattgtcttagcagcctcgatcccgtatttccatgctatgtttacaaatgacatgatggagtgcaagcaggatgagattgtaatgcaaggaatggacccaagtgccctggaggctctgatcaactttgcctacaacggcaaccttgccattgaccagcaaaatgtccagtcattgctgatgggggcgagcttcctgcagctgcagagcatcaaagacgcctgctgcacattccttcgagaacggcttcacccaaaaaaactgcctgggtgtgcgccagtttgctgagacaatgatgtgtgctgtgctgtacgacgctgccaacagcttcatccaccagcactttgtggaggtgtccatgtcagaagagttcctggccctgcccttggaagacgtgcttgagctggtgtctcgggatgagctgaatgtcaaatctgangagcaggtctttgaagctgcattggcctgggtcagatacnaccgggagcanaggggtccctactgcctgagctgctgtccaatatccggcttgcccct

SEQ ID NO: 5094 - DNA, 797 bp, Homo sapiens
  misc_feature (744)..(745): "n" may be a, t, c, g, other or unknown
  misc_feature (794)..(794): "n" may be a, t, c, g, other or unknown
agttttaaaactgggggatccttcttgtgtggaagcagagctcctggactcagagccgaccctgcttcttcctagctgtggagcaagtaggggagcttttccaaacctcaatttcttcatctagagaatgagggtaatggtgatttaaggactattatcttcttcctctgtgcctgatacttgtgattctcacaggaaccctcaaaggctgagagtatcccacccacttcacagatgaagcaaactgaggcccagagaagggaaattacttgcccaagatcacccagcaagtaagaaacagagctggagatgagctcaggccagcacggaaccacgcaaactccttctgtaggctttgtaaaggattgatgagaaaagcagatggttaagagctctacaacttctgtgaggtaaagaatatctgcagggctggacgtggcggctcttgcctgtaatcttagcactttgggaggccaaagtgggtggattgcttgagtctatgagttcaagaccagcctgggcaacatggtaaaactctgtctctctaaaaaaaaaaaaaaaaaaaaattagctgagtgtggtgttgtgtgcttgtagtcccagctactttggaggctgaagcggaaggatcccttggcccaggaggcagaggttgcagtgagctgagattgtgccctgcacttcagcttgggtgacagagccagaccttatttaaaaaaaaaaagggttatcttgggaattccnngattacccatgccatttttgaaagcctgcttgttgcccaacttggacanctt

SEQ ID NO: 5095 - DNA, 775 bp, Homo sapiens
  misc_feature (715)..(715): "n" may be a, t, c, g, other or unknown
  misc_feature (728)..(728): "n" may be a, t, c, g, other or unknown
  misc_feature (751)..(751): "n" may be a, t, c, g, other or unknown
atcaagaacatggagaaggacaatgggctggatgtgttcaagttgggtgaccgcgacttcctgcgcagcatggagaacgccatccgctttggcaagccatgtctcctggagaacgtgggcgaggagctagacccagccctggagccagtgctgctcaagcagacgtacaagcagcagggaagcacggtgctgaagctgggggacacggtgatcccctaccatgaggacttcaggatgtacatcaccaccaagctgcccaacccacactacacgcccgagatctccaccaaactcaccctcatcaacttcaccctgtcgcccagtggcctagaggaccagctactgggccaggtagtggcagaggagcgacccgacctggaggaggccaagaaccagctgattatcagtaatgccaagatgcgccaggagctgaaggacattgaggaccagatcctgtaccggctcagctcctccgagggcaaccctgtagatgacatggaactcatcaaggtgctggaagcctccaagatgaaggctgctgagatccaggccaaagtcaggattgcagagcagacggagaaggacatcgacctgacgcgcatggagtacatacccgtggccatccgcacccagatcctcttcttctgtgtgtccgacctggccaacgtggaccccatgtaccagtactcccttgagtggggttctcaacatcttnctcttgggcattngtcaaacttcaatgaggaagccngaccaaccttggaagaaagccgca

SEQ ID NO: 5096 - DNA, 734 bp, Homo sapiens
  misc_feature (660)..(660): "n" may be a, t, c, g, other or unknown
  misc_feature (699)..(699): "n" may be a, t, c, g, other or unknown
  misc_feature (733)..(733): "n" may be a, t, c, g, other or unknown
ttaggtcccctcaatggggacacagctataactgtccagctctgtgcatcagaggaggctgagcggcaccagaaggatataaccagaattctccagcaacatgaggaggaaaagaagaaatgggcacaacaggtggagaaggaaagggagctagagcttcgagacagactggatgagcagcaaagggtcctggaaggaaagaatgaagaggccctgcaagtcctccgggcctcatatgaacaggagaaagaagcgcttacccactctttccgggaggccagttctacccagcaggagaccatagacagactgacctcacagctggaggctttccaggccaaaatgaagagggtggaggagtccattctgagccgaaactataagaaacatatccaggattatgggagccccagccagttctgggagcaggagctggagagcttacactttgtcatcgagatgaagaatgagcgtattcatgagctggacaggcggctgatcctcatggaaacagtgaaagagaaaaatctgatattggaggaaaaaattacgaccctgcaacaggaaaatgaggacctccatgtccgaagccgcaaccaggtggtcctgtcaaggcagctgtcagaagacctgcttctcacgcgtgaggccctggagaangaggtgcagctgcggcgacagctccagcaggagaaggangactgttgtaccgggtccttggggccaatgcctng

SEQ ID NO: 5097 - DNA, 700 bp, Homo sapiens
  misc_feature (666)..(666): "n" may be a, t, c, g, other or unknown
  misc_feature (676)..(676): "n" may be a, t, c, g, other or unknown
  misc_feature (689)..(689): "n" may be a, t, c, g, other or unknown
ttggcaggctgaggcaagcggatctcttgagcttaggagttagagaccagcctgggtaacacagcagaaccctgtctcttaaaaaaaaaaaaaatctagttccaacgaatgcctcctcagtgaatctttttcacagtatccctggaaagtgaatatttagtctcttgaataactccagcgtcttgaaatctgctatcttcaccctcatgaaaacgtcaagagtttgaggaccacctctttctacatctactagcctaaacattttccctccctttagctagtcctccttgacatagtgtggactcctggcatcaccttgtctactctctggatgagctcaaatgtgtcagtgtgcctgtctaactttggtccagatgtggcctcaccaagccaaatagaactaaaccattacctgcttgcttgtagacctggaccgtaggagagcccaaggcccccttaggttttctttactacttatgctactgactcatatcaaactgacacctaagctggacatggtggtgcacacttgtagtcttagctgctctagaggctgaggcagaaggtagcttgagctccaagagtttgaaaccggcctgggcaacatagcaagatgcccatctgacaactgacaaaaacctacaggtggtattttcggggtatggnagggttggtntgatttcataatnataaataatgc

SEQ ID NO: 5098 - DNA, 761 bp, Homo sapiens
  misc_feature (535)..(535): "n" may be a, t, c, g, other or unknown
  misc_feature (537)..(537): "n" may be a, t, c, g, other or unknown
  misc_feature (732)..(732): "n" may be a, t, c, g, other or unknown
  misc_feature (739)..(739): "n" may be a, t, c, g, other or unknown
  misc_feature (753)..(753): "n" may be a, t, c, g, other or unknown
tcttttggtgctgtctcaaatgggtcaaccattcacttcctccttatgccctccatgcttttggctgaggataatgaagcctttgtttggagtaccaggttacactccaataaatgattacatttcccagccaccccaccctaccaatttcattgtgttggctgttcttttccgactaaggcaatacctaggaaaacgcttgaagcagcaattgttactgcaattttctgtgagctgagcctggtgttctaggtggcctagaaataatggtgtcatttgtgacacctcgagtgagggcaggagagtaaatactttggctaggagaagagtgatttattctttatcagaattctaggtgggggagggagaatctgtgaatgcataaagttttcttcatttttaaattttgtctcagtctttattgcttaggttagtggtccttgaacttgtcccctgaaagagcccagttctctatattctttttcttctcttgggttcttaattccccatatagtggaaattccttctttgctgntntggtatgggtaggtctgggggccagctgggcttggacaagccatttcctgctgcagcccagagcagcctgctgttccaccttgctctaaacagtcctgaaattgcccagtcctctgcttttgggaaatcatccccttcttccattctttgtctaccacttaacttaaggctttcttaccttttatttcgactgancccggtnggcttttaccaagnctctttgg

SEQ ID NO: 5099 - DNA, 761 bp, Homo sapiens
  misc_feature (587)..(587): "n" may be a, t, c, g, other or unknown
  misc_feature (686)..(686): "n" may be a, t, c, g, other or unknown
  misc_feature (735)..(735): "n" may be a, t, c, g, other or unknown
  misc_feature (757)..(757): "n" may be a, t, c, g, other or unknown
taccaaagcaagttaagtatagttcctcaaatacctatgacacagcccttcctctaagcctccttccacggaggggccctctctcttccacctgtagaagcccaccccagataccaccaccttcttgaaacctttttgcctctccagcccttggtgcaggctgtcctctcttaggctgtgtgagggctgttttgtgtccatctcctctctcctgctggtttgctctcagcatctgagtcatctttgaatctctggcccttgatggtagcctggcccgagccaatgttctgtgagtgtctgtggaaaggataggtctttcagccccagtgatagaagcccacctctaacgtgcttaagtaagaagggcaagtacctaatcatgtaactgggaatgatgggatgtggggcttcacacagcactgagggagagctgcaggaaccaggccccaggacagaactgtggctgtcctgcccctgttttttctctctctctggttttttttttttttttttttttgggacagagtcttgctctctcacccgggctggagtgcagtggtgcgatttcagttcactgcaacctccgncccgtcccgagctcaggcgctcaagcgatcctcatacctcagcctcccaaataattgggaccacaggcatgtacaacaaagcccagctattttatttgnattttttagtagaaatggggctcatcatgttgccagctggctaaaactnctgactgaatggccgccacctnggct

SEQ ID NO: 5100 - DNA, 838 bp, Homo sapiens
  misc_feature (714)..(714): "n" may be a, t, c, g, other or unknown
  misc_feature (781)..(781): "n" may be a, t, c, g, other or unknown
  misc_feature (797)..(797): "n" may be a, t, c, g, other or unknown
  misc_feature (829)..(829): "n" may be a, t, c, g, other or unknown
ggtgaaggcctcccccgtcgccgcgcggcttcccggagccgactgcagactccctcagcccggtgttccccgcgtccggacgccgaggtcgcggcttcgcagaaactcgggcccctccatccgccctcagaaaagggagcgatgttgatctcaggaagcacaaagggaccttcctagctctgactgaaccacggagctcaccctggacagtatcactccgtggaggaagactgtgagactgtggctggaagccagattgtagccacacatccgcccctgccctaccccagagccctggagcagcaactggctgcagatcacagacacagtgaggatatgagtgtaggggtgagcacctcagcccctctttccccaacctcgggcacaagcgtgggcatgtctaccttctccatcatggactatgtggtgttcgtcctgctgctggttctctctcttgccattgggctctaccatgcttgtcgtggctggggccggcatactgttggtgagctgctgatggcggaccgcaaaatgggctgccttccggtggcactgtccctgctggccaccttccagtcagccgtggccatcctgggtgtgccgtcagagatctaccgatttgggacccaatattggttcctgggctgctgctactttctggggctgctgatacctgcacacatcttcatccccgttttctaccggctgcatctnaccagtgcctatgagtacctggagcttcgattcaataaaactgtgcgagtgtgtggaactgtgaccntcatctttcaaatggngatctacatgggagttgggctctatgctccgnattggctct

SEQ ID NO: 5101 - DNA, 326 bp, Homo sapiens
  misc_feature (288)..(288): "n" may be a, t, c, g, other or unknown
  misc_feature (311)..(311): "n" may be a, t, c, g, other or unknown
  misc_feature (321)..(321): "n" may be a, t, c, g, other or unknown
agaaaagaaaaggacaggagggacaggggaaaggagggtcgggggaggaggatcagggaggaggaaggtcaggtgaaaggaggatcaggaaggatgagggtcagtggggagcggagttggtgggaggaaggtgggggaagtgtcagcagagaggagggtcgggataaaggtagggggagatgagggttgcagggatgagggcaggggactatgagagtcgggggcattagggtcagggggatgaggatgggggtaaatgaaggttgtgggggaggagagtcacagaanaaggtcagtgggaggactatcangggagacctntctct

SEQ ID NO: 5102 - DNA, 767 bp, Homo sapiens
  misc_feature (762)..(762): "n" may be a, t, c, g, other or unknown
  misc_feature (766)..(767): "n" may be a, t, c, g, other or unknown
gcaggtagaggaatgaattagatcccgaacctgaaatctggatgaaatcacacaaacatccacaggacaaacaaggtagcctgcattaagttgcctgtaagacttctgactctgaattcttccctgggagctcaatagcaggtgttggggctgctccaagaatggagagggcagtatgcatacctcagtcctaccaaccaagaactgaagtaggaagctgtgtccatgctcctgacatgagaaagtcttgccaatagaaaaagagggggaaagacagagactagctcaggtcacaggggtgagtgtgggcaacttacccagggaggacataaatgccaggttctccagcgtcacatcacgttacaggcatctctgagcctcactaaggagattccattcctcctgggtaaatttcacagccacgtcttcaaaagtcactgtgccctgttatgatgttgacagatgaaaccacaaaccacccctatgctgaggtatcacaatccatctctcccacacatctactctcgcacatcctcctctcaaggtcctcaaacataggagaaactaggcccactggtcatggggtacagccaccaacaacaatagttagttgaacaaataggtatctgtgcggtggctgtgatataagagtccaccccctcctgacaggcacttcccctagtatggccgaggtcatggaaagcccaatgtggcaccttcagcacagcagagataccctctctgaacgcacctcattctttntttnn

SEQ ID NO: 5103 - DNA, 884 bp, Homo sapiens
  misc_feature (714)..(714): "n" may be a, t, c, g, other or unknown
  misc_feature (735)..(735): "n" may be a, t, c, g, other or unknown
  misc_feature (799)..(799): "n" may be a, t, c, g, other or unknown
  misc_feature (836)..(836): "n" may be a, t, c, g, other or unknown
  misc_feature (873)..(873): "n" may be a, t, c, g, other or unknown
atatcaacactctgccccctcttcctccagccctgtctccccagactcctctgtcagccccccacaagccactcccattcattctccctcaggggaagagccctgccaagatggccctgcagcttctctcaagatcctgctggcttgggctgggggaatacagactgaggtcaccctgggcccctgggctagtggtttctagcacttacggaggatttccctccatcgcgtgagttcttgggagaaggtggcaagatgctcaacttactgggcacaagagtcactgaatcggtgccctctagggttctttctcttttgccatcttatccatattttaaggggtttctctttttctggggaagaggagagtgagcgaattgggggtcaagggggaggtgataagagaaagaaaagaggacagggctgggcacagtggctcacatctgtagtctcagcgcttcgggaggccaaggcaggaggatcacttgagctcaggaattccagaccagcctgggcaacatagtgagacccccatctctactaaaagaaaaaaaaaagaagaaaagaggacaggaagaaatgaaacaatccctttagtcataattcagttttaaattggggtctgtcccccgcagcccgtcattttatcctttgtaaaatatcttggcctctactttctgaccccctttttggtcattttctgggatgaatgancgcaggacagagaatttctgntggtaggaataatgacagtattctccgagctctcctgcagtgataggtcctagtcctaacgcangaaatttgaagctcgattagatcaaaagaaatggggnccaaatggtttttgactcatgctcgatattgacaccntgggtgggtgt

SEQ ID NO: 5104 - DNA, 849 bp, Homo sapiens
  misc_feature (661)..(661): "n" may be a, t, c, g, other or unknown
  misc_feature (824)..(824): "n" may be a, t, c, g, other or unknown
  misc_feature (827)..(827): "n" may be a, t, c, g, other or unknown
  misc_feature (834)..(834): "n" may be a, t, c, g, other or unknown
ggaatcttttttttctgagcagtaggtctcattagtgagcttagaatactccataaaccatgctgtaaacagatgcactgtcatccaggctttgttattccatttccaacacaggcagagtggatttagcatcattcttaagggtcctagaatttttggaatgggaaatgaccattggcttcacgtcaccagctgcattcgcccctaacgagagtcagcctgtccttttcaatctttgaagccaggcattgacttctctctagctgcgaaagtcctagatgccatcttcttccaatagaaagcggttttatccacactgaaaatctttttagagtagccaccttagtcaaccatcttagctagatctggagaacttgcttcagtttctcctgtaaagcttgcagcttcaccttgcacttctatgtgtggaagtgacttctttccttaaacctcatgaaccaacctctgctggttttctgcttttcttccgcagcttccctcacccgtctcggccttcatagaattgaggacggttaggaccttgctgtggattcagctttggttgccagtcacaccagccgtcgggcaaagttgttgttttaatctctccagaccactcagacttcttccacatcagcaataaggctgcttgctatcctgncatttgtgtgttcactggagcagctcgtttaatttccttctggggcttttcctttgcattgccgctcaaccgtttgatgcaagaagcccggctttctgactggagttttagacatgccgttccttacaaagcttaatcatttctagcttttgggtttaaaggnganaaaatgnggggattcctccttt

SEQ ID NO: 5105 - DNA, 806 bp, Homo sapiens
  misc_feature (724)..(724): "n" may be a, t, c, g, other or unknown
  misc_feature (744)..(744): "n" may be a, t, c, g, other or unknown
  misc_feature (749)..(749): "n" may be a, t, c, g, other or unknown
ttcccccagcactgctccagcccctctgtcaccccgcccttcggctcccctcgcagtggtggcctcctcctttccagagacgtcccccgagagacacgaagcagcagtgagagcctcatcttctctgggaaccagggcagggggcaccagcgccctctgcccccctcagagggtctctcccctcgacccccaaattcccccagcatctcaatcccttgcatggggagcaaggcctcgagcccccatggtttgggctccccgctggtggcttctccaagactggagaagcggctgggaggcctggccccacagcggggcagcaggatctctgtgctgtcagccagcccagtgtctgatgtcagctatatgtttggaagcagccagtccctcctgcactccagcaactccagccatcagtcatcttccagatccttggaaagtccagccaactcttcctccagcctccacagccttggctcagtgtccctgtgtacaagacccagtgacttccaggctcccagaaaccccaccctaaccatgggccaacccagaacaccccactctccaccactggccaaagaacatgccagcatctgccccccatccatcaccaactccatggtggacatacccattgtgctgatcaacggctgcccagaaccagggtcttctccaccccagcggaccccaggacaccagaactccgttcaacctggactgcttntccagcaacccctgtccagncacangagcaacagcagaccctgtcagatgccccctttacacatgcccaaaaggtcccgcca

SEQ ID NO: 5106 - DNA, 814 bp, Homo sapiens
  misc_feature (751)..(751): "n" may be a, t, c, g, other or unknown
  misc_feature (756)..(756): "n" may be a, t, c, g, other or unknown
  misc_feature (812)..(812): "n" may be a, t, c, g, other or unknown
acaactatttggccctgagaagtcgttctggacgctccatcatcaatgggaactgggcaattgatcgaccaggaaaatacgagggcggagggaccatgttcacctacaagcgtccaaatgagatttcgagcactgccggagagtcctttttggcggaaggtcccaccaacgagatcttggatgtctacatgatacaccagcagccaaacccaggcgtgcactacgagtacgtgatcatggggaccaacgccatcagcccccaggtgccaccccacaggagaccaggggaacccttcaatggccagatggtgacagaaggcaggagccaggaggagggagaacagaaagggaggaacgaggagaaggaagacttgcgtggggaggcccctgagatgttcacctcagaatcggcacagaccttcccagtcaggcatccagacagattttctccccatcgaccggacaacttggtgccaccagcaccgcagcccccacggcgcagccgggatcacaactggaagcagcttgggacaacagaatgttccacgacctgtgggaaaggatcgcagtaccctattttccgctgtgtgcacagaagcactcatgaagaggctcctgagagttactgtgactccagcatgaagccgacccccgaggaggagccctgcaacatcttcccttgccagccttctgggacatcggggagtggtctgagtgcagcaagacctgtggcctgggcatgcagcaccgncaggntcttgtgcccgccaggtgtacgccaacccgcagcctgacggtgcagcccttaccgntg

SEQ ID NO: 5107 - DNA, 776 bp, Homo sapiens
  misc_feature (682)..(682): "n" may be a, t, c, g, other or unknown
  misc_feature (707)..(707): "n" may be a, t, c, g, other or unknown
  misc_feature (733)..(733): "n" may be a, t, c, g, other or unknown
tttttgtgctggtttttcctcatcttcatggatttatctacctttggtctttgatgttggtaaccttcggatggggtttctgtgtggattttttttttttttatgttgatgctattcctttctgtttgttagttttccttctaacagtcaggcccctctgctgcaggtctgttggagtttgctggaggtccactccagaccctgttttcctgggtatcaccagcggagactgcagaacggcaaagattgctgcttgttccttcttctggaatttttgtcccagaggggcacccacaagatgccagccggagctctcctgtatgaagtgtctgtcgacccctgctgggaggtgtctcccagtcaggaggcatgggggtcagggacacacttgaggaggcagtctgtccctcagcagagcttgagcactatgctgggagatccgctgctctcttcagagtcagcaggcaggaatgtttaagtctgctgaagctgtgcccacagctgccccttctaccaggtgctctgtctgtcccagggagatgggagttttatctataagcccctgactggggctactgcctttctttcagagataccctgcccagagaggaggaatctagagaggcagtctggctacagcagctttgcggagctgcagtggactccacccagtttgaacttnctggtggctttggttacactgtgangtgaaaaccacctactcaagcctcantaatggcaaacgccccttcccccaccaagcttaaagtgtccca

SEQ ID NO: 5108 - DNA, 833 bp, Homo sapiens
  misc_feature (693)..(693): "n" may be a, t, c, g, other or unknown
  misc_feature (801)..(801): "n" may be a, t, c, g, other or unknown
  misc_feature (833)..(833): "n" may be a, t, c, g, other or unknown
taaaagttcggaaaatttgcagcctgacaatgtgatagaaaagaaaaattcccattttctgaggagaaattcaagctggctgcagaaatttgcatgagtaacaggagccaaatgctaattcccaagacaatggggaaaatgtctccagggcatgtcagaggtctttatggcaacccctcccatcacaggtccagagatatcaggaaaaaatggttttgttggccaggcccggggtcctcatgctgtgtgcagcctagggacttggtgccctgcatcccagccactcccaaccatgactgacaggaggcaaggtagagcttgggctgtagcttcggggagtgcaagctccaagccttgacagcttccatgtggtgttgagactgcgagtgcacagaagtcaagaactggggtttggaaaccttcgcctagattaaagaggatgtgcggaaatgcctggatggccaggcagaagtttgctgcaggggcagggccctcatggagatcctctgccagggcagtgcagaagggaaatgtggggtcagagaccccacacacagtccctactggggcaccacctagtggagctgtgagaagaggtcctccagaccccagaatggtagatccaccgacagcttgcaccgtgtacctggaaaagttgcagacactcaatgccagcccatgaaagcagctganagggagctgtaccctgcaaaggtacaggggcagactgccaagacatgggaacccaccttcattgatgactgatgtagatgtgagcagagaatatttgacttaaattgntgccctgatttgcttatggctgacctttgttn

SEQ ID NO: 5109 - DNA, 838 bp, Homo sapiens
  misc_feature (727)..(727): "n" may be a, t, c, g, other or unknown
  misc_feature (823)..(823): "n" may be a, t, c, g, other or unknown
  misc_feature (828)..(828): "n" may be a, t, c, g, other or unknown
  misc_feature (834)..(834): "n" may be a, t, c, g, other or unknown
cgtatataaacttggtcatgtggcttggttttaaaacagttcccttgactgtaattggcaggtgatagcatctacagcatggaaacctgcacctagtaggtgcttaagcatagcttcccttcccatgaagaggaggagacagggcacccactggccgagaggacaggagagatttagttcattaaggctgctcctctgtgctgcccccaccccgcttctgtggcaggcctggacctgatctgcaaacagacttgcctgcctgtgcctgtccctgaggcccatctccagagcagagggagggcatgcaccgctgggctgggtggtggtcctggctgagcctcctgctctcaccttggaccatttgaggtgcgtgctcagagagtcctttgttgccatgagacacttgccagccatgtcccgggatccacctgttctgccacaagaactgtgtctgtgacatgctgtcatcattggtagagactcctggcactagaacagatgacagaaacccacttataccagcgtaagcaaaacaaggaagtcctgtgttacaaatctgaaaagtgtagtagatttggtgctgggcagggctagatccaggtacttaaacaggttggccaggcatttgtctgtctgtttctgagctctcctctcctatgtcgacatctttggtctcaagcagcttttcctgtgtgttgggagaaccatcccagctgctctaacttanctacctcagtagagagagaaggtcgcttttctaatagttctgcggaagtccaaagctggttcttcatagtcagaactgggtcacgcaccccatgtntgaanaatgcnggta

SEQ ID NO: 5110 - DNA, 849 bp, Homo sapiens
  misc_feature (677)..(677): "n" may be a, t, c, g, other or unknown
  misc_feature (680)..(680): "n" may be a, t, c, g, other or unknown
  misc_feature (721)..(721): "n" may be a, t, c, g, other or unknown
  misc_feature (837)..(837): "n" may be a, t, c, g, other or unknown
ttttaacctggaggatgcagtgaaagaaacttcctcagtaaagcagccatgggaccacaccaccaccaccacaaccaataggccaggaaccaccagagctccggcaaaacctccaggtagtggattggacttggctgatgctttggatgatcaagatgatggccgcaggaaaccgggtataggaggaagagagagatgaaaccatgtaaccaccacgaccaagaggccagtaaccaccagagctccagtaaatactttaggaaatgattttgacttggctgatgccctggatgatcgaaatgatcgagatgatggccgcaggaaaccaattgctggaggaggaggtttttcggacaaggatcttgaagacatagtagggggtggagaatacaaacctgacaagggtaaaggtgatggccggtacggcagcaatgacgaccctggatctggcatggtggcagagcctggcaccattgccggggtggccagcgccctggccatggcactcatcggtgccgtctccagctacatctcctaccagcagaagaagttctgcttcagcattcagcagggtctcaacgcagactacgtgaagggagagaacctggaagccgtggtatgtgaggaaccccaagtgaaatactccacgttgcacacgcagtctgcagagccgccgncgncgccgaaccagcccggatctgagggccctgtccagctgcangcatgcacaatggtgccaccgcttgtcacccggttccccacccttcatttggacccgcactgctgtgctgtctggcctcggtcttgtggctgagttccggtgacttggtgttgtanttggtcttgcct

SEQ ID NO: 5111 - DNA, 868 bp, Homo sapiens
  misc_feature (806)..(806): "n" may be a, t, c, g, other or unknown
  misc_feature (847)..(847): "n" may be a, t, c, g, other or unknown
  misc_feature (860)..(860): "n" may be a, t, c, g, other or unknown
tccgaaagatggacagccttgcatggatcatgatagacaaactggagagggtgttggacctcaggaatatactttactcaaattgaaggtgcttgagccatacccatctaaattaagtggcctgaaaggtaaaaatattttcttggtggctgctactctcagacctgagaccatgtttgggcagacaaattgttgggttcgtcctgatatgaagtacattggatttgagacggtgaatggtgatatattcatctgtacccaaaaagcagccaggaatatgtcataccagggctttaccaaagacaatggcgtggtgcctgttgttaaggaattaatgggggaggaaattcttggtgcatcactttctgcacctttaacatcatacaaggtgatctatgttctcccaatgctaactattaaggaggataaaggcactggtgtggttacaagtgttccttccgactcccctgatgatattgctgccctcagagacttgaagaaaaagcaagccttacgagcaaaatatggaattagagatgacatggtcttgccatttgagccggtgccagtcattgaaatcccaggttttggaaatctttctgctgtaaccatttgtgatgagttgaaaattcagagccagaatgaccgggaaaaacttgcagaagcaaaggagaagatatatctaaaaggattttatgaagggtatcatgttggtggatggatttaaaggacagaaggttcaagatgtaaagaagactattcagaaaaagatgattgacgctggagatcacttattacatggaccngagaaacaagtgatgtccaggtcgtcagatgaatgtgttgnggctctgtgtgancagtggtc

SEQ ID NO: 5112 - DNA, 778 bp, Homo sapiens
  misc_feature (620)..(620): "n" may be a, t, c, g, other or unknown
  misc_feature (737)..(737): "n" may be a, t, c, g, other or unknown
  misc_feature (746)..(746): "n" may be a, t, c, g, other or unknown
  misc_feature (753)..(753): "n" may be a, t, c, g, other or unknown
acttgacttacaagcagcggccgtacaccttcctcttgcctagaaaatgccactcctcggggaaagtccagaatggcaagatgtccaccaacggtgtgtccaacggtgtgtccaatggcctgcaccttcatagcaatggcttccggctgccggagagtaggggacatgtcagcccccaagtagagctaccaccatacctggagcgtgtgaaacagcaagccaatgaggcttttgcctgccagcagtggacccaagccattcagctttacagcaaggctgtgcagagggcccctcacaatgccatgctttatggaaaccgagcagcagcctacatgaagcgcaagtgggatggtgaccactatgatgccctgagggactgcctcaaggccatctccctaaacccatgccacctgaaggcacactttcgcctggcccgctgcctctttgagctcaagtatgtggctgaagccctggagtgcctggacgacttcaaagggaaatttccggagcaggcccacagcagcgcttgtgatgcattgggccgcgccatcacagctgccctcttctctaaaaatgatggtgaggagaagaagggacctggtggcggcgccccagtccgncttcgcagcacgagccgcaaggactccatctcagaggatgaaatggcgctgcgggagcgaaactacgactatcaagtttccgctactgggggccactggcaacaccaccacggatantcaaaaganggccaanttcttttggcaagcaaacgcttcaa

SEQ ID NO: 5113 - DNA, 783 bp, Homo sapiens
  misc_feature (708)..(708): "n" may be a, t, c, g, other or unknown
  misc_feature (741)..(741): "n" may be a, t, c, g, other or unknown
  misc_feature (767)..(767): "n" may be a, t, c, g, other or unknown
ttttggggtcacagattagtgttcttgtatacttgtcaatgggctcttaaggcactcctcaaagaatctgccagtgatttaagcatcatttgaataagagcacagggtgagcagaagaacaacttgtgtggccaggagcaggggtagggagtgcagagaagagagagcctgggtgcaatgtcatcaagaaggccttccctatagtcccagctacttgggaggctgaggtgggagggtcgcttaagcccaggagttctaggctgcggtgccccttgattgtgcctgtgaatagccagaatagccagtgcgctccagcctgggcaacatagcaagaccctgtctctagtttaaaaaaaaaaaagggaaaaggctaggcatggtgcctcatgcctataaccccagcactttgggaggctgaggcaggaaaattgcttgagcccaggagtttgagaccagcctgagcaacatggtgaaactccatctctacaaaacatataaaaaaaaatagccaggtgtggtggtgcatgcctgtggtccccagctactcaggaggctgaggtgggaggatcgcttgagtccaggaggtcaaggctgcagtgagctgtgattgtgccactgtactccagcctgggctacagaggtgagactctgtctcaaaaaaaacaaaaaggcttcccagcagcactggtgccacaactgacatggcanctgcagctagaacaagttgagtttcttggctgntcttatcaaaattgggtcaaaattgngtgtgggccacaccat

SEQ ID NO: 5114 - DNA, 868 bp, Homo sapiens
  misc_feature (843)..(843): "n" may be a, t, c, g, other or unknown
  misc_feature (852)..(852): "n" may be a, t, c, g, other or unknown
  misc_feature (866)..(866): "n" may be a, t, c, g, other or unknown
tactttcagagaaaatctttccaaagaccctcttaagaaagtcctatttctaaaattttcatgtttgattcattcagatatgattaaagcccatcatggtctgtgtaaatgtttctgcattcttagaaactttctccagttttttataactagtccattggatgtaggaatgccaaagagtctaactaaaaagagagggaatcttggctacaatggaatacctaggggtatgggaagtaagtaatagtctttatttccatatgaatattgctggctttacacctgcaataattaggcaagagactcaaagatagttttttcagaaaagttttctttcaaggatctagcaagtctgagctatgcttccaactttactgccctccatcatccggcatctttgactcatccaccaccttctgtccctttcattctcattccccatgtgtcagctccccagaaaggacatatcttgtacaccttgccacagcactcatcacctgcttctggactgcctgagcaagagtgatacttcctgttctaaagacaggagtgaggatgggggatactcagactttgggatgtgccagaactgtggctagtccccaggaagcagaacttggaggactcataaaggagccaatcccacctccatcctaaacaaggccagttcataaaccccatctggcacagcagcagtctcaggaagctaaattggggagtgccctgtatctcactccctaaactggggagtgagagcatcctgatggtccgctcttgggctgtgacagtggtccctgcaaatgaaaaaggggagctggactgatgtcaggagatgtggcttancgtcattantagagcagggcctntc

SEQ ID NO: 5115 - DNA, 821 bp, Homo sapiens
  misc_feature (735)..(735): "n" may be a, t, c, g, other or unknown
  misc_feature (751)..(751): "n" may be a, t, c, g, other or unknown
  misc_feature (795)..(795): "n" may be a, t, c, g, other or unknown
agcggtggcctagcccttcaggcctggccgctacaataaggctggcgaactcgcagcgcttgaatacccgtggcctaaccgtccactcggaagaccggtcccgctcgggaggctctgcagtcgcgcctggggtcagggccgggggcgaatgtggctcgcgttctaggcctccctgggttggaaaaagactatgttagcaagtgtcacgccatgcttttgccaactttccaattaaaggttgacattcctgcataagcatttctctgtgaaaatgtccttgcctcttacagaggagcagaggaaaaagattgaagagaatcgacaaaaggctctggcccgcagagctgagaagttattggcagaacagcatcagaggactagctcgggcacctccattgctggcaacccattccaggccaagcaaggcccatcccaaaatttcccaagggagtcttgtaagccagtgagccatggtgtcattttcaagcaacagaatctcagtagctcatctaatgctgaccaaagacctcatgattcccacagttttcaggcaaagggaatatggaaaaagccagaagaaatgcccacagcctgcccaggccacagtccacgtagtcaaatgcctctcactggaatctctcctcccttggcacaaagtccttcagaggtccctaaacaacagctcttgaattatgagttaggtcaaggtcatgctcaggcttaacctgagatcanggttcacaccctttgnttaacccaactcataagccttttgggccaaacccaaagaagttnccaagaagacaccagcttaattcctt

SEQ ID NO: 5116 - DNA, 812 bp, Homo sapiens
  misc_feature (759)..(759): "n" may be a, t, c, g, other or unknown
  misc_feature (772)..(772): "n" may be a, t, c, g, other or unknown
  misc_feature (806)..(806): "n" may be a, t, c, g, other or unknown
ctaggtttgagtcctggttctaccacttacaacccagtgaggatccccagagggatcagtcccattgtacatatgagacaacaggttcagaggtgctaagtgtctcagccaaggtcacagagctagttaggggcagagctgggatttgcacataggccaactgtctaaagacccagtgggctcatatgccactatgggcagaacttttccggaacagcccccagttttcctggcagccgtaaagggaacctgtagttttctaggggcaatatcagttgttacaagatctgaatctttgatgtctaatgagctgggcctagcctcagtagaggactcctgctccacattccaccaagggaaacaggcattacggcccctacccaggacagctggtgccaggaatccaactttccccataggacaatggacctcccttaaacttgtctatttatttatttattttaaatagagacagagtctcactcactatgttgcccaggctagtcctgaacttctgggctcaagcagtcctcctgcctcagcctcccaaagtgacaggattacaggggtcagccactgtgcctggcccctccttaaacttcttttccagagactctagaatctttctttttggtggaaaacaataaaagatttggcactccacatggaatgcggcaggagactgcagtgggtgaactcccccggtcccttccagccctgggccctgctgcctgcctgcctgcacaccaccctgtaagnatctgctgtccangggacctttgacaggccctcagccatagtcagtnttcctg

SEQ ID NO: 5117 - DNA, 467 bp, Homo sapiens
  misc_feature (417)..(417): "n" may be a, t, c, g, other or unknown
  misc_feature (425)..(425): "n" may be a, t, c, g, other or unknown
  misc_feature (451)..(451): "n" may be a, t, c, g, other or unknown
cttggcttcagccctgatctgttcagagccctcagcacggtactggaggagaggccttgggccgcatcgtggcatattgtggctttggggagaaagaaaagcagatagtgcaatggaaagagcgtggacttgagagtcagacttgccttcaactcctagctctaccacttaccacctaggtgacctcaagccactttctcagcctttctgagactctgtatcctcatgtgtatcctagagtttgtctgatagggctatagtgagaattaattgaattaagtgtagtgagaattaagccaggtctggagaggcctggctactggtgagtgaggtaactgagatcaggtatggagaggactggctcctggtgagtgagttaattgagatgaggtatggagggacctgtctcctggtgantgagttanttgaaatgaggtgtggagggacctgnctcctggtgagtgagc

SEQ ID NO: 5118 - DNA, 854 bp, Homo sapiens
  misc_feature (705)..(705): "n" may be a, t, c, g, other or unknown
  misc_feature (812)..(812): "n" may be a, t, c, g, other or unknown
  misc_feature (835)..(835): "n" may be a, t, c, g, other or unknown
  misc_feature (854)..(854): "n" may be a, t, c, g, other or unknown
gtcagtgataaaatctccttgaatcgctctctcccagatatccggcacccaaactgcaacagcaagcgctacctggagacacttcccaacacaagcatcattatccccttccacaacgagggctggtcctccctcctccgcaccgtccacagtgtgctcaatcgctcgcctccagagctggtcgccgagattgtactggtcgacgacttcagtgatcgagaccgcattgctcggaaccgcaagaccattgtgtgcccgatgattgatgtaattgaccatgacgactttcggtacgagacacaggcaggggatgccatgcggggagcctttgactgggagatgtactacaagcggatcccgatccctccagaactgcagaaagctgaccccagcgacccatttgagtctcccgtgatggccggtggactgttcgccgtggatcggaagtggttctgggaactcggcgggtatgacccaggcttggagatctggggaggggagcagtatgaaatctccttcaaggtgtggatgtgtgggggccgcatggaggacatcccctgctccagggtgggccatatctacaggaagtatgtgccctacaaggtcccggccggagtcagcctggcccggaaccttaagcgggtggccgaagtgtggatggatgagtacgcagagtacatttaccagcgccggcctgaataccgncacctctccgctggggatgtcgcagtccagaaaaagcttccgcagcttccttaactgcaagaagtttcaagtggttttattgacgaaagatagcctggggaccttgncccaaatttttacccaacccgtnggaaccccccgggttgcan

SEQ ID NO: 5119 - DNA, 827 bp, Homo sapiens
  misc_feature (706)..(706): "n" may be a, t, c, g, other or unknown
  misc_feature (809)..(809): "n" may be a, t, c, g, other or unknown
  misc_feature (816)..(816): "n" may be a, t, c, g, other or unknown
  misc_feature (822)..(822): "n" may be a, t, c, g, other or unknown
aacggactttttcagagagggaactatctctttgacacaaaacatacgttttaattaataatacttgctctggtaatatagtttcttatgagttgctacatattttctagaatagattttccctaaaatatgcctttgtaagatttttttaataaaatcaagtttagaaataatttgaacttttttgggggatagagtttcagtcttgtcgcccaggctggaatgcaatggcacgatctcagctcaccgcaacctccacctcctgggttcaagtgatttttctgcttcagcctcccgagtagctgggattacaggcacgcaccaccacacctgtctaattttggtgtttttagtagaaacggggtttcaccatgttggccaggctgatttctagttcctgacctccggtgatccacctgcatcagcctcccaaagtgttgggattataggcgtgagctaccgtgcccggcctgaacttttttttttttggagacggagtctccctctgtcgcccaggctggagtgcagtggtgctatcctggctcactgcaacttccgcttcctgggttcaagcgattctcctgcctcagcctccggagtagctgggattacaggcactccgccgccatgcccagctaatttttgtatttttagtagagacgggatttcaccatgttggccaggctggtcttgaactcctgacctnaagtgttctgccaccttggcctccaaagtgctgggatgcagatgtgagccacgtcatcttggcctggcctgaacttttagaattcaatatttaacccattttnccctaanttattncctta

SEQ ID NO: 5120 - DNA, 451 bp, Homo sapiens
  misc_feature (73)..(73): "n" may be a, t, c, g, other or unknown
  misc_feature (143)..(143): "n" may be a, t, c, g, other or unknown
  misc_feature (151)..(151): "n" may be a, t, c, g, other or unknown
  misc_feature (374)..(374): "n" may be a, t, c, g, other or unknown
  misc_feature (429)..(429): "n" may be a, t, c, g, other or unknown
  misc_feature (443)..(443): "n" may be a, t, c, g, other or unknown
taatgaggaatcaaaggaagaagaagaaagagagaggaaggaaggttggaaggaaggaaggagggaaaattanaaggggaaaccatgattgctggtgaggttttgagcacattttcctgcaggctggtatgggtgagaggttnggtcttgnttgcaaatcttctgaaggccattccagaggagcagttgccactgccccatcccctgagctctgagcatgggggttcccctggggagactcctggtgagaggatgccgatttctgctgatctgtcactgggtaccgaggactgggtgtgtttaaggcagacagccaggtgaggatcccagctactggggcctgctgtcatctcctgggagtacccgggggtcangagcctaggggactcttgcacttcacatccagccatgctaattacactttttggnaaaggaaacagctnggagcagt

SEQ ID NO: 5121 - DNA, 817 bp, Homo sapiens
  misc_feature (739)..(739): "n" may be a, t, c, g, other or unknown
  misc_feature (753)..(753): "n" may be a, t, c, g, other or unknown
  misc_feature (807)..(807): "n" may be a, t, c, g, other or unknown
tcatggcagatgacttggattcaggacacaatggtttggtccactgctggctgagccaagagctgggccacttcaggctgaaaagaactaatggcaacacatacatgttgctaaccaatgccacactggacagagagcagtggcccaaatataccctcactctgttagcccaagaccaaggactccagcccttatcagtcaagaaacagctcagcattcagatcagtgacatcaacgacaatgcacctgtgtttgagaaaagcaggtatgaagtctccacgcgggaaaacaacttaccctctcttcacctcattaccatcaaggctcatgatgcagacttgggcattaatggaaaagtctcataccgcatccaggactccccagttgctcacttagtagctattgactccaacacaggagaggtcactgctcagaggtcactgaactatgaagagatggccggctttgagttccaggtgatcgcagaggacagcgggcaacccatgcttgcatccagtgtctctgtgtgggtcagcctcttggatgccaatgataatgccccagaggtggtccagccggtgctcagcgatggaaaagccagcctctccgtgcttgtgaatgccttcacaggccacctgctggtgcccatcgagactcccaatggcttgggcccagcgggcactgacacaccttcactggccactcacagcttccgggcattccttttgacaaccattgnggcaagagatgcanactcgggggccaaatgggaaagcccctttacaagattccgaatgggaaatgaancccccttttt

SEQ ID NO: 5122 - DNA, 831 bp, Homo sapiens
  misc_feature (623)..(623): "n" may be a, t, c, g, other or unknown
  misc_feature (679)..(679): "n" may be a, t, c, g, other or unknown
  misc_feature (786)..(786): "n" may be a, t, c, g, other or unknown
  misc_feature (792)..(792): "n" may be a, t, c, g, other or unknown
  misc_feature (830)..(830): "n" may be a, t, c, g, other or unknown
atcaagttgctataaacatcgaaaggggcgtgactttggtgagggggtcaataccaggactgaggactcctgttttatcccatttcaagactttggctgggtgaggtggctaattcctataatcccagcattttgggaggccgaggtggaaggatcacttgagtccaggagttcaagaccagcctgggcaacatagcaagctcttgtctctagaaattatttaaaacttagctgggcatggtggtgtgcacctgtggtctcagctacttgggaggctgaactggaaggctgcttgagcctgagaagtcgaggctgcagtcagccgaaattgtgccactggactccagcctgggcaacagagtgagaccaccatctcaaaaaaaaaaaaaaaaaaaaaaaagaagactttggcacattaaaaaatatagcaatatttcatcttgctaaaacaattatttcacactaacctattcagaacaaaaatagagaagaggtaaaaatagtttctaagtagccaaatagatgacagacagtcatgcattccagatggaatgggcagtcctgcctgcagcgtcactctggttttgcttaaatctcatacacttcacttgtaagtatcttgnatctttattaggatctcactttacctcattttacttacaagtttaactagattggnatcctagttactattttccatagcaaaggagaagaggaaggaagtttgttaaaggaagtcacacttgacaaaacccaaattttaaaaagtgaccccttgacaaaccncccganggaagggaaaaacccaaaccaaaatttaaaaccaaccng

SEQ ID NO: 5123 - DNA, 820 bp, Homo sapiens
  misc_feature (742)..(742): "n" may be a, t, c, g, other or unknown
  misc_feature (759)..(759): "n" may be a, t, c, g, other or unknown
  misc_feature (789)..(789): "n" may be a, t, c, g, other or unknown
aggcttaagctgtcctcccacctcggcctcctgagtagctgtgacaagaggcgtgtaccaccatgcttggctagtttttgtattttttatagagatggtgtttcgccatattgcccaggctggccttgaacttgttagctcaagtgatcctgcctcagcctcccaaagtgttgggattctagggatgagccaccatgcccagctggattcctttttttagtttgtttgtttttaaagacagttttccttttttgcccaggctggagtgaaatggcatgatcttggctcactgcaacctccacctcgtgggttcaagcgattctcctgcctcagcttcctgagtagctgggattacaggtgcctgccaccatgcccggctaatttttgtatttttagtagagatggggttttgccatgttggccaggctggtctggaactcctgacctcatgtgatccacctgcctcagcttcccaaagtgctgggattacaggcgtgagccaccgtgcctggcctccagctgaattcctttgctttaagtgtatatatgtctccaggggctgtcttcatttcagcaggctgtcctggcctgaaggaggcacccctaggctccttcctctgaacattcctagcctaggagctgggtggtaggaggtagcatgctgggaagcaggcacattcctatacctggggtcccaagagagccattgggtgggtgggcagacagacatacagtttaatanggccagggagaaactgncttccttctttgctcttttaggcctgcggncctggggcactgacattattaaggagcatga

SEQ ID NO: 5124 - DNA, 610 bp, Homo sapiens
  misc_feature (582)..(582): "n" may be a, t, c, g, other or unknown
  misc_feature (592)..(592): "n" may be a, t, c, g, other or unknown
  misc_feature (603)..(603): "n" may be a, t, c, g, other or unknown
ataacagccctatgaggcagggatagatagggttaccatgtaccttggggagaggtgtgttgaggaaagagtatgggcaaatatttatataagctctcagaagaagttggattaaccagctattcccactctcttccagcacaacatgcctttctggaggatcacaaaccatggagacctagtatcccttcaccaggctttagagcttgattttctctaagaactggaatgaggagccttccccttgagctccttttcactcctgaagggagctggagactggaaccaactgagaactttctccgtctgtctctctctgtgtctctgtctctatctctctctctttctctctttctctctctccctctctccctccctcccttcctctctccctccctctctgcctctctctctctctctctctgtctttatccatggaatgctggcgagaacacaatcagaaccaacagctgcaatttttgctaagagtgagctgcagccccgtgttcatctccatacagaagcagggacagttggatagagagaacaatggactcactgaagctacagtgcttttaattnttctgtgttntggttttggtnttttgtt

SEQ ID NO: 5125 - DNA, 736 bp, Homo sapiens
  misc_feature (674)..(674): "n" may be a, t, c, g, other or unknown
  misc_feature (718)..(718): "n" may be a, t, c, g, other or unknown
  misc_feature (727)..(727): "n" may be a, t, c, g, other or unknown
ctgcgacgactggagttccatgccagcaagatcgatgagctgtatgaggcatactgtgtccagcggcgtctccgggatggtgcctacaacatggtccgtgcctacaccactgggtccccgggaagccgagaggcccgggacagcctggcagaggccactcgggggcatcgcgagtacacggagagcatgtgtctgctggagagcgagctggaggcacagctgggcgagtttcatctccgaatgaaagggctggctggcttcgccaggctgtgtgtaggcgatcagtatgagatctgcatgaaatatgggcgtcagcgctggaaactacggggccgaattgagggtagtggaaagcaggtgtgggacagttaagaaaccatctttctccctctactcacggaatttctgtctattaaggtgacagaactgaagggcctggccaaccatgtggttgtgggcagtgtctcctgtgagaccaaggacctgtttgccgccctgccccaggttgtggctgtggatatcaatgaccttggtaccatcaagctcagcctggaagtcacatggagccccttcgacaaggatgaccagccctcagctgcttcttctgtcaacaaggccttcacagtcaccaagcgcttcttcacctatagccagagcccaccggacacaccctnacttcgggaacaggctttctataacatgcttgcgacggcaggangaactgganaatgggaca

SEQ ID NO: 5126 - DNA, 623 bp, Homo sapiens
  misc_feature (570)..(570): "n" may be a, t, c, g, other or unknown
  misc_feature (576)..(576): "n" may be a, t, c, g, other or unknown
  misc_feature (593)..(593): "n" may be a, t, c, g, other or unknown
tcccagtccacttctctagggccagtagcagacaccagccagtatgccgaggaaccagggcttctccgagcccgaatactcggccgagtactcagccgagtactccgtcagcctgccctccgaccctgaccgcggggtgggccggacccatgaaatctcggtccggaactcgggctcctgcctgtgcctgcctcgcttcatgcggctgactttcgtgccggagtccttggagaacctctaccagacctacttcaaaaggcagcgccacgagaccctgctggtgctggtggtctttgcagccctctttgactgctacgtggtggtcatgtgtgctgtggtcttctccagcgacaagctggctcccctcgccgtggctggaattggactggtgttggacatcatcctcttcgtgctctgcaaaaaggggctgctcccggaccgggtcacccgcagagtgctgccctacgtgctgtggctgctcataaccgcccagatcttctcctacctgggcctgaacttcgcgcgtgcccacgcggctagtgacacggtgggctggcaggtcttctttgncttctncttcttcatcacgctgnccctcagcctcagccccatcgtgatcatct

SEQ ID NO: 5127 - DNA, 735 bp, Homo sapiens
  misc_feature (649)..(649): "n" may be a, t, c, g, other or unknown
  misc_feature (678)..(678): "n" may be a, t, c, g, other or unknown
  misc_feature (695)..(695): "n" may be a, t, c, g, other or unknown
agctaccgaaacgctctgaaaatcgagccggaggagccgatcactttctgtgaggaagccttcgtgtcccactaccgctccggagccatgaggcagttcctgcagaacgccacacagctgcagctcttcatgcagtttattgatggtcgattagatcttctcaattccggcgaaggtttcagtgatgtttttgaagaggaaatcaacatgggcgagtacgctggcagtgacaaactgtaccatcagtggctctccactgtccggaaaggaagtggagcaattctgaatactgtaaagaccaaagcaaatccggccatgaagactgtctacaagttcgcaaaagatcatgcaaaaatgggaataaaagaggtgaaaaaccgcttgaagcaaaaggacattgccgagaatggctgcgcccccaccccagaagagcagctgccaaagactgcaccgtccccactggtggaggccaaggaccccaagctccgagaagaccggcggccaatcacagtccactttggacaggtgcgcccacctcgtccacatgttgttaagagaccaaagagcaacatcgcagtggaaggccggaggacgtctgtgcccgagccctgagcaaaacaccattgcaacaccagctacacttcacatnctacagaaaagcattacccattttgcggncaagttcccgacaagangctggacctcttcatcacattgacttacgccgttgctttt

SEQ ID NO: 5128 - DNA, 840 bp, Homo sapiens
  misc_feature (781)..(781): "n" may be a, t, c, g, other or unknown
  misc_feature (800)..(800): "n" may be a, t, c, g, other or unknown
  misc_feature (821)..(821): "n" may be a, t, c, g, other or unknown
cctaaattcctttatattgccttagtattaaggataatattatcttgcataatcttcctctgaaatatttattacttcccttcttaatgatttggaaaagcagtgtattttagataatatcttcttacagatactccaagtatcacagctaaattaattagtgaacaaaaagatgacaaagaaaagaaaaaccatgaagagaaagaaaaagttaaagcggaaaatggatttcaagacaattacagtgttgttgttgcctctgggctgaagtctcaatctaaacgtgctgtgtcagctacaccacctcgcccaccatccaggagggggaggacaatacctgataaaataggaagtacttcaggagcagaggctgccaacaaaataattactgtcccagtgtttcacctgtttcacaaactcttggcaggccagccattgccagctgaaatgacacttgcccagcttttaactctcctatatgaccgaaaacttcctcagggttaccgctcaatagatctgactgttaaattgggatcaagagttataacagaccccagtctatcaaaaacagattcttataaaagactacaccctgaaaaagatcatggagacttacttgctagctgtccagaagatgaggctctcactccaggtgatgaatgcatggatgggatactggatgaatctttgcttgaaacctgtccaattcagtcaccattacaagtttttgcagaaatgggtggactggctcttattgctgaaagactacccatgctatatncagaagtaattcaacaggngagtgctccagttgtaacatntaccccttcaggaaaagcc

SEQ ID NO: 5129 - DNA, 545 bp, Homo sapiens
  misc_feature (468)..(468): "n" may be a, t, c, g, other or unknown
  misc_feature (500)..(500): "n" may be a, t, c, g, other or unknown
  misc_feature (528)..(528): "n" may be a, t, c, g, other or unknown
tgtccatgtatactattgattagctcccacttgcaaatgagaacacgtggtatttgattttcttttctgggttagttcacttaggatgatggtctccagctccatgttgctgcaaaggacatgatttcgttctttttttatggctgcctcttttgtttcttaaatctgaattttcatgtggcttcaatgctagtctggcctaccctttccttcccaaagtcaccaccaactcactcccacccccacctcatgcagtgcacccctcacagcccccacccttggcagtgacatttggatttccagggcctttcctgatcctttagagacatcctctcccggccaagtcctgcaagggagacttgagtcagaggttcgatgggctggggtgaggtgggccacacaattaccacacccactcccaggcctattcccggtgatctaagcacacagaagcaggctggtacttanggaagaaggcaccagtgtatgccagagcttangatggcgtgaggaccaaatggaaagatngatattgaaagtggttg

SEQ ID NO: 5130 - DNA, 770 bp, Homo sapiens
  misc_feature (703)..(703): "n" may be a, t, c, g, other or unknown
  misc_feature (752)..(752): "n" may be a, t, c, g, other or unknown
  misc_feature (758)..(758): "n" may be a, t, c, g, other or unknown
aattcttgtattggaatcctttatactttggcgcaggacagcacttctcctgatgtgcagacctgggcattacattctctatcattgatcattgattctgctggcccactctattatgtgcatgtggaacctaccctttctcttattataatgttgttgttaaatgtgcctcctactcatgctgaagttcaccaaagccttggtcgctgtttgaatgcccttattaccacgttaggtccagagctacaaggtaacagtacttcaatttctaccttaaggacttcctgtctactgggttgtgcagtaatgcaagataacccagactgccttgttcaagctcaggccatctcttgccttcagcagcttcatatgtttgctccacgacatgtcaacttgtctagcctggttagctgcctctgtgtgaatctttgtagcccctacttgttactgagaagagcagtactggcttgcttacgtcagcttgtacaaagagaagcagctgaagtttcagaacatgctgttatgcttgctaaggatagcagagaagagttgactccagatgctaacatcagagaagttggccttgagggggcattgttgatctcactagacaaggagacagatgagagattatgccatgatatcaaagagactttaaattatatgcttacatctatggcagtggaaaaactcttcctgtggntaaagctttgtaaagatgtacttgctgcatcagctgattttacagctgnacttgngtggatccatgc

SEQ ID NO: 5131 - DNA, 435 bp, Homo sapiens
  misc_feature (371)..(371): "n" may be a, t, c, g, other or unknown
  misc_feature (413)..(413): "n" may be a, t, c, g, other or unknown
  misc_feature (423)..(423): "n" may be a, t, c, g, other or unknown
caaaaaattgggtgggcatgatggcactggcctgtagtctgagctcgggaggatcacttgagcccggggggttgaggctacagtgagccgtgattgcaccattgcactccagcccgggcaacagagcaagaccctgtctcaaaaaacaagaaaaatttggttctttttctttttttttgagacataatctcactctgttgcctaggctggagtgtaatggcacgatctcggctcactgcaacctccacctcctgggtttaagtgattctcctgcctcagcctcctgagtagctgggattacaggtacatgccaccatgcccagctaatttttgtatttttagtagagatggggtttcaccatgttggtcangctggtctcgaactcctgacctcgtgatccgcccacctcggnctctcaaagngctgggattaca

SEQ ID NO: 5132 - DNA, 835 bp, Homo sapiens
  misc_feature (726)..(726): "n" may be a, t, c, g, other or unknown
  misc_feature (743)..(743): "n" may be a, t, c, g, other or unknown
  misc_feature (759)..(759): "n" may be a, t, c, g, other or unknown
  misc_feature (834)..(834): "n" may be a, t, c, g, other or unknown
tctgctaaagaagtgggcaggtatttttagaaacatacttgattctgacaactacagtcctataccagtaacaagtgaagagatgtacaaaaaggtggtaggacaattcccatttcaagatatagaactggaaaagcaaccatttccaaaaaagtttcctttctctgaatttgtgccaaaagtttacaaccaaattaaagaatttatctacgcttgtctgaagttttcagaagatcttcatctaagctcaactgaagttgatgacatgattcggaaatcaacaaacctgttgctaaccaggactctgagcaactctctgcagaatgtaattaaaaggaagaatattgggcttactgagcttgttcagattattatcaatacaacacatttggagaaatcctgtaagtacttggaagaatttatcaccaacatcacaaatgtgcttccagagacagttcacactaccaagctctatggcaccacaacttttaaggatgctagacatgcagctgaagaagagatttatactaacttaaaccagaagattgaccagttcctacagctggcagactatgactggatgaccggagatttgggcaacaaagctagtgattacctggtagacctcattgcctttcttcgtagcacctttgctgtattcacacaccttcctggaaaggtggcccagacagcgtgtatgtcagcttgcaagcatttagccacatncttgatgcaacttttgntggaagctgaagtgcngcagctcaccttgggagcattacacagttcaacttggacgtcagaaaatgtgaacagtttgcagatccggcccgng

SEQ ID NO: 5133 - DNA, 664 bp, Homo sapiens
  misc_feature (662)..(664): "n" may be a, t, c, g, other or unknown
aaggacagagatttccatctgttttgttcaatgctatgtctctagggcctagaacagagcctgggaccccataaggtgctgaataaataggggttcagtgaattcattaattacatttctgcaagatggggtggcatgttgtcatcttcagccattttttttttcttcgattgcattatatttggaacaggcacgatggtgacatctgtaatcccaactacttgggaggctgaggctagaggattccttgagcccaggaattcaaggctaaagtgtgctatgatcacacctgtgaatagcactgcactccagcctgggcaacacataagacctctctctttaaatgtaaaaaaaaaagtctgcgtgcagtggcttatgcctgtaatcccagcactttgggaggctgaggcaggtggatcacctgaggtcaggagttcaagaccagcctggcgaacacagtgaaaccctgtctctactacaaatataaaaaaaagaaaaaacattagctggatgtggtggtgcatgcctgtaatcccagctacttgggaggctgaggcaggagaatcgcttgaatctgggaggcagaggttgcagtgagccaagatcgcaccattgcactccagcctgggtgatagaatgagactctgtctcaaaaaaaaaannn

SEQ ID NO: 5134 - DNA, 716 bp, Homo sapiens
  misc_feature (580)..(580): "n" may be a, t, c, g, other or unknown
  misc_feature (659)..(659): "n" may be a, t, c, g, other or unknown
  misc_feature (694)..(694): "n" may be a, t, c, g, other or unknown
  misc_feature (705)..(705): "n" may be a, t, c, g, other or unknown
cccctccttggccccaagcctggccagttgtgctaaaagtagcgctgacccaatcatggtctgtccagaggccaggactattttgactctgtcctcaggattcatgtggtctgaggcgtgtacgagctggactgctcccatgaccactcagatgtggtgccaggaatgttctggctgacacacctgtccccagagctgctaaacgctgctacttaccccacagccccacagcgtgcgtcctgagatactggttccaggagggataggtggtgaggacttgcaccaggcggtggttaggggctttctatcctcattcataagagagcaaccagccagttttgggtggcattgcttctcatagctccccactggactggagcatgttaatctgtgtatttgtgacattcactcagaatgggggcccgacaacagaaggctccttagagacagcaaacattattcttccaaggaaggctggaggatttccttctctggaggccgttaatagtggaagaacttttcatcctactggcttaaatataagtcccagtgcaaggctcctgcctggaacatcatcctnccctctactagattggctttgccattcttcaaagtccaactgaaatccccttcctaaggacttccttcttttgcaccanaggggtacttacacagactttccattaatagagangctttttcctnctttttttctt

SEQ ID NO: 5135 - DNA, 575 bp, Homo sapiens
  misc_feature (573)..(575): "n" may be a, t, c, g, other or unknown
gtcttgctctttaattgtaactttacagtgttttcgctcacgagccgaaacttcaagttccctttttgccagcagagtttgggttgcggtcgctggaaaacttgatgcgcactgaaatctcttggtctgtgcatgaggaagagtggatccagcttcttgtcttggctctctgttctctgaatgccttgtactttttgcttttctatcttaccattttttttttgtttgctttcactgtgaataatatattttcatctttccttaccttgctttttttgctgacagaaaatggtgaatgcacaccgtgggtgcagtgagggcttggtgcctgctacgtgggcagcttccacctgtggctggcttattgggctacttggagccacagaatcattgctgagctccgatgtgccagagagtcccaggccatatgggtcactcttctagcttgggaatcttaagtccagctttttggatgtcatcctccctggagggggagctcatgaaagtccaaggttcgagtcttcctccccagagggctaccctgtaatgccgtgggggggtgtgtgtgggggnnn

SEQ ID NO: 5136 - DNA, 776 bp, Homo sapiens
  misc_feature (686)..(686): "n" may be a, t, c, g, other or unknown
  misc_feature (719)..(719): "n" may be a, t, c, g, other or unknown
  misc_feature (757)..(757): "n" may be a, t, c, g, other or unknown
acttccaagttctggtacaaggcggatatttcaagagaacaagccatcgccatgttgaaggacaaggagccgggctcattcattgttcgagacagccattccttccgaggggcttatggcctggccatgaaggtggccacgcccccaccttcagtcctgcagctgaacaagaaagctggagatttggccaatgaactcgtccggcactttttgatcgagtgtaccccgaagggagtgcggttgaaagggtgctcgaatgaaccatatttcgggagcctgacggccttggtgtgccagcattccatcacgcccttggccttgccgtgcaagctgcttatcccagagagagatccattggaggaaatagcagaaagttctccccagacggcagccaattcagcagctgagctgttgaagcagggggcagcctgcaacgtgtggtacttgaactctgtggagatggagtccctcaccggccaccaggcgatccagaaggccctgagcatcaccctggtccaggagcctccacctgtgtccacagttgtgcacttcaaggtgtcagcccagggcatcaccctgacagacaatcagaggaagctcttcttccggaggcattaccccgtgaacagtgtgattttctgtgccttggacccacaagacaggaagtggatcaaagatggcccttncttaaaagtctttggatttgtggcccggaacanggcagtgccacggataatgtgtgccactgtttgcagancatgaccctgtgcaacctg

SEQ ID NO: 5137 - DNA, 791 bp, Homo sapiens
  misc_feature (668)..(668): "n" may be a, t, c, g, other or unknown
  misc_feature (709)..(709): "n" may be a, t, c, g, other or unknown
  misc_feature (751)..(751): "n" may be a, t, c, g, other or unknown
  misc_feature (786)..(786): "n" may be a, t, c, g, other or unknown
aacatggtcatttttattaaagtaaaaaataagatagtagtagctctggacatttggaaatgtgtatgtttgtttacaccctgtgaaaagtagacatggtctgcaaaagagccaatctcctaaatatatttctttctctagaaatgttattttgggacaaatgaatgaatccctgttgggaaaaaagaacctgctgcatatcatccatattttattttattattattttttttgagatggagtctcactctgtctcccaggctggagtggagtggcacaatctcggctcactgcaacttctgcctcctgggttcaagcgattctgctgcctcagcatgcccagtagctgggattacaggtgcatgccaccacacccggctaatttttgtattttagtagagacggggtttcactatgttggccatgctggtcttgaactcctgacctcaagtgatccacccgcctcggcttctggaattacaggtgtgagccaccgcacccagccatgatccatactttaatgtgggttctggattgcttcctaggccacgtgtttaacatgccacatgatgatgcaaagcagtgtgccagccttaatggtgtgaaccaggattcccacatgatggcgtcaatgctttccaacctggaccacagccagccttggtctncttgcagtgcctacatgattacatcatttctggataatggncatggggaatgtttgatggacaagcctcagaatccatacagntcccaggcgaactcctggcaccttgtacgatgccnaccgg

SEQ ID NO: 5138 - DNA, 757 bp, Homo sapiens
  misc_feature (579)..(579): "n" may be a, t, c, g, other or unknown
  misc_feature (741)..(741): "n" may be a, t, c, g, other or unknown
  misc_feature (746)..(746): "n" may be a, t, c, g, other or unknown
  misc_feature (752)..(752): "n" may be a, t, c, g, other or unknown
tatccatggaggaaatcatacctcctaaaacctgtggcactgaatggggttcagccattactccacaaattcctatagcaagggctaaaccctgccagtccccaggcaacacctcggtcctccctgttaaaaagcctaatggagaatatcagtttgtgtaggacttgaagggggtaatgaggcagtcattcccatccacccaacactggtcccaagcttgtctgtgctcagatacctggagatgctcagtttttcactctactacacttcaaggatgctttcttttgtgtagccctctccacccagaatccctgtatctttttgctttgaatggagaaatctctgatacccagaaagccacatagtacacatggactgtgcttccccagggcttctgggaaggcccccacctttttgggaatgcagggagctaagcctacagaatgggacttttattacaatatgtggatgacttgttcattgtcagccaaacatggcaggattcagattttaatatcattaaaaccttgaatttcctggctgaacggtgatacaaggtcagccccatccaaggcccanatttctttacagaagttccgatatctggggttcattctgaccccaggagcccgaacactagttgtggactggaaaaagcaatcacttcattgctggtcccacaaacaaaaaggcagccccagggtttcttgggaatggtgggcttctgtagtatttggattncaaantatggnctgac

SEQ ID NO: 5139 - DNA, 821 bp, Homo sapiens
  misc_feature (774)..(774): "n" may be a, t, c, g, other or unknown
  misc_feature (810)..(810): "n" may be a, t, c, g, other or unknown
  misc_feature (812)..(812): "n" may be a, t, c, g, other or unknown
acaactttgtgttttgttgttgtgttgtgttttctctttcagtttcaaagaagctggcaccgattccacccaaggtcccctttggccagccgggggctatggcagaccagtccgctggccagccgtccccagtcagcctgtcccccacccagcccagcaccccgtcaccctatggactgagctaccctcaggggtactccttggcctcgggccagctctccccagctgcagctcctcccctggcctctccttctgtctttacaagcactttgagcaaatcgcggcccactcctaagccgcgacagagacctactctgccgcctcctcagcctcccacagtaaacctctcggcctctagtccacagtccacggaggcccccatgctagatggcatgtcccctggggaaagcatgtctacaggtaaccaagccacaggctccctcacttttttttatgaactttagtgaaatgtgcctaggggatggattgctagagttactgccagtgaacacattcctgcgtgctttgggatgactgggctggcaccaggggtagctcataagatctccttagaagcccaccaatggaaagcaaccctggaatccatgtgtcccacacaggggcttcttatgggatctctctcggtctaagcccaccagcctggggttctggttttgctcttattatcgggggttgaagacactgagtcatttggagtggggcctcaggagaagctggaactgggtatgatcacaaaacagcatcaaaacttangtatttcctggatagaagcccaacaactgacaggtntnaatgcttat

SEQ ID NO: 5140 - DNA, 840 bp, Homo sapiens
  misc_feature (677)..(677): "n" may be a, t, c, g, other or unknown
  misc_feature (695)..(695): "n" may be a, t, c, g, other or unknown
  misc_feature (719)..(719): "n" may be a, t, c, g, other or unknown
atatctggcagctggctatgccatcattgccgaaaacaaactcctataatccaatgctctctcatcacatatcacctcacaacaagcggaactatttgccctaaccaagaccctcactctagcaaagggaaagagggtcaacatttacaccaattccaaatatgcataccatgtcctacagtctcacactgtaatctggcaggaaaggggtttttctaactacaaaaagaaccgccataataaatggcaaactcatacacaagccgctggaggcagctaaactaccactagaggccgtcattatccattgcaagggacaccaaaaggctacagatgccataaccaagggaaacttcttagcagattcggcagcctggcaggcagcccttagaacactattgttattgcccattttccctagcatacacccaagaagaaaaaggtgccttgctggctccagggctgttcataacgaaagctgaatttacttagactacaaactcatcctacccaagacccaaaaactttctgttctcacccacatccataaccaattccatgcgggttatctcccgttgctccaatttctaaaaacctgtatacattcccttaccatggccatcagcttggaccgcctcactaaaggttgctctgcctgcagtcagacttcccctcangggcccttagaccacctncttttccctccttcaggcccaaangccagttgccgggacaggattggcaaattgacttcactcatacgttcccccataaagaaagtctgatatctcttacgatggtagatccttttcaggtggatagaaccttcttactccatga

SEQ ID NO: 5141 - DNA, 749 bp, Homo sapiens
  misc_feature (670)..(670): "n" may be a, t, c, g, other or unknown
  misc_feature (691)..(691): "n" may be a, t, c, g, other or unknown
  misc_feature (705)..(705): "n" may be a, t, c, g, other or unknown
gcgggaagggtcctgggccccgggcggcggtcgccaggtctcagggccgggggtacccgagtctcgtttcctctcagtccatccacccttcatggggccagagccctctctccagaatctgagcagcaatgccgtttgctgaagacaagacctataagtatatctgccgcaatttcagcaatttttgcaatgtggatgttgtagagattctgccttacctgccctgcctcacagcaagagaccaggatcgactgcgggccacctgcacactctcagggaaccgggacaccctctggcatctcttcaatacccttcagcggcggcccggctgggtggagtacttcattgcggcactgaggggctgtgagctagttgatctcgcggacgaagtggcctctgtctaccagagctaccagcctcggacctcggaccgtcccccagacccactggagccaccgtcacttcctgctgagaggccagggccccccacacctgctgcggcccacagcatcccctacaacagctgcagagagaaggagccaagttaccccatgcctgtccaggagacccaggcgccagagtccccaggagagaattcagagcaagccctgcagacgctcagccccagagccatcccaaggaatccagatggtggccccctggagtcctnctctgacctggcagccctcanccctctgacttcancgggcatcaggagcaggacacagaactgggcagtacccacacaa

SEQ ID NO: 5142 - DNA, 845 bp, Homo sapiens
  misc_feature (816)..(816): "n" may be a, t, c, g, other or unknown
  misc_feature (833)..(833): "n" may be a, t, c, g, other or unknown
  misc_feature (844)..(844): "n" may be a, t, c, g, other or unknown
gaggctgaggcaggagaattgcttgaacctaggaggcagaggttgcagtgagccgagaccgtgcctttgcactccagcctgggcgacagagtgagactccatctcaaaaacaaaaaaccttggcaaaatactgcaaataaccccattaaaaagagggcaaaagaagccgggcacggtggctcacacctgtaatcccagcactttgggaggccaaggtgggtggatcacgaggtcaggagattgagaccatcctggctaacacggtgaaaccccatctctactaaaaatacaaaaaattagctggatgtggtggcggacgtctatagtcccagctacttgggaggctgaggcaggagaatggtgtgaacccaggaggcagagggtgcagtgagctgagattgtgccactgcactccagcctgggcgacacggcaagactctgtctcaaaaaaaaacaaacaaaacaaaacaaaacaaaacaaaaaacagaaggcaaaagagttgaagaaacatttcactgaagaggatgtatagatggcaaataagcatataaggagatatgtaacattattagctatcagggaaatgcaaattaaagcccagtgagagaactacctcaggatgactaaaataaaaagtagtgaaaatacgaaatactggtgactgtgcagggaaactatgctcatggattgctgataggaatgtgaaatggtacagcccttctggaaaacagatctggcagttaccatccttgggtatttattcccagagaaaatgaaaactactctggataccttagcccagccttggggatccnggcctgtaattcccagnttcttccggang

SEQ ID NO: 5143 - DNA, 668 bp, Homo sapiens
  misc_feature (603)..(603): "n" may be a, t, c, g, other or unknown
  misc_feature (644)..(644): "n" may be a, t, c, g, other or unknown
  misc_feature (654)..(654): "n" may be a, t, c, g, other or unknown
gggatcagggcggggccctgagcgccgccatgcttttgtacggcaggatcgcaaagcacgccgggaccggttggtttggttttgaagacgtggatggcgggaattctcgcttctggcctgggtgttttagctcacttggaaaggctagagacccaagtgagcagatcccgtaaacggtctgaagagctgcagagcgtgcaggcccaggaaggtgctcttggaaccaagattcataaactaaggcgtctgcgagatgagctgagggctgtggtgcggcaccggcgagccagcgtgaaagcatgtattgccaatgtagaacccaaccaaacagtggagatcaatgagcaagaagcattggaagagaaattggaaaatgtgaaagccattctgcaggcatatcattttacaggcctcagtggtaaactgaccagccgaggagtttgtgtctgcatcagtactgcttttgaggggaacctattggattcctattttgtggaccttgtcatacagaaaccactccggatacatcaccattcagtcccagtcttcattcccctggaagagatagctgcaaaatatttacagaccaacatccagcacttnctgttcagtctctgcgagtacctgaatgcttactctgggangaagtaccangcagaccggcttca

SEQ ID NO: 5144 - DNA, 749 bp, Homo sapiens
  misc_feature (299)..(299): "n" may be a, t, c, g, other or unknown
  misc_feature (720)..(720): "n" may be a, t, c, g, other or unknown
  misc_feature (722)..(722): "n" may be a, t, c, g, other or unknown
  misc_feature (748)..(748): "n" may be a, t, c, g, other or unknown
agaatttagctttttcaggaactgccatactggcttttcttttgtttttttgttttgagacagaatctcactttgttgcccaggctggagtgcagtggcactctctcaggtcactgcaacctctgcctccgcagttcaagtgattctcatgcctcagcctcccaagtagctggaattacaagtgtgcaccaccacacctgtttttgtatttttttttttttttatgagacggagtttcgctctcgttgcccaggctgaagtgcagtggtacaatctaggctcaccacaacctccacctnccaggttcaagcgattctcctgcctcagcctccccagtagctgggattacaggcatgcgccaccacacccggctactgtttttgtatttttaatagagatggatttttgccatgttggccagggtggtgttgaactcatgacctctagtgatccacctacttccgcttcccaaagtgctgggattacaggcgtgagccactgtgctcagccccatactgggttttgtatcagcatgtatattttccattcccaccagcagtgcagactgttgcaatttctccacatccttggcaacacttactattttttattatggcctttctaatatgtgtgaagtggtatctcattgcggttttgatatgcattcccctaatgaccaatgacatcgagcatccattcctgggtttattgaccatttgngnatcgatttttgggggaaatgtaaganc

SEQ ID NO: 5145 - DNA, 736 bp, Homo sapiens
  misc_feature (647)..(647): "n" may be a, t, c, g, other or unknown
  misc_feature (697)..(697): "n" may be a, t, c, g, other or unknown
  misc_feature (736)..(736): "n" may be a, t, c, g, other or unknown
gaggcctccctctagctggcctcaggacccagatgggggacaggcggagtgtcagtatcaaggaaagatgtccctgggaggaagggctgagtcttgacttcttaaagaggcactgcccagctaaacacttgggggtctgatgagtctccaggtcggactccctccccgccattgtgtcactgccaggggcacagataagcatcccccccgccccagtttggggaattttccaacacctcatggggagaaaaacaaggaaaaaccaacaagtgcaggtggagattattccatggtgctgctgacaacagtgggagggagacagtgcagctgacggggacctcaccctccaccagccttgaggacagggtgggtgggagctgacagtaatgttcgcctggatccaaatcaaagcctggaacgaccaagtaaccggcctgctgggtctgaaccacagccctctggccgcctttggccccactgagcccccgtgtcacagtgtcactgaagcgccttcccttgacgggtctgtgtttccaaatgaaaggtgtcagcaggaaagttcctggtgccttcagagtcgaccggttcaaggccagctcacgaatccactgtggagacttgcattggtgaggtctgtatgcacttangaggcacgctgggctgtgagcctgggagactctctgaaaggggactccgnactccttgggctgtgcttaacctgacgggcactttagtn

SEQ ID NO: 5146 - DNA, 771 bp, Homo sapiens
  misc_feature (726)..(726): "n" may be a, t, c, g, other or unknown
  misc_feature (748)..(748): "n" may be a, t, c, g, other or unknown
  misc_feature (762)..(762): "n" may be a, t, c, g, other or unknown
ttaaagaaaagaaggcagcagtgaaagaatttgaagacaagaaggttgagctgaaagagaacctgattgctgagctagaagaaaagaagaaaatgattgaaaatgaaaagctgacaatggaactgactggagattctatggaggtgaaacctatcatgaccagaaagttgcggaggcgaccaaatgatcccgtccccatcccagacaagaggaggaaacctgctccagcccagctaaactatttgttaacagatgaacagatcatggaggatctgagaacattaaataagcttaagtcacccaagagaccagcatctccatcctctcctgagcacttgcctgcaacacccgcggaatctccagcccagaggttcgaagctcggatagaagatggcaaactgtactatgacaaaagatggtaccacaagagccaggccatctatctggagtcaaaggacaaccagaaactgcgctgcgtgatcagttctgtaggagccaatgagatctgggtgaggaagacaagtgacagcaccaagatgaggatctacctgggccagcttcagcgcgggctcttcgtgatccgccggcgctcagctgcttgactttctacagtgctcttctcttgaccctttttctggagtgggttttatttttggtttggttcgttttctccttaatagaaaaatgttacttactgggaatagctactcagccttggaaatgganagcactgcagtgaattctttanggcacttttgtggncggatgctt

SEQ ID NO: 5147 - DNA, 670 bp, Homo sapiens
  misc_feature (615)..(615): "n" may be a, t, c, g, other or unknown
  misc_feature (617)..(617): "n" may be a, t, c, g, other or unknown
  misc_feature (662)..(662): "n" may be a, t, c, g, other or unknown
tccacctcttggtgggagagggtgcaaaaaattttatgatcattctcagtctaccacaagaaggttccagtgatcaagaaaggcttcatggagataccaagcattgagcaggacttcaaggatggataagatctgatgctgaaggaaggagaaggggtgatattccaggagggaaggacagtgtgaataaaggagcggaggtgggaaggaagtgtttgggaggccctgatctgaccagtcttgttgaggagagggtgcatgaggcaggctggtaggagatgagaaaaagagaattgggggtagatttaggggtcttgaaggctggcctgagaatttgataaatgacccaataggcaaaaggaggcacggaaggattgtaagtagggtcaggaggtaacattgaatgccattgcctacacccccatgtccccacctgaaagtaacatccttcgttgcgtggttttctaaacatcgggactcttcatggtttgatggctggccccagggtagttggcacttttcatttttctcccgttcctgccccaccaccatcaaaaggcttggacacctccatcatcgctgatgagtactgaatgttgggtccctgcggtccananctgcctgcttctgccagagggaatgacagaagggaagtgactttnaaacagga

SEQ ID NO: 5148 - DNA, 731 bp, Homo sapiens
  misc_feature (308)..(308): "n" may be a, t, c, g, other or unknown
  misc_feature (380)..(380): "n" may be a, t, c, g, other or unknown
  misc_feature (636)..(636): "n" may be a, t, c, g, other or unknown
  misc_feature (717)..(717): "n" may be a, t, c, g, other or unknown
  misc_feature (727)..(727): "n" may be a, t, c, g, other or unknown
cgaactaattatttagataattaagtggctgggcacagtggctcatgcctgtaatcgcagcatgttgggaggctgaggtgggcagatcacttaagcccaggagttggagaccagcctaggtaacatagaccttgtcttcacaaaaaaaaaaaaaaaaaaaaaaaaaaaaaaagaaaaaaagttagggcatggtcacatgcctgtagtcctagctactctgaaggctgaggcaggaggaccacttgagccaaggagttcgtggttatagtgggctatgatcaactactgcactcaagcctggacagcanagcaacaccctctcttaaagaaaaaaaaagataattaagctacaagccacatttatttgaaacattctccgnggatgatctgggtatttgattttgaatccttcaagtaaatttctcagttccttaacgtgcatatgtaaacgatcatgagtcatctttggttattaaaaataacccaaaccacagtgattgaagccttgacatgctttctttttcttggtgagattttcctggattgtcagctcctccccccttcctccccgtacgtgctttcagtgagacggaacagttcatttcttccttgactacaattgaataaacatttcgnaatgacattaaaaagtattgacttttgggtcataagtaccagcatttgcagcattttctgactgcatcgttgcacttatgnttctcaattngaag

SEQ ID NO: 5149 - DNA, 571 bp, Homo sapiens
  misc_feature (313)..(313): "n" may be a, t, c, g, other or unknown
  misc_feature (534)..(534): "n" may be a, t, c, g, other or unknown
  misc_feature (541)..(541): "n" may be a, t, c, g, other or unknown
  misc_feature (560)..(560): "n" may be a, t, c, g, other or unknown
agctcagtgcccagcatgtctgtggtgagtgtgtagttcaggaagtgaactggcaaaactgagtatcaccctctcttcctgggttcttgccactcccctgaaaaccagggtagcattgtcacatcagatagctccgctacgtgtgcgctgaccatgctgagatgggcactgtggactcagcctctggtcattgctggaaccagcggcctccatgtgaggtacaggggaacgcactgctagcagatggttgggatgtggacactcgtcctgccctcttggcttggtgctgtgccatcgcacagtcattcgctgnttagcatgcatgggagagagtgaagcacaagggcccaggcccctgggagtgcctgccctcaatttggaagagcccttgggcacagcataggcgcctggcagaattggactgggccatgatccagggcattgggacctcacctaggagttggggttctggtcagaagccctgtggagacagggtctcccctgtgggcaccaaactgacctcaaactgctggntctttgnccctggggacagggctggntgaagtactct

SEQ ID NO: 5150 - DNA, 730 bp, Homo sapiens
  misc_feature (661)..(661): "n" may be a, t, c, g, other or unknown
  misc_feature (711)..(711): "n" may be a, t, c, g, other or unknown
  misc_feature (724)..(724): "n" may be a, t, c, g, other or unknown
ttatcatccttcaagtggggctgaacaccattgcagacctttggtacctgttcggagacctcagtctttcattggtgagcacccaagggtttgctgtggaaatgtttttgctccctgatgttgctgagtaggagctggtggccttctctgtctctactgcaggtggcagagtggctgtgttctgggtcccaggtgggctggaccccccaacctccgcagacagcaggacatcagggagtgggcccggctgaggactggatagggttcaagggagaggatagattaacattcttggaagtctctttttgcatttgttttataatgtctgtcttttttttttttttttgagatagagtttcactctgttacccaggctggagtgcagtgggccgatcttggctcactgcaacttccgcctcctgggtacgagtgattcttttgcctcagcctcccaagtagctgggattacaggcacataccaccatgcccagctaatttttgtagttttagtagagatgcggttctaccatgttggccagattgttctcaaacccctgacctcaagtgatccgcccgccttggcctcccaaagtgcggggattacaggcatgagccaccgagcccggtctgaactcacaattttcatttcctgacccacggnctccatatttggaggccagtaagggcctttacaggttattatttattaanggctgattctacnccaggc

SEQ ID NO: 5151 - DNA, 796 bp, Homo sapiens
  misc_feature (758)..(758): "n" may be a, t, c, g, other or unknown
  misc_feature (761)..(761): "n" may be a, t, c, g, other or unknown
  misc_feature (784)..(784): "n" may be a, t, c, g, other or unknown
tttaacagtcttcttgcctactaaacatagacttagagaacacagtctgttttggggctccagaactcaaaagggaagtgaagacaatggagagtgttcagatagcacttttagtagatagaatctgatatttaaaaataaagagtgggggagttgggggccatctgccaaggagataatccttcataaagcagattaaccatatctttgtcttagttcaaatcactataacaaattaccatagaccgggtagcttaaccaacaaacatttatttctcattgttctggaggctagaaatctgagatcagggtgctagcagagacaggttctggcaagggtctttgccaacttttgctgtattctcacatagcagaaagagagctaaaaagccgtctggtacttcttcttacagaggcaccaatccaattcatgtgggctccaccctcatgacctaatcacctcaaaaggtcccaccacataataccatcacactggggattcaatttcaacatgtgaattttgggggaacacaaacactcagtccataacactcccccagcccacctctgctgccttttctctttgaaagcacttaccttctctttctgcattgatgtaatgccagaggattggatctgggaaaggaagtaaatgtgggagggaagaatcagggttcagccatttagcgagccaagtaggtgccgtgtgtcagcaagggtaccctgggcatgagtattttaccacccttacagcaatncancagcctgtgtgataagggtgggnttctgggtggga

SEQ ID NO: 5152 - DNA, 719 bp, Homo sapiens
  misc_feature (240)..(240): "n" may be a, t, c, g, other or unknown
  misc_feature (461)..(461): "n" may be a, t, c, g, other or unknown
  misc_feature (685)..(685): "n" may be a, t, c, g, other or unknown
  misc_feature (710)..(710): "n" may be a, t, c, g, other or unknown
  misc_feature (715)..(715): "n" may be a, t, c, g, other or unknown
atcagcctcctgagagctgggactacaggcgcctgccaccacatccggttaatttttgtatttttagtagagatggggttttgccatgttggccaggctggtcttgaactcctgagctcaggtgatctgcccacctcggcctcccaaagttctgggattacaggcgtgagccacggtgcccagcctggctcctgttttttgagacggggtttcaccctgtttcccaggttggagtatagnggtgccgtcatgacttactgcagccttgaactctttggctcaagcagtcctccccactcagcctctctagtagctggggctccaggcatgaatcaccgtgccagactaagtttttttaaaattttttgtagagagaatctctctctgttgcacaggctattcttgaactcctaggctcaagtgatcctcctgcttcagcctccgaaagtgctgggattacngttgtgagtcactgtgcctggctcttttaatcttgaaaactctgggaagagctcacttctgtttaggaggctgccttgggaactgcatctcctgggctggtgctctgtgctgcttggagtctgcagaccctatctgggtcgcttggccttccgtgcacaagctgccagaatggaggccccattctcaatgtgggggctggccaaagagcaaggagcttccacangacagaagctgggcacctgcttggnctggntctt

SEQ ID NO: 5153 - DNA, 856 bp, Homo sapiens
  misc_feature (707)..(707): "n" may be a, t, c, g, other or unknown
  misc_feature (782)..(782): "n" may be a, t, c, g, other or unknown
  misc_feature (803)..(803): "n" may be a, t, c, g, other or unknown
  misc_feature (809)..(809): "n" may be a, t, c, g, other or unknown
aacgggaaaatctccttcttccacaatgcagttgtccgtgaaaatctgcgacaatttgtagaaagtcttcttccagggaacttggtggagaaagttacaaataaaaattacgtcagattcctctctggctggcagcaagagaataagcctcatgtccttctgtttgaccaaacgcccattgtgccactgttatacaagttgactgcctttgcatacaaagattatttatcatttggatatgtatatgtgggtttgagagggacggaagagatgataaggcggtacaacatcaatatctacgcccctaccctcttggtctttaaagaacatacaaacaggcctgccgatgttatccaggcccgaggtatgaagaagcaaatcattgacgacttcatcacccgaaacaaatatctattggcagccaggctcaccagccagaagttgttccatgaactctgccctgtgaaacggtcgcatcgacagaggaagtactgtgtggttttattgactgctgagactaccaagttgagcaaaccctttgaggctttcctgtcctttgccctggcaaacactcaagacacagtgagatttgtgcatgtctacagcaatcggcagcaggagtttgccgacaccttactaccagacagtgaggcgtttcaagggaaatcagcggtgtctattttagaaaggcgcaacacagcaggaanggtggtgtataaaaccctggaagacccttggattgggagtgagagtgacaaatttatcctcttggctatcttgancagctgcgtaagatccagctnttctgncctctgaagcaaggtttctgactgaccgatgaacttggccctgtttt

SEQ ID NO: 5154 - DNA, 775 bp, Homo sapiens
  misc_feature (727)..(727): "n" may be a, t, c, g, other or unknown
  misc_feature (736)..(736): "n" may be a, t, c, g, other or unknown
  misc_feature (771)..(771): "n" may be a, t, c, g, other or unknown
aaaaaggtacaactaccttgctgatgctgtacatatggctcacttgtgcccagagagagaataaagccatgtcgaaactatctacgattccttgagtgtttttccagctacctgccacttgcccacccactcccctcagatctcagttagaacatgacaattgggctcatgaacaggatcctgagtggttgcaggtgaacaagcagttggcacaagggcaaagtgatcacatcctgattgagtggctatggacagccatacagactgtgtggaacaacgctggtgaaatacccaaaccatttagaagcagtaatgcctcacttgcctgggactgggatggtgtggctgagactgccttactggcagccaggtgcgctattcagcagccacaagccctacaagtaattaaccaggggcacctgtttgagctggaggtgcatgtggccacagacggttttggttgaggcttgtggcaatgcacagagcgcctaagaatgccagtaggcttttggtcccaactatggaaaggagctgaactccggtattcattgatagagaaacagctagcagctgtatatgctggccttcgggctcatgagagcatgacaggacaggctgcagtcatcatatggacaacttacccaataacaggatggatgcgtctatgtgtaatgaccacctggagtgggatagcacagatgtccactttggcaaaatggggcgactncttgcacantggagtaagctgagtacaagtcccatacagcaganttgc

SEQ ID NO: 5155 - DNA, 670 bp, Homo sapiens
  misc_feature (604)..(604): "n" may be a, t, c, g, other or unknown
  misc_feature (619)..(619): "n" may be a, t, c, g, other or unknown
  misc_feature (629)..(629): "n" may be a, t, c, g, other or unknown
attacaggcggatcccatggggccggaggcctgcaccaccgcgagatgtggccattttacaagaaagggctaataagttggtgaaatacctgttggttaaggaccagacaaagatccccatcaaacgctcagacatgctgagggatgtcatccgagaatatgatgaatatttcccagaaatcattgaacgagcaagctacactctggagaagatgtttcgagtcaatctgaaagaaattgataagctaagtagcttgtatattctcatcagcactcaggaatcctctgcaggcatactgggaacgaccaaggacacacccaagctgggtctcctcatggtgattctgagtgtcatttttatgaatggcaacaaggccggtgaggctgtcatctgggaggtgctgcgcaagttggggctgcgccctgggtatgactgggctctctcagcgcttgctgtccgtgttgtcctttggcaagagaggatggtcctaggattgcatcagtctggtggtctggtggagcgggtggggtgctggactgggtagagggcccagggttctgacctgggtggatgacgggcaaatggtcctgaactctctgctgnctctctccttaatgncctctgctgntctaagctgagatgttagatagaccttcagggatccctgac

SEQ ID NO: 5156 - DNA, 851 bp, Homo sapiens
  misc_feature (837)..(837): "n" may be a, t, c, g, other or unknown
  misc_feature (840)..(840): "n" may be a, t, c, g, other or unknown
  misc_feature (842)..(842): "n" may be a, t, c, g, other or unknown
tttattcctggactgccagctccctctctgacgatgtccaacacaatgcctcggcccagtactccactagatggcgttagtactccaaagcctcttagtaaactccttggatcattggacgaggttgttctgttgtccccagttccagaactgagggattcttcaaaacttcatgattctctctataatgaggattgtactttccaacagcttggaacttacattcattctatcagagatcctgtccataacagagtcaccctggaactgagtaatggctccgtggttaggatcactattcctgaaattgccacctctgagttagtacaaacgtgtttgcaagcaattaagtttatcctgccaaaagaaatagcagttcagatgcttgtcaagtggtacaatgtccacagtgctccaggaggacccagttatcactcagagtggaatttatttgtgacttgtctcatgaacatgatgggttataacacagaccgcttagcatggactagaaattttgactttgaaggatcactttctcctgtcattgcgcccaaaaaagcaaggccttccgagactggatctgatgatgactgggaatatttactaaattcagactaccaccagaatgttgagtctcatcttttgaacagatctttatgtctgagtccttcagaagcttcacagatgaaggatgaggatttttcacagaatctcagtctggattcttctacacttctctttactcacatacctgcaatttttttcggtcttcacttgggtatgaagagcttaagttgaatactctaatggggagaaaggaatttggtcacttggtgnacntnttcgttcaa

SEQ ID NO: 5157 - DNA, 715 bp, Homo sapiens
  misc_feature (663)..(663): "n" may be a, t, c, g, other or unknown
  misc_feature (687)..(687): "n" may be a, t, c, g, other or unknown
  misc_feature (715)..(715): "n" may be a, t, c, g, other or unknown
aaacgattgaagttgaagaacaacaggaaggcaatgatgcagaggcccagaggcgtgagattgagctgcttcgccgtgagggagaattgccactggaagagctgctccgttcccttccccctcagctgttggaagggccttccagcccctctcaaaccccctcatctcatgatagtgacacccgagatgggcctgaagaaggtgctgaagaagagccccctcaggtgttggagataaagcccccaccctctgctgtcacacagcgcaacaaacagccttggcatccagatgaagatgatgaagagtttactgccaacgaagaggaagcggaggatgaagaggatactatagcagctgaggaacagttggaaggggaggtggatcatgccatggagctgagcgagttggctcgagaaggtgagctttccatggaggagctattgcagcagtatgcaggagcctatgccccaggctctgggagcagtgaagatgaggatgaagatgaggttgatgctaatagctctgactgtgaaccagaggggcccgtggaagcggaagagcctcctcaggaggatagtagcagtcagtcagactctgtggaggaccggagtgaggatgaggaagatgaacattcagaggaggtagaaacaagtggaagttcancatcagaggaatctgagtctgaanagtctgaggatacccaatcacagagccn

SEQ ID NO: 5158 - DNA, 491 bp, Homo sapiens
  misc_feature (431)..(431): "n" may be a, t, c, g, other or unknown
  misc_feature (490)..(491): "n" may be a, t, c, g, other or unknown
gatgacaggttcttggagacccagctgtgtgctgtgttgatgggcaaacatgaggtgggccccaggggaaaggagctgttctggactctgtgaatgctgctgctcccaagggcggtgcccaggtgagatgcctgcgggggaagcagcaggagctaccacctccacccagccactgcattctggagcagcgcttcccaaacttcagtgtgtgcaccgatcacctagggccttttttttttttttcctttttgtggagaacgggtctcgctagattgcccaggcaggtctcaaactcctgggctcaagccatcctcctgcctctgcctccctaagagttgggattaccggcttgagccactgtgcctggcttgtttgttttgtattaattacatttttatagagagagatggggtcttactttgttgcccggnctggttgcaaactcctgggcctcaagggaacctcccatttcagcctcccaaagtgccgnn

SEQ ID NO: 5159 - DNA, 758 bp, Homo sapiens
  misc_feature (675)..(675): "n" may be a, t, c, g, other or unknown
  misc_feature (750)..(751): "n" may be a, t, c, g, other or unknown
agagaagcaacatctttaaggtactgagggcaggagaagttaatgtagaatactatgccagaaaaaataaattcccaaaagtggaagtgaaataaggacatttagagatgtacaaaagctgaccgaattcactaccagtcaacccacactacaagaaacatcaaatgagtcctccaagcagaaggaacccaataccagatgaaaatccagatctccacgaggaaatgaagaacaccagaaatggatcggccctttcttcaaataagagcagttggaataacaaagctgttcagttgtacccttggaatccactgaaatcctgggtagggaagctccagtaccaccaactggaaagactgggaatgcctaatagctggtactggccattgtcgtaggctttgtccactctgacaaactgaagatggggactcgactcaccttcgccagccacaggaggacctccagacgaggttaggtcgacttcccgataactttagatcctgaaacctcacgggatttttcttctcttccctttgatctctcttccgcttgctcaacaggacaggactcgctgcctttctttcccgtcagaaagggatcccttgcggacaggacctaagtgagtagctggtttcccctacttgccttccgggcctgggtgtctcgggagctcangctgacgggagacctactaccggcgagtgagaccagcaggacctggaagggccgcgcaccaaggtggaggttggnncccgggg

SEQ ID NO: 5160 - DNA, 649 bp, Homo sapiens
  misc_feature (591)..(591): "n" may be a, t, c, g, other or unknown
  misc_feature (633)..(633): "n" may be a, t, c, g, other or unknown
  misc_feature (642)..(642): "n" may be a, t, c, g, other or unknown
cagcaccaggctgtggcaggttgggttttgctctgtgctgtgatttctgttggagttggaaagttggctgtgagtcggcccagatgtgaagcggaaacggggaggagggaggtgagtgggcctggctgggtggatggggatctgctcgcctgcacggtttcctctttggtaaagtggggcctgcactcgccccatctagacaggcatgtggggactgaggtgattgattcccagcgtggaggagcatctcgctcagtgccaggcggaccatggcctggaggtggccggcattttcccttctcctgaggggatttattgatcttgtgctgcaggtggtgtggcctgagggcaggtgtggcttgcagagctcatcactggggcaggtgcagggctctggggtgctgagctgtcactggcgaagggcctcaggtcccccccaacagctcccacctgctcagccacagcgtggatgcgtcccgggctccccggccccgggggataccataagcacagaggtggcctctttaatcaggggcttcccagggagggtctgaggctgggctgcgggattactcctttcttgggaagcangcaggggtggccaggcacagtggctcacgccagtgatctcanccccttganaggctaa

SEQ ID NO: 5161 - DNA, 742 bp, Homo sapiens
  misc_feature (649)..(649): "n" may be a, t, c, g, other or unknown
  misc_feature (662)..(662): "n" may be a, t, c, g, other or unknown
  misc_feature (703)..(703): "n" may be a, t, c, g, other or unknown
ataaatccccctttttgtgtctcagggcagacagaggttctggctgccttttacttgagtcatgggcgctccagagtggcagggtagtgtggtacagagagactcactgctccgtgtgtgtcctctggcacaccctccgctctggggccccactctcacctcgttcagttgacctgaaggagctccagcccactccagccccttcccacccatcatgccaggctataactccactggagcagtaggcggaccagctggaggccttctcagcagagcagagagctctcaaggagcagacagggggaggtgttggcaaggcagctgcaacaacaagttcaccccgctttggattttaaaaggatcgaaattcgaaatcctcttctggggttatgtgaggtgctgtggggtctttttccttcctcctttctttttggtaggcaagcaacataccaagttcctagaaaaggagaaaaacactgtggcagcccagagggccatagctaaagcgtgactcactcagagccgatcctactgacacacgtcccctccctccgtcccactctgccattgccccctcctgtcaggaccagactagggggtctgggactcccggggagccatgcaccccccacttgggtggtggtggcanggcaggggagtgntgccaaacctcaggaggacttggagctgcccgtgccacttnctgtggagagactccagtgcgcctgccgttaaccctgca

SEQ ID NO: 5162 - DNA, 743 bp, Homo sapiens
  misc_feature (602)..(602): "n" may be a, t, c, g, other or unknown
  misc_feature (650)..(650): "n" may be a, t, c, g, other or unknown
  misc_feature (670)..(670): "n" may be a, t, c, g, other or unknown
  misc_feature (708)..(708): "n" may be a, t, c, g, other or unknown
cggatgggacagggagaggaagcagctgtgctttcatgctgaccctgatcctctgtgggggggccgtctccaaactggttgctgaaattggggatctgaaaaacatcttaagctatcctacagcaaaagttgatgattctaatgttagcaatcctgtctataggaataacggggttgtgaatcaatttgtaaacagtctttggaccctaaagtcagaaatcctatctacaggaacaactgggatacacaaggtcaggatcttgtgctgtgtgactttcagcaacaaggaagtgggccaaagtgcagcccaattaatgcttaattataactctatttcagtccataatgtggcatgcaattcttgtcaaccctctggggacacttttgaatttgggcatttgggaaatgttccttcattcaccagttgctgtttttaactaagtgatttactttgtgctggagctgagctgcgccaagctggagacacaaatagaacaaacacactccctgctctcatggagctcctggcattgtcccgtgcactagtgaccatttgctgcacacccagctcttctctaagcacttttcaaggatgctcttgnttaatcctcatgacaaccttatgaggcagatactggtattctcctcangtgaggaaaccgaggcacanggagattaaataacttggccaaggtcactccatctganccgggatttcaacccaagtagtcttgcttgcaaaa

SEQ ID NO: 5163 - DNA, 781 bp, Homo sapiens
  misc_feature (514)..(514): "n" may be a, t, c, g, other or unknown
  misc_feature (695)..(695): "n" may be a, t, c, g, other or unknown
  misc_feature (754)..(754): "n" may be a, t, c, g, other or unknown
  misc_feature (761)..(761): "n" may be a, t, c, g, other or unknown
agcaatttgggaggtggaggaggagcaggaggaggaaaaggaaacaaccaggccagtcatggtgtctcgtgcctacgaggaggaggaagcggaggaggggaaaaaaaggaggagcgaaaagaaacggagcagaaggagttggaggaggaggaggtggaggaggaggagggaaaagaaatggagcagcaggaggagggaaaagaaatggaagaggaggagcaggaggaaaatgaaatggaggaggaggaggaggaaaaagaaatggaggaggaaaaagaaacaggaggaggaaaaagaaacggaggaggaagaggaggaggaggacaaagaaacagccaggccggacgtggtggctcacccctgtagtcccagctgctcgggaggctgaggcagaagaatcgcttcaacccgggaggcagagtttgcgtgagccgagatcgtgccactgcactccagcctggagacagagtgagactccatctcatctcaaaaaaaacaaaagaaaacaaaacanaaacaaaaaaacagccaggagccgtggctcacgcctgtaatcctagcaatttgggaggcgataagaattattgaaatgcagtaagaattaccgaaatgttgaacaaagacccaagtgagcacgtgctgttggaaaaatacccaatactacactactcacacaagttccacattctgtatanttaaaatggccagcagggcggagggtgctaacttattaccttgagcagagcgtactagnagactcncactgcactgaaccttttaa

SEQ ID NO: 5164 - DNA, 735 bp, Homo sapiens
  misc_feature (701)..(701): "n" may be a, t, c, g, other or unknown
  misc_feature (713)..(713): "n" may be a, t, c, g, other or unknown
  misc_feature (720)..(720): "n" may be a, t, c, g, other or unknown
ggttggcagtggtcacgtcgcttgtcaaggcacccaggagtggggcccgagtggggatttcaggacgtgggctctcagggggagggaaagtggctaaccaggacttttgcaataccaaaatcagccacgcggtgtcatcctcctcccaagaggtctggctggggcttgcgggcagtttagggttggagccaggggagaagtcacagaagaattgctagaggtgaagttttgcattttgtttgcgtaacagccccacaccctgccctgcgaagatgcataaattagcccctggcccttccccacggttccttccttccctagtgtcttcccgtcactccagggactcccaatatggtgatacgaggcagcctgggggtgggggcagaaggaagtcctgccaacattcactgtgtgaccttgggcatttctctggctgcagtctccggtggccctcacattcgatggctctaggttccccagctgacctggcctgagggcttgggttgaggagaggatttgaccccatgtgaacagaaggctcccagggtgagtaagacatggccctggtttcacctagatctcagcctgccctgctggtgtgaaccggaggggagggtgagtggacagactggtttggcagctctggctggctctggaaggtggggagtttggtgggaagaaagccagggctacacttgtancaggaccagcangtgtcangactgggacatggaa

SEQ ID NO: 5165 - DNA, 767 bp, Homo sapiens
  misc_feature (704)..(704): "n" may be a, t, c, g, other or unknown
  misc_feature (714)..(714): "n" may be a, t, c, g, other or unknown
  misc_feature (731)..(731): "n" may be a, t, c, g, other or unknown
aggcgttaacgcgcacgcgcttagggatccggccgtggccgagcgcgcggccgtaagaccgcgggtgactagcatgcagatacccatgctctgactttctgcccctccactgacatggcccaccggggtggggagagggacttccagacttcagctcgacgcatgggcacctcgctgctcttccagctttcagtgcatgaacgggagctggacctggtttttctggatcatagctatgccaagccttggagtgcccacccagatgccagtagtgcccgccccacccgcatgctctttgtcactccccggcggcagcacgaaagtaccatatgattgttaaatacctgtgaagtatgtgtggcccggtcctatttcctcacctgtttacagtgaatcagacgtcccaatagatgtggagacggtcacatcaacgcctatgccactctatgacaatcagaaggcacgcagcgtgatgaatgagtgtgaacggcatgtcatctttgccaggactgatgcagatgcccctcctccaccagaggactgggaggagcatgtcaacaggactggctggacaatggcccagaacaagctattcaacaagatcctcaaagccctgcagtctgaccggcttgccgcttggccaacgaaggggcttgtaatgagccagtgctgcgccgtgttgctgtggacaagtgtgcaagganagtgccggangctctggcaagtgtganctgggatacccagctgatccaatggctggacaccaa

SEQ ID NO: 5166 - DNA, 749 bp, Homo sapiens
  misc_feature (694)..(694): "n" may be a, t, c, g, other or unknown
  misc_feature (713)..(713): "n" may be a, t, c, g, other or unknown
  misc_feature (728)..(728): "n" may be a, t, c, g, other or unknown
tgtggtgactctaaccataacagcctgagacagaggtcccaggagatccctccttgtggaaaagcagtagttctcttccccagaaaggactggggtcaaaggatgcacaacagtaacgactttgtggtgaggttggcagagaatatacgatggggagcttgatgtgtgagaagtggaaagaaggtcatcttggatgattggaggacaacatcccgcaaacgacaacagggaaagcacagtacttttacaaaaggctccgcaaatatctcatccttaccatctgttccttgtgccttataagatttttggatttcatcctaagagtaacacgcatttatggggagactgagggataggactgggtaaatttgagatatatctccaaaaaccatcttcattttaccaaagagaaaaatgaagcccagagaggttaagtgacttgcccaggatcatacagctaatgagtagtcaggaaaatattctctttagagttctttgtatttctttcttcatagtgttgccaaatataaataatagtgtagggttggcctgccatgtgttggagtgggcaggatctttggtgtgacaaaggtagataatttgtctagccaagttttgagatatcacaaagctccagtgccttaccaggcagaagttatattcagaatgattacaagttgctctatgatagaangtgctcaaataaatggtantataggccacactgnattctatgctacagggatttc

SEQ ID NO: 5167 - DNA, 832 bp, Homo sapiens
  misc_feature (736)..(736): "n" may be a, t, c, g, other or unknown
  misc_feature (801)..(801): "n" may be a, t, c, g, other or unknown
  misc_feature (807)..(807): "n" may be a, t, c, g, other or unknown
atgtttctaccaataaacagtaactaaaatataaactatgctccaatgaactaatttttttttactgctatttgtcttctcttttagaaaattattactatatgtttatttgaattctgtagttttttgttttctaatttgaatattaattctccttatcccaattgtgagattaccccagcacttaattattttgatttctctttctctatcctatgaattcttgttttatttttatcgttttaaacataatctattgagggaaagttaagtaattttctgtattccctaaacctagagatatcaaagcaggaaatatccttctgacagaaccaggccaggtgaaacttgctgactttggctctgcttccatggcatcacctgccaattcctttgtgggaacgccgtattggatggccccagaagtaattttagccatggatgaaggacaatatgatggcaaagtagatgtgtggtctcttggaataacatgtattgaactagcggaaaggaagcctcctttatttaatatgaatgcaatgagtgccttatatcacatagcccaaaatgaatcccctacactacagtctaatgaatggactgattattttcgcaactttgtagattcttgcctccagaaaatccctcaagatcgacctacatcagaggaacttttaaagcacatatttgttcttcgggagcgccctgaaaccgtgttaatagatctcattcagangacaaaggatgcagtaagagagctggacaatctgcagtatcgaaaggatgaagaaactccttttncaggangcacataatggaccacagtagaagc

SEQ ID NO: 5168 - DNA, 775 bp, Homo sapiens
  misc_feature (689)..(689): "n" may be a, t, c, g, other or unknown
  misc_feature (708)..(708): "n" may be a, t, c, g, other or unknown
  misc_feature (748)..(748): "n" may be a, t, c, g, other or unknown
taatacatgccctccttgccaattgttttctctagttcaatttatttttctttctttctttctttcttccttccttctttccttccttccttccttcctttctttttttctttttttttttttcggggtctggctctgtggcccaggctggagtgcagtgccatgatctcggcttactgcagccttacctcccaggctcaattaattctcccacctcagcctcctgagtagctgggattacaggtgtgcgccaccatgcccggctaatttttgtatttttagtagaggcagggtttcaccatgttggccaggctggtcttgaactcctgatctcaggtgatctgccctcctctacctcccaaagtgctgggattataggcgtgagccaccacacctggcccagttctatacttttctgtaaaaagtaaacaagttgcccaaatccttgtctctactttcagctgggaaactggcctgggcagctcaaaccattagatctggagagggagagggtgctgagtctgctcagtgatgtggcagtagtggatcaaaaatatctgtttggaggtcagacaggcctagattcactgctgtgcaattttgagtaagttccttgacttcccttgacttctctgatcctcatttttcttatctgaaaaatgcagcaaatagaatgatagaattattgngagaacccaaacccagtanagtgctaggacagtgccagtcacatagtatgggctgtggnactagcaaatgcagcattggcttaggc

SEQ ID NO: 5169 - DNA, 809 bp, Homo sapiens
  misc_feature (728)..(728): "n" may be a, t, c, g, other or unknown
  misc_feature (750)..(750): "n" may be a, t, c, g, other or unknown
  misc_feature (767)..(767): "n" may be a, t, c, g, other or unknown
cacaaagcacggggccttgggctccccactaaggctagagggctgcgtccgaggccgtggggaggctgcctggaacaacatgcaggtattcaccttcacctggagagaggacatccggcctggagacccccagcacaccaagaagttctgctttgatgccatttcccacaccagccctgtcacgctgtacgactgccacagcatgaagggcaaccagctgtggaaataccgcaaagacaagaccctgtaccaccctgtcagtggcagctgcatggactgcagtgaaagtgaccataggatcttcatgaacacctgcaacccatcctctctcacccagcagtggctgtttgaacacaccaactcaacagtcttggaaaaattcaataggaactgagccctcatgcccccttggcaggccccccagggtctggcactcactgcagacttcctctttcaagggaggcagggcccctgtgggcactagatgtaaaaggtgctggccaaatggttcagggtgaagagggctcttgattcaggggctggggtctgcctggtccttgagcccctgagttgtgggggtagggtgaagagcatatcccacaagaggccccacagggagcagagactgctttaatccctgctgacatcacggaaaagcaacagagccttttcaactttgtcactatgtccccttgaacattatgtgggagaacaccaaggtagcctangccacccaaaatgagtcctgcnaggttgccaaccctcanatggctcttctacatgatggtgctttagaaacaaaggtaaaa

SEQ ID NO: 5170 - DNA, 811 bp, Homo sapiens
  misc_feature (751)..(751): "n" may be a, t, c, g, other or unknown
  misc_feature (778)..(778): "n" may be a, t, c, g, other or unknown
  misc_feature (809)..(809): "n" may be a, t, c, g, other or unknown
aaataaaagtaaaaagatttcaaaataattcagacataaaaggagtgacattctgatacatggatggagctggagaatattatgcttagtgaaataagccagatacaaccttttgtacaaaaatacaaaattgtatgatctcatttatatgaggtagttagaagaggcaactctatggagacagaaagtagaatagaggttaccagggctgtgaggggagaggtgaatggggagtttaatgaatacagagtttctgtttggaatggtgaaaaaattctggagatggataatagtgatggttgaacaatattttgaatatatttaatgccacagaattgtacacttaaaaatggttaaaatggtaaattttacacgatatgtatctgtatctatatatatctctctctatatctatatatcttaccagaatacaaaatttaataacacactccgaaaacctttacagatgaggaaactgaagaaaactgtctacaggggaggagttaagaatttgcccaggattattcagctgggaatttgcattcgggatccaaacttagttctgtttcactacatattatctactccatattatctgttctgtgttatctgctggctttctgggtgattaaagatatgtcagctccgagaagaatgagtttatttgaatcattcagaaagttacatttaaaaagtaggtaattgtagtttgatggaaggtacagtgtgaaaccctagacagactaaaggntaactttgaggatttctttctcaaccnaagtggtaatagtatgcatttgaaaaggganga

SEQ ID NO: 5171 - DNA, 865 bp, Homo sapiens
  misc_feature (781)..(781): "n" may be a, t, c, g, other or unknown
  misc_feature (836)..(836): "n" may be a, t, c, g, other or unknown
  misc_feature (864)..(864): "n" may be a, t, c, g, other or unknown
ccttctgaagaatgagcagtttttatcgcatctcctcttgttcctacacttggacagcggtgtccctcagggtgtcacacaacaggtcacccacaaggtggcacagcacctgacaggagccagccatggggacaacgtgaagcttctcaacagcatgatccaggcacacatatctgtaagcactcagcccaatgaagtgggccccgttgctgtgttggagttctgggttcaggctctcataagccagcatctctgataccgagaacaacctatcctcttcctcatggaccacttgtgtaaagcagcttttcagctgatgcaggaagactgcatacagaaattactctaccaacaacataagaatgccttgggttaccaccgtgaccggagtctgctctcatctttggtaagctggattgtggcaggcaacatcactccttcctttgtggagggcttggccacgcccactcaggtctggtttgcctggacagtgctcaacatggaatccatctttgaagaggactcccagctccggagagttattgaaggggaattggtgataaactctgctttcacccctgaccaagctctgaagaaagcccagacccagctgaagctccccatcgtgccatccctccagaggctgctgatttatcgctgggcccaccaggctctggtcacaccttctgatcaccccctcctgccactcatttggcagaagttcttccttctgtatcttcaccgtccgggaccacagtatgggttacccatagatggttgnattggaagaaggttttttaaagtcctgtcatatcaatttgttgaaagaaatgaanaacgttggaccaagtggctgacttccanc

SEQ ID NO: 5172 - DNA, 780 bp, Homo sapiens
  misc_feature (735)..(735): "n" may be a, t, c, g, other or unknown
  misc_feature (763)..(763): "n" may be a, t, c, g, other or unknown
  misc_feature (775)..(775): "n" may be a, t, c, g, other or unknown
agaatcctacctaatgcaacccgacttttggcctgagccattcaatggataattagtcctaactgtattgctggagtggaccattactgaagtcttaccttttttgtccttgcttttaccttgccttgttccagcaaggcttaagcatagctttaggtcctatgttatgcgcatgttatgtgattgtctgattgattacattataaactctgcacaggcggcatcacggtctttctgccctttcctgcctccctccgtccttgcactgccttgcttcatggagctttgcacttagcaggtgctcagtaaatacttgctgggtggttgacacaggattacatgttaatccatcatcttcaaaggctagaaccagacctatttaaaaaaacaaacaaaatccttccttttaaaagtggcattaccttcttaccctcacaaatgttcattttagtcgcctttattgctttctggggtagggggtcttaagggagtaactcagagagcctctttaacttaaaagaggcataataaattacagtctttaagagaagatcggatgcctgcgtgcctcccagaagtgggttaggagcacagaattctagatggctcctttgtttgcaccccaccctgtctgcagggctggcctcccacagcagtgtgtggtatcctacagatcactattaaataaacagtcccttgaaatcacaacattaaaaagtgctggctatgtattgnaccaggagagccaaatattatggaaaangccaaatatttncactg

SEQ ID NO: 5173 - DNA, 874 bp, Homo sapiens
  misc_feature (745)..(745): "n" may be a, t, c, g, other or unknown
  misc_feature (841)..(841): "n" may be a, t, c, g, other or unknown
  misc_feature (847)..(847): "n" may be a, t, c, g, other or unknown
  misc_feature (867)..(867): "n" may be a, t, c, g, other or unknown
cggtttgctataatttcttaaaattcaatcaatttcacatccattaaacttacaagtaccgtaatccagttttcctaggaaaactaagcccagccgaaccttgggaaaaatacctctgtgttaaacatatatacatgatcgattttaaatgttttcaccacaaaaaatggtaagtacgtgaggtgatggatttgttaactcagaagcaggcacaccaaatcacaatgggtctgattcgatcctccctgatggcaatggagacccatctaactaatcccacttctaattacctttctttttctccttacagacctaaaaaatctcaccatttctattagcctgaaaatccctctgttcttctcttcctccttcagcactgaatctcgcttacactaggttttacttaatgattctcctccttatactttctgtctcaccagtttcctctcacacttatttacctgctacacaaaattattcttattgggcttatgtgccctttcctccacttattcgacctctcacctggattgatgctcctgcggaaatctacattaacgatagtttgtggatgcctggagctacagatgaccgttgccctgctcaaccaggagaagaaggcactacatttaatgttatcatgggttataaataacaccctctgtgcctcagaaatgcacctggttatatccatctagaaactcaagtctgggctgcttatcttcccgagggatcagcttcagangaaccgggacatttggtctctgggcctctcctttctcctttaaaacaaatgaaaagggggagtaatgggacataccccatactttcaataagtagncttcangcatttcctttcacccagangagcaat

SEQ ID NO: 5174 - DNA, 730 bp, Homo sapiens
  misc_feature (599)..(599): "n" may be a, t, c, g, other or unknown
  misc_feature (646)..(646): "n" may be a, t, c, g, other or unknown
  misc_feature (693)..(693): "n" may be a, t, c, g, other or unknown
  misc_feature (722)..(722): "n" may be a, t, c, g, other or unknown
cggtttcctccaatggtaacatcttgccaaactataggacaatgtcagagctaggatattgaccttgatacagtgaagatacagaacagttctaacaccacaacggtctctcatgttggccttttatagccataccagcttcccttctccttaacccccataaccactgatttcttctccatttctataattttatcatttcacaatataaccatatagcatgtaacctgtgggtttggctttgttcactcagcagagttctgcggaaattgggcaggttgttgcagtcactggttcatcaggtttaagactaggatacatgaggcaaagggaaatcccagagacacacttctgtgtgtttcgttgggtccccagtctgcctttttccacctttcagagtcttctgtttttttccccatataatgtacagggttctgagttatacttagtgggtgaaatagggtaaagtatgtctaattcatcttccctgaagctgaagtcagtgagattagtttcctaaagttgcaaatagccaaaagctttgctcaggtgaagtctaatgactgcaggtttaaaatttttggtttggataaattggnatttcttattcaaaattgctaagaccatatcccagctctggggttgnaatttggattttgagaaaagacagaattttaggaaaatgctgagtanaattaagaggaacaaatttctcatatggngaatattc

SEQ ID NO: 5175 - DNA, 800 bp, Homo sapiens
  misc_feature (655)..(655): "n" may be a, t, c, g, other or unknown
  misc_feature (775)..(775): "n" may be a, t, c, g, other or unknown
  misc_feature (795)..(795): "n" may be a, t, c, g, other or unknown
  misc_feature (797)..(797): "n" may be a, t, c, g, other or unknown
tttatgtatttatttatttgagacggagtttcgctcttgttgcccaggctggaatgtaatggtgcgatctcggctcaccgcagcctctgcctccggggttcaagcgattatcctgcctcagcctccagagtagctgggattacaggcatgcgctgccacgcccggctgattttgtatttttagtagaggcggggtttcaccatgttggccaggctggtctccaactcccgacctcaggtgatccgcctgcttcggcctcccaaaatgctgggattacaggcgtgagccactgcgcccggcctgagaaggggggttttattgggcagaggagatcagcagtggattcaaaggaggcttggaaggaggcaagggtgtcacagagtgggatccttcagggcctgggtatgatgcctgcactaacctcactggacagtagcgtaggctagacaagattttagagatgtgttgtgaccagctgcactccaggaaaactgtttacattatatcttacctcattcatccagcctttgcatttttgtttgcttgtttttgagacagagtctttttctgtcgcccaggctggagtgcagtggcacaatcttggctcactgcaatctccgccttctgggttcaagcaattctcctgcctcacctnctgagtactgggataacaggcacccgcaccatgccctggccatttttaaatattttagtggaatgggttcacatgtggctgctgctcaatctgactaatacaccacttgcctgctcaatntgatcgctacaccctgcacntnttt

SEQ ID NO: 5176 - DNA, 757 bp, Homo sapiens
  misc_feature (688)..(688): "n" may be a, t, c, g, other or unknown
  misc_feature (729)..(729): "n" may be a, t, c, g, other or unknown
  misc_feature (747)..(747): "n" may be a, t, c, g, other or unknown
attgaagcttaaagaatgctttattaagccccttttctgggatcattagctgcatgttaacctattgtccaaaaatagtagttagacagtacctgtaaaacgtttgacttgcaagctatgcatgatctgtactgtgaaattgtgtctagggtcttgtggccaaaaagtaaatgttacaggaaaaaaaaagcctaatgaaatccctgttcacttccagtatcctatccaaacttcattgctgtattagtaaggtgcaaatataagagcaagcatgttttgcagtgttcagactggttttgtttgcccttgaagttggccagcttgtcgttgtatttggtgtgggcatatgtgggcatcatttttcagatgccaaactaaaatgtaggtagtatttttagaatgagatttgacattgttttagtgtctttcttttttaagcaaaaatttgagttatccctgaaagagttgaagatttgaagctttgcacaaaagcactttttttaacagtaaaaaatactgcccatgaaatttaaagacttgaagtttactaaagctacaataattactttttagctaaataaaaggaagcagaaaattcagtttgagatatatttcctataaagaccagattcttactgataatctggtatttattccagtctagattttgattttaagagttcccatncctttatttgaaaacttatgttggttcaaaattgggtaagnctgcttttcattggtttncaaatgggat

SEQ ID NO: 5177 - DNA, 786 bp, Homo sapiens
  misc_feature (775)..(775): "n" may be a, t, c, g, other or unknown
  misc_feature (779)..(779): "n" may be a, t, c, g, other or unknown
  misc_feature (786)..(786): "n" may be a, t, c, g, other or unknown
gaaatcaaaactaaaaatccttgatgatgtgttatgggtgtggtttgtacaagagagctaatacagaattccattcagtgaatcctctgtttaaagagaaagccttggcctttgtcagaagatgggaaaacaaatgtacatttataaactttcagttaaaataaaatgtttaaattatatatctgtgtatcttttttttttaaacgattccttctaacctttttttttaaacgattccttctaacccatttttttttttgttaaacccaaccagccaactcttggtcctgattgtattggaaactagggcttctattaaagatagttaacatctatttagttcatatacaatatcagcattattcgaagagtttcacttgaattatctcagttaagcttcgtaacaaccctatgtcttctctttatagttaagaaaactgaaccttagagaggtgaagaattcgtccagggtcataaaactagcaagtggcaaaattgagatttaaacactgctaggtgttaccttaggatctaaacttttaaccattactccaaagtacaggctgggtgcggtggctcacgcctgtaatcgcagcactttgggaggccaagacgggtggatcacttgagcccaggagttcaagaccagactaggcaacatgacaaaaccccgtatatctaaaaacaaaaattagcccgggcatggtagcacacacctgcaatcccagcttcttgggaagctgaggcatgagaattgcttgaccctgggaagcanaagntgcagcn

SEQ ID NO: 5178 - DNA, 863 bp, Homo sapiens
  misc_feature (745)..(745): "n" may be a, t, c, g, other or unknown
  misc_feature (826)..(826): "n" may be a, t, c, g, other or unknown
  misc_feature (834)..(834): "n" may be a, t, c, g, other or unknown
  misc_feature (857)..(857): "n" may be a, t, c, g, other or unknown
tttaaatctaagggatattttcccttcctatagaaaaagatgcttttgcttggcctaatgaccatactgggcagagatcagggtgaaatccagagacttcagcccatgttactagtttcagctacaggtgagaagtagcactgcaaagaaaagctaaactggtaaccttgctgtgtagcagagatctttggtcataggagtattcctgcatgggccataaggttgtggtttgaggtggaaactccctgaaacatcagctggaaagtcgcctttagaataaagacaaagaaccttctgcaagccagccaaggcaataccaggacttggaggtggcaagtttgataaactaatctgtaggaaaaagttcctatcttagtgcttacacagttcttttttctttttttggtatagacggggtcttgctacattaattctttgactggggctgggtcttcttttgcacagggcagcttgagactacaatcaccatggcttcctctcaataccaagtcagggattaggctgtaagaataacaatacaagtactaaagactgaaattttattaaagccaaagattgagaactggtttccggacagcttctagccatgcattcataggctgtgagcaggagtcctgtagaataacaggagacctctggggtccaagctctgagcttctgggcacattttaaatgggtctcactttattggccaatctggaatgcagtcacatgatcacagctnactacagcctggaacccttggacttcagcagtttccaaccttagccttcctgaatagttgggactaccggcacgtgcccancttaactnaatttattaatttaaccttttanaagaac

SEQ ID NO: 5179 - DNA, 747 bp, Homo sapiens
  misc_feature (689)..(689): "n" may be a, t, c, g, other or unknown
  misc_feature (701)..(701): "n" may be a, t, c, g, other or unknown
  misc_feature (718)..(718): "n" may be a, t, c, g, other or unknown
tccctgatatgatgtctgcaggtattcatgctcctgtatagttccctcccacactgaatagggttgccctgttgaaacgttggaatattctggaaatgaccatgtgtgacttccaaggcaaggtcataataaaaaacattgcagctcctaccttgtctctcagatcactagttcaggggaagccagctgccatgtcataaggatgctcaagcagtcctacagaaagttccatgtgaccaggagcagaggcctcctgccggcaaccagcactagtggcaggcatgtgagtgcgccatcttgcaagcagctcttccagccccagttgagccttcagatgactgcagccccagctgacatcttaactacaacctcatgacagaccttgagcagaccctctggctaagcttctcccaaatttatgactcccagaaacagtgcaagatgatacatatttattgttgttttaagctgctaagttttgaggaaatttgttacacagtgagaggtactcaatacactgagtcactcccctaacccatagcacaggctgagtccccaaacctgcactagaggcaacaaagagggagaagccctttccatggagctaactgtgcatctggggagaaagagtcatcctaagtccatctggggaccatgaagggttggtgtgggatctgggtgggggtggnctaaggccctanagcaagtagccctggtntaggacaccaggaaaacaacttcagggca

SEQ ID NO: 5180 - DNA, 743 bp, Homo sapiens
  misc_feature (685)..(685): "n" may be a, t, c, g, other or unknown
  misc_feature (710)..(710): "n" may be a, t, c, g, other or unknown
  misc_feature (712)..(712): "n" may be a, t, c, g, other or unknown
tttaatgggaaactccccccgcacacacacacactttttttttgaggcacagtctcactatgttgtccagactggttttgaactcctgggctcaagagatcctcccacaccagcctccccagtagctgggactacaggcatgacccactgcacccagctaaatttttcaattttaaaatgttggcaactcacttaaatgtaagacaaataaacacatctgtaggctggcagtgctgcccacactgcccagactaggggttagggggtctgtatgggccatcaccaggctgctaaccacagcaaccaatatgtgccaagcctgactacacgtaccttctcattccaccctcctggcagcctcacatctgctttacaggtggggaactgaggctctaagagactaagaaaattacccaaggccactgcagctagccaggggcaggtatgggagtcagagctgggtgcagctgactacaaaccctgtgctcaggatgacaccctctaggagcctcgacctctctcccagttctcttctccctccactcaggcaaatgagctctgccttcacagggcaccaggctggaacatatgtctggaggccaggggcggtggctcacgcctgtaatcctagcactttgggaggccaagatgggaagatcattgaggtcaggagttcaagaccatnctgggcaacatgatgaaaccccgtntntactggaaattccaaaactggctgggcatgg

SEQ ID NO: 5181 - DNA, 745 bp, Homo sapiens
  misc_feature (715)..(715): "n" may be a, t, c, g, other or unknown
  misc_feature (720)..(720): "n" may be a, t, c, g, other or unknown
  misc_feature (736)..(736): "n" may be a, t, c, g, other or unknown
aaaaaacaaggttagcctgcagcagagccgcagcagcaacagccaccaaagcgggggctgaaagggaagagaacttagatttgacctgtgcaaggacctcagcagcttggacacagcccactgcagagatgaaaggagaagctggacatatgctacacaatgaaaagtcaaagcaggagggacacatctggggctctatgaggaggacagctttcatcctgggctctggacttctctcatttgtggccttctggaactcagtgacatggcatcttcagagattttggggtgcttctggctacttttggcaagcccagtgggagaggctgctgactacatttgaagggaaggagtggatcctcttctttataggtgccatccaagtgccttgtctcttcttctggagcttcaatgggcttctattggtggttgacacaacaggaaaacctaacttcatctctcgctaccgaattcaggtcggcaagaatgaacctgtggatcctgtgaaactgcgccagtctatccgcacagttcttttcaaccagtgcatgatatctttccccatggtggtcttcctctatcccttcctcaaatggtggagagacccctgccgccgtgagctacccacctttcactggttccttctggagctggccatcttcacgctgatcgaggaaatcttggtctactattcacaccggtgagcaagccctgnctgangcacagctggcttctnatcctgcta

SEQ ID NO: 5182 - DNA, 730 bp, Homo sapiens
  misc_feature (381)..(381): "n" may be a, t, c, g, other or unknown
  misc_feature (694)..(695): "n" may be a, t, c, g, other or unknown
  misc_feature (707)..(707): "n" may be a, t, c, g, other or unknown
ttccagacatgtccttccaacccagagttcccctcctttttcagctacgcttcttgttccctgtctcatctccttttttcccatcactccccaagtccctgtggtctggctgacactgttctggtcacattctactggctaaatccaacagagttttttcagtctttattttgtttgacatgtaacctagctggctcttcatcccttcccaaaacttcccttttgacttctgtgtcctttaatctttgtgttttcctctgatctctctgaccgttcctttttagcctttttagctggttcctcttccctgcctattcatcagtgttgttccctgacgtctcattcttgatgctctcctcactctgctaagatttatcaggnctaacagctttagctattacctataaagcttctgcatctttttcatcttcagcactatcatctcctaaagtccagacatacagtaaactagaagcagttctaaaatttccactttatctttgcccccttgcctgacgtcatttgtccattctagatctgccccccctttcctcattcagaggcctgtgatgtctggagttcctccttttcctcacatctagtcactcaccagggcttgcagtcccactttcaaaatacctcttggttccatctttccggccctggctctggcccttaccatgttttgcctcanntgctgcaatggnttcttaacctgggcttctcactg

SEQ ID NO: 5183 - DNA, 788 bp, Homo sapiens
  misc_feature (742)..(742): "n" may be a, t, c, g, other or unknown
  misc_feature (745)..(745): "n" may be a, t, c, g, other or unknown
  misc_feature (785)..(785): "n" may be a, t, c, g, other or unknown
ctgcatggctggggaggcctcacaatcatggaagaaggtgaaggaggagcaaagggaagtctatcatggcagcaggcgagacagtgtgtgtaagggaactcccatgtacaaaaccatcaaatctcttgagacttatttactatcatgagtacagcatgggaaaacctgtccccatcattcagttacctcccaccaggtcccttccaggatatctggggattatgggagctacaattcaagatgagatttgggtggggacacagccaaaccacgtcaccatctggtttgacttctccttagaggccacatcatgggcctgtcagccaccataattctgggactcttttcccaagttcatgtccataacccctcttccgtctgcaactgggaggtcagctttcatgaacattcccaggagaaagcgaggtggggaggaggtggagctggaaaactgccaaccctaaagagaaaggagtacctttgggcagttacctagggtagaagagctgttcgcacaaagaacccacagtactaaaatgactttcacagactccactcataggcaaggctgctattgagctgatgaacactggcacagccatgccagttgctaaaatacagaaattcttttgtgtaaattgataaagagcaaccaccctggacactctaagtctagtccaactgcccaaagtcaccctgacccaaagtcaaccatttaagatgatcccatgagccacaagtnaangggttaatggtttggcggggcttggggcaccaggactctnttt

SEQ ID NO: 5184 - DNA, 727 bp, Homo sapiens
  misc_feature (633)..(633): "n" may be a, t, c, g, other or unknown
  misc_feature (697)..(697): "n" may be a, t, c, g, other or unknown
  misc_feature (706)..(706): "n" may be a, t, c, g, other or unknown
caaaatattatccattgtaaactgagatttaattctcaaatgtattctacttgttctaaaacaatctgtccacaaatataagactataagtaataaattgttatttccgcacaatgggaatctctaatgtgaaaatgtattctatgaaaataatttttttaaataaaatgttgtataaaaaaaaaaaaaaaaagatgaactgtccctgcatcggcctaaaggtatcagtgctcaaaatcccactcctgctttccaactcaaaggcttgactcttgcagttcatctctcttctgtatcatcagatttttcctctctatcggattattgccctcctgcttctcctccatttctctgttcccctttatagcaaagtccttggcagagctgcccctgcatgctgtctccactttctcatctcctgctcttgaatcagtcaagccaggctgttgccttcttcctcctctacaaccatgcatgccaaggtctcctggccaaatccaatggctacttcccagccctcatccgacttgacctctcagcagcattcagcccacctggggccctctctttccttgccttccaggacctcatgctctcctgggcttcctcctgcctctccaagcacaattctgnctcctttgctggctcttacacatgtccccctctaaaatgcagggtgttctaagactcagtcctnaacttcttnccatctctctttatcctcact

SEQ ID NO: 5185 - DNA, 770 bp, Homo sapiens
  misc_feature (700)..(700): "n" may be a, t, c, g, other or unknown
  misc_feature (730)..(730): "n" may be a, t, c, g, other or unknown
  misc_feature (766)..(766): "n" may be a, t, c, g, other or unknown
taggggcaagattagaagctgggagaccatggatattaggcaagaaattatgagtatttgttggcaagatacagtgctattaattggaaagagttatttaggagattagcaaataattacatattgggtgacatggttgggagacagctcagtgcagagataagagaaagaagttttggtgaattgcatggttttgccccaggcaactgggtggacggtggaactgtaaattgagaatgattacaataatgctaacatttaaggggtatttagtatgttccaagcactgtgctgtatgctttacacaaagtaacttattcctcataataacctgtgaagtcggtaaactattacccccattttatagatggggaagctgagacctggagacaaaacggaagtcccacttagctaagattctaaaccagacattctgactccagaacccagcgcatagactctatattacggcaatattatagcccataccattgtcaataatagtatgaaatttgacatctcctaatcaactttatatctcacacatatggagtgatgacaaataatgccttaggtcaccacattagttggagaaatgtagcattaaattaccgctcttatagtaaattaccatcaaataatgaatttgtgccaagtacaagagcctgaatttccaacaatagattataataccattggngaagttaaatagcagatttgaattgcagtntttaatgtgttctttatcaatgagggatctacttancttt

SEQ ID NO: 5186 - DNA, 780 bp, Homo sapiens
  misc_feature (720)..(720): "n" may be a, t, c, g, other or unknown
  misc_feature (746)..(746): "n" may be a, t, c, g, other or unknown
  misc_feature (748)..(748): "n" may be a, t, c, g, other or unknown
agatgtaggggagatggggcagaggagaggtctctgagcaccaggagaaggtcctggggtgggaggaggcatggtgtggtaaccgccgccctacctggtggcacccgaggagcttccccactcaggatgtggttttctccatcatggaaatgttttggatagtttctcagctgcatctgaagcctggaagcccaggccgatgggtcagagcaggagcctttggggagaggctatcagtggctctcagagcaaggaggggtctgggcagtgcctggtaccgggcgggagccaggctccctgggcccgtgactgagttctgcctgctcccctcttctcacaggtggtacaagctgcactccaagccaggcaagaaggagaaggaacgcggcgagattgaagtcaccatccagttcacgcgcaacaacctgagcgccagtatgtttgacctgtccatgaaggacaagccaaggtctcccttcagcaagatcagggacaagatgaagggcaagaagaagtatgatctggaatctgcctctgccatcctcccaagcagcgccatagaggatcctgacctgggcagcctgggcaagatgggcaaagccaaaggcttcttcctccgcaacaagcttgcgcaagtccgtcccttgacccagtccaacacctcgcttgggctcggacaagcacccttgtcctcagccagccgggagcttggcctaccanggacctgcgccgacttcttaccccgntnaccaagccgtacaagctgcttgtccacttgaa

SEQ ID NO: 5187 - DNA, 701 bp, Homo sapiens
  misc_feature (655)..(655): "n" may be a, t, c, g, other or unknown
  misc_feature (668)..(668): "n" may be a, t, c, g, other or unknown
  misc_feature (693)..(693): "n" may be a, t, c, g, other or unknown
gactggaagaaagtgaaggggagctccggaagaacctggaggagctatccaggtgaagatggaacgggagcagcatcagactgagatcagggatctccaggaccagctctcagaaatgcacgatgaactggacagtgcaaagcgatcggaggacagggagaagggagctctgattgaggagctcttacaggcaaaacaggatcttcaagatctgctgattgccaaagaggggcgagaagacctcttgagaaagcgagagcgtgaactcaccgccctgaagggagccctgaaagaagaggtttccagccatgatcaggagatggacaagctgaaggagcaatatgatgctgagttgcaggccctgagggagagtgtggaagaagcaaccaagaatgtcgaggtcttggcgagcaggagcaacacttcagagcaagaccaggcggggactgaaatgcgcgtgaagcttctgcaggaggagaatgagaagctgcagggaagaagcgaagagctggagcggagagttgctcagcttcaaaggcagatcgaggacctgaaaggcgatgaagccaaggcgaaggaaacgctgaagaagtacgagggagaaatcgacagttagaggaggcccttgtgcacgtcagaaaggaagaaaaagaanctgtgtcagccanaagggccctggagaatgaactggangctgctca

SEQ ID NO: 5188 - DNA, 734 bp, Homo sapiens
  misc_feature (694)..(694): "n" may be a, t, c, g, other or unknown
  misc_feature (705)..(705): "n" may be a, t, c, g, other or unknown
  misc_feature (722)..(722): "n" may be a, t, c, g, other or unknown
ttggcccaggaagtcgtttgtttggacagtagcggtggcagtgaggatgaaaaaagcagtcgagatgaggtgattgaactgagctctggagaggaggacactctgcacattgtggacagcagtgaatctgtcagtgaagatgatgaggaagaagagaagggtggcacccatgtcaatgatgtcttaaaccagcgtgacgcccttgggcgggtccttgtcaacctaaaccaccctccagaggaggaaaatgtcttccttgccccacagttggcacgggctgtgaaacctcatcagattggcgggatccggttcctttacgataacctagtggagtctctggagaggtttaagaccagcagtggctttggctgtattctggcccacagcatgggtctggggaaaactttgcaagtgatctctttcatcgacgtcctcttccgccacacgccagccaaaacagtccttgccattgtgccgaattggctggcagagttcaacatgtggcttccacctcctgaagccctcccggctgacaacaagcctgaagaagtccagcctcggtctttaaagttcacatcttgaatgatgagcacaaggcgatggcatctcgtgctaaagtgatggctgattgggtgtcagaaggtggcgtgctgctgatggggtaccaagatgtacagacttctcactcttgaanaaatcatttgncccaggtagacccgaanaaaaccccagaa

SEQ ID NO: 5189 - DNA, 680 bp, Homo sapiens
  misc_feature (389)..(389): "n" may be a, t, c, g, other or unknown
  misc_feature (411)..(411): "n" may be a, t, c, g, other or unknown
  misc_feature (490)..(490): "n" may be a, t, c, g, other or unknown
  misc_feature (541)..(541): "n" may be a, t, c, g, other or unknown
  misc_feature (573)..(573): "n" may be a, t, c, g, other or unknown
  misc_feature (669)..(669): "n" may be a, t, c, g, other or unknown
  misc_feature (676)..(676): "n" may be a, t, c, g, other or unknown
  misc_feature (678)..(678): "n" may be a, t, c, g, other or unknown
cctttccctgttggtgattctgggtctggccgtgggcttcagcctagtccaggatgttatcgctattgaatatattgtcctgaccatgaataggaccaacgtcaatgtcttttctgagctttccgctcctcgtcgcaatgaagactttgtcctcctgctcacctacgtcctcttcttgatggcgctgaccttcctcatgtcctccttcaccttctgtggttccttcacgggctggaagagacatggggcccacatctacctcacgatgctcctctccattgccatctgggtggcctggatcaccctgctcatgcttcctgactttgaccgcaggtgggatgacaccatcctcagctccgccttggctgccaatggctgggtgttcctgntggcttatgttagtcccgagtnttggctgctcacaaagcaacgaaaccccatggattatcctgttgaggatgctttctgtaaacctcaactcgtgaagaanagctatggtgtggagaacagagcctactctcaagaggaaatcactcaaggntttgaagagacaggggacacgctctatgcccnctattccacacattttcagctgcagaaccagcctcccaaaaggaatttttcattccacggcccacgcttggcccaacccttacaaagactatgaangtaaagnanga

SEQ ID NO: 5190 - DNA, 745 bp, Homo sapiens
  misc_feature (652)..(652): "n" may be a, t, c, g, other or unknown
  misc_feature (691)..(691): "n" may be a, t, c, g, other or unknown
  misc_feature (731)..(731): "n" may be a, t, c, g, other or unknown
atatgtgtcccatatagaacttttcaaactatttcctcttcttacttgcaaaaaattgcagccaaaacatattacatgtgttaacaaatttttaacttgcatagagtcctaacatttgtgttaatgataggagactttcaggtctccgttgattctattatactaatcctaaaatagcatcactggcaggcacaggatctagatctaaataaactctcaggctgctgagggataagcaggatctcataaaaaattgtggtatttctttatgacactgtttgccagcaggtgagccattaacagctttatctcccagcccttgcctccttctctggaatgccagtttctcttacttaaaagagcaacgcctttctttttctttctttctttctttttttttttttaattgtttttgtttgagatggagtctcactctgttgtgcaggctagagtgcaacggggtgattttggctcactgcaacctccgcctcccaggttcaaacaattgtcctgcctcagcatcccgagtagctgggactacgggcatgagccaccatgctcggctaatttttgtatttttagtagagacagggtttccccatgttggccaggctggtctcgaacttctggcctcaagagatccacccggctnggccttccaaaatgctgggattcaggcgtgagccaccgncaccggcctgcatttctttatagaagtccaccaggaaaanccctggacctactg

SEQ ID NO: 5191 - DNA, 669 bp, Homo sapiens
  misc_feature (360)..(360): "n" may be a, t, c, g, other or unknown
  misc_feature (628)..(628): "n" may be a, t, c, g, other or unknown
  misc_feature (630)..(630): "n" may be a, t, c, g, other or unknown
  misc_feature (647)..(647): "n" may be a, t, c, g, other or unknown
ctagctatggaattactgctttcaatcatcccctgaatctcaccaagcagcagctctcagaggtggctctgatgaccacatcagtggatgtccttgtgtccatctgtgtcatctttgcaatgtccttcgtcccagccagctttgtcgtattcctgatccaggagcgggtcagcaaagcaaaacacctgcagttcttcagtggagtgaagcctgtcatctactggctctctaattttgtctgggatatgtgcaattacgttgtccctgccacactggtcattatcatcttcatctgcttccagcagaagtcctatgtgtcctccaccaatctgcctgtgctagcccttctacttttgctgnatgggtggtcaatcacacctctcatgtacccagcctcctttgtgttcaagatccccagcacagcctatgtggtgctcaccagcgtgaacctcttcattggcattaatggcagcgtggccacctttgtgctggagctgttcaccgacaataagctgaataatatcaatgatatcctgaagccgtgttcttgatcttccacatttttgcctgggacgagggctcatcgacatggtgaaaaaccaggcaatggctgatgccctggaaaggntnggggagaatcgctttgngcaccattatcttgggacttgg

SEQ ID NO: 5192 - DNA, 785 bp, Homo sapiens
  misc_feature (651)..(651): "n" may be a, t, c, g, other or unknown
  misc_feature (763)..(763): "n" may be a, t, c, g, other or unknown
  misc_feature (773)..(773): "n" may be a, t, c, g, other or unknown
  misc_feature (785)..(785): "n" may be a, t, c, g, other or unknown
ccagaagaaaaaccagaagaagagaaagaagaggttatagatgaccaggagaacctggctcatagcaggaggaccagggaagatagaaaggtagaagccatcatgcatgcttttgaaaacttagagaaaagaaagaagcggcgggatcagcccttggaacagagcaactctgatgtagagattactacaaccacctcagagactcctgttggtgaagagacaaaaactgaagcccctgaatctgaagttagcaactctgtttcaaatgttaccatcccaagcaccccacagagtgttggtgtgaatacccggaggtcttcccaagcaggggatattgctgcagaaaaactagtccccaagccacctccagcaaagccttctaggccccggccgaagagtcgaatttctcggtacaggaccagttcagcccaaagactaaagcgtcagaagcaggccaatgcacagcaggcagaattgtcacaagctgccttggaagagggaggaagtaacagtttagtaactcctactgaagctggaagtctagacagttcaggagaaaacaggccattaacagggtctgacccactgtggtgtcaattactggatcccatgtcaaccgtgctgcatctaaatccccaaaaccaaaaagtntctagttacagaatggttgaatgacaaagcagagaagcaagaatgccctgttgagtgcctttcgtatcacaacggatccactgtctggcaacgaccctaacatgttccaggncttatccttncccgttaattgn

SEQ ID NO: 5193 - DNA, 882 bp, Homo sapiens
  misc_feature (716)..(716): "n" may be a, t, c, g, other or unknown
  misc_feature (743)..(743): "n" may be a, t, c, g, other or unknown
  misc_feature (881)..(882): "n" may be a, t, c, g, other or unknown
aggaacccgagccgcacggaacggcggtggtggcccgcggagccggacggggcactatgaacgaagaggagcagtttgtaaacattgatttgaatgatgacaacatttgcagtgtttgtaaactggaaacagacaaagaaacactctccttctgccacatttgttttgagctaaatattgagggggtaccaaagtctgatctcttgcacaccaaatcattaaggggccataaagactgctttgaaaaataccatttaattgcaaaccagggttgtcctcgatctaagctttcaaaaagtacttatgaagaagttaaaaccattttgagtaagaagataaactggattgtgcagtatgcacaaaataaggatctggattcagattctgaatgttctaaaaacccccagcatcatctgtttaatttcaggcataagccagaagaaaaattactcccacagtttgagtcccaagtaccaaaatattctgcaaaatggatagatggaagtgcaggtggcatctctaactgtacacaaagaattttggagtagagggaaaatacagactttggactttctatgttacaagattcaggtgccactttatgtcgtaacagtgtattgtggcctcatagtcacaaccaggcacagaaaaaagaagagacaatctctagtccagaggctaatgtccagacccagtattcacattacagcagagangaattgaattcgatgactcttggtgangtagaacaactgaatgcaaaagctctacgcaattccggaagtttttgaaagtaccttaccaagtgcaagaaaagatcttggcctacagtcatgtccgcacgttgcctcgacagtttgaaactggtctaagttccatgnn

SEQ ID NO: 5194 - DNA, 690 bp, Homo sapiens
  misc_feature (643)..(643): "n" may be a, t, c, g, other or unknown
  misc_feature (653)..(653): "n" may be a, t, c, g, other or unknown
  misc_feature (685)..(685): "n" may be a, t, c, g, other or unknown
ccgcttggcagcttgattctcaacttccagtactccaaacactcagtcagaaaagtcagtcagctgctttcctgctggcatgttagtcttggccttggcagctgcaggggtgagatgtgctaatgatggggccaagctgagctttgggggtgaagccatcagctgttcccatctccctctggcggaggcaaaatgagaacagctgggaagcaaggccaacatccactcccagaagccgctcctctgccagcagaggtgtcaacagaattccagtcatgtgagccttccaggagtgtatagtgaattcattccatacttaaacattctagtatacaaagaagattgtacaatggagtaagccaacaatggagacactcatctgtttatttttgtaaccttcagaatgaatgctatgattccatatagattgatttctccactaatttatctacaggaaaatcagacgcctgatttgccactaaaatttggacatgtcagatttagtctattcaattcactaagctttacttccagtttcttagtagggagagtctgctccttggagcataatttattcagctgcaatagatggtactcttgaaacttttttctcacatactttagtctcttttctggttcttgnctctgctctnctttaaaaaggtgattatcatccttctttctncctca

SEQ ID NO: 5195 - DNA, 641 bp, Homo sapiens
  misc_feature (520)..(520): "n" may be a, t, c, g, other or unknown
  misc_feature (609)..(609): "n" may be a, t, c, g, other or unknown
  misc_feature (619)..(619): "n" may be a, t, c, g, other or unknown
  misc_feature (629)..(629): "n" may be a, t, c, g, other or unknown
tacacgcctgtagtcccaactactcgggaggctgaggtgggaggattgcttgaacccaggaggcagaggctgcagtgaaccgagatcatgtcactgtactccagtctgggcgacacagcaagaccctgtctccaaaaaaaaaaaaaaaaaagttgggggaagcattccatgtgcagatggagggactggcccgagtcaaggtgggaggcgtgcaaacgcaggctctcacagtgcgtggccagcagcgtgggccccggcacggggcatggagcagagtagacagtgctgagtcctgctcactgtcctgtctggggagtcatcacatctactggaggtggctcagggcaggctccatctcttgcccagggcagcagggtgggccctgtggctgtactctttgttgctgccctaaagtgccaagagaacttgttttggaatcataaatcctgagtttgcagcctgttgctctcaactcttccctggttgtgtgacctcaggcaagtcaccctttctggtttgntttcccatctgcaaaacaggatgagagccagtaaggccccttcccgccctcaagttctatgtctctggtggctttaaaggtggagtcgnttcttgctgntcatctgcantgcccaatggca

SEQ ID NO: 5196 - DNA, 684 bp, Homo sapiens
  misc_feature (511)..(511): "n" may be a, t, c, g, other or unknown
  misc_feature (603)..(603): "n" may be a, t, c, g, other or unknown
  misc_feature (609)..(609): "n" may be a, t, c, g, other or unknown
  misc_feature (678)..(678): "n" may be a, t, c, g, other or unknown
aatgagactcctgagtgtcttcatgtcccgcaccaaatctggatccaagtcttccatatgtgagtcatcttccctcatctccagtgccacagcagcagctctactgagctctggggctgtggactactgcctgcacgtgctcaaatcactgctggaatattggaagagccaacagaatgacgaggagcctgtggctaccagccagttgctgaaaccacatactacctcctccccacctgacatgagcccattctttctccgccagtatgtgaagggtcatgctgctgatgtgtttgaggcctatactcagcttctaacagaaatggtactgaggcttccttaccaaatcaaaaagattactgacaccaattctcgaatcccacctcctgtctttgaccactcgtggttttactttctctccgagtacctcatgatccagcagactccatttgtgcgccgtcaagtccgcaaacttctgctcttcatctgtggatccaaagagaagtaccgncagctccgggatttgcacaccctggactctcacgtgcgtgggatcaagaagctgctagaagagcaggggatattcctccgggcaagtgtggntacagncaagctcaagctccgccttgcaatatgacacactcatcagcctgatggagcacctgaaagcctgtgcanagattg

SEQ ID NO: 5197 - DNA, 729 bp, Homo sapiens
  misc_feature (654)..(654): "n" may be a, t, c, g, other or unknown
  misc_feature (665)..(665): "n" may be a, t, c, g, other or unknown
  misc_feature (729)..(729): "n" may be a, t, c, g, other or unknown
agaagggcgctgagaagggagctggaaggaaaagaaggaaacattccttcctcaactggaggaagacacgcggccacacacagaaccagcggccccaggaccgtcaccctgcgtgcccgggcctgtccctcctgaccccaggattatagtggcgaggcagggtgttagccaagcggattgagccaggacacagcaccgcggagccctgcaggcgagtcctccggaggctgagagcaaacggctgcactaggaacccagcagtcagaccggcccccaccctggagtgaacacatcgccactgccaggcatcgcagggaggattaccccaatggcacctagctgggcgacgagaacaaccccgagatgcgggtgcactgcgccatcatcccctccgacatgctgcacatcagcaccaactgccgcacggccgaggagatggtgctcacgctgctggactacctcttccaccacgaggtgcaggctgtgtccagcctctcggggcagggcaagcacgggaagaagcagctggacccgctcaccatctatggcatccggtgtcaccttttctataaatttggcatcacagaatctgactggtaccgaatcaagcagagcatcgacttcaagtgccgcacggcgtggcggcgcaagcantggggccagancctggtggtcaaaaactttttgcgggagaatgcccaacttaatccttctacttggcccttaaan

SEQ ID NO: 5198 - DNA, 882 bp, Homo sapiens
  misc_feature (735)..(735): "n" may be a, t, c, g, other or unknown
  misc_feature (763)..(763): "n" may be a, t, c, g, other or unknown
  misc_feature (842)..(842): "n" may be a, t, c, g, other or unknown
  misc_feature (844)..(844): "n" may be a, t, c, g, other or unknown
  misc_feature (878)..(878): "n" may be a, t, c, g, other or unknown
ctatcgaatccacttttgttcgcatcaaagaaactccttctgaacaggagagcaaagtcttcgttctgactgaaaatggggagcgtacctacactgttaaccatgaaaccagccacccaccaccctccaaagtctttgtctgtgacaagcccgagagcatgaaggaattccgcctggatggtgtttccagccatgcgctgtcagacagctccaccgagttcatgcaccagattattgaccaggtcctgcaagggggcccaggtaagaccagcgacatcagtgagccatctccagaatcctccattttatcatccagaaaggagaacgggaggtccaactctttgccgatcaagaaaacagttcactttgaggctgacacctacaaggatcctttctgcagtaagaacctgtccctttgctttgaagggagcccaagagtggcaaaggaatcattgaggcaggatggacatgtcttggcagttgaggttgctgaggaaaaggaacagaaacaggaatcctcgaagattccagaatcctcctctgacaaggtcgctggtgacatttttttggtggagggcacaaacaataattctcagtcttcttcctgtaatggtgctttagagagtacagcccgccacgatgaagaaagtcactctctttcacccccaggagaaaatactgggatggccgattcctttcagatcaagggtaacctgatgactgtagaagctttanaggaggggagactattttggaagccatnccatttaaagcctcaaaatttaacagggacctaatagaatttgctttttaccagccaaggcttttaacaaagttccttnancttatgagaacaaaaacctggccaaggatgcttnaggc

SEQ ID NO: 5199 - DNA, 888 bp, Homo sapiens
  misc_feature (670)..(670): "n" may be a, t, c, g, other or unknown
  misc_feature (770)..(770): "n" may be a, t, c, g, other or unknown
  misc_feature (813)..(813): "n" may be a, t, c, g, other or unknown
  misc_feature (836)..(836): "n" may be a, t, c, g, other or unknown
  misc_feature (885)..(885): "n" may be a, t, c, g, other or unknown
ttttcatgcttgctccctggcctgaatctagaaagtaaaactttgctggaatgaagttggggttgaaacagtttcggtttgtaaccatactgtctctgtctcatctactcagctctgcctttgtaatgtaaaagcagccatagatggtatgtaaatgaatgaacatggccatgttctgatagcattttatttacaaaaacaggcagtgggctaaatttgggctatagtttgccaacccctcttctaggcaaagaactgcctgagcgtaggaagctggactgaggttctctgctagtgtgtgaacttgtggatgccaaagccaatctcttcccttcatgtcagacactttgcaaatgttacctcttttagatctcccattaactctaaaaggtggagggtgctattatgcttccatttcatacattgttctaagagattatcacactactagtaagttaggatagtaggaatttgaacttcaggtctgtcagaccctaaaaccccatgccctggaaatggttttctaaggctggcctgtggttcgttggttgatttcaattagaatttaagaattttttcagaatacatctaggtgtaaagatttttttgtcaatattactccacaaactagattatttcttttggcctgataactcaggaactttcttgnattacttctctcccttcttactggtttcttctttggactctcctgttgcacaggtattggatctcctggacctatccagttcctttcttttctatgctgncatatttttcatctcttaatgctctgggtctgggagcttccangacagttgctctttacacaactnaattgggtttcagttatatcagtctccaattagcccttcttttttggangca

SEQ ID NO: 5200 - DNA, 793 bp, Homo sapiens
  misc_feature (631)..(631): "n" may be a, t, c, g, other or unknown
  misc_feature (655)..(655): "n" may be a, t, c, g, other or unknown
  misc_feature (698)..(698): "n" may be a, t, c, g, other or unknown
  misc_feature (751)..(751): "n" may be a, t, c, g, other or unknown
  misc_feature (763)..(763): "n" may be a, t, c, g, other or unknown
caaaaaatgagcattattttagcaacacaatcctgacactatgagagggagaaaactgggttggatcaagtattcatcttacccagtaagccattataactcaggcttttgatgcatattttgggctgttattcatcaaggtggtcaaagtcatgaagaactgtatgttattctataatatactttctatattaagtctgttcagatgataccacattttctacatcactgatccattaaaaaaaaatctttctttgaatgcctcttgccactaatcaggctatgatattcagtttttgagataggttaacaaattgaaaacccagctttaaatgttatggtagtttaaaaatagaagtgttttacttcaaactattctgagttgctgcttagagcaataaaaatgtactttatagcttgttaacctagatctcagggatatccgttctacaataatggaagtagatttgtttactgtctaaatcagccttgtcagaacaatgctctccagtgactttttaaagtcagagtaaaccaatacattctgtcttctgtgattatacagcatggcatggtgttctcttgtatacttgtgttttgaatatgagtaacagtctttagctgactttancattttggagaaatctggatatgnggcttctacttatataagcatctaccaaatatattaactgagntttataggcccggtattttccatttcagtactttcaagactcttcgatatgcncttacatacttnatactcattaaatgaagatattgggaagct

SEQ ID NO: 5201 - DNA, 766 bp, Homo sapiens
  misc_feature (731)..(731): "n" may be a, t, c, g, other or unknown
  misc_feature (737)..(737): "n" may be a, t, c, g, other or unknown
  misc_feature (761)..(761): "n" may be a, t, c, g, other or unknown
ccattcaagcattcaaagacacatgataatgcacaatggagatggaacttataaatgtaagttttgtgggaaagcctgcccttgtctcagcatatatcttatacatgaacgagttcacactggagagaaaccatataaatgtaaacaatgtggtaaagcctttagttattcaacttcccttcaaatacatgaaagaactcacactggagagaagccttatgaatgtaaggaatgtgggaaagcattcggtagtcccaattccctttatgaacatagaagaactcacactggagagaagccatatgaatgcaaacaatgtggaaaagccttcagatggttccattcctttcaaatacatgaaagaactcacagtgaggagaaggcttatgaatgtaccaaatgtgggaaagcattcaagtgtcccagttatctttgtagacatgaagtgacccactctgggaaaaagccctgtgaatgtaaacaatgtgggaaagcattatcttatcttaactttcaaagacacatgaaaatgcacactagaatgagaccttataaatgtaagactgtggaaaagcctttgattctcccagttcgttttgaagccatgaaagaactcacactggagagaaaccttatgaatgcaagcactgtggtaaagccttcaatcgttccagttcctttcactatcatgaaaggactcacactggagagaaaccctatgaatgtaagcngtgtantaaagccttcatttctttcacttnctttt

SEQ ID NO: 5202 - DNA, 788 bp, Homo sapiens
  misc_feature (724)..(724): "n" may be a, t, c, g, other or unknown
  misc_feature (761)..(761): "n" may be a, t, c, g, other or unknown
  misc_feature (775)..(775): "n" may be a, t, c, g, other or unknown
cactgttcctacagcaatcggtcagttgtgggagtgcttgtccactaccagaaaagacacccagaaataaaggttactgccaaatatatcagacaggctcctcccacagctgcaatgatgagaggggtcgaagggccccaaggctccccccggccacccgcccccatacaacagctgaaccgaagcagctctgagagagatggccctcctgtggagaatgagatgttcttttgccagcactgtgattatgggaaccggacggtcaaaggggtactcattcattatcagaagaagcaccgagacttcaaggccaatgcagatgtgatccggcagcatacggccaccattcgaagcctctgcgaccgaaatcggaagaagcctgccagctgcgtgcttatctccccctctaatctggagcgggacaaaacgaaactccgagcactcaaatgtaggcagtgctcatatacctccccctacttctatgcactgaggaagcatatcaagaaagaccaccccgccctgaaagccacagtcacgtccatcatgcgatgggcatttctagatggcttgatagaagctggctaccactgcgagtggtgcatctactcccatacggagcccaacggtttgctcctgcattaccgacggaggcattcagaacactatggtgattacacctacatggctactaaactgtgggctgggccagacccatcccttcctntcttacaatgccagccgaagcccaaacctacagatcngggactgggtttcnaactggttccatt

SEQ ID NO: 5203 - DNA, 802 bp, Homo sapiens
  misc_feature (638)..(638): "n" may be a, t, c, g, other or unknown
  misc_feature (742)..(742): "n" may be a, t, c, g, other or unknown
  misc_feature (777)..(777): "n" may be a, t, c, g, other or unknown
  misc_feature (788)..(788): "n" may be a, t, c, g, other or unknown
ttatctactgtatctcacactactacttcagggattttgaactctgctccccactcctccagcacctcacacctccatcaccccagcgtggcctacgactgtctctggaactactcacagtacccatctgccaatcctggcagcaacctcaaggacccaccccttctctcccagttctcggggggacaatacccactcaacggcatccttgggggcagccggcaaccttcatccccaagtcataacactaaccttcgggctgggagccaagagttctgggccaacggtacccagagtcccatggggcttaactttgattcacaagaactgtaagattcctttcctgaccataattttgaggtgatgcccaatggaccccctagttttttcacctccccacagacttctcctatgttgggatctagcattcaaacctttgcaccctcccaggaggtaggcagtggtatccatcctgatgaggcagcagaaaaggagatgacttcagttgtggcagagaatggcactggcttggtaggcagcttggagctggaagaagagcagccagaactgaagatgtgtggctacaatggctctgtcccttctgtggaatcgttacaccaagaggtctcagtcctggnccctgaccccacagtgagctgtttagatgatccttcacatcttcctgatcaactggaagacacttcaatcctcagtgaagactctctggagcccttcaactctntggcaccagagccagtgagtggaggactatatggnattgatgaccngactgatgggtgca

SEQ ID NO: 5204 - DNA, 725 bp, Homo sapiens
  misc_feature (669)..(669): "n" may be a, t, c, g, other or unknown
  misc_feature (675)..(675): "n" may be a, t, c, g, other or unknown
  misc_feature (696)..(696): "n" may be a, t, c, g, other or unknown
gcagttaagtatttgtttaatcttgctttgtcttttcaaacagcgatttagtaatcctgtttgaggctgcagtgtggcaatgctttccagaggatggagtcctttttgtttgttttgaaaaaatagagatggggtttcactatgttgcctaggctggtctcatactcggcctcgagccatcctcctgcctgggcctcccaaagtgttgggattacaggcgtgagccatggtgccagactggagtccttttattaaaattaactgccctgctcagctttctgctgggccaccccagagccaatccttggttcttgggcccaaggctggacccaggggttgcaggaaacagtctgtagcatccaagtggggcctgtcgtacccactccagtgtgtaggtgcagaacgctctttgggggatttctctgctgggccaccttactccagggatccctcagttttcaaaacaaagcaagagggcaaggaagaatggagaaacagctcagtgttgactctcttccccctggtgagtgctgtgctggggcctctgtgcacatcataccacttcccccttgaatcagccccacaaggcagggtgagagatgaggactcagggtgcaaggaggtctcacagcttggaaatggatcaggacagctctgattcttcaaggncaaggncttctctatatcatgaggcancccaaaaatgtggttctacacatattctg

SEQ ID NO: 5205 - DNA, 662 bp, Homo sapiens
  misc_feature (615)..(615): "n" may be a, t, c, g, other or unknown
  misc_feature (649)..(649): "n" may be a, t, c, g, other or unknown
  misc_feature (658)..(658): "n" may be a, t, c, g, other or unknown
caactatacaaaacagtatccggtgtttgtgggccacaagccaggacggaacaccacacagaggcacaggctggacatccaggtgattatgatcatgaacggaaccctctacattgctgctagggaccatatttatactgttgatatagacacatcacacacggaagaaatttattgtagcaaaaaactgacatggaaatctagacaggccgatgtagacacatgcagaatgaagggaaaacataaggatgagtgccacaactttattaaagttcttctaaagaaaaacgatgatgcattgtttgtctgtggaactaatgccttcaacccttcctgcagaaactataagatggatacattggaaccattcggggatgaattcagcggaatggccagatgcccatatgatgccaaacatgccaacgttgcactgtttgcagatggaaaactatactcagccacagtgactgacttccttgccattgacgcagtcatttaccggagtcttggagaaagccctaccctgcggaccgtcaagcacgattcaaaatggttgaaagaaccatactttgttcaagccgtggattacggagattatatctacttcttcttcanggaaatagcagtggagtataacaccatgggaaangtagttttnccaa

SEQ ID NO: 5206 - DNA, 746 bp, Homo sapiens
  misc_feature (575)..(575): "n" may be a, t, c, g, other or unknown
  misc_feature (608)..(608): "n" may be a, t, c, g, other or unknown
  misc_feature (665)..(665): "n" may be a, t, c, g, other or unknown
  misc_feature (687)..(687): "n" may be a, t, c, g, other or unknown
  misc_feature (723)..(723): "n" may be a, t, c, g, other or unknown
atgttgtgtgaagtacatgagtcacaatctcaactgtgaactggatctgtgcagcagcttctcaatgttttctgggcattgtgtccccttagataagtcgcagcctgacacgtgtgctaaattatggtttgaaggtcaacaaatccatgcataacaaaaatccatgtatgagagtcaacattgcaacttttgactgcctctagatataagattcaaatcctcaacagtgggccatgctcatgtgagaggacaacaatctttactcttgactgtgtctgcttactagtattacaatctcacctttgagctgggctctgttagtacactctctgtaccacccaaagaatttatgagatacatggtttggctctatgtcctcacccaaatctcatctacaattgtaatctccatgtgttaaagcaggcaggtcattggatcatgggacagtttcccccatactgtttttgtgatagtgagtgagttctcagagatctgatggttttataagtgttggaagttccttctttattcactttctccctcctgccaccttgtgaagaaggttcctgattctncttctgccatgattataaatttcctgaggtctncccagctatgtggaactgtgagtcaattaaatcccttttctacctaaattacctggncttgggcagttctttatagcantgtgaaaatgaactaatacaatatgatatgcatganaattgcaatctgcattaaaacct

SEQ ID NO: 5207 - DNA, 708 bp, Homo sapiens
  misc_feature (551)..(551): "n" may be a, t, c, g, other or unknown
  misc_feature (647)..(647): "n" may be a, t, c, g, other or unknown
  misc_feature (660)..(660): "n" may be a, t, c, g, other or unknown
  misc_feature (684)..(684): "n" may be a, t, c, g, other or unknown
gaatgggctcctgcctgcctggtgccacatcctgccccagctttgagggctgaatcctctcagctcagagaagagcttccctagttttgcaggcgcacggaggcctcccacccgtacacctgcctctgctctccccctggccattgcaatgcatgcccgggatctgggtttaccctgcagcccgactcctccagggcaggctccttccgtccttgggtccagcagcctcccccctccgctgggtactgagcatctgaaaagtctcagatagggccctacacctcttctcccttctcaagtgctcagcccaggggtggggcttgctgcttgcaaagagcagcccaccctcctgtactgccatcctattgcctttgaagaaggaggtcagcctggacaggtgaactgagttgccttcagaaaggcctgtctcaggcagccgcagcaggcttcacgatgtccatgtatcctgtttgcctgctgccgtctctcctctcccaagaggggaggtctgcgtgttgagccagggaggaaggagcctgcagcctgctcanggtggtggctggtgactgcggggccagggcttgctgctgtctctcggaatgtcctgcatgtgggtctggctgttcctgctggcactgcctcttctnttttccttctttnccactctgcctgcttgcccgtcanggtcttcggatgcccctgcttgga

SEQ ID NO: 5208 - DNA, 645 bp, Homo sapiens
  misc_feature (611)..(611): "n" may be a, t, c, g, other or unknown
  misc_feature (628)..(628): "n" may be a, t, c, g, other or unknown
  misc_feature (632)..(632): "n" may be a, t, c, g, other or unknown
ttgtttattctgttcactgctgtatatctgcagccctgggcacgtagtaggtgcttgataaatagttgttgacttgacttgttagcagctggtagaagcttcccctaatgtttcattctccaggctttattttgagtgaagttgaggccagaaggcctcagtatcctcttccagggatgctgggaactgtagactggatgaccgtgagcttttcagtgtgtgtgtgtgtgtgtgtgttttttttttttttttttgaagctggaagaaactgtacagaaaagaggcccattttgcagatatggagaccaaggtccagagggaccagggccttgccttctacggcacctttgatgggagaatccgtaggcttgatgttgaggtccttcggtttgtctttctgccttttcattgcaattccagggggagagggaccctctggcctcacccttggctctgacctcagtgcggtcagtaaagtctgcctttccctctaactttcacctctttctccccactgcctacgtgcctgccctctgcccactgaaagtgggagcatcagaagggagctgtgcccccaacccccatgtgagggacagatcagcaaaagcctnaaagtccgtgggcccgngtgnctccatctcattg

SEQ ID NO: 5209 - DNA, 723 bp, Homo sapiens
  misc_feature (697)..(697): "n" may be a, t, c, g, other or unknown
  misc_feature (702)..(702): "n" may be a, t, c, g, other or unknown
  misc_feature (708)..(708): "n" may be a, t, c, g, other or unknown
tggagagcctcatccttgaacgtgaaggacgtttgaagactgtggcatgatcacaggatgagatcacagggaacttgagtttctctcctcctctcccttcacagttatttcactgagggaaatccctcccctgcccagaatgaaaactctagccaactcttgacttttccatcactccaaagtagttgaaagtacattagtctccacagtggcaaaacagtgtgcaaaagctaaataattagaacagccagtcccatgtgacagtcaaagcttctaactccattcaaagttgcagccattcccctcaagggctggcagggaggggaggggtaagagaaacaggaaggttcttactgagtttggtcctggtgtgagctgcgtcacactccctgcagaggtttcaaggagactctctctctctctgtctccatggggaccttatttgaattcttctactcttaccccagcctgccatctccagctatcctcccctgaagagcccttctgctgcgctggattctggtggccatgtcatctcctcggccccgtgggagtctgaagatctggctgcagcctcacctctgaggtcctgctagttgccacctcttaaacatgatctgaggctcccatgcactctgacctgtgcccacatggggcccacgggaaacacgctggcaagcaaactgtgggtgtgcanacggntctcanggcttgcagcacctg

SEQ ID NO: 5210 - DNA, 710 bp, Homo sapiens
  misc_feature (640)..(640): "n" may be a, t, c, g, other or unknown
  misc_feature (676)..(676): "n" may be a, t, c, g, other or unknown
  misc_feature (697)..(697): "n" may be a, t, c, g, other or unknown
ttgatgcattttggctgcagcggcagctcagtcgtttctatgatgatgccatcgtgtcgcagaagaaggcagatgaagtattggagattttgaagacggccagtgatgatcgggaatgtgaaaatcagctggttctgctgcttggtttcaacacctttgatttcattaaagtgttgcggcagcacaggatgatgattttatactgtaccttgctggccagtgcacaaagtgaagctgaaaaggaaaggattatgggaaagatggaagctgacccagagctatccaagttcctctaccagcttcatgaaaccgagaaggaggatctgatccgagaggaaaggtcccggagagagcgagtgcgtcagtctcgaatggacacagatctggaaaccatggatctcgaccagggtggagaggcactggctccacggcaggttctggacttggaggacctggtttttacccaagggagccactttatggccaataaacgctgtcagcttcctgatggatccttccgtcgccagcgtaagggctatgaagaggtgcatgtgcctgctctgaagcccaagccctttggctcagaagaacaactgcttcagtggaaaagctgccaaagtatgcccaggctgggtttganggcttcaaaacacttgaatcggatcccagagtaagntttacccggctggcctttganaccgattgaaaaa

SEQ ID NO: 5211 - DNA, 816 bp, Homo sapiens
  misc_feature (748)..(748): "n" may be a, t, c, g, other or unknown
  misc_feature (758)..(758): "n" may be a, t, c, g, other or unknown
  misc_feature (789)..(789): "n" may be a, t, c, g, other or unknown
aggtatttactttttgttgaattttaagggacctcaagtgaaataataatcggtgaattcaggatcaacctttatgtccagagcgtttgttccgtcgtccatttcttgtctagagtagtggtatgagctgaaaacattgctaagtgatcaccacatattgttgatgtaagggctactggttattacaagagatttttatgactcctgctgtgggggtgccctttctacccggctgagcttggtgggagccaaggctgagtcggatgtatctttatattcccagttctcggtggaacttaaaatgctgtgagacaccagacagacagatactgtgaacttggagctctctaatgaagggataccaaagtcttgtattcaatttttttttccttaaattgtcagccgaaaatgagagcacacctattcagcaactcctggatcacttcctccgccagcttcagagaaaagatccccatggattttttgcttttcctgtcacggatgcaattgctcctggatattcaatgataataaaacatcccatggattttggcaccatgaaagacaaaattgtagctaatgaatacaagtcagttacggaatttaaggcagatttcaagctgatgtgtgataatgcaatgacatacaataggccagataccgtgtactacaagttggcgaagaagatcctttacgcaggctttaagatgatgagcaaaccggcagctcttttgggccatgaagatcngctggttgangaacctgtccctgaagttgtccagtccagtngaactgccagaaatccaaaagccagtt

SEQ ID NO: 5212 - DNA, 772 bp, Homo sapiens
  misc_feature (675)..(675): "n" may be a, t, c, g, other or unknown
  misc_feature (710)..(710): "n" may be a, t, c, g, other or unknown
  misc_feature (763)..(763): "n" may be a, t, c, g, other or unknown
gcgatgattcccccacaggaggcatccgctcgacggcgggagattgaggacaagctgaagcaggaggaggagactctgtccttcatccgagacagcctggagaagagcgaccagctcactaagaacatggtgtctatcttatcatcctttgagagccgccttatgaagctggagaactccatcatccctgtgcacaagcagacggagaatctgcagcggctgcaggagaatgttgagaagacgctgtcctgcctggaccatgtcatcagctactaccatgtggccagtgacactgagaagatcatcagagagggccccacaggtaggctggaagagtacctgggaagcatggccaagattcagaaggcagtggagtatttccaggacaacagcccagacagcccggaactcaacaaagtgaaactgctctttgagcgcgggaaggaggccctggagtccgaatttcgcagcctgatgacgcggcacagtaaggtcgtctcgcccgtgctcatcttggatctgatcagtggtgacgatgatctggaggcccaggaggacgtgaccctggagcacctgccgagagcgtgctccaggatgtcattcgcatctcccgctggctggtggaatatggcccgcaaccaagatttcatgaacgtctactaccagatacgcttncagccagcttggacccggtccattcaaagggaccngaaaggagcattttccattaagaaccagttctttccttttgggggttccctanttccccttg

SEQ ID NO: 5213 - DNA, 700 bp, Homo sapiens
  misc_feature (648)..(648): "n" may be a, t, c, g, other or unknown
  misc_feature (666)..(666): "n" may be a, t, c, g, other or unknown
  misc_feature (681)..(681): "n" may be a, t, c, g, other or unknown
aaatgcttttgctttgtgttcagccaagatttgcagccttttttcagaggttttaaaattttcagaaaaaacatttctaatgtgtctaatgtgtcagtggtaacactgacttaatggtaaatggtaaatgatttaagtttccttgtcagagtcagtattatttgaaggagttaggaaggcagtctgaggctgtgatgagtctccttacctcccaaatgatcaagatggcaaccccagctcgcaagccattcaaggcgggcataacgtaccatgggttttctccctttgatccacatacccttctcccgggagctggaagaactgtgaggagaaagggagctcttgaagttgaagcatcagtgaggagaaaaaccattcaccccttccccccactatggctgaggactggcttctgagacagtttaggaaactgacaaagccatgaaggaatggctcagctatcgaccatctggacatccagcagtatctatccatgtccttatctttgtggggctctttctagctggacacactagattctgcccggcccaaggcctctggagaaatccagcttgggcatgcatgcatgcagggagagccacacagcacagctgtgagggcaggagccagccctggagtgtgccccanggaagacacagctctcangaggagactggaaanggtcctatggaagacattg

SEQ ID NO: 5214 - DNA, 659 bp, Homo sapiens
  misc_feature (576)..(576): "n" may be a, t, c, g, other or unknown
  misc_feature (645)..(645): "n" may be a, t, c, g, other or unknown
  misc_feature (649)..(649): "n" may be a, t, c, g, other or unknown
atattgactgtatgtcaggcccatgtccttttggggaggttcagcttcagccctcgacatcgttgttgcctaccctcaacagaactttcatctgggatgtcaaagctcataagagcatcggttagagctgcagttttccatccctcgcctgaggcagatcggtccgggtgagagctgcccagacggagtcactcactccatcagcggccgaatcgatgccaccgtggtcaggatcggaaccttctgcagcaatggcactgtgtcccggatcaagatgcaagaaggagtgaaaatggccttacacctcccatggttccaccccagaaatgtctccggcttcagcattgcaaaccgctcatctataaaacgtctgtgcatcatcgagtctgtgtttgagggtgaaggctcagcaaccctgatgtctgccaactacccagaaggcttccctgaggatgagctcatgacgtgtcagtttgtcgttcctgcacacctgcgggccagcgtctccttcctcaacttcaacctctccaactgtgagaggaaggaggagcgggttgaatactacatcccgggctncaccaccaaccccgaggtgttcaactggaggacaagcagcctgggaacatggcggggaactttaacctntctntgcaaggctg

SEQ ID NO: 5215 - DNA, 812 bp, Homo sapiens
  misc_feature (130)..(130): "n" may be a, t, c, g, other or unknown
  misc_feature (541)..(541): "n" may be a, t, c, g, other or unknown
  misc_feature (607)..(607): "n" may be a, t, c, g, other or unknown
  misc_feature (618)..(618): "n" may be a, t, c, g, other or unknown
  misc_feature (670)..(670): "n" may be a, t, c, g, other or unknown
  misc_feature (729)..(729): "n" may be a, t, c, g, other or unknown
  misc_feature (771)..(771): "n" may be a, t, c, g, other or unknown
  misc_feature (773)..(773): "n" may be a, t, c, g, other or unknown
ctaaggaagttgggctcggtcccagtgtcaagtgtccatattttctttattttcttttagaaactaaagggaagggaatgaaccatttcagagcatcaaccgaaacaagttaaaagaattgatctttgcntagaagaataactagttgtttcaagtctcatatgctacatactgtgtctttttgaataccaggttatacctcagctcattgcaagaattgatacgcccagacccttggtgggacgtctcattcaccagcttctcacagacattggtcggtaccacccccaggtatgtggagactctgggcagtttctcatctaaccactggtttggtggtcagcctttccaaaagctgccctggcgacacaagcgcaggaactgggagccatgtgttccatcctggcccaggagggtctgtccagccagccgtcccagagggcccgggagccttgctaaaaagaaagcgttccctcgaagactgagccccttcctggtagtctcaagcagatgttaatgtcacactcaccacttgttttgntattctccttaaaattcataccagctcttccccaacccacatttcctttatagatgtttcttctgnttttccctcangccctcatctacccactgacagtggcttctaagtctaccacgacagcccggnacaatgcagccaacaagattctgaagaacatgtgtgagcacagcaacaccctggtccancaggccatgatggtgggtcggaacccctggggggctttatanancctggtcccttaacttggtggggccccaagtgggaatgg

SEQ ID NO: 5216 - DNA, 660 bp, Homo sapiens
  misc_feature (565)..(565): "n" may be a, t, c, g, other or unknown
  misc_feature (628)..(628): "n" may be a, t, c, g, other or unknown
  misc_feature (654)..(654): "n" may be a, t, c, g, other or unknown
aggtaatgcttcattgttgaggctgttcgtgcattgtagactgttcagcagcattcctggcttctatctgctaggtgccaatagtgttttttatgacaaccagaaagtgtccagacactgccaaatgccgaggcaggggaagtgcagaatccttagttgagagtcactgctctagggtctggacccttccactaattaaatcttcttgcacctgcatacttagcttaccttggtatgcaggtgggtgaacacctgcctattagtagtgcccgtcgtcaaatcctgcatataaactggtaagaagtggtgctttctcttttcctggtacagatcctagcccagaggtgatgagcagtaaagctgcagattggaagggaggggctggtgaaaacagtggtgcggtgcagatggggagggattctagtagtaggcatcttagacttcagttggtgttggtggcaatggtatctgtacccctctaagaccgcatggcaagaatacaattttatatttaatagtgatcagcatggatgttggtgcgtcacaaacattgactcagcagtgnctaaacctgggcatttagaacaaggcctcacagaatcttctggaagtgcttcaaactcctttncaaacctagtcgcagttggtttttgnaacctt

SEQ ID NO: 5217 - DNA, 774 bp, Homo sapiens
  misc_feature (692)..(692): "n" may be a, t, c, g, other or unknown
  misc_feature (744)..(744): "n" may be a, t, c, g, other or unknown
  misc_feature (755)..(755): "n" may be a, t, c, g, other or unknown
ggcatctacaattgtcagaagaccagcattgtgcgggtgggtggaaggagcaacagtgaaatcctgaagcagttcaccctaagggagctgaggaacaagcgggaattccgccgcaacctccccatgcacctccgaagggcctacatgagtatcatgacacagatgaaggagtcagagcaagagcttcatgaaggagccaagaccctggagtccaccatgcgtggtgtcctacgggaacagtacctgcagaagtacatctcaccccagcactgggaaagtctcatgaatggaccagtgcaggatagtgaatggatttgcttccagcactggaagcattccatgatgctggagtggctaggtcttggtgtcggttctttcacgcaaagtgtttctccagcaggacctgagaatacagcccaggcagaaggggatgaggaggaagaaggggaggaggagagttcgttgatagagatcgcagaggaagctgacctgattcaagcagaccgggtgattgaggaggaagaggtggtgaggccccagcggcggaagaaggaagagagtggagcagaccaggagttggctaaaatgcttctggccatgaggctagaccattgtggcactgggacagcagctggacaggagcaagccacaggagagtggcagacccacacaaccagaaaaagaaaatgaanaaaagagtgaaggatgagcttccaaactgaacaccatgactgcagcccaggnccaccagatcnaagatgtttggcacctgga

SEQ ID NO: 5218 - DNA, 780 bp, Homo sapiens
  misc_feature (683)..(683): "n" may be a, t, c, g, other or unknown
  misc_feature (713)..(713): "n" may be a, t, c, g, other or unknown
  misc_feature (765)..(765): "n" may be a, t, c, g, other or unknown
tttgctttatttttttccttttctcttttttttttttttttctctttcctttttttaaatttaaaccattgagacttcagaagagcaggacacaatgctgtggacaggcaccaatttctttaaagaaattcaatgtgggcaaggcatatgtgtaaatttcacttttactttttataaggggttagggagctatttttggttttgtccttcactttccctctgtcttccttctttatacttttctcagttctacttatgacacctcacttccctagagaaggcctgcctccccatagggaatctgggggtttcttctggaacggggcgtgaggacacaaggaggcctctgggccacgcctccctaccagatgcaggaactcctggactccttggtgggctggccctggctagcccttgggcctcggagatgatcagaggtgaagaaccgcctggaagaggaaggccagggtttggccaggagaactaagaaggtctcaactccaggctttgttgtgtttaagctattgggagccccaggccacaccaggacttgcagtggtgggaatccattcctcttctgccctgtgttgcagggaactaggaggtaagggtggagggcgaccatctcgctcttgctggcggtggagcagccatccctgccttctgttgggaaaaactgttgngccaaactcttgtgtggaacacagctgggncttcagcaggcatctggcactgccggaggcaacgcttttacctaactggctnctggaatggcatctt

SEQ ID NO: 5219 - DNA, 715 bp, Homo sapiens
  misc_feature (676)..(676): "n" may be a, t, c, g, other or unknown
  misc_feature (678)..(678): "n" may be a, t, c, g, other or unknown
  misc_feature (707)..(707): "n" may be a, t, c, g, other or unknown
agtactagaactttcatgtgccctctgaaggatgtgagccatggaaccggcaaaccgcatccctgactaggggcctgtggccttgtcatttacctcccaaccaccacccctccatgcccctttatctgcttagcgcatttcttttcttcggttttgtacatgtatctgagtcctaatcccctatatgctccccttacagaggaaaaagacgggtttgcctgtgacctcctacataatcctcctgggagctcagatcaagaaggagacgatccgatggaggaggatgatttcatgtttgaactctcagacaagcctcttctcccttgctacaacctccaagtgtcagtgtcccgcgggtaagtgtccgagagatccacggtgactgagtgtcaggatcctggcactcagtaggaaggtggagttctccacgaggaagtgaagacctggcaacgagtgccatcacacatgacaaaggctagcctgcccttttagcccagagtagtcatgttcaaactagaggctgcaggctccatggacattgactatctgcatttcctgaaccttaaatctagattctctctcggaaggcttttttttggcactattactgggtataaaagataatctgagagatacttgggcctatgaactgctagaatctctggaacatttttgnantttctgggggtaaacagattgaacattanaaattgga

SEQ ID NO: 5220 - DNA, 755 bp, Homo sapiens
  misc_feature (615)..(615): "n" may be a, t, c, g, other or unknown
  misc_feature (697)..(697): "n" may be a, t, c, g, other or unknown
  misc_feature (745)..(745): "n" may be a, t, c, g, other or unknown
  misc_feature (749)..(749): "n" may be a, t, c, g, other or unknown
accgatcaaggatcaccagcctccaccccctctactacacggcccctcaactctgtggagcccgccaccatgcagccaattcccgaagcccacagcctctatgttaccctgattctctccgattccgtgatgaatatctttaaagacagaaactttgacagctgttgcatctgtgcctgcaacatgaacatcaaaggggcggatgtcgggctttacatccccgattcttccaatgaggaccagtaccgctgtacctgtgggtttagtgcgattatgaaccgcaaacttggctacaattcaggactcttccttgaagatgagttggatatttttgggaagaattctgatattggtcaggctgcagagaggcgcttaatgatgtgtcagtccaccttccttcctcaggtggaaggaaccaaaaaaccccaggagccacccataagccttctcctcctcctccagaatcaacacacacaaccttttgcttcactgaatttcctggactacatttcctctaacaatcgccaaactcttccctgtgtaagctggagttatgaccgggtgcaagcagataataatgattactggacggaatgctttaatgcgttggagcangggcggcagtatgtggataaccccactggtggaaaagtggacgaagctctggtgagaagtgccactgtgcactcttgggctnacaagcaatgtgctggacattagcatgctcttcttcccaggatgtggntcgnatgctg

SEQ ID NO: 5221 - DNA, 733 bp, Homo sapiens
  misc_feature (586)..(586): "n" may be a, t, c, g, other or unknown
  misc_feature (689)..(689): "n" may be a, t, c, g, other or unknown
  misc_feature (715)..(715): "n" may be a, t, c, g, other or unknown
  misc_feature (731)..(731): "n" may be a, t, c, g, other or unknown
tgccaaggttctaagtaatacaatttcaaaggttcagaggtgtctaatacaattttcccccttttgtacataattctatgccctttgtgtaattctgttagaaacattagggtaattatagagctacgttctgcttttcagttgctataatattagcctgggtctgctcgtaccagctgtattaataagcaatgactatggccgggcgcggtggctcacgtctgtaatcccagcactttgggaggccgaggcaggcagatcacctgaggtcaggagttcgagaccggcctggccaacatggtgaaaccccgtctctactaaaaaaatacaaaaagtagccaggtgtggtggcaggtgcctgtaatcccagctactcaggaggctgaggcaggagaatctcttgaacctgggaggcagaggttgcagtgagctgagatcatgccagcctaggcatcaacagcgaaactctatcccaaaataaaaaaagcaatgactgaagtttagcaaactcctaaattaagactttttctgagcctttctctgtagcatgtatttgctactagaggcaggcaaggtcataacctanggtgagctttgggttattaattcaaagacccagtgtctaaatcctcatctgtaaaatggggaccaaattatctgaacttccagtcactggatgtggggaccantgaacctgcttgggtgtgaaaacccnttgggaactgaaaaanga

SEQ ID NO: 5222 - DNA, 583 bp, Homo sapiens
  misc_feature (402)..(402): "n" may be a, t, c, g, other or unknown
  misc_feature (506)..(506): "n" may be a, t, c, g, other or unknown
  misc_feature (538)..(538): "n" may be a, t, c, g, other or unknown
  misc_feature (554)..(554): "n" may be a, t, c, g, other or unknown
cagtcagttactcaatatttatggaacacttcctgtgccaggccctggatttctcagctgtaacacagataaccaatatgtgccttatccctcaaatagctgacccaacggggcccaaaccccattttcatggtcctacctgtcctaccaacttttttttttttttttgccaatttctggtttttcttcctctagatcctgcctgcagacatttatatttgaacctgtgttcttggttccagacaatgtgggttcccaccaaaacccacttgcaccgaactctcatgggcttattagtaactctgtgaaagagttggctgcagtgggtggggtgaggggtttctggacccccttcacacaccacttagccctctctgactggcccttctgttaccactcctncgctttgctctgaacaagtgaccctttccctggcccagcaaaccaagagggcgtgaacaagccagtcccgctacctggcgcttctcccagggagcattctcctncccttctctggccccttctgtatttttatggngttttccccaggctgntaattaattagccttctttacaaaggcgg

SEQ ID NO: 5223 - DNA, 839 bp, Homo sapiens
  misc_feature (546)..(546): "n" may be a, t, c, g, other or unknown
  misc_feature (593)..(593): "n" may be a, t, c, g, other or unknown
  misc_feature (744)..(744): "n" may be a, t, c, g, other or unknown
  misc_feature (813)..(813): "n" may be a, t, c, g, other or unknown
  misc_feature (817)..(817): "n" may be a, t, c, g, other or unknown
agataatatgcaacagcatctgtaatgactgcataaacaattcttgcattttcctgaagtgttcattttaaatgattgattcatggctcggttcaagtatacacacagattagcctttgcaaataattcacttaatactagctacaccctgtggcagttgttttaaggtttttgatctctagggggtgtacagaagtgttctacttgtgcaaattgttttcctttttatgtcatcaattctgaaaacgtaggcttattacaggaatttttccccccatatatttttgagcctcatgcaattttgtatagcagtagccagtgaagttatccatattgcttcctctgatatagtctctgagtcaatttgttttaatgtttaaaaacttattgcctacttttccttgacacttacatgttcggcgtttcagtggaagataaaatgaagaaacttgatttccactccactagaaacaggctattttccttctatttcatcaaatctcaaagcttatagagattataactgcatgttggttattttactgntcttgcctatctatctatctatctacaaatctatctttctatcttgntcattttagggataatgaagaagcatttagtgggaccccacaagcataataaaaagtgtcactgtaagatatatttaccagcataaatataaaaagcaatatagtacttaacaaaaaatattacacattctctcataaggcacattttttncacacttttaattttggttttaccaattaaagtagtcactttaaaaatcagaaagcaaaggtttttganctanattaagttgggttatataagtc

SEQ ID NO: 5224 - DNA, 745 bp, Homo sapiens
  misc_feature (703)..(703): "n" may be a, t, c, g, other or unknown
  misc_feature (713)..(713): "n" may be a, t, c, g, other or unknown
  misc_feature (727)..(727): "n" may be a, t, c, g, other or unknown
gttttgttttttcatggagtctcactctgttgtccaggttagagtgcagtggtgtgatctcagatcactgcaacctttgcctcctgggttcaagtgactctcctgtctcagctttctgagtagctgggattacaggcacctgccaccacaccctgctaattttttttgtatttttagtagagacagggttttgccatgttggtcaggctggtcttgaacttctgacctcaagtgatctgcccgccttggcctctccaagtgctggaattacaggtgtgagccaccgtgtccggcctaaaatattgttgatatgtgttttaagtctttttaagcctatgctcccccatttccttacacttggccatagtcacatccagccatttttctctggtgtcctttggtctgggttgtgcctgttgtccctctgcctctgtgtttcctgcacgtgggcagttagatcctgagatgggatcaggctccactcagctgctgtggaagaataaaggggattcggatgtctgtcctctcatgctcctcgaagctgatgatgcttgatgccattcttggccttttttgcttttattttttgtagttcttaaggggtttaaaaaatcgtggcataaggtaatgcaaaaaggtgtccatgtgttaaacgtacaactagacggactctgcagtgtgcccacctgtcctgctgctggangccatttgangagccaactgcctntcacagctatggactgca

SEQ ID NO: 5225 - DNA, 526 bp, Homo sapiens
  misc_feature (498)..(498): "n" may be a, t, c, g, other or unknown
  misc_feature (504)..(504): "n" may be a, t, c, g, other or unknown
  misc_feature (511)..(511): "n" may be a, t, c, g, other or unknown
ggttggctcttgcacttcctggctctctggacttggttatgtgattgagcctccatggcctccgtgtctttgtctgtcaatgggtttgattaaagcgttgacctcataggttcttaggaggattaatgagaacattttatgtaaagctgcttacatggagccttggtatgtgccggaaagctttagccctttattaaaagtgacagcagacccagcacggtggctcatgcctgtaatcccagcactttgggaggctgaggcgggcagatcacttggggtcaggagttcgagaccagctactcgggaggcagaggcaggagaatcgcttgaacctggggtgcagaggttgcagtaagctgagctcgcaccactgcactccagcctgagtgacagagtgaaactcagtctcaaaaaaaaaaaaaaaaaaagagtggcagtagtggtgggggagacccccatcccccttgctggggtttcctaggaaagaaggctggtganagctgntgctggnggtgggccctgaccg

SEQ ID NO: 5226 - DNA, 713 bp, Homo sapiens
  misc_feature (635)..(635): "n" may be a, t, c, g, other or unknown
  misc_feature (700)..(700): "n" may be a, t, c, g, other or unknown
  misc_feature (702)..(702): "n" may be a, t, c, g, other or unknown
cagatgaagtattggagattttgaagacggccagtgatgatcgggaatgtgaaaatcagctggttctgctgcttggtttcaacacctttgatttcattaaagtgttgcggcagcacaggatgatgattttatactgtaccttgctggccagtgcacaaagtgaagctgaaaaggaaaggattatgggaaagatggaagctgacccagagctatccaagttcctctaccagcttcatgaaaccgagaaggaggatctgatccgagaggaaaggtcccggagagagcgagtgcgtcagtctcgaatggacacagatctggaaaccatggatctcgaccagggtggagaggcactggctccacggcaggttctggacttggaggacctggtttttacccaagggagccactttatggccaataaacgctgtcagcttcctgatggatccttccgtcgccagcgtaagggctatgaagaggtgcatgtgcctgctctgaagcccaagccctttggctcagaagaacaactgcttccagtggaaaagctgccaaagtatgcccaggctgggtttgagggcttcaaaacactgaatcggatccagagtaagctctaccgtgctgcccttgagacggctganaatctgctgctgtgtgctcctactggtgctgggaagaccaacgtggccctgatgtgcatgctccnanagattgggaac

SEQ ID NO: 5227 - DNA, 699 bp, Homo sapiens
  misc_feature (258)..(258): "n" may be a, t, c, g, other or unknown
  misc_feature (528)..(528): "n" may be a, t, c, g, other or unknown
  misc_feature (574)..(574): "n" may be a, t, c, g, other or unknown
  misc_feature (610)..(610): "n" may be a, t, c, g, other or unknown
  misc_feature (641)..(641): "n" may be a, t, c, g, other or unknown
  misc_feature (676)..(676): "n" may be a, t, c, g, other or unknown
tgcgcttttccctctgcagtgataatctggaaggaatatctgaaggtccttcaaatcgctccaattcagtgtcctccctagacctagaaggagagtctgtgtcagaacttggagcaggaccttctggcagtaatggagttgaagctctacagctgttagaacatgagcaagctacaacacaggataaccttgatgataagctaaggaagtttgaaattcgtgacatgatgggattaacagatgatagggacatatcanaaacagtgagtgagacctggagtacagacgtcttgggaagtgactttgaccctaatattgatgaagatcgcttgcaagaaattgcaggtgctgcagcagagaacatgttaggcagtttgctgtgcctcccaggttcagggtcagtgcttcttgacccgtgcactggttctaccatatcagagacaacaagtgaagcttggagtgtagaggtattgccaagtgactcagaggccccagacctaaagcaggaggagcgtctgcaagaactgnagagctgttctggactgggtagcacatctgatgatacggatgtcanggaggtcagttcccgccccagcacaccaggcctcantgttgtgtccggcataagtgcaacctctgangatattcccaatagattgaagacctgagatctgantgcactctgaatttgggggtaaa

SEQ ID NO: 5228 - DNA, 737 bp, Homo sapiens
  misc_feature (711)..(711): "n" may be a, t, c, g, other or unknown
  misc_feature (722)..(722): "n" may be a, t, c, g, other or unknown
  misc_feature (734)..(734): "n" may be a, t, c, g, other or unknown
gttctggcgcccggagcgcggccatgtgaaccgcttgtaccccggggagagacgagccccgagcccggctggacgccgctgcctcagaaatggaggcaaacgaccattttaactttactggccttccccctgcacctgctgcctcaggactgaaaccctctccttcctcaggggagggcctctacactaacgggtctcccatgaacttcccccagcaagggaaaagtttgaatggggatgtgaatgttaatggcttatctactgtatctcacactactacttcagggattttgaactctgctccccactcctccagcacctcacacctccatcaccccagcgtggcctacgactgtctctggaactactcacagtacccatctgccaatcctggcagcaacctcaaggacccaccccttctctcccagttctcggggggacaatacccactcaacggcatccttgggggcagccggcaaccttcatccccaagtcataacactaaccttcgggctgggagccaagagttctgggccaacggtacccagagtcccatggggcttaactttgattcacaagaactgtatgattcctttcctgaccagaattttgaggtgatgcccaatggaccccctagttttttcaccttcccacagacttctcctatgttgggatctagcattcaaacctttgcacccttccaggaggtangcagtggtatncatcctgatgangca

SEQ ID NO: 5229 - DNA, 867 bp, Homo sapiens
  misc_feature (742)..(742): "n" may be a, t, c, g, other or unknown
  misc_feature (819)..(819): "n" may be a, t, c, g, other or unknown
  misc_feature (847)..(847): "n" may be a, t, c, g, other or unknown
  misc_feature (849)..(849): "n" may be a, t, c, g, other or unknown
tgcgtgtcgttccccttctctgggatgggaggcagctgccacgggcctctgaaagaggtgcctggaggcaaagacattgcaagtccgaacttcgttctgggccaagctgtgtgcccacaggagcgggcaaacggggctgagaagcagcaagaaggacaagctcgggtaggagaaaaggggcagaagaagagtgacactgtggcttccttgatgttgcagcacccctctacggcccctcccaatccacagagcctctgaccagcaccagtcttgctgcctgtgctgggggcacttggaacattggttagcaggagcaacaggcctggcactgccagctaggttcagggaagagagaaatgggctgagctgctgctcctggtactactgggccatggatgaaggcaccagactagaagtccagagccctagccaggggcggcaggagggaagactaccacttattgtgtacctattctgtgcctagccccgcaggaggcacttgaatgtttctcatttagtcacatacatttattgagcacctaccacatgccaggcattgtcctgatgggatgcagtggtgagcaaggttcctgctctcataacaaccctgggaggtaggccctattgtcatccccattttacagatgagaaaatcaaggctcaatacagtttcatgatttatcacagctagtgagtgtggaggaaggattctgggcccctgacctaactcgtaagccttcgnttttcagctacctttcatgggcatgaccactcttctaatagcccccaggcttaaccttgcctctgggcaaggctatnggcttgcccttttggtggaatgttgganancctggcttttacttggtt

SEQ ID NO: 5230 - DNA, 536 bp, Homo sapiens
  misc_feature (484)..(484): "n" may be a, t, c, g, other or unknown
  misc_feature (519)..(519): "n" may be a, t, c, g, other or unknown
  misc_feature (533)..(533): "n" may be a, t, c, g, other or unknown
catgtagtatttggtttgctgttcctgcattagtttgcttagaataatggccttcaactgcatccatgttgctgcaaaggacatgatttcattcctttttatggctgcaaaattttttaatatttttgtatcaatgaggtctcactgtgttgcccagactggtctcaaactttggcctcaagcattccttgcacctcagcctcacaaagtcctgagattatacctgggagccactgcacccagccctttgatgcagttctcaatgacaccagtctttttttttttttttcttttttgtttcccttttagagacagggtttcgctctgttgcctaggctggagtgcagtggagtgatcatagctcactacagccttcaattcctgagctcaagcgatcctcctgcatcagctttcggagtacctaggagtataaacatgagccactacacccaactaatgtttttggttggtgttattttttttnctttaagagatagggttgccggcccggaggctggntcacacctgtaatncca

SEQ ID NO: 5231 - DNA, 682 bp, Homo sapiens
  misc_feature (566)..(566): "n" may be a, t, c, g, other or unknown
  misc_feature (641)..(641): "n" may be a, t, c, g, other or unknown
  misc_feature (672)..(672): "n" may be a, t, c, g, other or unknown
  misc_feature (680)..(680): "n" may be a, t, c, g, other or unknown
attggatcaaacatgtcacaagagtcggacaataataaaagactagtggccttagtgcccatgcccagtgaccctccattcaatacccgaagagcctacaccagtgaggatgaagcctggaagtcatacttggagaatcccctgacagcagccaccaaggccatgatgatcattaatggtgatgaggacagtgctgctgccctcggcctgctctatgactactacaaggttcctcgagacaagaggctgctgtctgtaagcaaagcaagtgacagccaagaagaccaggagaaaagaaactgccttggcaccagtgaagcccagagtaatttgagtggaggagaaaaccgagtgcaagtcctaaagactgttccagtgaacctttccctaaatcaagatcacctggagaattccaagcgggaacagtacagcatcagcttccccgagagctctgccatcatcccggtgtcgggaatcacggtggtgaaagctgaagatttcacaccagttttcatggccccacctgtgcactatccccggggagatggggaagagcaacgagtggntatctttgaacagactcagtatgacgtgccctcgctggccacccacagcgcctatctcaaagacgaccagcgcancacttcggacaggacatacagcgagagcttnaaggaccnca

SEQ ID NO: 5232 - DNA, 560 bp, Homo sapiens
  misc_feature (497)..(497): "n" may be a, t, c, g, other or unknown
  misc_feature (507)..(507): "n" may be a, t, c, g, other or unknown
  misc_feature (533)..(533): "n" may be a, t, c, g, other or unknown
atagatgccccctcctttgtgcctagctcctgcgaatccaccgagtgcctgagaccatagcttctactgtgcccacccaggcagggaccctcggccccctctcctccatttctgagcccccatggccagatcctgggcagggaaatgatcctttcaggagacaaccagagcccctcaccaggaacgggggcacccgtggactacgggagggtggcggttgggttctctgctccctcccagctcctgaacctggaacaatcggcagaaaacccaggaaccccggcactcctgcattcagcacgggattcccccacccatgcccagaagccctgaccttgctgtttctggaaaaagcatggggtggggcagggagggctggcatttcccccagaagaccttgccctttgacctgcccactctccacactgcctcacctggaaagccatgtcctgctggcctcattccttcctgaagggcctaggagtggagaggcctgngtagggctgncacaggctgggtagagccgcctggcntgaagcacggggtaaggtgccatacca

SEQ ID NO: 5233 - DNA, 770 bp, Homo sapiens
  misc_feature (571)..(571): "n" may be a, t, c, g, other or unknown
  misc_feature (744)..(744): "n" may be a, t, c, g, other or unknown
  misc_feature (749)..(749): "n" may be a, t, c, g, other or unknown
  misc_feature (754)..(754): "n" may be a, t, c, g, other or unknown
gaatattatgaatagaaaatgtattttttgtttgttttgcaaggaaggatataaagaaagagtaattttatatgtggaggaatcctgtatagtaaattccctatcctagagtaaaataactttaagaaagaggtagtatagaacatgtcaggaaattcagctatgttgtagatggtctgtgtaagtcatctgcacagtgcatgagtgtggaggtgggcgggcactcattggcccttgaactccttttgagcagtatggaagccaagaactagaagccaggaaatggggttgtaaaactgatttgtctatggattttatgtgttgagctgctgtggtcttggcttgtagtaattacctatatgaaccttccctcctcccctttagaatttaggacaggttcaaaaggccctccaatataaaaataaaatactgtccttccccacaaaggaaaaaatagctccccggttcaaccaggagacttagtcttgctaaaaccttaaagacagggtaaagacagggataccccaagaatcaattacaatgaaatggaaggggccttatcaggtattgntaagtacccccactgctgttaaacttcagggaacacctacttgggcacacagatccaggactaaacctggttcttatgagtcacaggcacaaaggaagggcactacaaccacaaccaatatcagtaaagctttggaagacctctgctacctatttaaaataatcaacactcanccccnaagangtaatgtaatgctgta

SEQ ID NO: 5234 - DNA, 689 bp, Homo sapiens
  misc_feature (615)..(615): "n" may be a, t, c, g, other or unknown
  misc_feature (636)..(636): "n" may be a, t, c, g, other or unknown
  misc_feature (663)..(663): "n" may be a, t, c, g, other or unknown
aagtctttctggaaattgacaaccgccagtgtgttcaagactcagaccactgcttcaagaacacggatgcagcagcagctctcctggcctctcacgccatacaggggaccctgtcataccctcttgtgtctgtcgtcagtgaatccctgactccagaacgcactcagctcctctatctccttgctgttgctgttgtcatcattctgtttattattctgctgggggtaatcatggcaaaacgaaagcgtaagcatggctctctctggctgcctgaaggtttcactcttcgccgagatgcaagcaatcacaagcgtcgtgagccagtgggacaggatgctgtggggctgaaaaatctctcagtgcaagtctcagaagctaacctaattggtactggaacaagtgaacactgggtcgatgatgaagggccccagccaaagaaagtaaaggctgaagatgaggccttactctcagaagaagatgaccccattgatcgacggccatggacacagcagcaccttgaagctgcagacatccgtaggacaccatcgctggctctcacccctcctcaggcagagcaggaggtggatgtgttagatgtgaatgtccgtggcccanatggctgcaccccattgatgntggcttctcttcgaggaggcagctcanatttgagtgatgaagatgaagatgca

SEQ ID NO: 5235 - DNA, 719 bp, Homo sapiens
  misc_feature (573)..(573): "n" may be a, t, c, g, other or unknown
  misc_feature (635)..(635): "n" may be a, t, c, g, other or unknown
  misc_feature (684)..(684): "n" may be a, t, c, g, other or unknown
  misc_feature (692)..(692): "n" may be a, t, c, g, other or unknown
cttcaccagtagaaaattctgattgttccacaaatagcagattatctttctctcctgaaaatatcctcatccaaaaccaagacattgtgagagaagctgcagtgcagggagatgggcagaagcaaaggcagcctcaggccacagatctggactccagtgggacacatggcagtgagatgcttccagccacagaagtgactgtgtcaggagggttttctgttgaagaaaccagctgtggagacacagggagatctggtggtgaggccctggctgttgcaaatgattctaccagcacaccacaaaatgctaatggactttggaaattgaaatctacaactcccggtggtgctttgcctgagtgttttggcaccacagacactactttttcttcagcattttgcagaaaacatggagagacacaggatacctcccaaagtagcctgcctggtaccttacattgttacacaggcattcgagaggggggagacgacactgaggtagagagtgaggcatttagctgcagtgaggggagcgaatagcaagatgctcctgatgactcacagaaaaatttangagacacagatgctgctgtagcccgaggtgagaccttccttagaggtaggttatttgacgtnagctctgcaagattttaacataagtctttttctgactggatagactttncacatcanaggttgtgatggttcttgagagctgcc

SEQ ID NO: 5236 - DNA, 733 bp, Homo sapiens
  misc_feature (591)..(591): "n" may be a, t, c, g, other or unknown
  misc_feature (712)..(713): "n" may be a, t, c, g, other or unknown
  misc_feature (731)..(731): "n" may be a, t, c, g, other or unknown
tgaagaacatttatgaatctcttgatgaagttactataaaagacactttggaaggtgataacatgtatacttgttctcattgtgggaagaaagtacgagctgaaaaaagggcatgttttaagaaattgcctcgcattttgagtttcaatactatgagatacacatttaatatggtcacgatgatgaaagagaaagtgaatacacacttttccttcccattacgtttggacatgacgccctatacagaagattttcttatgggaaagagtgagaggaaagaaggttttaaagaagtcagtgatcattcaaaagactcagagagctatgaatatgacttgataggagtgactgttcacacaggaacggcagatggtggacactattatagctttatcagagatatagtaaatccccatgcttataaaaacaataaatggtatctttttaatgatgctgaggtaaaaccttttgattctgctcaacttgcatctgaatgttttggtggagagatgacgaccaagacctatgattctgttacagataaatttatggacttctcttttgaaaagacacacagtgcatatatgctgntttacaaacgcatggaaccagaggaagaaaatggcagagaataccaatttgatgtttcgcagagtactagagtggatttgcatgatacctgcagttcttcaagacaaaacattttgacatnntattttgggtaagttggnaa

SEQ ID NO: 5237 - DNA, 765 bp, Homo sapiens
  misc_feature (546)..(546): "n" may be a, t, c, g, other or unknown
  misc_feature (703)..(703): "n" may be a, t, c, g, other or unknown
  misc_feature (707)..(707): "n" may be a, t, c, g, other or unknown
  misc_feature (760)..(760): "n" may be a, t, c, g, other or unknown
cactgatggatattccaatgggggagaccctagaccaattgcagcgtcactgcgagattcaggagtggagatcttcacttttggcatatggcaagggaacattcgagagctgaatgacatggcttccaccccaaaggaggagcactgttacctgctacacagttttgaagaatttgaggctttagctcgccgggcattgcatgaagatctaccttctgggagttttattcaagatgatatggtccactgctcatatctttgtgatgaaggcaaggactgctgtgaccgaatgggaagctgcaaatgtgggacacacacaggccattttgagtgcatctgtgaaaaggggtattacgggaaaggtctgcagtatgaatgcacagcttgcccatcggggacatacaaacctgaaggctcaccaggaggaatcagcagttgcattccatgtcctgatgaaaatcacacctctccacctggaagcacatcccctgaagactgtgtctgcagagagggatacagggcatctggccagacctgtgaacttgnccactgccctgccctgaagcctcccgaaaatggttactttatccaaaacacttgcaacaaccacttcaatgcagcctgtggggtccgatgtcaccctggatttgatcttgtgggaagcagcatcatcttatgtctacccaatggtttgtggtccggnttanagagctactgcagagtaagaacatgtcctcatcttcggcagccgaaacatggncacat

SEQ ID NO: 5238 - DNA, 759 bp, Homo sapiens
  misc_feature (688)..(688): "n" may be a, t, c, g, other or unknown
  misc_feature (730)..(730): "n" may be a, t, c, g, other or unknown
  misc_feature (746)..(746): "n" may be a, t, c, g, other or unknown
gggtaggaaaacagttcctcgtggacagcagagctgcctgctcggtcctgacccagcctatttgcctcctctccaattgcaattgcagggtaatgggaatagacaggtgtcctaaggtaagaaaatttactttccctcttgcttgtgaggccatgtctaggcttttttctcctcatttctgtatgccccccggaatgtcctactccattgctgggtagagacttattaagcaaaatgggagccaccatctccctggaagaggacagactgcaggtagaggcagagccagaacagggaatccacctgctagcactcttaaatggacaggaacttgagacccaaaacatacccaaagaaagcaaggatcacatcaccccttccctatcggacacttcagtcctaggacaggctaataaagttccgccagtaaagacagacctgaagcctgggatgggctatccatggaggaaatcatacctcctaaaacctgtggcactgaatggggttcagccattactccacaaattcctatagcaagggctaaaccctgccagtccccaggcaacacctcggtcctccctgttaaaaagcctaatggagaatatcagtttgtgtaggacttgaagggggttaatgaggcagtcattcccatccacccaacactggtcccaagcttgtctgtgctcanatacctggagatgctcagtttttcactctactacacttcaanggatgctttcttttgngtagcccttttca

SEQ ID NO: 5239 - DNA, 812 bp, Homo sapiens
  misc_feature (656)..(656): "n" may be a, t, c, g, other or unknown
  misc_feature (674)..(674): "n" may be a, t, c, g, other or unknown
  misc_feature (784)..(784): "n" may be a, t, c, g, other or unknown
  misc_feature (807)..(807): "n" may be a, t, c, g, other or unknown
  misc_feature (812)..(812): "n" may be a, t, c, g, other or unknown
ctttatcgctttcagatttggaggccaatcactgccaccttttatttccctgtgggtccaggaactggatttctttatttggtcaatttatatttcttatatcagtattctacgcgacttgaaacaggagcttttgatgggaggccagcagactatttattcatgctcctctttaactggatttgcatcgtgattactggcttagcaatggatatgcagttgctgatgattcctctgatcatgtcagtactttatgtctgggcccagctgaacagagacatgattgtatcattttggtttggaacacgatttaaggcctgctatttaccctgggttatccttggattcaactatatcatcggaggctcggtaatcaatgagcttattggaaatctggttggacatctttattttttcctaatgttcagatacccaatggacttgggaggaagaaattttctatccacacctcagtttttgtaagtgtttttgtcctgtctcatctaacattttactgcctgtgttcttagtgcatcctaatgagagctccatgaggagtatgatttacccctatgccccatctgctggagaaacctgaggcaacaagtgacttaccctagtcacacagtcacaggaagttagggattaaagcttangctcagttgccttcctgntactcttttagccagggaccactgacaactagattccaacattacaggaggcatctcaactctctgagcctgctgagggacctgatgcacttcagagtgcgaaacagtangctggtgaatgggcagagcacangttan

SEQ ID NO: 5240 - DNA, 785 bp, Homo sapiens
  misc_feature (473)..(473): "n" may be a, t, c, g, other or unknown
  misc_feature (477)..(477): "n" may be a, t, c, g, other or unknown
  misc_feature (710)..(711): "n" may be a, t, c, g, other or unknown
  misc_feature (718)..(718): "n" may be a, t, c, g, other or unknown
tactcaccagctcaaaacctgactcatctcccgtcaccccacccacagacccagccgatgactcctcttcctttgaccccgtggattttctccctcctcgacagcatcatgatcctccaccagagcatcatgatcctccaccgtatgtccctgctccggctctacccctctcccccactctctccaaccaacccacttctgactctgagacctctctgcctcctcccctcacccgctctcgggcccaatgtgctcagcaaccagctcccttgcttcctctccgggaagtagcgggagttgaggggatcgtccatgtccacgtccctttctccttctacgatctcttacagattgaagaacgtctcgggtccttctcctccgatcctgatacttacatcaaagaatttaaatatcttactcaatcttatgaactcacttggcatgatctctactttatcctctcttctaccctncttncagaagagaaggaaagagtgtggctcgcagcacaggcatatgccgacgaccttcatcagcaggatcctactaagcccgtaggagctgctgctgatccctgggaagagccttcctgggaataccaacccacagaacctggccaagtgtactgtagccatatgattacttgcctcattgcaggccttaacaaagctgcccataggctgtaaattttgaaaaacttaaagacattnnccaaaangcaggatgaaaatcctggccaatctcttttccggcttacagaaagctcttcaaaaatatacccggat

SEQ ID NO: 5241 - DNA, 804 bp, Homo sapiens
  misc_feature (645)..(645): "n" may be a, t, c, g, other or unknown
  misc_feature (742)..(742): "n" may be a, t, c, g, other or unknown
  misc_feature (756)..(756): "n" may be a, t, c, g, other or unknown
  misc_feature (789)..(789): "n" may be a, t, c, g, other or unknown
ggccatggatgggcttggataaagcaccataagttcttcctctaggccatggactccccctggaactggcagcctggcccccaggcttcaggctgtccctgggttgaaggtggtgtttcacctgggacctgcccctttctgcccaggagcctgtctgcctcctgctaccatcaacatggcatccacagcacccaggctgtgcatgctgagggacgcctgcaggcctgcactgagctgccctcagtctcctcttggcttccctcctgtgcctgtcggtgaccaaagtctggagggggccaagatgacaggggtcttgcatgtcaacaccacccagagtacatacacacccagctgggttgcgacagcacccaggctcagtttcaactttgctccaaaaatcagagtggacactgggagtggtgagatgccagggagcgggagcaggcaattacaagcctgcatgacaggggggcttcctgggtccccaagagcagagggatgcctgggtccagagctgtggctaggtagctgcagctgtgcctgggagctcagggctcctgccctgccaacttgatagaaggcagggttcccacctgttcctggtccctgccagctctgtggagcatgcagccccagctatgcctnccctgctgcagctggcatccccacagcagctgctccagataggccactgctgcatcactgacaattctttcagctcacaaaggtagccatgaattangaaagttgggtcangcttcaagcaagcctgcgttaagcaagctcaanagctgaggatgccca

SEQ ID NO: 5242 - DNA, 866 bp, Homo sapiens
  misc_feature (813)..(813): "n" may be a, t, c, g, other or unknown
  misc_feature (845)..(845): "n" may be a, t, c, g, other or unknown
  misc_feature (849)..(849): "n" may be a, t, c, g, other or unknown
aggatgcctaaaatcatccagactgttggtggtggtgctgtgcaggagagagcgcctgagctggatggtggtgggcccacggagcaggacaaaagccattctaacagcagcaccttgtcggaccgaagactcagcaactccagcctctgtagcattgaagaagagcaccgaatggtgtatgaaatggtacagcggattctcttgtcaacacgaggttatgtcaacttcgtgaatgaagtatttcaccaggcatttttgttgccttcctgtgagatagctgtaacaagaaaagtagttcaagtgtacagaaagtggattctccaggacaaacctgtgttcatggaggagccagatagaaaagatgttgcccaagaagatgctgaaaaattaggattttccgagactgatagcaaggaggcctcatctgaaagttctggtcataaacgatcttccagttggggacgcacatactccttcacaagtgcaatgagcagagggtgtgtgacagaggaggaaaatacaaatgtgaaagccggcgtccaggctttgttgcaggtatttttgacgaactctgcaaacatctttttgttggaaccatgtgctgaagttcctgtgctcttgaaagaacaagttgatgcttgtaaagctgttttgattatttttaggcgcatgataatggagcttacaatgaataaaaagacatgggaacagatgttgcaaatactactcaggataacagaactgtcatgcagaagccaaaggataaacgaataaaggacttggttgcccaaagcttgcaggggtactatttangacgctcatggtagctggatccgaccaaactntggngacatttctcgagagct

SEQ ID NO: 5243 - DNA, 842 bp, Homo sapiens
  misc_feature (693)..(693): "n" may be a, t, c, g, other or unknown
  misc_feature (760)..(760): "n" may be a, t, c, g, other or unknown
  misc_feature (798)..(798): "n" may be a, t, c, g, other or unknown
  misc_feature (820)..(820): "n" may be a, t, c, g, other or unknown
actggcaaggatcgcctgcatatgttgctgacttagtcttagccaaccaacaaattatgagccagattttgtctgctctgggcctgtgtaatagcagtgccatggcaatgataattggagcaagtggattacatctcactaaacatgaaaactttcatggtgggttggatgccatatcagttggggatggattatttaccatactgacaacccttagtaaaaaagcttctacagtccacatgatgctgcagccaattttaacatacatggcctgtggatatatgggcagacaaggctctcttgctacttgccagttatctgagccattattgtggttcattttgagagtattggatactagtgatgccttgaaagcatttcatgatatgggtggtgttcagctcatatgcaataatatggttactagtacaagggctattgtgaacactgcaaaaagtatggtatcaactattatgaaatttcttgactctggtccaaataaagctgttgacagcacattgaaaacaagaatactagcttctgagcctgacaatgctgaagggattcataactttgcacccctcggtacaatcacatctagcagtcctactgcccaaccagctgaagtgctattgcaggccacaccttctcacagaagagctcgctctgctgcttggtcctacatctttcttncagaggaagcttggtgtaaccttaccattcacctttctgcacagtgctgcttaaggagatacatatncagcctcatcttgcatctcttgcaacctggcctttctnaatgctggtgaagtaagtgcanatggggaaatatgctacctttg

SEQ ID NO: 5244 - DNA, 766 bp, Homo sapiens
  misc_feature (732)..(732): "n" may be a, t, c, g, other or unknown
  misc_feature (762)..(762): "n" may be a, t, c, g, other or unknown
  misc_feature (765)..(765): "n" may be a, t, c, g, other or unknown
catagcataccatttatcgggctcggcgcaggcccgcggggagcgcagcccggcggagagactgatggagaggcagaaacggaaggcggacatcgagaaagggctgcagttcattcagtcgacactacccctaaagcaagaagaatatgaggcctttctgctcaagctggtgcagaatctgtttgctgagggcaatgatctgttccgggagaaggactataagcaggctctggtgcagtacatggaagggctgaacgtggccgactacgctgcctctgaccaggtggccctgccccgggagctgctgtgcaagctgcatgtcaatagggccgcctgctacttcaccatgggcctgtatgagaaggcgctggaggacagcgagaaggcgctgggcctggacagtgagagtatccgggcgttgttccgcaaggcacgcgctctcaatgaactgggacgccacaaggaggcctacgagtgcagcagccggtgttccctcgccctgccccacgatgaaagcgtgactcagcttggtcaggagctggcccagaaactggggctgcgagttcgcaaggcgtataagaggccccaggaattggaaaccttttctctgctcagtaacggcactgcggctggcgtggcagatcaggtaggatcgggctgaaccaacctgtctcagtttatccgttatgagaggttttggattcactctcttccgggtataaatgacctcangcagtgggtccaggggccttcgcttcctangang

SEQ ID NO: 5245 - DNA, 746 bp, Homo sapiens
  misc_feature (702)..(702): "n" may be a, t, c, g, other or unknown
gtttgacgatgagagtgatggggaagaagaggaggagctcatggatgaggatgtggaagaagaggatgactcagagatctcagggtacagcgtggagaatgccttcttcgatgagaaggaagacacctgtgctgccgtgggggagatctctgtgaacaccagtgtggccttccttccatacatggaaagtgtctttgaagaagtatttaaactgctggagtgccctcacctgaatgtgcggaaggcagcccatgaggctctgggtcagttttgctgtgcactgcacaaggcctgtcaaagctgcccctcggaacccaacactgctgctttgcaggctgccctggcccgagtcgtgccatcctacatgcaggcagtgaacagggagcgggaacgccaggtggtgatggccgtgctggaggccctgacaggggtgctccgcagctgtgggaccctcacactgaagccccctgggcgcctcgctgagctctgtggcgtgctcaaggctgtgctgcagaggaagacagcctgtcaggatactgacgaggaggaggaagaggaagatgatgatcaggctgaatacgacgccatgttgctggagcacgctggagaggccatccctgccctgcagccgcggctgggggagactcctttgccccattctttgccggtttcctgccattattggtgtgcaagacaaaacanggctgcacagtggcagagaagtcctttgcagtgggggggggggg

SEQ ID NO: 5246 - DNA, 744 bp, Homo sapiens
  misc_feature (725)..(725): "n" may be a, t, c, g, other or unknown
  misc_feature (744)..(744): "n" may be a, t, c, g, other or unknown
tttaccgcgtcagcatgctggtgcatttatttcgggtcgggattcggggtggcccattcccaggcaggctgctaccgcccctccgcttccagacattctcagctgtcaggtactctgatggctaccgcagctcctccctcctccgggccgtggcccacctgcggtcccagctctgggcccacctccctcgagcccccctagctcccagatggagcccctctgcctggtgctgggttgggggagccctgctaggccccatggtactgagtaagcatccccacctctgccttgtggccctgtgtgaggcagaagaggcccctcctgccagctccacaccccatgtcgtggggtctcgctttaactggaagctcttctggcagtttctgcacccccacctgctggtcctgggggtagccgtcgtgctggccttgggtgcggcactcgtgaatgtacagatccccctgctcctgggccagctgtagaggtcgtggccaagtacacaagggaccacgtagggagtttcatgactgagtcccagaatctcagcactcacctgcttatcctctatggtgtccagggactgctgaccttcgggtacctggtgctgctgtcccacgttggcgagcgcatggctgtggacatgcggagggccctcttcagctccctgctccgacaaagacatcaccttctttgacgccaataagacaggcaactggtgaacccgnttgacaaaaccctttttgn

SEQ ID NO: 5247 - DNA, 712 bp, Homo sapiens
  misc_feature (669)..(669): "n" may be a, t, c, g, other or unknown
  misc_feature (679)..(679): "n" may be a, t, c, g, other or unknown
  misc_feature (688)..(688): "n" may be a, t, c, g, other or unknown
atgaaccacgagtgggtggggaacgactggctgcccagcctggggctgccccaataccgcagctacttcatggagtcgctggtggacgctcgaatgttagatcaccttaacaagaaggagctccggggccaactcaagatggtggacagctttcacagggtgagtctacattatgggattatgtgcctgaaacggctcaactatgaccggaaggacctggagcggaggcgggaagaaagtcagacccagatccgagacgtgatggtgtggtccaatgagcgggtcatgggttgggtgtccgggctgggcctgaaggaatttgccacgaacctcacggagagcggggtacacggggcactgctcgccctggacgagaccttcgactactccgacctggccttgctcctgcagatccccacgcagaatgcacaggcccggcagcttctggagaaggaattcagcaaccttatctccttaggcacagacaggcggctggacgaggacagcgccaagtctttcagccgctccccatcctggcggaagatgttccgggagaaggacctccgaggcgtaactcccgactcagctgagatgttgccccccaactttcgttcggctgcagcgggagccctgggctcttccggggcttccttttccgcaagcttgcancccagaaggncagactttntgggaagtttccccgggccagaac

SEQ ID NO: 5248 - DNA, 857 bp, Homo sapiens
  misc_feature (635)..(635): "n" may be a, t, c, g, other or unknown
  misc_feature (735)..(735): "n" may be a, t, c, g, other or unknown
  misc_feature (754)..(754): "n" may be a, t, c, g, other or unknown
  misc_feature (837)..(837): "n" may be a, t, c, g, other or unknown
  misc_feature (848)..(848): "n" may be a, t, c, g, other or unknown
aagtgattcttccacggccaaactagaggcacagagctggaaaaacttcatccccactcagcacatactagggaggtaacttgccagctttgctttgggtcatagttcttacagctaacttatgtgttccagaaaatttaccgagaaatcgacgttgacaggtctggtaccatgaattcctatgaaatgcggaaggcattagaagaagcaggtttcaagatgccctgtcaactccaccaagtcatcgttgctcggtttgcagatgaccagctcatcatcgattttgataattttgttcggtgtttggttcggctggaaacgctattcaagatatttaagcagctggatcccgagaatactggaacaatagagctcgaccttatctctgtgagtcagcaggccccgccttgcttctaaggggatgggggaggcatggggcggaaagggctgttacttgagtgatctgctttttcaagttttgctttaaagagctcttggtctgtcggggccaggcctgtaaccggttgtaagatcccacaatgcacttttacttgcagttgttttccaaccacctattctcaagtccaaaatgcacgcctggctccctcttctcatgagctttgacttgagtgtanctcaagggtaaactaaggagtggctgcaggatcatgcttagaaaaatgaactcctgattagcatgcaagggagaacatgttatataaagaaatcctttanctgaaattcaagtttgggntttgggaagatccatcattcttagaaggggatctacttaaaaatctttaagccaattagtttctctactccttccccgttaanataaacttatnctagtaaat

SEQ ID NO: 5249 - DNA, 686 bp, Homo sapiens
  misc_feature (563)..(563): "n" may be a, t, c, g, other or unknown
  misc_feature (626)..(626): "n" may be a, t, c, g, other or unknown
  misc_feature (670)..(670): "n" may be a, t, c, g, other or unknown
  misc_feature (681)..(681): "n" may be a, t, c, g, other or unknown
attcattccctgtcctcggatcacagtctcttctcactacagtgtcgccgcctctgcctgcgtagccccggccatggctctgtagcctcgacccctttgtgcccccggcccgtctccgcgctcaccacgcctgcgctctccgctcccaccttctttcttcagccgaggccgccgccgcctctccttgctgcagccatggagtcttccactttcgccttggtgcctgtcttcgcccacctgagcatcctccagagcctcgtgccagctgctggtgcagcctctcctgttgccatcagtgcccagcacctgtgctacagccatgtcactcctggcgaccctggggctggagctggacagggccctgctcccagctagtgggctgggatggctcgtagactatgggaaactccccccggcccctgcccccctggctccctatgaggtccttgggggagccctggagggcgggcttccagtggggggagagcccctggcaggtgatggcttctctgactggatgactgagcgagttgatttcacagctctcctccctctggagcctnccctaccccccggaccctcccccaaccttccccaaccccacctgacctggaagctatggcctncctcctcaagaaggagctggaacagatggaagacttcttcctanaatgcccccgnccctt

SEQ ID NO: 5250 - DNA, 646 bp, Homo sapiens
  misc_feature (452)..(452): "n" may be a, t, c, g, other or unknown
  misc_feature (616)..(616): "n" may be a, t, c, g, other or unknown
  misc_feature (618)..(618): "n" may be a, t, c, g, other or unknown
  misc_feature (642)..(642): "n" may be a, t, c, g, other or unknown
aaatccttccttccccggggtagaagtccagggtgagaaattggttccgaactcaaaggaacccagtgccgggccacagccgggtcacgtggccggcggccccccatgacgtgctggctgcggggcgtcacggcgacgttcgggcgacctgccgagtggccaggctacctcagtcacctgtgtggtcgcagtgctgccatggacctgggacccatgcgcaagagttaccgcggggaccgagaggcatttgaggagactcatctgacctcccttgacccagtgaaacagtttgctgcctggtttgaggaggctgttcagtgtcctgacataggggaagccaatgccatgtgtctggctacctgcaccagagatggaaaaccctctgctcgcatgttgctgctgaagggcttcgggaaagatggcttccgcttcttcactaacttcgagagtcnaaaaggaaaagagctggactctaatccctttgcttcccttgtcttctactgggagccacttaaccgtcagtatctgagaaagaaaaatgaggaactggaacagctctaccaggatcaagaggtgcccaagccaaaatcctggggtggctatgtcctgtaccctnangtgatggagttcttggcaaggtcnaacc

SEQ ID NO: 5251 - DNA, 733 bp, Homo sapiens
  misc_feature (668)..(668): "n" may be a, t, c, g, other or unknown
  misc_feature (714)..(714): "n" may be a, t, c, g, other or unknown
  misc_feature (730)..(730): "n" may be a, t, c, g, other or unknown
atgcaaaaattagctgggtgtggtggcagcttcctgtaatcccagttactcaggaggctgaggcaggagaatcacttgaacccgtgaggcagaggctgcagtaagctgagatcgcaccgctgcacattccagcctgagtgacagagcaagactccatctagaaagaaagaaagaaaaagaaagaaagaaagaaagaaaggaaggaagggggagagagagagagacagagagagagagaaagaaagaaaggaaggaaggaaggaaggaaggaaggaaggaaggaaggaaggaaggaagaagagagagagagaaagaaagaaagagagaaagaaagaaggaaaagaaagaaggattccctagaagctcaatacatagaatagatgaaagggactagctgcctggggctgggggctcagctcagcatctcatccctctactactcttgacagtatacctcaatcctggggcatcataaagcatcacttgaaaagtagcaactcaacactctcacaggacaagggaaaggctcagagagggcaagcaatctgctcaaggtcacacattaagtttggatgaatgcatggctccctgcccagcactccatgccctgcaggaggggcaatgcccatctatctgtcaaccaggctgcagaccttgacccacatgtncaggagcctgtatgcttggccccctctacccttgagtgcccaggangggatctcatacactntta

SEQ ID NO: 5252 - DNA, 668 bp, Homo sapiens
  misc_feature (623)..(623): "n" may be a, t, c, g, other or unknown
  misc_feature (660)..(660): "n" may be a, t, c, g, other or unknown
  misc_feature (664)..(664): "n" may be a, t, c, g, other or unknown
cacaccccatctgggggaaggacaggagctggacaggccaagagctatctcccttggctggagaagaccgggaaaaagggagtactggagccaggaaggaagaagagggagggccagtgctggtaaaggagaagttgggcctgaagaagttagtcctcacccaggagcagaagaccatgttgttggattggaatgactccatccctgagagtgtgcacctcaaagctggggagcgaatttcccagaaaagtgctgagaatggtagaggaggccgtgtgctaaaaccagtccgccccctgctgctccctagggcagcaggagagcccctgccaacccagagaggggctcaggagaagatggggacccctgcggaacaagctcaaggggagcgaaacgtgcctccacccaagtccccactgcggctcatagccaatgccatccgaaggtctctagagcccctcctttccaactctgaaggcgggaagaaggcctgggccaagcaagaatccaaaactttgcccacacaggcctgcactcgctcattcagccttcggaaaaccaattccaataaagacggggaccagcattcccctgggagaaaccagtcctcagcctttaccctnctgaccctgccttcgacccacagtttgcccaatcggncatncaag

SEQ ID NO: 5253 - DNA, 690 bp, Homo sapiens
  misc_feature (408)..(408): "n" may be a, t, c, g, other or unknown
  misc_feature (645)..(645): "n" may be a, t, c, g, other or unknown
  misc_feature (651)..(651): "n" may be a, t, c, g, other or unknown
  misc_feature (655)..(655): "n" may be a, t, c, g, other or unknown
ggaacacattactccttacacatcgtctttatacaacatacattcaggctcagattcaacggctatccactgcttgctaacacctttttgagcatatgacatctatcaggtagctgcatagggtttaggtctagttattcatggattctgcataggagctcagcctctgataagatctgtgacaatgctcatcacttacctgtctcttcatattcctgtcttgatattccatttttactctataattttctatcttcatttggttttatgttattaaatacttcattgtaaactgtttcaactcttttctggaacagggtggcacagaaacaaacctctaactcttctcatccttctttttttcttgggggagggtggttatttctgaattttatttttattttattntattttaagttatgggatacatgtataagatgtgcaggtttgttacacaggtaaacgtgtgccatggtggtttgctgcacctatcaacccatcacttaggtattaagccctgcatccattagctatttttcctgggctctccctctacccgctccacccccacaacaggtcccagtgtgtgttgtttccatccctgtgccatgtgttctcattggtcagttcacacttgtaagtganactgcntggngttgggtcttctgcttctgggtaagttgctgagga

SEQ ID NO: 5254 - DNA, 781 bp, Homo sapiens
  misc_feature (735)..(735): "n" may be a, t, c, g, other or unknown
  misc_feature (748)..(748): "n" may be a, t, c, g, other or unknown
  misc_feature (776)..(776): "n" may be a, t, c, g, other or unknown
ttcaaaaatagagaaaactgtgagctttctgatcactgtattaaactacaaaaaaagaaaaagcaatgtagagtcagccctcagtcatggattaaagtctcttaatcgtaaatctccctctcactccagtagcagtgaagatgctgattctgcatcagaattagctgactctgaaggaggtgaggagtataatgccatgatgaataactgccttcgtgtgaatctcactttagctgatttggaacaattggctggcagtgatctgaaggttccaaatgaagatactaagagtgatggaccagaaaccaccacccaatgcaagtttgacagaggctccaagagccccaagactcccactggcctccgcagaggccgacagtgtattcgtcctgcggagattgtggcttccctgttagaaggagaggagaacacctgtggcaaacagaaaccaaaggaaaacaatttaaagccaaaatttcaggctttcaagggagtaggctgtctatatgaaaaggagtcaatgaaaaaatccttgaaagacagtgctgcctctaacaataaagatcagaattccatgaaacatgaggatcccagtatcatatccatggaagatgggtccccatatgttaatggctcattaggtgaagtgactccatgccaacatgcaaagaaggcgaatggccaaactatattcagctcaaaaaagacagacccttttgaaagccaggatcgcangcagtgtccctancagtctgaaagagaagtagaatctattntaggc

SEQ ID NO: 5255 - DNA, 755 bp, Homo sapiens
  misc_feature (680)..(680): "n" may be a, t, c, g, other or unknown
  misc_feature (705)..(705): "n" may be a, t, c, g, other or unknown
  misc_feature (732)..(732): "n" may be a, t, c, g, other or unknown
attcctcgctccaaggggcagacaggacaggctgaaaatagcaactggttccaaaaagataaaggggatgactccagcagagcacctcactcctttgaagagcacagaggaagatgtcagcccagtcccttcctgcagcaacaccccccacgcagaagccccctcggatcatccgcccccgccctccttctcgttccagggctgcccagtccccagggcctccccacaatggctcctctccacaagaactaccccgaaactccaatgatgcaccaaccccaatgtgcactcccatcttctgggagcccccagctgcatccctcaagccccctgctcttttgcccccctcggcttctagagccagcctcgactcccagacttccccagactcaccttccagcacccccacacctagtccagtgtcccggcgctccgcctccccagaacctgctccccggtctccagtccccccacccaagccgtctgggtcaccctgcacgcctctgctccccatggctggagtcctggctcagaatggctctgcctcagctcctggcactgtgcggaggctggctggcaggtttgaagggggtgctgaaggccgggctcaggatgcagatgccccggagccaggtcttcaagcgagagcagatgtgaatggggagagagaagctcccctnacccggagtgggtccaggagacggngttcaagtgagtgtggcggtgggggcnctggtgactcatcaccattttcg

SEQ ID NO: 5256 - DNA, 724 bp, Homo sapiens
  misc_feature (629)..(629): "n" may be a, t, c, g, other or unknown
  misc_feature (638)..(638): "n" may be a, t, c, g, other or unknown
  misc_feature (724)..(724): "n" may be a, t, c, g, other or unknown
tggtgctgatgtgtgaactgtctcgggaggatgcccctgtgcgctggtacaaggatgggctggaagtggaggagagcgaggccctggtgctggagagggatgggccacgctgccgcctggtgctacctgctgctcagcccgaggacgggggcgagtttgtatgtgatgctggagatgactcggccttcttcactgtcactgtcacagccccaccagagaggattgtgcacccggcagcccgctccctggatctgcattttggggctccagggcgcgtggagctgcgctgtgaggtggccccagctgggtctcaggtgcgctggtacaaggacgggctggaagtggaggcatcagatgccctgcagctgggtgccgaggggcccacccgcaccctgaccctgccccacgcccagcctgaggacgccggggagtatgtgtgtgagacccggcatgaggccatcaccttcaatgtcatcctggctgagcctccagtgcagttccttgctctagagacaactccaagcccgctctgtgtggcccctggggagccagtggtgctgagctgtgaactgtcccgggctggcgcccccgtggtctggagccacaatggggggcccgtgcaggaggcnagggcctanagctccatgccgagggcccccgcgagtcctctgcatccaggctgaagcccagcccatgcagggctctacacctgcagtctggacan

SEQ ID NO: 5257 - DNA, 740 bp, Homo sapiens
  misc_feature (665)..(665): "n" may be a, t, c, g, other or unknown
  misc_feature (676)..(676): "n" may be a, t, c, g, other or unknown
  misc_feature (737)..(737): "n" may be a, t, c, g, other or unknown
gcacacttctatttgtttggatgtggagagagaaaagaagaaatccacgtggtgggtaaagcacctgggtccacagccgaaaaatcccgggtttagtctgtttcactatacaaaattgggccatttacctgagttccaggctccacatataaaacacagacataatattactcacccatgtcactgggctgctgggggactctactaggacaacagaggcaaagctctgatataagctctttgcaaatgtaagaagtggtccttatgtcacccagtttagggcagtggttgagagcagacacattctgatccctcgaatctgaatcctatctttggcccatctggaagtgggacaagtttcttaaacctttgtgcctgggtttcctatctggggaagaataaattaacagatgcaaggaccctgaacagtccggttggagactgctccagtccttggcaccgtcctgcattctgtgggtcccaacagtgtggtgaaaccaggaagccgaccagccatccaaccagggtgtggtcctctggctgagactctctatcccacgtctgggcacccatgccaccagctggccttgaattccagggatgcgggaggacaatgagcatgaaccgaaacgtgccgagtggagttgagaacgtaaaggaagaanggggagatgangacctctcctgggggagatgaaggctgccaagtcctaagacacaggcttcaaggtctgcangaa

SEQ ID NO: 5258 - DNA, 788 bp, Homo sapiens
  misc_feature (715)..(715): "n" may be a, t, c, g, other or unknown
  misc_feature (771)..(771): "n" may be a, t, c, g, other or unknown
  misc_feature (773)..(773): "n" may be a, t, c, g, other or unknown
agacctgaaggctgcttccgctaacccgggctggcgctgctaacctcacccaacgatccctgctgtcggaaaatgtccagaggcaccatccctgctatgaagagggaatgccagtacaacagccacaaggggtcttcctgtggccctcaaacaaaaaatcactgcattacatcagcagactgcattggagagaaaggcgccgggacagaaaagcctgagataaaccacctgtcattcttggagaaaaggatgctgcggctttcccgatttggttgatgagatggaaaatcaacccttacaggaaggacatcaccaattccggaaaggatgctgcgccagtcatgtttccgcactctgtgagacgttgaaatctccagaagttgcccaaggttttcaagctgaacacaggagaaatgactctggatctctgaggactgttttcctcaataaggagctgcaatcttggctccaccaccctccctccaaaacatctcctgtgtctggtatctggttatattgtggcctgacagagaagtttctttcggggccagtgaatttaaaaaaaaaaaaaaaagaaaagcgggtcctaccaactcattaatactttaatactttaaatttccctctttatagtaggttgaaatgcagtatctcttaagaacaatggctgaaccaaatgtttcctcaaaactcacattttttcccaccatttcanaaactgcctcaggactaagctttgaattttttttttttttttaatctgggccaaantnctatctaaagggcct

SEQ ID NO: 5259 - DNA, 711 bp, Homo sapiens
  misc_feature (601)..(601): "n" may be a, t, c, g, other or unknown
  misc_feature (692)..(692): "n" may be a, t, c, g, other or unknown
  misc_feature (698)..(698): "n" may be a, t, c, g, other or unknown
  misc_feature (704)..(704): "n" may be a, t, c, g, other or unknown
gtaacatggctactggtcactcagtgtctgtgagaccctgagggccagaggcaaggctggcggggtggagctgctgtgtgagcccaggcaaagcccttccttctttggactttggcccctggcagaagaaaatgattctcagcccctgggatccttagagatggtgggtcatgattcccctcctccctccactcactcagcttggtattgaggcctcactgctagaagaagaggaacagatgacctgttctgggaactgaggcttcacaagaagaacaaagctccagagattgagccatagtccctgacaggaagcctcgggggtgctggctgctccctgctggccgggatgccagtggtgtctgaaaccaggggtagagtttacaggaggccgggctgctcaggagagctagaatgaagttctctgtcctcatggtctcagatctgagctcttccccaaagggtggtgacttccatcaccctgcttctttggggtcacagtctggtctgggtaatgtgaaccccccaggctttggacctgggactaagaggctctaggaggctccagcctcatctgcctcctatcccctgccttgttcanaggcccagagctggggcccggaagtgatcatgaagatggaaactgtggtctggctcatgatggtgcatcactgctgggtctgtttgcaagncgttgngcactntgggccc

SEQ ID NO: 5260 - DNA, 823 bp, Homo sapiens
  misc_feature (770)..(770): "n" may be a, t, c, g, other or unknown
  misc_feature (772)..(772): "n" may be a, t, c, g, other or unknown
  misc_feature (823)..(823): "n" may be a, t, c, g, other or unknown
cctgttccttccatctaactgtatgttttgaaccattaaccaacctctctccataccccgcctcccagcctctggtgaccatcatatggttctctactccgttagatcaactttttttttttagctaccacatttgagtaaaaacatgcgatatttgcctatctgtaggaccttcttaagactgtgaaactgtacctaggaatccaacttacaagggatgtgaaggacctcttcaaggagaattaaaaaccactgctcaaggaaataagagaggacacaaacaaatggaaaaacattccgtgctcatggataggaagaatcagtatcgtgaaaatggccatactgcccaaagtaatttatagattcaatgctgtccccatcaagctaccatcagctttcttcacagaattagaaaaaactactttaaatttcatatggaaccagaaaagagcctatataacgaagacagtcctaagcaaaaacaacaaagctggaggcatcatgctgacttcaaactatactacaaggctacggtaaccaaaacagcatgattctggtaccaaaacagatacatagaccaatggaacagatcagaggcctcaaaaataacaccacacatctccaaccatcttatctttgacaaacctgacaaaaacaagcaatgggggaaaggattccctatttaataaatggtttgggaaaactggctagccatatgcagaatactgaaactggccccttccttacaccttataccaaaactaactcangnggataaagacttaaccttaggacctaaaaccataaaaccctagaagaaaan

SEQ ID NO: 5261 - DNA, 816 bp, Homo sapiens
  misc_feature (764)..(764): "n" may be a, t, c, g, other or unknown
  misc_feature (779)..(779): "n" may be a, t, c, g, other or unknown
  misc_feature (804)..(804): "n" may be a, t, c, g, other or unknown
tatagaccaccagatttcttctggtgaaaacaccagatcagtgattccaaatgatatttcaagtaatgctgcaattttaggaggacagccgccaaatgtgacaagcaattctggaattctgggagtccaaagaccaaatgtatcaagtaattctgaaattcttggggtccggccatctaatgtttccagtagttctgggattattgcagcccaaccaccaaatattctaaataactctggaatattgggaatacagccacccagtgtgtcaaatagttctggacttttgggagtgctacccccaaatatacctaacaattctggacttgtaggagtacagccaccaaatgttccaaatactcctggacttctgggaacacagccaccagctggacctcaaaacttaccccctttaagtatccctaatcaaaggatgcccacaatgccaatgttagacattcgtccgggactaataccacaggcacctgggccaagattccctttaatacagcctggaattccaccccaacggggaatcccacccccatcggtacttgattcagctcttcatccaccaccccgtggaccttttcctccaggagatatttttagccaaccagaaagaccttttttagctcctggaagacaaagcgtagacaatgttactaacccagaaaaaaggataccacttgggaatgatacattcaacaggaaggagatagagattaccggtttcctcctatagaaaccagggaaagcattantagaccttcccctgnggatgttaaaaatgtggttggccgnctatagatccaa

SEQ ID NO: 5262 - DNA, 777 bp, Homo sapiens
  misc_feature (473)..(473): "n" may be a, t, c, g, other or unknown
  misc_feature (752)..(752): "n" may be a, t, c, g, other or unknown
  misc_feature (760)..(761): "n" may be a, t, c, g, other or unknown
gtcgtgatcagacgagcggtgagcgatcgatactcctatgctagcctctggctcctcaggggacacagccgagtggtcggaccaaacgcaacgagtcttcgccagcccaaaggcgactcgacaccgtcccagctgaagagaggcatgggactgaaccagctggtggtggcccgatggctggagacacccactgccccgcagagcccctggccagagaaggcactttatgggaggccctcagggcgctcctgccgcacagtaaagaagacctgaagttggacctcggggagaaagtggagaggagcgtggtgacattgttgcagcgagccactgagctcttctacgagggcaggagggacgagtgtctgcagagcagcgaggtgatcctgggctactcctgggagaagctcaacacgggcacatggcaggacgtagacaaagactggcgccgggtctacgccatcggctgcctnctgaaagccctgtgtctgtgccaggcacctgaggatgccaacactgtggccgcagccctgcgggtctgtgacatgggcctgctgatgggggcagccatcctgggggacatccttcttaaagtcgctgcatccttcagacacaccttcctggaaagaggcctgccgtggctccttccagagcaacccttgcacaaagaaagcaagggcggaccatggtttgattccagattgaagttagaaaaaacagtcccccggttgaccgtccgtccttcagatttnagggacannttttggttcagggaag

SEQ ID NO: 5263 - DNA, 732 bp, Homo sapiens
  misc_feature (667)..(667): "n" may be a, t, c, g, other or unknown
  misc_feature (706)..(706): "n" may be a, t, c, g, other or unknown
  misc_feature (718)..(718): "n" may be a, t, c, g, other or unknown
gagggcctcagggagctgcaaaactcatccaggagaaaaaggcaggagcagcaagtgacccctcccaagctcccatctatggggcttagcaaaaaaagggaggaagtgggggctggatatgcccacccctgccaaaagccctgaccccagggaaggaggctgctcacccagccttggccctgcagggaatgttggggggcacagaggggagaagctctttcccccactccacattccttctgttgccaagatccttaattccctcctgcccatatccctacaggcgacggcagacagtgcaatggccctcctgccacttcagcacaccttgccccacctgggaccatcacacgtgaagcaccaggctgggagatgaggtgcacacagttgcagctaggtcggggccccagttaagctgtgccccaccaccctaggcaatgaggggcaggaaaggggtacagaatgaatggtgaaagagagtggagatacggaagggggagaggagaggagaaatgtggacagagggcttgaagacatggccgaataggctactgccacccggctttggggagatgggcgataagtgttgaggtaggctcgagaactgctccccaaatcagtgagaattgcattaggagccctctggggaaagagcacaggaactganttgctgggcctcaaaacaaaaggcttgcaggcacatggntagactggccgntgtcttgaaggacc

SEQ ID NO: 5264 - DNA, 765 bp, Homo sapiens
  misc_feature (697)..(697): "n" may be a, t, c, g, other or unknown
  misc_feature (740)..(740): "n" may be a, t, c, g, other or unknown
  misc_feature (748)..(748): "n" may be a, t, c, g, other or unknown
cacttcagaaacccatattcacacacatgtgcacgtgttcacatgaaaagacccccttgcactcaggcccccagagccgaggcattgtgcagccccacagcagccaccttcacagctgctaacagcccctgtgccatgcctgctgcaggcactgtctgctctaggaggggctcttgttttcatggaacccagtggtgaagagacaccccactggcccttctcttccccaattcctgtttcttcattccccatcatttacctgctctttctgtctggtcaagaaagcatgtctcagccaggcccagtggctcagccaggcacagtggctcacaccttctaaccagcactttgggagtctgaagtaggaggattgcttgagcccaggagtttgtgaccagcctgggcaacatagggagatcccatctctacaaataataataataaagagtagctgggagtggtggtacacacccgcggtcccagctacatgggaggctggggtgggaggattgcttgagcctgggaggtcaagggtgcagagagcaatgattgcaccactgcactgtgacctggatgacagagcaaaaccctgtctccagaaaaagaaagaaagaaagaaagcaggtctcaaaagcaatggatgagtattctttaactacaatgtagcagactctttattaaaaatgaaatttgatgnttatttttaatcatgttcaacccactttattctcagatatagncttcctgngaataactttcttttca

SEQ ID NO: 5265 - DNA, 854 bp, Homo sapiens
  misc_feature (637)..(637): "n" may be a, t, c, g, other or unknown
  misc_feature (714)..(714): "n" may be a, t, c, g, other or unknown
  misc_feature (734)..(734): "n" may be a, t, c, g, other or unknown
  misc_feature (793)..(793): "n" may be a, t, c, g, other or unknown
  misc_feature (830)..(830): "n" may be a, t, c, g, other or unknown
aatatctagtcctgtagcaaatttggaaaataaagaaaggtataaggaagaaaattaaaatcactcctgagtctatcccacgttcatagccaccactgaggctgtagtcctttgagcataaatgtatattcagcaacattaagctcattctctatgattatgaatctgcatttttccaagtgaaaagagatgtcatgaattgaaaagatccttccaaagcaccattgctaatggctcttccagttgtcacagatgtgtgacatttgtcgcctgttccccccacttctgacttatgatactgcagttgttcgcatgtttccctcttgtgaataacgcttcaggaacggcctcatcatctcaaagctttgctcttgtctttaggacgctgccctgtgagccgctcgcccagctactttgcacagcaagacatcaccttgtagctgttcttgagcggtgcactggcatccaggccagtagtgtggttgcctcacccccagctcctcctacaagttctagaaggcctctctctggttcagctcttggcagctcagtaaagataagacctgcccacagccctggggatgggcggagactgggggattagaggagccagaggtcaccttcaactgccatttanctcttagtgggctcttcagctggatctggaaaccagattgacagcaggcagattaataagaatagcataccaattgnattgggtttacatatacatnggggatcttctgcaagagaaccgaaatgcaaagaagtgacccaagccagacgcttttgnacttttgacaagaatgataaattggaaagaaacgacngggcaaagaaaattggcttggaca

SEQ ID NO: 5266 - DNA, 685 bp, Homo sapiens
  misc_feature (428)..(428): "n" may be a, t, c, g, other or unknown
  misc_feature (556)..(556): "n" may be a, t, c, g, other or unknown
  misc_feature (631)..(631): "n" may be a, t, c, g, other or unknown
  misc_feature (664)..(664): "n" may be a, t, c, g, other or unknown
  misc_feature (680)..(680): "n" may be a, t, c, g, other or unknown
aattgtaatgctttctggtttgtttaagagtgaaagaaagggactatagcatattggttaagaacaagaactcatcttgactccagcacttatcatctgtgttactttggacaacttgctcttacctaaatttgttcctttgtaaaatgaaaataatagtagcatctacctcgtagggctgttgtgagggtagaagatagatataggtatagatacagatagagcgagagagagagagatccttttttttttttttttcctgagatggagtctcactctgtcgcccaggctggagtgcaatggcaccatctcggctcactgcaacctccacctcccgggttcaagcaattctcctgcctcagcctcccgagtagctgggattacaggcgtgtgccagcatgcctggctaatttttgtatttttagtanagacgggtttcaccatgttggccaggctggtcttgaactcctgacgtcatgatccacccaccttggcctcccaaagtgctgggattcctggcgtgaaccaccacacctggccaagagagagatcttanaacagtgctgggcacacattgcgagaaagaatcaaagctggcaaaggtgtgacttcagctattgacctgtgtcgntaccatggaaacaaggcactggaggccctgganagctttcctcctcggnggcca

SEQ ID NO: 5267 - DNA, 843 bp, Homo sapiens
  misc_feature (700)..(700): "n" may be a, t, c, g, other or unknown
  misc_feature (710)..(710): "n" may be a, t, c, g, other or unknown
  misc_feature (719)..(719): "n" may be a, t, c, g, other or unknown
  misc_feature (807)..(807): "n" may be a, t, c, g, other or unknown
  misc_feature (811)..(811): "n" may be a, t, c, g, other or unknown
  misc_feature (843)..(843): "n" may be a, t, c, g, other or unknown
atgcgcttccgcaggaagaaggaagcggcgccgccatcgcctcccggcgctccctccccgactcctaagtccttcggccgccaccatgtccgcctcggctgtcttcattctggacgttaagggcaagccattgatcagccgcaactacaagggcgatgtggccatgagcaagattgagcacttcatgcctttgctggtacagcgggaggaggaaggcgccctggccccgctgctgagccacggccaggtccacttcctatggaccaaacacagcaacctctacttggtggccaccacatcgaagaatgccaatgcctccctggtgtactccttcctgtataagacaatagaggtattctgcgaatacttcaaggagctggaggaggagagcatccgggacaactttgtcatcgtctacgagttgctggacgagctcatggactttggcttcccgcagaccaccgacagcaagatcctgcaggagtacatcactcagcagagcaacaagctggagacgggcaagtcacgggtgccacccactgtcaccaacgctgtgtcctggcgctccgagggtatcaagtataagaagaacgaggtcttcattgatgtcatagagtctgtcaacctgctggtcaatgccaacggcagcgtccttctgagcgaaatcgtcggtaccatcaagctcaaggtgtttctgtcnggaatgccanacttgcggntgggcctcaatgacgcgtgctcttcgagctcactggccgaacaagacaaatcatagactggaggatgtaaaaattcaccatgcgtgcnggtntttgctttgaaacgaccgaccatttctttatn

SEQ ID NO: 5268 - DNA, 739 bp, Homo sapiens
  misc_feature (652)..(652): "n" may be a, t, c, g, other or unknown
  misc_feature (672)..(672): "n" may be a, t, c, g, other or unknown
  misc_feature (678)..(678): "n" may be a, t, c, g, other or unknown
taatagcaacttatattattttactatttacagagagtgtccacatatgttaacttccttgatcctcacaaacaccctatcccttgggtattttctaccagccccatgaggctcagagagatttacatgactttttgagggtttgaacccaactctttggtctcaaaaacatctcattccagtacacctcattgcctcccaagccctgtatccaggaagacctgactcaccagcatgctttctgtgcgaaaggacaccagagctgagaagtaaatcgacaccacccccaatccctgcaacttcctcttctctgtcctgtcattgagaacaccagcctaagggcacgtttttctccttccacgttctattaaagctcagtagtctaactcctactattgaaaatgagagaaacaggaaggaaagtctcaaattccaactttggaaaccacgttgaaagaaggtgctctcatctggacatgatggttcacgcctgtaatcccagcactttgggaggccgaggctggcagatcacgaggtcaagagattgagaccatcctggctaacatggtgaaaccttgtctctactaaaaatacaaaaattagccaggtgtggtggcacgtgcctgtagacccagctacttgggagtctgangcaggagaattgcttgaatncaggangcagatgttgcagtgagccacatcatgccactacacgccagctgggcaacagagcaagact

SEQ ID NO: 5269 - DNA, 625 bp, Homo sapiens
  misc_feature (604)..(604): "n" may be a, t, c, g, other or unknown
  misc_feature (610)..(610): "n" may be a, t, c, g, other or unknown
  misc_feature (619)..(619): "n" may be a, t, c, g, other or unknown
gaatacttagctttatgtaacagatgcatattcactgaatttttctaaactgaatcatattttaacctcatagaaggatcttaacttacttatgaaaggaacctgatgaagaatcagcttataaaccttcaacttaactttttaaaaatgtgactttccctatgacaaaccaacagtttatcatagttttaaagagtagctattattcacctgactctgaggtagatgctggggttattaaccaaaggaagacagttctcacgtggaaggattcactgataatagattgggaggttattctaaattccacaagctaagagggagtagcaaacagcattgaatagttatgttctagatgggagtattcaaaccaagaagactcaggggagggggtcttccctacgatctagtggaagaagtgcgatcaagccaggctttgaaaggtagagaggatttggacaggatttgggaatagcactgggtttggtagccacagaattcagcttgattgagttcactttttcctgaaaccaaaggacagttctctgagccaccttaaacctggtttccactaagactcttgttccacattcaggaccccaangacccnatgggcaanctatta

SEQ ID NO: 5270 - DNA, 774 bp, Homo sapiens
  misc_feature (747)..(747): "n" may be a, t, c, g, other or unknown
  misc_feature (772)..(772): "n" may be a, t, c, g, other or unknown
  misc_feature (774)..(774): "n" may be a, t, c, g, other or unknown
ataaaaagattgtaaacctgttgtggaaaacaatgagttgtagtaagcatacctttgacaccacttttttatactcctaattcattattagttgtgtattttatactttatatatgtctagtttgggaatttcattgggattttcaaaacttcaggggtagtagaaagaggggaaggttaatttcaggaccaaaaagctttatggagttctaatactttctgtgggcaaacaacacagagtaatgttcatagccctcacgttgtacagcctctacagtgtacaaggtgctttctcttaccagatctcctttgaccttcacagcgactccatgctgtggccaggcagtgagcgatgggctttttacccatgaggaaatggaggctgggaagtctcactgtgggcgctctgggcctggaccgccagtgctctgacagcagatagcctttctagtttgttggtcagtcacggctttctgttcccatctgttttagctacccaggtcacagagattactcatataggggcaagacaaaaacatctaagagtcatccaggtttagtagaaagaggatgggctctggaagagacagacatggagtgaatccagccagtggccctcattggccatgtgacctggcaagtaacatgtgctgagctgagcttcacggtgagcataggaaccccctctgagggctcagtgcacttggcaacattggaagagcctttaatcatttaatccaaggtggngggtctggattaccttgggtttttntn

SEQ ID NO: 5271 - DNA, 804 bp, Homo sapiens
  misc_feature (770)..(770): "n" may be a, t, c, g, other or unknown
  misc_feature (785)..(785): "n" may be a, t, c, g, other or unknown
  misc_feature (804)..(804): "n" may be a, t, c, g, other or unknown
tttattacaaagtgaagaaaacaagaacttggatttagagccatgtaccgggttccaaagaaaactaatttatcagactttgagctggaagtatccgaaaggcattcatgttgagactttagaaactgaaaagaaggagcgatatatagttatcagcaaagtagatgaagaagaacgcaaaagaagagagcagcagaaacatgccaaagaacaggaggagctgaatgatgctgtgggattttctagagtcattcacgccattgctaattcgggaaaacttgttattggacacaatatgctcttggacgtcatgcacacagttcatcagttctactgccctctgcctgcggacttaagtgagtttaaagagatgacaacatgtgttttccccagactcttggatactaaattgatggccagcacacaaccttttaaggatatcattaacaacacatcccttgcggaattggaaaagcggttaaaagagacacctttcaaccctcctaaagttgaaagtgccgaaggttttccaagttatgacacagcctctgaacaactccacgaggcaggctacgatgcctacatcacagggctgtgcttcatctccatggccaattacctaggttcttttctcagccctccaaaaattcatgtgtctgccagatcaaaactcattgaacctttttttaacaagttatttcttatgagggtcatggatatcccctatctaaacttggaagggccagacttgcagcctaaacgtgacatgntctcatgtgacattncccaaagaatggaaaaccn

SEQ ID NO: 5272 - DNA, 846 bp, Homo sapiens
  misc_feature (715)..(715): "n" may be a, t, c, g, other or unknown
  misc_feature (759)..(759): "n" may be a, t, c, g, other or unknown
  misc_feature (820)..(820): "n" may be a, t, c, g, other or unknown
  misc_feature (843)..(843): "n" may be a, t, c, g, other or unknown
cacccccccccccccggccattaccgaagcggatgaaaacaaacactaacgatggcggcgccgggaagcgaccggctgctgggcttaaggcgggagtgaccgcttaaccagtgagggaagcactgaagagcgccagtcgacgtgggtgcgacaactcgcggagtcttaggagcaaaacgtctggggcctgcgagccaggacccttctgaagccttaggtgtctatcggcgacgtgtacggtcactgcagctccggagcgcggaaccctcagccaggaggcgcggctggtcggtcccaggtcccggcctccgtaatgagagcccggaaccactctttgtgccgcagcttcgcagtggaacgacctgtggaaacctgtgatccattctcattaaataaatctctggattcctataggcaatggaaactgatctcaattcccaggacagaaaggacctggacaagtttattaaattttttgccctcaagactgtccaagtgattgtccaggctcggcttggtgaaaagatttgcactcgttcatcatcttctccaacgggttcagattggttcaacttagcaatcaaagacatcccagaggttacacatgaagcaaagaaggcactggcaggacagctgcctgcagtcgggaggtccatgtgtgtggagatttcacttaagacttctgagggagattccatggagctggaaatatggngtctttgaaatgaatgaaaagtgtgataaagaaatcaaaggttnctacacgggggtacaacagaactggcattggttgcttgaagtcccttcttgctataactanggtgacacccagcctataggctnttc

SEQ ID NO: 5273 - DNA, 810 bp, Homo sapiens
  misc_feature (690)..(690): "n" may be a, t, c, g, other or unknown
  misc_feature (793)..(793): "n" may be a, t, c, g, other or unknown
  misc_feature (796)..(797): "n" may be a, t, c, g, other or unknown
gcacgtcagctgtcagatacgaaaggtagatatcaggtaagaatctggacttaggaaatagtcacaaaactgtcataggttgtaattttatcaacattcgcttctagtaaaattaaagtcaattaagaaatagaacttgggtcaaaattctgttacaaagcttcataatttgtcccgaagcatatggtggagcattctgagaaatttgctttttgtgtgtttgacattcctaatttgggagtccttcagctgaattactattcttttagaagttgagacagcaggtaagcaaaggacctagttcatgtaaacatggacatcatgatggctatttaaaaaatatttgttctacaccttctcccctgaggcttggggagtgtgttcagccgctgcagtttctctgctcatggaggtcttgtttggatctgtgctggcggctgagcatttagtgtgagccagtgacccatgaacttgccgctctgtgagggccagagtcagggccagtcatggtaatgggcctgaaggcacttccagaaccttttatgtctctcgtgagccatctgttaagaacgttcttcttggtgtggtttgtaggcctacctgtcgctattctgggaaaccttcttgagtgctatgcaaatgtgttcacaggcaatgggggtggcctgagccttggggtgggcacctggncagtgaagtggcttgccctttcccactgggcatacaagtaccttgctctttctgggggcatcatctgctgggatgaatgagggctaggaaataatttgcatgnggnnttgggggacacac

SEQ ID NO: 5274 - DNA, 782 bp, Homo sapiens
  misc_feature (684)..(684): "n" may be a, t, c, g, other or unknown
  misc_feature (699)..(699): "n" may be a, t, c, g, other or unknown
  misc_feature (771)..(771): "n" may be a, t, c, g, other or unknown
catgtgaaatattctttttaaaagttagtctgatttcttttgcacagtcctgtaccttcaattataagtttgcctcaagctctttgtggtaggagtctgagaataagtaaacaaaaccaattctcagtaactattttcagacttaatttgcctgaattacatttcatgtcaaaagcatgcattaaggaacaaagcaatttcagtaaagacacctatattctctcctacatgttgcttaagtagataacatatcttaagcagatttacaatattaaaagcttccaaggaaactcagtaaagtaccatgtgactttttgcccctattggcagctagttcttcaatacttggcttactttaaaaaaaataccttgcatcttgccccttttgtccacctaggatagaaatcagctttattcagtgtgatcatatactgagaaacattggcttcctctacataattactggtttgagaaaatacagtcagaagattgcactgggattgaataatttggatgagaagaaagtagttctctattgaatgtagttatagcttagtgctatttatgcagataaaccacatttttgtaacagtagtagcaggtgtatttgattattaaagtgttacaagttattgggttgcaaaattaagcttttagagttatcagttttgtgggtaagttttncatagtattatgtanagcctgaagatggtactctctatcaaccactcttctatagtgggatttcatttctaatggtagctcttgganagcaggtctgg

SEQ ID NO: 5275 - DNA, 666 bp, Homo sapiens
  misc_feature (628)..(628): "n" may be a, t, c, g, other or unknown
  misc_feature (656)..(656): "n" may be a, t, c, g, other or unknown
  misc_feature (664)..(664): "n" may be a, t, c, g, other or unknown
attttttaatccattctgtggcttgttccatgcctgagaacttttgacatcctgtgcccagacttaaactcaccccttcagtgtgtgggtttagggggagaagtgaaggttgacacattcatatcaacaacatagtctactttaccatccaacgatgtattttgatatcagccaagtatttctctctacaactgtgagcaatgctaatccactccagccttcttacactgtaatgataccttttctttgtcctctctggaagtttctagtagcatatctccaaataattattgaatttgaaagcctcagctggacaagtcttctctgtggttgaattgtgacaatgtctgtgttccttaaaaaaataaaaaataacataaaaccaagtaaggttagacaaaacagttgaaagtttaaaatcccttggcctcatctagttcagtggagacaaactttctaaatgggaggagggccatgtaatgagaggagaggagaggagagaagtatttgatgcactcatggcctcagggtcagggagacctggaggagcagtggagatggtggagagccagagaacagggccaccttccaagaggcagcctttactcacctctggctgattggcggngttggggatgtgggtacaggcatatcanacctttanat

SEQ ID NO: 5276 - DNA, 840 bp, Homo sapiens
  misc_feature (822)..(822): "n" may be a, t, c, g, other or unknown
cacttccccgatcgggccgtgtccgccgcggccctgcgaggtccgaggggcaatagccctctggaacaagacaattcatgtgagataagaaagaagagcccacaagaccaaggatgtattctcagtttacagaccactgaccagaggccactccagggtgtcaggactaagagaagtcacaaaacagcagatttcccaagagcagcggaaaatgacccagtcacagatatcatttgaggatgtggctgtggatttcacgctggaggaatggcagctacttaatcctactcagaagaacttgtacagagatgtgatgttggagaactatagcaatctggttttcttggaagtctggctagataatcccaaaatgtggctccgagataatcaagacaaccttaaaagtatggagagaggccataaatatgatgtttttggaaaaatatttaattcaagcataaacattgttcatgtaggactgcgatcccataaatgtggcacaggagaaaaaagtttgaaatgtccttttgatttgcttattccaaaaaataattgtgaaagaaagaaaattgatgaactcaataagaaattattgttctgtatcaaacctggcagaacccatggtgggataaaatactgtgattgcagtacatgtagaaaatccagcaacgaagagccatggctcactgctaatcacataacacacacaggagtctatttatgcatggaatgtggcagattttttttaacaagaagtcacaacttggtattcaccagagaactcatacaggagagaagccctatcaatgcaatgagtgtggnaaagcctttttacagaag

SEQ ID NO: 5277 - DNA, 797 bp, Homo sapiens
  misc_feature (710)..(710): "n" may be a, t, c, g, other or unknown
  misc_feature (716)..(716): "n" may be a, t, c, g, other or unknown
  misc_feature (778)..(778): "n" may be a, t, c, g, other or unknown
gtttgggtggtgaacagggatacagcaggcctcagtgaccaggcagagcccagtgaggtcaggcatggacaacgcacgcacattgggatgggaaggcctgctgttaactgggagagagaggaggaggaggtatggggatgactcccaaggaagggctttgcctaccttgatgggtttgctgggctgcgcctcagaaactggaggtcagtgccattcccatcagtgttcctactgccaggaaagtcttgcagtggctggctggccttcctgttcgactttctttccttgctcatcaaaacactttctctcccagcatcaactctacctgctccttctgcttaccacgcattccagtgactctgcccggttccaccggaagcggagttattttggaaggctggatggtgtacggtagggtggagggagccagaacgggaagccttggatggtggaaactcctctatcaccagggaacttggctgcagccccaagccctggcctcccaccagagcggggccgtccactttctccttctttttttagtactatcctctctgacccgcccagggctgggatgttgcagtgtgtttttccaagagacccggcaaacagcaacttgacaggttcaacggttcccattgacagcctgaatggactcctctgaaaactacgaaactggacacaaaaacagcccataaaaatcctgcctnccgcangcgtctggacgctgccttttccaaatgacccttcacacacggatgctgcatgggtggctaancacattttttgagtgattt

SEQ ID NO: 5278 - DNA, 820 bp, Homo sapiens
  misc_feature (758)..(758): "n" may be a, t, c, g, other or unknown
  misc_feature (768)..(768): "n" may be a, t, c, g, other or unknown
  misc_feature (788)..(788): "n" may be a, t, c, g, other or unknown
gaaaaggaaatcgcagctgtgatttctcctgaactggagcatctagataaaacccttcccaccatgaataatctcatcagccaagataagcgtatcagctctaaccctgtggccaaaataatatatggtgacccagtgaccttcctgccccacctgccccggaaaagtgtggtccattgctctaagatttggagctgcaggaaaagaattacagttgagtacctccagcacattgtggaacagaaaaatggcaaagaaagagtgcccatcctctggcatttcctgcagaaggaagcagagctgaggctggtaaagttcctgcctgagattttggccttgcaaagggatctagtgaagcagttccagaacgttcagcaagttgaatacagctccatcagaggcttcctcagcaagcacagctcagatgggttgaggcagctgcttcacaacaggatcacagtctttctgtccacatggaacaaactgaggagatcgcttgagacgaacggtgagatcaacctacccaaagactactgcagcactgacttggatctggacactgagtttgagatcctcttgccacgccgacggggcctgggcctctgtgctaccgctctcgtcagctacttgattcgcctacacaatgaaattgtctacgccgtggaaaaactctccaaggaaaacaacagctattccgtggatgccgccgaggtcactgaactgatgtcatcagttatgaagtggagcgggacctgctncactgatctntcactgcagtaccagtggangaggcagaaagacggcagagtcgatctggaga

SEQ ID NO: 5279 - DNA, 828 bp, Homo sapiens
  misc_feature (760)..(760): "n" may be a, t, c, g, other or unknown
  misc_feature (795)..(795): "n" may be a, t, c, g, other or unknown
  misc_feature (822)..(822): "n" may be a, t, c, g, other or unknown
ttcacagaaaacaaaatttactcatatccaatgtacatttcctgaagataaaactgttcatctcagggtctgagtgggccctggagcctgagctggccttgctcactgcatccgcaaggagacaattagcacagcctgctgcctgtagctgagctgtgcagagccagggaacaggagtgctccaaaagcgagaagggtttccggttgccctttcaacctcagaagtcaggacttgactcacagtcttctggatttttgacaaacaaaatcctatgcctatgcctagatccataggcacacaaatggaagacctaaataaatcaaagtgggggagtgaggctgctggactcctagagattcatggctctgccttgattagtcaccattcttttagcacatacgtccagatatcctacagaaaagaatgcagtcaccattcaggcatgctttgttttgaagcaatgatcatgaacttaatattctctgctggcataaagaggaaaaaaatataacacctggcagcttgtgggtaagtccatcacgggagccggtcctaaaattcttcaaaataccaactttctgaggttggaagcagaccctgagatgagattttggtgcaagtgatttattaaggaagggatcccaggaaaggcagtaagggagtaggggaaacaagttagggatggggaagaatccaagcaaaggttcaacttcaaaagttctggcctcagtctaatcccgagtgtaaattaggcctcanagttggtctaccttcaggcaaggaagcaggactgncatattcttatatgaagtcaagcattnggttaa

SEQ ID NO: 5280 - DNA, 844 bp, Homo sapiens
  misc_feature (489)..(489): "n" may be a, t, c, g, other or unknown
  misc_feature (758)..(758): "n" may be a, t, c, g, other or unknown
  misc_feature (776)..(776): "n" may be a, t, c, g, other or unknown
  misc_feature (782)..(782): "n" may be a, t, c, g, other or unknown
gttcacattagttgtgtctctggttcttgtcacaatctatgctgattatattgcccctttatttgacaaattcacacctctgcctgagggaaagcttaaagaagaaattgaagtaatggcaaagagtattgactttcctttgacgaaggtgtatgttgtggaaggatctaaacgctcttcccacagcaatgcttatttttatggcttcttcaagaacaagcgaatagttttgtttgacactctactagaagagtactctgtactaaacaaagacatccaggaggattctggcatggaaccccgcaatgaggaagaagggaacagtgaagaaataaaagctaaagttaaaaataagaaacaaggatgtaaaaatgaggaggtactcgctgtactaggccatgaactggggcactggaagttgggacatacagtcaaaaatatcattattagccagatgaattctttcctgtgtttttttttatttgctgnattaattggtcgaaaggagctttttgctgcatttggtttttatgatagccaacccactcttattggactattgatcatcttccagtttattttttcaccttacaatgaggttctttctttttgcctaacagtcctaagccgcagatttgagtttcaagctgatgcatttgccaagaaacttgggaaggctaaagacttatattctgctttaatcaaacttaacaaagataacttgggattccctggttctgactgggtggtctcaatgnggcattattctcatcctncactgntagagagacttcaagctttgaaaactatgaacaccctgagatgtcaagaactgggctgaaga

SEQ ID NO: 5281 - DNA, 665 bp, Homo sapiens
  misc_feature (663)..(665): "n" may be a, t, c, g, other or unknown
cactcaaatcatgaagaatcctaaagcgaagaccacaggaatgggtgccatctatggcatggcccagacaactgttgacaggaatatggttgcagaattgtcctcagtcttcttggacagcttgtacagcaccgacactgtcacccagggcagccagatgaatggttctccaaaaccccactgaacttggaccctttctagtctcaaggggattccagccttcagaaggttcttgggatatggaacaggccgtgcacaactttgacatctggtcttgctccatagagcacaactcaagatagaccatgagacagcttgagcctcaggattcttgttcttcctcttatcttccttttgtggtttttaatttgaagaccccagagaattccattacataatgattttgcccttgttataaatgttaccctaggaattgttttaaccatttccttttctaaactctctagctttcaactttacttaaacattgtgtggtagctctgacctgtcctgattctttagagaagctggggtacagtttatgagatagctagagcttctttgttatctcaggcaggaggcgtttacataacagatgtttcctcagctgggtgtgaggtatactctaagcaggaggctttttcagccttctctctctttttnnn

SEQ ID NO: 5282 - DNA, 809 bp, Homo sapiens
  misc_feature (749)..(749): "n" may be a, t, c, g, other or unknown
  misc_feature (779)..(779): "n" may be a, t, c, g, other or unknown
  misc_feature (787)..(787): "n" may be a, t, c, g, other or unknown
tatttggcaacatctggttatccatggccagcctggtcatctttatgcagctgcgttacctgtttcatgaggtgcaacgtcgaattcgtcggcacaagaactatctacgtgtggttggaaacatggaggccaggtttgcagttgcaactccagaggagctggctgtcaacaatgacgactgtgccatctgttgggactccatgcaggctgcgcggaaactgccctgtggacatcttttccacaaggtctcggattgcgagctggctgccgagtttttcggttgaagtgatgcacaccaccaacattcttggcattacgcaggccagcaactcccagctcaatgcaatggctcatcagattcaagagatgtttccccaggttccataccatctggtactgcaggacctccagctgacacgctcagttgaaataacaacagacaatattttagaaggacggattcaagtaccttttcctacacagcggtcagatagcatcagacctgcattgaacagtcctgtggaaaggccaagcagtgaccaggaagagggagaaacttctgctcagaccgagcgtgtgccactggacctcagtcctcgcctggaggagacgctggacttcggcgaggtggaagtggagcccagtgaggtggaagacttcgaggctcgtgggaacccgcttcttcaagtctgctgatgagagacagcgcatgctggtgcagcgtaaggaccaacttcttcagcaagctngcaaacgttctttgaacaaaagttttgaanatgatgcnggcttaaaaaagctttcttccc

SEQ ID NO: 5283 - DNA, 761 bp, Homo sapiens
  misc_feature (646)..(646): "n" may be a, t, c, g, other or unknown
  misc_feature (689)..(689): "n" may be a, t, c, g, other or unknown
  misc_feature (711)..(711): "n" may be a, t, c, g, other or unknown
  misc_feature (746)..(746): "n" may be a, t, c, g, other or unknown
gaaataacgatgagcgatgaggagcggattcagctaatgatgatggtcaaagaaaagatgatcacaattgaggaagcacttgctaggctcaaggaatacgaggcccagcaccggcagtcggctgccctggaccctgctgactggccagatggttcttacccaacgtttgatggctcatcaaactgcaattcaagagaacaatcggatgatgagactgaggagtcggtgaagtttaagaggttacacaagctggtaaactccactcgcagagtcagaaagaaactaattagggtggaagaaatgaaaaaacccagcactgaaggtggggaggagcacgtgtttgagaattcgccggtcctggatgaacggtccgccctctactctggcgtgcacaagaagccccttttctttgatggctctcctgagaaacctcccgaagatgactcagactctctcaccacgtctccatcctccagcagcctggacacctggggggctggcccggaagttggtcaaaaccttcagcaaaggagagagccggggcctgattaagccccccaagaagatggggacattcttctcctacccagaagaagaaaaggcccagaaagtgtcccgctccctcaccgagggggagatgaagaanggtctcgggtccctaagccacgggagaacctgcagttttggangatttgcttgcgaatcgctctntgcacgttggcagtataattctgaccccatgggtnaagaaggggactttg

SEQ ID NO: 5284 - DNA, 691 bp, Homo sapiens
  misc_feature (635)..(635): "n" may be a, t, c, g, other or unknown
  misc_feature (648)..(648): "n" may be a, t, c, g, other or unknown
  misc_feature (654)..(654): "n" may be a, t, c, g, other or unknown
ggaacagcggcctctgacaccagcacagcaaacccgccgggatcaaagtgtaccagtcggcagcatggctacgaaatgtgggaattgtggacccggctactccacccctctggaggccatgaaaggtaattgcccatggtctgagagccagcgccctactactgattccacagctgggggtggagggacttcagacctagcccccaccctctggcacacccagcacttcccctacctttccttcccaccctgccgtccctgctgcctgctttctaccgtgcaggacccagggaagagatcgtctacctgccctgcatttaccgaaacacaggcactgaggccccagattatctggccactgtggatgttgaccccaagtctccccagtattgccaggttaggcggggcttgggcgccagctactttgagaccatagctgccctcatccctggccctgggcccccccttcccagctccatccttcttggccctccctggggatgcttgtgcacgctcaacctgggacaaggggagtgctgaaatccagcctgtgccgtgcttccaaaccaaaatgagtccacaggggcgcctcttccaaaagtggacagaggcgtggcctgggggagcaccacctnttcccgcatctangtcatncaccggctgccatgcccaacctgaaggacaactggat

SEQ ID NO: 5285 - DNA, 721 bp, Homo sapiens
  misc_feature (647)..(647): "n" may be a, t, c, g, other or unknown
  misc_feature (691)..(691): "n" may be a, t, c, g, other or unknown
  misc_feature (709)..(709): "n" may be a, t, c, g, other or unknown
aagagaaatgctcttcatacccagtaggcagacagtccctacatataaaaagcttcctgagaatgtacagcccaggttcctggaagatgaaggcctttacaccggggtaagaccagaggtggcacgcaccaatcagaacatcatggagaacagattgctgatgcaggaccccgaaagaagatggtttggagatgacggcaggatcctagctctgccaaaccccatcaagccatttccttcaaggccgccagtactaacacaggagcagagcattaaggcagagcttgaaacactgtataaaaaggctgtaaaatacgttcacagtagtcagcatgtgatcagatctggagaccctcctggaaatttccaactggacattgatatttcagggttaatcttcactcatcatccctgttttagccgagagcatgttttggcagccaagctggcccagttatatgaccagtaccttgcaagacaccagagaaacaaggcgaaatttcttactgataagctccaagctttaagaaatgctgttcagactggccttgatccagaaaaacctcatcagtctctcgataccatccaaaaaaccatcaatgagtataaatctgaaattcgacaaacaagaaaattccgtgatgctnaacaagaaaaagattgaacattgcttaagactatcattaaaagnttggaaagagatgaaatncctttcaaagtt

SEQ ID NO: 5286 - DNA, 780 bp, Homo sapiens
  misc_feature (710)..(710): "n" may be a, t, c, g, other or unknown
  misc_feature (712)..(712): "n" may be a, t, c, g, other or unknown
  misc_feature (764)..(764): "n" may be a, t, c, g, other or unknown
ttcaaatagttgtagcaagaatgaaatagacattgatgcttttaggcattatagcttttctgatcaacctaagtgttcacagtacatatctgggctcatgagtgtacatggactcctcggatgcggccgtcctgcagcagaagcctcgagagcctccgggtgggtgccaagccgcctcccttccagcggtggccgagcgacagctggatcaggtgcggcgcgcaccgggactgggacgagcccccgccacgtggaggcaggatggacggctggagtggggaccgcgcccgggcggctgcacccaccggcctccagcctccaggctgcaaggaccacggctgctcctcgggaagccctttcagggatccagcggggtcctctgtgatacgcagtggcaaaggagaccgcccggaaggcccctccttcctcaggccgccggcagtgacagtcaagaagctgcagaagtggatgtacaaagggcgtctgctgtccctgggaatgaagggtcgtgcccgtgggacggctcccaaagtcacaggaacgcaggcagcctccccaaatgtgggcgctttgaaagtgcgtgaaaaccgtgtcctgtcggtgccttcagaccaaagaattacgctgacagatttatttgaaaatgcctatgggtcttcaatgaaagggaagagaacttgaagagctgaaggataatattgaattcagangncataagccacttaacagcatcactggtttcaaagaaaccgcaattggctatntcaagtacttttgagg

SEQ ID NO: 5287 - DNA, 698 bp, Homo sapiens
  misc_feature (585)..(585): "n" may be a, t, c, g, other or unknown
  misc_feature (645)..(645): "n" may be a, t, c, g, other or unknown
  misc_feature (667)..(667): "n" may be a, t, c, g, other or unknown
  misc_feature (691)..(691): "n" may be a, t, c, g, other or unknown
tggaaatgaatataaaatcagaatccaacacataaaaagaaagttcagcaaatgcaggactccagtctccactgcttcacagtagggtttgtccttgtgttttcttgttttgtttgggaaaataatgcaaaagagatttgttgtaaaagctttgaaatttaattatgatcagggagttctaaaggaaattaaacatagcatgagtacttttaaaaaatatgaatttaatatagcatcttatcaaataattcatcccacacggctagctcacttcccaccaggaaatagaaaagaatttttgaggactcttaactaataataatttctgaatttctctgacaccttcactgtttctaaacattttttttggtcatgttaacttacttgattcttcagagtttgcttattatagccatcactttctaatagtacatagtttgaaaagcacttggccgtcttctgcattctgggaacatgtggcttcctgacccacagaggatggcttctcgctgtgtcctcatgtggtggaaggggtgaggggtctctctgaagtgtctctgctaagggcgctagtcccattcttgngggctttattctcaccacctaatcactcccaaagtccaccttctaacaccatcgcttcangggaaaaatttcaaagtattgnatttgggggagggggccggcattnaatagtc

SEQ ID NO: 5288 - DNA, 629 bp, Homo sapiens
  misc_feature (546)..(546): "n" may be a, t, c, g, other or unknown
  misc_feature (579)..(579): "n" may be a, t, c, g, other or unknown
  misc_feature (591)..(591): "n" may be a, t, c, g, other or unknown
gcttacagttcctaaccccgaccctgcgcgcagcccgcactatggcagccccgccgcagctaagggctctgctcgtagtcgtcaacgcactgctgcgcaagcgccgctaccacgctgcgttggccgtgcttaagggcttccggaacggggctgtctatggagccaaaatccgggcccctcacgcgctggtcatgacctttctcttccggaatggcagcctccaggagaagctgtgggccatactgcaggccacatatatccactcctggaacctggcacggtttgtgttcacctacaagggtctccgtgccctgcagtcctacatacaaggcaagacctacccagcacacgcattcctggcggccttcctcgggggtatcctggtgtttggagaaaacaataacatcaacagccagatcaacatgtacctgttgtcacgcgtcctgtttgccctgagccgcctggctgtagagaagggctacatccctgaacccaggtgggacccgttcccgctgctcactgcggtggtgtgggggctggtgctgnggctctttgagtatcaccgatccaccctgcagncctcgctgcagncctccatgacctacctctatgaggacagcaatgtatgg

SEQ ID NO: 5289 - DNA, 817 bp, Homo sapiens
  misc_feature (681)..(681): "n" may be a, t, c, g, other or unknown
  misc_feature (709)..(709): "n" may be a, t, c, g, other or unknown
  misc_feature (762)..(762): "n" may be a, t, c, g, other or unknown
  misc_feature (784)..(784): "n" may be a, t, c, g, other or unknown
  misc_feature (816)..(816): "n" may be a, t, c, g, other or unknown
gcgactgcgcgcgcagggcctgagcgggcgccggagggaaggggaagcggcggggtagtaacagattatgggcaacagtccttttaattaatctaccgtcatcatggctaatgaggactgtcccaaggctgctgatagtcctttttcatcagataaacatgcccaactcatcttggcccaaatcaataagatgagaaatggacagcatttctgtgatgtgcagctgcaagttggacaggaaagttttaaagctcatcggctggttttggctgccagcagtccttactttgcagctttgttcactggaggaatgaaagagtcctcaaaagatgttgtaccgattctaggaattgaagcaggaatctttcagatacttctagatttcatttacacaggtatagtgaacataggtgtgaataatgtccaggagttgattattgcagcagacatgctacagttgactgaagttgttcatctttgctgtgaatttctgaaaggacaaattgatccactgaactgcattggaatttttcagttctctgagcaaattgcctgccatgatctcttggaattctcagaaaactacattcatgtccatttcttggaggttcatagtggagaagagttcctggcacttacgaaagatcagctgatcaaaattttgcgaagtgaagagcttancattgaggatgaatccaggtcttcttanctgcaatgcaatggatctgaaagatttgggaaaaagaagaaacatgtggtggnaatgctagacccaattcgattncctttattacctcttaaaaactttttaaaggnt

SEQ ID NO: 5290 - DNA, 815 bp, Homo sapiens
  misc_feature (740)..(740): "n" may be a, t, c, g, other or unknown
  misc_feature (802)..(802): "n" may be a, t, c, g, other or unknown
  misc_feature (804)..(804): "n" may be a, t, c, g, other or unknown
tcctgcagggggcaccagagatcttggacaggcaaactgcagcccttctgcatggaaccatcatcctggactgtgtcaacatggaccttaaaattggaaaggcaaccccaaaggacagcaaatatgtggagaaactagaggcccttttcccagacctacccaagagaaatgatatatttgattccctacaaaaggcaaagtttgatgtatcaggactgaccactgagcagatgctgagaaaagaccagaagactatctatagacaaggcgtcaaggtggccattagtgcaatatatatggatttggagatctgtgaagtcctggaacgctcccactctccacccctgaagctgacccctgcctcaagtacccaccctaacctccatgcctatcttcaaggcaacacccaggtctctcgaaagaaacttctgcccctgctccaggaagccctgtcagcatattttgactccatgaagatcccttcaggacagcctgagacagcagatgtgtccagggagcaagtggacaaggaattggacagggcaagtaactccctgatttctggcctgagtcaagatgaggaggaccctccgctgcccccgacgcccatgaacagcttggtggatgagtgccctctagatcaggggctgcctaaactctctgctgagccgcttcgagaagtgcagtcagatcttactgtcacagtctaccacagccttccttgtcccagaagtgactgntgaaaagccaagaggtaatgggtgaagctacctgactcactttaaatgcctggttttgagangnttggagaatca

SEQ ID NO: 5291 - DNA, 676 bp, Homo sapiens
  misc_feature (458)..(458): "n" may be a, t, c, g, other or unknown
  misc_feature (619)..(619): "n" may be a, t, c, g, other or unknown
  misc_feature (654)..(654): "n" may be a, t, c, g, other or unknown
  misc_feature (671)..(671): "n" may be a, t, c, g, other or unknown
ataaaacctaacattctgagccagtatttaggacccgtaaaatttgactctactgaatctttccaatcttatacccactacagtgcaaaaacccctgatttcattaagcagacgtagtagctgccctggaatatgctatttcccttattgttgttatgcttttgttaatgatctaccctccagtgaattttggtttgtgttctgaatcttaaatttacacagcatacaacctcgaatggatattataatttctctgagcctgaaaattgaaataataacttcatctttaagggatgcaatgagaaacaactatgttccaatatgaaactacattacttgcagtgatcaatctgagagattgtgctttgataacctgacttcaaaatacagaccaagatactttcctaatttatcatttgaggttttaaataattatgatatacaaggggtaattttgntttttgtttttttttttgcttttgttagagaattttaagcaatttacttggttagctcaatgctatataaatatgtttgcaattattttaatttaaaaacttaaaaaatacaaatgtaaattatgatcagatacctttgatcataacacctaaaagaaaanggaggaaacactatcaaaatttgattttcttatgnttcattttctatacagncttaa

SEQ ID NO: 5292 - DNA, 671 bp, Homo sapiens
  misc_feature (621)..(621): "n" may be a, t, c, g, other or unknown
  misc_feature (632)..(632): "n" may be a, t, c, g, other or unknown
  misc_feature (669)..(669): "n" may be a, t, c, g, other or unknown
ctaggtaggaagggggcctgctggttggttggggcttcatgatacttgcagtggtggaggcagctgttgggggttcttagaaatagagtcctccagccagctctaagggcttcctgccctggcctcagccttagcaggccagagtgagcagtgggcagaaaccttgacctcacttaatatggccttcgtccaggtgaagcagaaagagctgtgtctgcccttcgcttgggtccgtgtgagagcaaggcctttggcaagcctgtgtcgtgcctgtaccactggggctgcctcccacaccctcccctgcacacccctagtgccgcagtaagcacgcccaccattaaagcagaccaggagttactaacctgcctgccttcctcagaggctcagtgttgagttggaagagaggggttttacagtgggccagtccttaaggtggtgtgggtgctgggctgtggttgtggccttaggtctgctggcgggtgtgctgcacctccttggcctcccctctcctgggctcaaggaagtaaacaagtcctctgtatgatggggaggccaggacctctcgtccctttaaggcagcttggtgcctgccagtcacctcaacgggcggcaagtcantgggcttgtgngcatctgtaaactcagcactttgggaggctgaagcanga

SEQ ID NO: 5293 - DNA, 710 bp, Homo sapiens
  misc_feature (636)..(636): "n" may be a, t, c, g, other or unknown
  misc_feature (645)..(645): "n" may be a, t, c, g, other or unknown
  misc_feature (709)..(709): "n" may be a, t, c, g, other or unknown
cgttatttttttaatctgccagaacatacatttttcttacctgtcattattattattattatttgaggtggagtcctgctgtatcaccaggctggagtgcagtggtgcaatctcggctcactgcagtccctgcctcctgagttcaagcaattcttgtgcctcagcctccctagtagctgagattacaggcgtgtggcaccacgcccagctaatttttctatttctagtagatatggggtttcaccatgttggccaggctggtctcgaactcctatcctcaagcaatctgcctgccttggcctcccaaagtgctgggattagaggcgtgagtcacctcgcccagcctcttacctgtcattcttgaggagcccagtgtaggagggaagggctgtgtatctgtgagtgcgggtaaagcacacggaagctggccatgttcgtcatcttggtttcatactgacaagcaggagtcagtgtgccccatggcgtgggggccctggaaggaagcctctgcagctgcagaaagacagaccccacttggaaaataaaacagcagcataaggacttgggctctaattacagagttgtcaggttgaagagaagtggttgtgggataacaggaagagaaaatattttggntcttctcancataatgaattttcatcagtacgcctatttccttggttaactttttgccaaatggggacctttng

SEQ ID NO: 5294 - DNA, 691 bp, Homo sapiens
  misc_feature (677)..(677): "n" may be a, t, c, g, other or unknown
  misc_feature (680)..(680): "n" may be a, t, c, g, other or unknown
  misc_feature (684)..(684): "n" may be a, t, c, g, other or unknown
atcgcttgaacccaggaggcggaggttgcagtgagccaagatcacgccactgcactccagcctggccgacagagtgagaacccgtctcaaaaataaattaaaaaataataaaaaataaaacaaagtaggccatagatctaaatgttagagctgaaactacaaaacacttgaagtaaatacaggagtaaatcttcatgacctgagttaagcaaagccttcttagatgcaagaccaaaagcacaagtagcaaaagaaaaaagtagacaaactggacttcatcggagattaagatttgtgcttcaaaggacaccatcaaggaagtaaaaagacaaaccacagaatggagaaaatatgctgctgggactcgccacctcctgccgtgctggtgggggaagcgccaggctgtaggtggggtctggcctggtctctgcccagcaaactggctgtgctggcccgggcaatccctctcctcctgggtctgtttctggggctatggagttgagggtggagccagcagcaaggggacagggctcgctgggggacccgcctgcctgtgctgctgccaggagctctggaacttccaatacctggcagcttctttgcctctcagagttgcagcccttgggtgatgttgcagctcacatttccccatttctgattactgcttgccccacttnctnctgngtccctg

SEQ ID NO: 5295 - DNA, 835 bp, Homo sapiens
  misc_feature (626)..(626): "n" may be a, t, c, g, other or unknown
  misc_feature (669)..(669): "n" may be a, t, c, g, other or unknown
  misc_feature (715)..(715): "n" may be a, t, c, g, other or unknown
  misc_feature (766)..(766): "n" may be a, t, c, g, other or unknown
  misc_feature (787)..(787): "n" may be a, t, c, g, other or unknown
  misc_feature (831)..(831): "n" may be a, t, c, g, other or unknown
tctaggcctggtcggctggcggcgatggcaggattttcataatatatgtagtatgagttccacatcttggcctcttacccagcttcagcagtctcagctccaccagttagagaataaatgggatttgcatgaactccactctgagctgaaatacagactgcggtgttaatatccttttcttctgattgttattaacaggtccttatgtcgtcagaagatcgagaagctcaggaggatgaattgctggccctggcaagtatttacgatggagatgaatttagaaaagcagagtctgtccaaggtggagaaaccaggatctatttggatttgccacagaatttcaagatatttgtgagcggcaattcaaatgagtgtctccagaatagtggctttgaatacaccatttgctttctgcctccacttgtgctgaactttgaactgccaccagattatccatcctcttccccaccttcattcacacttagtggcaaatggctgtcaccaactcagctatctgctctatgcaagcacttagacaacctatgggaagaacaccgtggcagcgtggtcctgtttgcctggatgcaatttcttaaggaagagaccctagcatacttgaatattgnctctccttttgagctcaagattggttctcagaaaaaagtgcanagaaggacagctcaagcttctcccaacacagagctagattttggangaactgctggatctgatgtagaccaagaggaaattgtggatgaaagagcantgcaggatgtggaatcactgncaaatctgatccaggaaatcttggactttgatcaagctcaacanataa

SEQ ID NO: 5296 - DNA, 729 bp, Homo sapiens
  misc_feature (705)..(705): "n" may be a, t, c, g, other or unknown
  misc_feature (712)..(712): "n" may be a, t, c, g, other or unknown
  misc_feature (729)..(729): "n" may be a, t, c, g, other or unknown
accctggcttttcttcacctcttcaaccaggagccgagatttctgttgctctgaagccatccaggggtctttaaccagaagagagaggagagcctcaggagttaggaccagaagaagccagggaagcagtgcaatggcttcaaaaatcttgcttaacgtacaagaggaggtgacctgtcccatctgcctggagctgttgacagaacccttgagtctagactgtggccacagcctctgccgagcctgcatcactgtgagcaacaaggaggcagtgaccagcatgggaggaaaaagcagctgtcctgtgtgtggtatcagttactcatttgaacatctacaggctaatcagcatctggccaacatagtggagagactcaaggaggtcaagttgagcccagacaatgggaagaagagagatctctgtgatcatcatggagagaaactcctactcttctgtaaggaggataggaaagtcatttgctggctttgtgagcggtctcaggagcaccgtggtcaccacacagtcctcacggaggaagtattcaaggaatgtcaggagaaactccaggcagtcctcaagaggctgaagaaggaagaggaggaagctgagaagctggaagctgacatcagagaagagaaaacttcctggaagtatcaggtacaaactgagagaccaaggatccaaacagaatttgatcagcttanaagcatnctaaataatgaggagcn

SEQ ID NO: 5297 - DNA, 828 bp, Homo sapiens
  misc_feature (639)..(639): "n" may be a, t, c, g, other or unknown
  misc_feature (760)..(760): "n" may be a, t, c, g, other or unknown
  misc_feature (811)..(811): "n" may be a, t, c, g, other or unknown
  misc_feature (828)..(828): "n" may be a, t, c, g, other or unknown
accaattaaggaaaaaaataacccacaaaagaatggctgggaattatctctcatggcctttattttcttcatattagatctccagaaatctatttgaattaattttgttatcatttgctaaatcactggaggccatgtctacactgccaagagaaaaaagttcaaaaactcatttcaaacagcttcctaccaaaccagtcggggatattctatacagtataccaatataaaaaatacagaagaattatttgttctgatcctattccaaattatataagttgataaccaaatgttaccattggaaaacgtcttggaactatttaagtctttctattgcactttttcttccaactttaaaagacaaaattttaaaatctgaccccagcccttgtgattgttcagtatataatcaatggtatcttacaaggactattttatttggaatcaatcaaatttgtttcctgccaacaataagttagattgttttttgcagttctcaagtaacaaatatgaggaccgaactctcattcaacatccaagcccttgcagtttgtgcaaatatatgtttagcaacaaaggacagacagaatccatcattagtatggctttttactggaatgttttgcatttattcattgntctttgcttggagagcaaatttagatatttcaaaaccacttttcatgggtgtggtggaacgattctggatgcagagcaatgcagtagtgccgcctcgctggcattggttggctgcagttgngctgagactaaccgagtgctgaatagcaatgggcttcagtggctggaatgntttctgcactcttttgn

SEQ ID NO: 5298 - DNA, 832 bp, Homo sapiens
  misc_feature (686)..(686): "n" may be a, t, c, g, other or unknown
  misc_feature (832)..(832): "n" may be a, t, c, g, other or unknown
atccctccctgcccaggccgcgagaatgaccactccacttgcaggcgaagcccctggccgctgtgctgaaggaggtgtgcgacgcgtggagcctgacgcactctgagcgttacgccctgcagtttgcggatgggcaccggagatacatcaccgagaataaccgcgcggagatcaagaatggcagcatcctgtgcctcagcacggccccagaccttgaggctgagcagctcttgggtgggctgcagagtaacagtcctgaagggcgccgggaagccctgaggcgccttgttccgctggcctcggacatgatctttgccagggaggtcatcagccgtaatgggctccagatactaggcaccatcattgaagatggggacgacctaggagaggtgctggccctcagcctgagggccttctcagagctcatggagcacggcgtggtgtcctgggagactctgagcatcccctttgtgaggaaggtggtgtgctacgtgaacatgaacctcatggatgcctccgtgcctcccctggcccttgggctgctggagagtgtgaccttgagcagcccagccctgggccaactggtcaagagcgaggtgcccctggataggctgctggtgcacctacaggtgatgaaccagcagctgcaaaccaaggccatggccctgctgacagccttgctgcanggggccagcccttgtggaacgcaagcacatgcttgactatctttggcagaagaaccttcgccagtcatctataagacatcattcacagtgcaacaccaatgggcgacaagatggcttcatcacctgacgtactgaagcttttatcn

SEQ ID NO: 5299 - DNA, 721 bp, Homo sapiens
  misc_feature (691)..(691): "n" may be a, t, c, g, other or unknown
  misc_feature (700)..(700): "n" may be a, t, c, g, other or unknown
  misc_feature (704)..(704): "n" may be a, t, c, g, other or unknown
agctttaggttcacagcaaaatagaacataaattacagagggttcccccgcacccctgggctcagcatccccacaagagcggccatttgttatagtcgcgaccgccctggagacagtgtcatcatcacccacaggccgcacgacctcagggtccaccgggtgctgtgcagtctatggttggatgaacgtatcctgatgtggacccaccgttgtggtatcatacagagtagtttcactgccccaggtcccccgtgttcctgctgcacatccctccgtccctccctctccccagcccctggcattcgctgatctttgtgctgtctgcacggttttgccctttcctggatgtcagagtcggaaccgtacagcgtgtagtccttggagacgggctgctttcactcagcagcatgcgtctatggtccttttttgtcttttcagggcctggtaatattctgttgtctggatggacgccgggtgtttaatccactcacctatgagtgtcttgggtcacttgtagttgtctctctgggcttctcttacggataaatgaagaataaacaaagccagccactggcccctgaactcggttctgcctctgacttgtcttgatgaggaggtgtccttgcgtggactcgtgctgtgtcatcatgctcctgctccgtgttcggagccacctgggctgtgacaggangtcaagtgntcanggatgatgcagtttctg

SEQ ID NO: 5300 - DNA, 787 bp, Homo sapiens
  misc_feature (706)..(706): "n" may be a, t, c, g, other or unknown
  misc_feature (742)..(742): "n" may be a, t, c, g, other or unknown
  misc_feature (771)..(771): "n" may be a, t, c, g, other or unknown
agagcgacgcggaaccccgggcgcctgggtccccagcatgatcctcggcagcctgagccgggcagggcccctgcctctgctacggcagcccccgatcatgcagcccccactggacctcaagcagatcctgcccttcccactcgagccagcccctacccttggcctcttcagcaactacagcaccatggaccctgtgcagaaggctgtgctctcccacacttttgggggacccttgctcaagaccaagcgacccgtcatttcctgtaatatctgtcaaatccgcttcaattctcagagccaggctgaggcgcactacaaaggtaatcgccacgcccgacgagtcaaaggcattgaggctgccaagaccagaggcagggagcctggcgtccgagaacctggagacccagctcccccaggcagcaccccaacaaatggggatggtgtagcaccccgtccaggtactaagcacaagacaattctggaggcccgaagtgggctcgggcccatcaaagcttaccctcggctggggcctcccaccccgggggaaccagaggctcctgcccaggaccgaactttccactgtgagatctgcaatgtcaaggtcaactcggaggtccaactgaaacagcacatctccagccggcggcaccgagacggcgtggccgggaagcccaacccactacttgagccgtcacaagaagtctangggcgccggggagctggcgggcacgctgactttctncaaggagcttgccaagtccctgcggcggnctgttcccaggccccc

SEQ ID NO: 5301 - DNA, 824 bp, Homo sapiens
  misc_feature (685)..(685): "n" may be a, t, c, g, other or unknown
  misc_feature (772)..(772): "n" may be a, t, c, g, other or unknown
  misc_feature (812)..(812): "n" may be a, t, c, g, other or unknown
  misc_feature (819)..(819): "n" may be a, t, c, g, other or unknown
agtccacgcggattttcgaagctggggctggcaagaggccgctggacaccacgctccagtcgtcagcccacttcctagctgaacagcgcgaggcggcggcagcgagccgggtcccaccatggccgcgaattattccagtaccagtacccggagagaacatgtcaaagttaaaaccagctcccagccaggcttcctggaacggctgagcgagacctcgggtgggatgtttgtggggctcatggccttcctgctctccttctacctaattttcaccaatgagggccgcgcattgaagacggcaacctcattggctgaggggctctcgcttgtggtgtctcccgacagcatccacagtgtggctccggagaatgaaggaaggctggtgcacatcattggcgccttacggacatccaagcttttgtctgatccaaactatggggtccatcttccggctgtgaaactgcggaggcacgtggagatgtaccaatgggtagaaactgaggagtccagggagtacaccgaggatgggcaggtgaagaaggagacgaggtattcctacaacactgaatggaggtcagaaatcatcaacagcaaaaacttcgaccgagagattggccacaaaaaccccagtgccatggcaagtggagtcattcatggcaacagccccctttgtccaaattggcangtttttcctctcgtcaggcctcatcgacaaagtcgacaacttcaaagtccctgacctatccaagctggaggacctcatgtggacatnatttcgccgtggagactttttctaccacaagcgaaaaatnccaagtnttcca

SEQ ID NO: 5302 - DNA, 806 bp, Homo sapiens
  misc_feature (105)..(105): "n" may be a, t, c, g, other or unknown
  misc_feature (233)..(233): "n" may be a, t, c, g, other or unknown
  misc_feature (405)..(405): "n" may be a, t, c, g, other or unknown
  misc_feature (611)..(611): "n" may be a, t, c, g, other or unknown
  misc_feature (643)..(643): "n" may be a, t, c, g, other or unknown
  misc_feature (754)..(754): "n" may be a, t, c, g, other or unknown
  misc_feature (788)..(788): "n" may be a, t, c, g, other or unknown
  misc_feature (796)..(796): "n" may be a, t, c, g, other or unknown
aatgcaagaacaagatatgccattcttgcgaggagggccaggcatgtacaaggtagtgaagacgggaccttcaggtcacaacatcagaagctgccctaaccttanaggtatcccaattggaatgttagttctgggaaacaaagtcaaagcagtgggagaggtaaccaattctgaagggacatgggtgcaactggatcagaacagcatggtagagttctgtgagagtgatgaangagaggcatggtccttagctagagacagaggcggaaaccagtacctccgacatgaagatgaacaagctcttctggatcatgaattctcaaactcctcctccaagccctttctcagtgcaagcttttaataaaggggcaagttgcagtgcccaaggatttgattatggactcngaaatagcaaaggtgatcgaggaaacatctcaacatcttctaaaccagcctctacatcaggaaaatcagagctgtcctctaaacacagcagatcgcttaaacctgatggacgtatgagccggactactgctgatcagaagaagccaaggggcacagaaagtttatctgctagtgaatccctcatcttaaaatctgatgctgctaanttgacgtcagattcccacagtaggtcattatnccccaaccataacaccttgcagacattgaaatctgatgggaggatgccttctagctccagagctgaatccccaggaccaggttctcggtggcatctctaagccaaagactnttccagcccataggtctagcccatcggtgctagntcttcacncttcttctta

SEQ ID NO: 5303 - DNA, 730 bp, Homo sapiens
  misc_feature (223)..(223): "n" may be a, t, c, g, other or unknown
  misc_feature (648)..(648): "n" may be a, t, c, g, other or unknown
  misc_feature (655)..(655): "n" may be a, t, c, g, other or unknown
  misc_feature (695)..(695): "n" may be a, t, c, g, other or unknown
gtgctttttgtggggaaagtgaggtttttttttatatacatatataattgatatctttaatttattggttgttaactgttgctgctgcctggtgtgtcctcagctcccagggctgcgggcccaccgtttacatgtgcacgccctgacccacctgcccacgccgacttgggaggatggtggcctgcagcggccaagaagccaaaaaaatttttttttttttcanatactgtgcttgatttttggagaggggagaggtggaaattcctaaatggctaatgcactgttccctccagcccgaatgcctcctgccaaaccccttttccctgctgcctctgtccccgcatccttgttctcccctgggtccgtaacattttttccgaggatgaacaggggacatctttaggtttctcaactcttgctttggtgtttgccgcagcatggaaaacagggcgcctaaggctgggagctggaagaaggggcattgggtacccaggcagagtcaggagaggtggtctttgaagtaagttagcagaaatcaaggggacccccgcctccttgggctggggaggggatttcaagatagttcatgactctctcccgctctgccttccctccttcctatctgctttttccagtaaactgcatggngtccttncctgccttctcttggctcaaaggctgggagggaaggaaangagagaagagttccaggcaatcccatcaaatatag

SEQ ID NO: 5304 - DNA, 654 bp, Homo sapiens
  misc_feature (611)..(611): "n" may be a, t, c, g, other or unknown
  misc_feature (625)..(625): "n" may be a, t, c, g, other or unknown
  misc_feature (630)..(630): "n" may be a, t, c, g, other or unknown
ttgctttgaattaaatgagagagaagcaacaatagagagcattcaggggaacttacctacaccccttacctatcctgacatcactctctccaggtctgatcccttgaaataccatcatttgtcccctcagaaaccttgggcgtgaaggagtcctcctgagccctgggcccactgtaccaaagtcttctctccagagagggtcaggagcctgtcttctaaccacctccatggcaggacttagccagactgccttgggaactgctgtcattctcctcactcaccacctcttcccacccaaccactccatcaaagctgtgtttgcagaggactgaccctcagtgaagtctggacactcccccacaaaaaataagaggctccaaaactgacaagcacctagctaagtacctttgtgccttgaagcatggcaaacaatcctccactgccctaagagaacccactgagaatcctgtggagcctctggggaagctggggtttatggggccctggtaaatctgctacagaatgccccccatggaatataatgaagtggacatgatttttgggcttctcccacaacatttttttttttttgagacacagtctcattctgntgtccaggctggantgcantggtgaaggtgttggcttacagca

SEQ ID NO: 5305 - DNA, 790 bp, Homo sapiens
  misc_feature (653)..(653): "n" may be a, t, c, g, other or unknown
  misc_feature (725)..(725): "n" may be a, t, c, g, other or unknown
  misc_feature (763)..(763): "n" may be a, t, c, g, other or unknown
  misc_feature (783)..(783): "n" may be a, t, c, g, other or unknown
gctccagacgctgagaggcaggaggcactagggatcgtccgcaggattgggactgatacagaggccgccacggagcccgccggagccaccgttcctgctgctgccgccgctgcccgaatcggaaccgtcgggccgcagccgccggcaatgccgcgaaggaagaggaatgcaggcagcagttcagatggaaccgaagattccgatttttctacagatctcgagcacacagacagttcagaaagtgatggcacatcccgacgatctgctcgagtcacccgctcctcagccaggctaagccagagttctcaagattccagtcctgttcgaaatctgcagtcttttggcactgaggagcctgcttactctaccagaagagtgacccgtagtcagcagcagcctaccccagtgacaccgaaaaaataccctcttcggcagactcgttcatctggttcagaaactgagcaagtggttgatttttcagatagagaaactaaaaatacagctgatcatgatgagtcaccgctcgaactccaactggaaatgcgccttcttctgagtctgacatagacatcttcagccccaatgtatctcacgatgagagcattgccaaggacatgtccctgaaggactcaagcagtgatctctctcatcgncccaagcgccgtcgctttcatgaaagctacaacttcaatatgaagtgtcctacaccaggcttgtaacttttntaggacaccttacaggaaaaccttgagagacatttctncatcttaggatgcccactgnatcataa

SEQ ID NO: 5306 - DNA, 820 bp, Homo sapiens
  misc_feature (665)..(665): "n" may be a, t, c, g, other or unknown
  misc_feature (726)..(726): "n" may be a, t, c, g, other or unknown
  misc_feature (737)..(737): "n" may be a, t, c, g, other or unknown
  misc_feature (767)..(767): "n" may be a, t, c, g, other or unknown
gatggagtatcactctgttgcccaggctggagtgtagtgactcgatctcagctcactgcaacctccacctcccaagttcaagtgattctcgtgcctcagcctcctgagtagctggaactacagatgtgcaccaccacacccggctaatttttgtatttttagtagagacggggtttcaccatgttggccaagctggtcttgacctcctgacctcaggtgatctgcccgcctcagcctcccaatgtgctgggattacaggcgtgagccaccgcgcctggcctgtacatataactcttaaaatgctgccctgaccctggggctcactttcaaagatgtccacactctgtaggccaggaccccacctgtcccgtacccttcctggcagccctgtccctgctacatcgcccttcagctacaccagctttctttgggtccctggaccacacctgataccttcccgcccagaagtgttatctctgtcctggcagttgctcaaccttttatggtccctaccaccaaggccatctgcttggttgacatacccaccccaactgtaattaaatcatccccggtgtctcctcactagacagctccacataagcacagctggtccttttaaggctgtgtccccagcaccttccacaaaggaggatgcagttcatcangatgggttggatgaacaagcccattttacagatgaataaactgaggcacaggcaggtgcanaattttggcancactgcacacctgtcctgggctttgtcctnctccctggggaaatgagcttggagcacccctctaggaactgggatgccagcct

SEQ ID NO: 5307 - DNA, 674 bp, Homo sapiens
  misc_feature (481)..(481): "n" may be a, t, c, g, other or unknown
  misc_feature (546)..(546): "n" may be a, t, c, g, other or unknown
  misc_feature (602)..(602): "n" may be a, t, c, g, other or unknown
  misc_feature (632)..(632): "n" may be a, t, c, g, other or unknown
  misc_feature (665)..(665): "n" may be a, t, c, g, other or unknown
gaaggatgcatctagtgcaggacccattcatcaagagatgtaagtacattcttcagcttagcttttcaagcatcaagtagtgtttctattctgtatttcagaagatattatggcatagtttaaaggggtgctagcataggacttaggaagactttttttcaaatcattgctttgattttatcttcataattgtaaaaaatcatgttatttttctgttcctgttttctgaaggaaaaaaacatcttcttctaggtttgatataatgtttcagtgagaacagcacacagtgggagtggcccagtgcctggcctttaaacatgcttaataaatgttacatgaatactgtatcctgctttgatcaccactggcattttgtaatggaattagttcttctttttttttttttcttcaacttttattttaagttctggggtacatatgcaggatgtgcaggtttgttacataagtgaacatgtgccgnggtggtttgctgcacaggtcatccatcccatcacctaggtattaagcccagcatccattcgctgntcttcctgatactctccccaatccaccatccccctgcctcctgccacatgccccantgtgtgttgtttccccccatgtgtccatgngttctcatcattcagctcccacttattagtganaacacctgg

SEQ ID NO: 5308 - DNA, 774 bp, Homo sapiens
  misc_feature (666)..(666): "n" may be a, t, c, g, other or unknown
  misc_feature (745)..(745): "n" may be a, t, c, g, other or unknown
  misc_feature (758)..(758): "n" may be a, t, c, g, other or unknown
  misc_feature (768)..(768): "n" may be a, t, c, g, other or unknown
tgttaatattcaattaaaaatatgcttatagtttttgtcctctaaatttcctctctcaccttcctcttatatagagtcaaaataaattaaagaggttatcttttttctatattttctttgcctggcaagatctacatctttaactgatatttatgaagtcccctaaggaatttaacgacttcattggattttgcaatgttacattcttagtgaagtaaattattagtaagacagatatacaagttagcttccttgatctttaacttgacttataaagaaacgtgttgatccttctccttattttttaaatctttttttatttctctgtttctttttgttgttactgtttcccctgcttcttctttacaattcaaatcaaattcttattcacctgaagcacgagtaatttggaagcttctatgctatttgaccagagacaatccctttttttttttttttttggtattaagggtgtgcttaaccatctattagatagatatgggtagtagacaaagaatattctagaaggtttgatccagaacatcctaaaaaagtagaatactaattgttgagactgtcagttcattcatatctcatatttcctctgtcagagagagtcagctaagcaaggtcattggcccaaaaatatcttgaagcaatggctgnaattgaacatatgcaggagaagttactgtaagtatgagtcaacacaatggtaagaaggatgaaaatggctggccaaaanggttggcctgganaaaatccccncttttt

SEQ ID NO: 5309 - DNA, 832 bp, Homo sapiens
  misc_feature (681)..(681): "n" may be a, t, c, g, other or unknown
  misc_feature (683)..(683): "n" may be a, t, c, g, other or unknown
  misc_feature (823)..(823): "n" may be a, t, c, g, other or unknown
aataaataaaaccaccagtcctttgaagaacagtgaccaagctattgtaaattgcaagtaatagttggagagagtttgggctacggaatggggaggactgagatgaacaagggtgttgggaggtgagcaagagttcctttaatacattcagcaaatacttaaatgaccagcatagtgatgaagagtatgggttctgggccaggcacaatggctcacgcctgtaatcccagcactctgggaggctgaggcgggcgtatcgcctgaggtcaggagttcaagaccagcctggccaacacgatgaaaccctgtctctactaaaaatacaaaattagccgggaatggtggcaggcgcctgtaatcccagctactcgggaggctgaggcaggagaattgcttgaacccgggaggcggaggttgcagtgagctgagatagtgccactgtactccagcctgggtgacagagtgagactttgtctcaaaaaaaaaagatacgggttctgactgggcgcggtggctcatgcctgtaatcccagcgctctgggaggccgaggagggcagatcacagcgtcaggagttcaagaccagtctggccaacatagttaaaccccgtctctactaaaaatacaaaaattagccaggtatggtggcacatgcctgtatttccttaacgtgttagccttntncaaacctgcagtgaacttgcttggttccgaatgggagccgtgctgccaaaaactaaattagtaaaacttgtgagcgcctactggtgtcatgcatgtctagaatatcggggatacagtgatcctgatacaccatcctgtcnggaggacaa

SEQ ID NO: 5310 - DNA, 834 bp, Homo sapiens
  misc_feature (54)..(54): "n" may be a, t, c, g, other or unknown
  misc_feature (430)..(430): "n" may be a, t, c, g, other or unknown
  misc_feature (684)..(684): "n" may be a, t, c, g, other or unknown
  misc_feature (712)..(712): "n" may be a, t, c, g, other or unknown
  misc_feature (720)..(720): "n" may be a, t, c, g, other or unknown
  misc_feature (824)..(824): "n" may be a, t, c, g, other or unknown
  misc_feature (828)..(828): "n" may be a, t, c, g, other or unknown
aacggcccttcgcagcgggcgcgctgtcagacctcagtctggcggctgcattgntgggcgcgccgctctcgtctgatccctgctggggacggttgcccgggcaggatcctttacgatcccttctcggtttctccgtcgtcacagggaataaatctcgctcgaaactcactggaccgctcctagaaaggcgaaaagatattcaggagcccttccattttccttccagtaggcaccgaacccagcattttcggcaaccgctgctggcagttttgccaggtgtttgttaccttgaaaaatggctactggacaggatcgagtggttgctctcgtggacatggactgtttttttgttcaagtggagcagcggcaaaatcctcatctgaggaataaaccttgtgcagttgtacagtacaaatcatggaagggtggnggaataattgcagtgagttatgaagctcgtgcatttggagtcactagaagtatgtgggcagatgatgctaagaagttatgtccagatcttctactggcacaagttcgtgagtcccgtgggaaagctaacctcaccaagtaccgggaagccagtgttgaagtgatggagataatgtctcgttttgctgtgattgaacgtgccagcattgatgaggcttacgtagatctgaccagtgctgtacaagagagactacnaaagctacaaggtcaagcctatctcggnagacttgntgccaagcacttacattgaagggttgccccaaggcctacaacggcagaagagactgttcagaaagaagggatgcaaaacaaggcttattcaatggctcaatctnttanatgata

SEQ ID NO: 5311 - DNA, 767 bp, Homo sapiens
  misc_feature (736)..(736): "n" may be a, t, c, g, other or unknown
  misc_feature (738)..(738): "n" may be a, t, c, g, other or unknown
  misc_feature (760)..(760): "n" may be a, t, c, g, other or unknown
gcaggtggtttcggttgcggcagtcgcgtcccgggagcgtcgctgcctggtgaacgctagaatgggtactaggaaaaaagttcatgcatttgtccgtgtcaaacccaccgatgactttgctcatgaaatgatcagatacggagatgacaaaagaagcattgatattcacttaaaaaaagacattcggagaggagttgtcaataaccaacagacagactggtcgtttaagttggatggagttcttcacgatgcctcccaggacttggtttatgagacagttgcaaaggatgtggtttctcaggccctcgatggctataatggcaccatcatgtgttatgggcagacgggagctggcaagacatacaccatgatgggggcaactgagaattacaagcaccgggggatcctccctcgtgccctgcagcaggtttttaggatgatcgaagaacgccccacacatgccatcactgtgcgtgtttcctacttggaaatctataatgagagcctgtttgatctcctgtccactctgccctatgttggaccctcagtcacaccaatgaccatcgtggaaaaccctcaaggagtcttcattaagggcttgtcagttcacctcacaagtcaggaggaggatgcattcagcctcctttttgagggtgagaccaacaggattatagccttccacactatgaacaaaaactctttcagatcacactgcattttcaccatctacttaaangnccattcccggaccttatcagangaaaagt

SEQ ID NO: 5312 - DNA, 469 bp, Homo sapiens
  misc_feature (234)..(234): "n" may be a, t, c, g, other or unknown
  misc_feature (442)..(442): "n" may be a, t, c, g, other or unknown
  misc_feature (447)..(447): "n" may be a, t, c, g, other or unknown
  misc_feature (469)..(469): "n" may be a, t, c, g, other or unknown
tagtagagatggggtttcaccatgttggacaggctggtctccagctcttgacctcgtgatccgcctgtctcggcctcccaaagagttgggattacaggcatgagacatcacgcccagactctttttttttcttaagacataatctcactctgtcgcccaggctggagtgcagtggtgtgatctcacctcaccgcagcctccgcctccctggttccagctattctcgtgcctcanccttgccagtggctgggtctacagcgggggtgccaccacgcctgtttaatttttgtatttttagtggagacggggattcaccatgttggccaggctggtctcgaactcctgctcctgacctcaaacagtcctcacgccttggccttccaaagtgctgagagccaggcgcctggctctatgtctttttttggggggtatggagtcttgntctgntgcctaggctggagtgcagcgn

SEQ ID NO: 5313 - DNA, 724 bp, Homo sapiens
  misc_feature (398)..(398): "n" may be a, t, c, g, other or unknown
  misc_feature (633)..(633): "n" may be a, t, c, g, other or unknown
  misc_feature (684)..(684): "n" may be a, t, c, g, other or unknown
  misc_feature (705)..(705): "n" may be a, t, c, g, other or unknown
agtgtgatgccaccgccgctacggggaagtaatggtatccggccaattgagattcggagttaaaacagggatgtgcagatggaggtcggaggagacactgctgccccggcccccgggggcgcggaggacttggaggacacgcagttccccagtgaggaagctagagaaggtggaggggttcacgcggtcccgccggatcccgaagacgagggcctggaggaaacaggatccaaggacaaggaccagccacccagcccatcaccaccgcccctgtcagaggccctgtcaagcacctctcggctctggagtcctgcagcccctgagaatagtcccacatgtagccctgagagtagctctggaggccagggcggggaccccagtgatgaggagtggcgcanccagcggaagcatgtgtttgtgctgagtgaggctggcaagcccatctactcgcggtatggtagtgtggaggcgctgtcggctaccatgggtgtaatgaccgccctggtgtcctttgtgcagagtgcgggagatgccatccgtgccatctacgctgaggaccacaagctggtgttcctacaacagggcccactgttgctcgtggccatgtcacggacttctcagtcagcagcccanctgcggggggagctgctactgtcacgcacagatcgtgagcacacttacacnttgcaagttgtcgcccgcatnttcgcacacaaccggaact

SEQ ID NO: 5314 - DNA, 729 bp, Homo sapiens
  misc_feature (711)..(711): "n" may be a, t, c, g, other or unknown
  misc_feature (723)..(724): "n" may be a, t, c, g, other or unknown
ttctttggtgttttttggcccagcgtttgtggtgttttcactgggcactgggtcacgtggcctagcccattgctgctgggtggaggccccttctcctggatctgccccaatcaggccttgcccgcttcactggtgcccctcccaccatggctgccactgtcctcccacagccaacccagccatcagttctcattgcccctctcgcccattgcctccggcacaagcctggcctgtgatgctgcccccacaccgcctcctccccgccctccaccttcagcccctggtggggctcctcgccacctgaccccggaacggctggggcagccttgactgcttctgccgacttactctctgggcggcagtgccatctggatcggtggttcctcttcatccaggttttctgtgttctgctctgatcctcctgcctcagcctcccaaagctctgggaatacaggcgtgagccactgcgcccggccaagtgtttctcttagaatttcctgaaatgatagggtctctggaggggcaggtgctgggcttgagccctgggtaggaccctgcaggggagaggtggtcctgcagcccacagaggacggctctgtcctgttcctcatggtgcagatctccacaatggaagttcgaagcaagcaaaagccacgcaaaccacaggccgatctgtctgaaccctaagatttggcccggttctgcttcaancaccaacaccgnnttgct

SEQ ID NO: 5315 - DNA, 739 bp, Homo sapiens
  misc_feature (602)..(602): "n" may be a, t, c, g, other or unknown
  misc_feature (683)..(683): "n" may be a, t, c, g, other or unknown
  misc_feature (705)..(705): "n" may be a, t, c, g, other or unknown
  misc_feature (720)..(720): "n" may be a, t, c, g, other or unknown
ttgccatgtggaaatggggcagagtgttgccaattttctgattttttgtgtggaaaaaaatctccaaattgtagtttttaaatttggggaatgcaaatatatatatatatacacacacacacacacacacatacacatacaatccatatacatatggagtatgtaagttggcaataacagtatacatcaaaaaatttacaaacactgcaagacaaataaaatccaagccatccatttgtgaccacagtcataagcattcacttagccaggggcttttagataattgtctgtgaagtctgagaaaagactaagataaccaagatgaacataatgtcaaaggacgaaatcatggggacaatttggattttgttccaaaagacaagtgtttttaaaaagaacctttccatacttcgtgttctgttctatagagttaaaccttttaacttccatggccctttagatctctttcaagcacattccattttcttctgatcatacttcctcagaaaacctttttttggctgggtgtggtggctcatgcctgtagtcccagcactgtgggaggctgaagtggttgtattgcttgaggccaggtgtttgangccagccagggcaacacagcaagaccccatctctacaaagtgttaaaacattagctaggcatggtggtgcacgcctgtggncctaacttcttgggaagctgangcaggattgcttganccccagaatttgagccttc

SEQ ID NO: 5316 - DNA, 718 bp, Homo sapiens
  misc_feature (698)..(698): "n" may be a, t, c, g, other or unknown
  misc_feature (709)..(709): "n" may be a, t, c, g, other or unknown
  misc_feature (717)..(717): "n" may be a, t, c, g, other or unknown
gaaaagggggcgccgggccgctctagccggtgaggccggcgggctctctgtggctgcggctgggaaaccgcgcggaggaggtgcccggccggggaccagccctggtccagcgcctccctctctcagcatggacgaggagagcctggagtcggccttgcagacctaccgtgcgcagctgcagcaggtggagctggccttgggcgccggcctggattcgtctgagcaggctgacctgcgccagctgcagggggacctgaaggagctcatcgagctcaccgaggccagcctggtgtctgtcaggaagagcaggttgttggccgcgctggacgaagagcgcccgggccgccaggaagatgctgagtaccaggctttccgggaggccatcactgaggcggtggaggcaccagcagcggcccgtgggtccggatcagagaccgttcctaaagcagaggcggggccagaatctgcggcaggtgggcaggaggaggaagagggagaggacgaggaagagctgagtgggacaaaggtgagcgcgccctactacagctcctggggcactctggagtatcacaacgccatggtggtgggaacggaagaagcggaggatggctcggcggtgtccgtgtgctttacctgtaccccactcacaagtcttttgaagcccgtgcccgtttctttcaaggaagggaaagtgcccnttttaaaggangaacttgna

SEQ ID NO: 5317 - DNA, 850 bp, Homo sapiens
  misc_feature (657)..(657): "n" may be a, t, c, g, other or unknown
  misc_feature (682)..(682): "n" may be a, t, c, g, other or unknown
  misc_feature (760)..(760): "n" may be a, t, c, g, other or unknown
  misc_feature (789)..(789): "n" may be a, t, c, g, other or unknown
  misc_feature (791)..(791): "n" may be a, t, c, g, other or unknown
tgtcttcatgcttgttgcttcagtaacaaaatagctgctgaggctgcaggcatcacaccacattcaaggcaagaaaaaggaagaagtgagaatggtgccagccacatcatcttctcttaccaggaaaggcaaaagtcttcctagatctcccagcaggtttctgcttatatgtcatttgctagaactgtgtgccatgaacaccctggatacaagcaaaaacctggaaaagcacatattttgcctgggtctgggctcattgccatcctgagagaaagcagacttctggtagcaaagaaggtggaaataggtattgggaaggaagctaacggtgtctgctacaacacagcttaataaatagtagttttatatgcataataaatagtagctactccttggcataaagtaaaaataatgataacaaaaatacttacataattatattgtgtaagtgcttactatgtgccaggaactgttctgaatgttttaaatatgttaactcatttaatcttcacagcaattttgtgaggtaaatgttactatccttggtttttttttttttcagtgtttttaattctactttatatacatacaattagattgatcataatccctggttcatgacataccctcattggtccatgcatggctctcttttgnttactttttaaatattagttattgnaaataatatatagacaccttcaaatcccctggccaaaataaaattagggctggtcacaatttgcatctgctggatggnacccccaccatttacttctccctggccangngactcatccaaattctgagctcattatccttcactttgttttcatacagtttaaagttt

SEQ ID NO: 5318 - DNA, 665 bp, Homo sapiens
  misc_feature (388)..(388): "n" may be a, t, c, g, other or unknown
  misc_feature (643)..(643): "n" may be a, t, c, g, other or unknown
  misc_feature (646)..(646): "n" may be a, t, c, g, other or unknown
  misc_feature (662)..(662): "n" may be a, t, c, g, other or unknown
attttcccccatcttaagaaaatttgctttgatttccattctcctactagcagcagctgatatcacctgtagacctatgagcattttatctattctatcattgaagttactgataaagatttttgttgttgttgttgttgttgggagaaatggatttcccacaactaatccctctggcccaccattaggagaaggtcatagagctgaatatatgactacaaggcctccaaatgttccccctaagccccagaaacacaggaagtccaggccccgctcacagtataatactaagttgtttaatggggatttggaaacattcgtcaaggactcaggacaggttattcccctcattgtggaaagctgtattcggttcatcaatctctatggncttcagcatcaggggattttcagagtgtctggttcccaggtggaagtcaatgatattaaaaattcatttgagagaggtgaaaatcctttggctgatgaccagagtaaccatgatattaactcagttgctggcgttctgaagctctatttccgtgggctggaaaaccccctctttcctaaggaaagatttaacgatctgatttcttggatcagaatagataatctctatgagagggcgcttcacatccgcaaactnctnctgactttgcccaggncgg

SEQ ID NO: 5319 - DNA, 626 bp, Homo sapiens
  misc_feature (123)..(123): "n" may be a, t, c, g, other or unknown
  misc_feature (169)..(169): "n" may be a, t, c, g, other or unknown
  misc_feature (181)..(181): "n" may be a, t, c, g, other or unknown
  misc_feature (236)..(236): "n" may be a, t, c, g, other or unknown
  misc_feature (301)..(301): "n" may be a, t, c, g, other or unknown
  misc_feature (349)..(349): "n" may be a, t, c, g, other or unknown
  misc_feature (381)..(381): "n" may be a, t, c, g, other or unknown
  misc_feature (406)..(406): "n" may be a, t, c, g, other or unknown
  misc_feature (452)..(452): "n" may be a, t, c, g, other or unknown
  misc_feature (538)..(538): "n" may be a, t, c, g, other or unknown
  misc_feature (606)..(606): "n" may be a, t, c, g, other or unknown
  misc_feature (609)..(609): "n" may be a, t, c, g, other or unknown
actgggcggcctgaggagcgcggaccccggcgctcggctcccggcgccatgtgagggggctcgggggccgcggggggccgggcgctccccgccggaggtgtgaacccacatccctgcccccanggccacctgcaggacgccgacacctacccctcagcagacgccgganagaaatgagtancaacaaagagcagcggtcagcagtgttcgtgatcctctttgccctcatcaccatnctcatcctctacagctccaacagtgccaatgaggtcttccattacggctccctgcggggccgtanccgccgacctgtcaacctcaagaagtggagcatcactgacggctatgnccccattctcggcaacaagacactgtcctctnggtgccaccagtgtgtgattgtcancagctccagccacctgctgggcaccaagctgggccctgagatcgancgggctgagtgtacaatccgcatgaatgatgcacccaccactggctactcaagctgatgtgggcaacaagaccacctaccgtgtcntggcccattccagtgtgttccgcgtgctgaagaagccccacgagtttgcaaccggacccctgaaaccnggntcatcttctggggcccc

SEQ ID NO: 5320 - DNA, 823 bp, Homo sapiens
  misc_feature (674)..(674): "n" may be a, t, c, g, other or unknown
  misc_feature (693)..(693): "n" may be a, t, c, g, other or unknown
  misc_feature (738)..(738): "n" may be a, t, c, g, other or unknown
  misc_feature (817)..(817): "n" may be a, t, c, g, other or unknown
  misc_feature (821)..(821): "n" may be a, t, c, g, other or unknown
gaattaggggaggtggagggcagggctgggctcgaggagcaaggcaggcccggcgccaaagacgtgctgatccagctgcccgggcaggaggtctcccatgtggctgccgaccccgaggcccccgagatccagatgttcccacaggcccaggagagcccggccgccgtggaggtgctcacccaggtggtccatccctcagcagccatggcctctcaggagcgggcacaggtggccttcaagaagatggtccagggcgtcctccagtttgctgtgtgtgacacggccgcggccggccagttggtcaaggacggtgtcacccaggtggtggtgagcgaagagggtgccgtccacatggtcgccggggagggtgcccagatcatcatgcaggaggcgcagggcgagcacatggatctggtggagtccgacggggagatctcgcagatcatcgtgacagaggagctggtccaggccatggtgcaggagtccagtggcggcttctccgagggcaccacgcactacatcctgacagagctgccccaggggtgcagggcgagccgggcctgtactcccacaccgtgctggagactgcggactcgcaggaactcctgcaggccggggccacgctaggcacaaaggccggggccccaagcagggcaaaacagctggccagcgtnggtcatctacacccagganggcttcttgggccgcggcggcaattcagagcccaagagaaagcancggaacttcaggaagccttgaaaccgccgggaaccttttacttcagcacaagggcaaggttttgggaaaggttccaacntttngt

SEQ ID NO: 5321 - DNA, 857 bp, Homo sapiens
  misc_feature (715)..(715): "n" may be a, t, c, g, other or unknown
  misc_feature (778)..(778): "n" may be a, t, c, g, other or unknown
  misc_feature (794)..(794): "n" may be a, t, c, g, other or unknown
  misc_feature (827)..(827): "n" may be a, t, c, g, other or unknown
ggaatattttgatctgaagagacatgagctgtgtggagattacattaaagacatcctttgccaggagtgctcgccctacgcagcccacctctacgacgccgaaaacacccagacgcctctccggaatctcccgggcctctgctctgattactgctctgccttccattctaactgtcactcagccatttccctgctgaccaatgaccgcggcctccaggagtctcatggaagggacggtacccgcttctgccacctcctggaccttcctgacaaggactattgcttccctaatgtcctgaggaacgactatctcaaccgccacctgggcatggtggcccaagatcctcagggctgcctgcagctctgcctgagcgaggtggccaacgggctgaggaaccccgtctccatggtccatgctggggacggcacccatcgcttctttgttgccgagcaggtaggagtggtgtgggtctacctccctgatgggagtcgcctggagcaacccttcctggacctcaagaacatcgtgttgaccaccccatggatcggggatgagagaggcttcttggggttggcttttcaccccaaattccgccacaatcgcaagttctatatttattattcgtgcctggacaagaagaaggtagaaaagatccgaattagtgagatgaaggtttctcgggctgatcctaacaaagctgacctgaaatcaganagggcatctttggagattgaagaaccagcctcaaaccataatggcggacaacttctttttggnctggatggctatatgnacatattcactggggacgggggacaggctgganatcctttggcctgttggaaatgctaaaaca

SEQ ID NO: 5322 - DNA, 781 bp, Homo sapiens
  misc_feature (735)..(735): "n" may be a, t, c, g, other or unknown
  misc_feature (738)..(738): "n" may be a, t, c, g, other or unknown
  misc_feature (778)..(778): "n" may be a, t, c, g, other or unknown
acagtttcacccagcaagcgtgagaacaggtactgcttcctgagcaccgccagccaccggcaccaagaccggccacatcccagcactgcccacctctgctcccagccgccagatgacggaggctctcgccagaccctcagcacgcagagctggcttctgatagaagtgctcgggaaagaaagcaaagcgggaggtgcctctttagaaaccacgaagtgcacgcggcgtcgacagtgatcacgccacctggacagccagagtccaaggcataaggaggaaaatgagtctcctcaaagagcggaagccaaaaaagccacattacatccccaggcctccaggaaagcccttcaagtataaatgtttccaatgtccctttacttgcaatgagaagtcacatctttttaatcacatgaagtatggtctttgtaaaaactcgattactttagtatcagagcaggatcgagttcccaagtgccctaaatctaactcactagaccccaagcaaaccaaccagcccgatgccacggcgaagccagcctcttccaagtctgtcgcaaatggactctctgccttcgactcgaagcttcagcacagctctgccagggaagacatcaaggaaaacctggagctgcaagcccggggaacccacaggtgcctgggacagaagccagcccttcacagggcataccctgcaagagcccagcttccggaagccggcctcggtgcccaacctgnttntggaaggcgcaagttcgggccttctgcatttggttccaanttc

SEQ ID NO: 5323 - DNA, 854 bp, Homo sapiens
  misc_feature (655)..(655): "n" may be a, t, c, g, other or unknown
  misc_feature (721)..(721): "n" may be a, t, c, g, other or unknown
  misc_feature (827)..(827): "n" may be a, t, c, g, other or unknown
  misc_feature (836)..(836): "n" may be a, t, c, g, other or unknown
  misc_feature (851)..(851): "n" may be a, t, c, g, other or unknown
agttggtccgagctgccgaaaggtctggtcgcagagacaggaacgtgtaatcctcagcgtgctccagcccacagcttcgctctactgctcggcagggcagctggcctctgggcaccggcggcccctctgcctcgcggaaaagcctgatgaagtcctccgatattgatcaggatttattcacagacagttactgcaaggtgtgcagtgcacagctgatctccgaatcgcagcgtgtggcccactacgagagtcgaaaacatgcaagcaaagtccgactgtattacatgcttcaccccagggatggagggtgtcctgccaagaggctccggtcagaaaatggaagtgatgccgacatggtggataagaacaagtgctgcacactctgcaacatgtcattcacttcagcggtggtggccgattcccattatcaaggcaaaatccacgccaagaggttaaaactcttgctaggagagaagaccccattaaagaccacagcaacacccctgagcccacttaagcccccacggatggacactgctccggtggtcgcatctccctatcaaagaagagattcagacagatactgtgggctctgtgcagcctggtttaataaccctctgatggcccagcaacattatgatggcaagaaacacanaaagaatgcggcaagagttgctttgttagaacaactggggacaaccctggatatgggggaactganaggtctgaagcgcaattacagatgtaccatctgcagtgtcttcctaaactcaatagacagtatcatgcccatcttgaaaggatctaaacaccagaccaacctgaanaataagtantgaaaccttaatcangac

SEQ ID NO: 5324 - DNA, 771 bp, Homo sapiens
  misc_feature (625)..(625): "n" may be a, t, c, g, other or unknown
  misc_feature (711)..(711): "n" may be a, t, c, g, other or unknown
  misc_feature (727)..(727): "n" may be a, t, c, g, other or unknown
  misc_feature (762)..(762): "n" may be a, t, c, g, other or unknown
taatgcattatttgttgactgacttgctcatacagtttgcatgactttgcagttctttggaaaagaggtattgctggaaagggagttttatctggaagtgtttcataaagcctactcttatctccattgtgccccaggcaaacttagccactgtgtcctctgtgctcactctctctctcttacacacttcattgccctccttctttcagtcttttttcctcagtatatctccagtgttgaacacagggcctggtagaccgtagacacttggtacatctttgtaaaagaataaatgatgaatgaatgatattgaggtctaaaagctcaggatgagaaagagaggcaaattcagttgcaagtctggcaagtggctcagttggaactcctcagcaggcctggcttgctagaggcctgtgttgagtttgtctgggacaggcctcctgtgaagactcacatctatgatccagcagtaacagctttcactgtcaggcacaaacttcttggctgactgaaagagcaacgtgttagtctctagaagtggagtggactggtgtctgaggtgagtatagcccacttggatacagatgcccagtatttggttacctgccctggggagaggactggnttctccctggtgtatagactcataggctggctacagacatatatacacacacacccaactactgatttgccttgggagtacactgngcttacttaatattgnacaagctggtgaccagattaccttatgagaaggcncatgatgta

SEQ ID NO: 5325 - DNA, 773 bp, Homo sapiens
  misc_feature (706)..(706): "n" may be a, t, c, g, other or unknown
  misc_feature (764)..(764): "n" may be a, t, c, g, other or unknown
  misc_feature (770)..(770): "n" may be a, t, c, g, other or unknown
aaaaagagtggtaacttgatgaattccagttattctaaggttctttgcctagtaaatgtttatttctctaataaatcagaacttattgcaactaactgctttgtgctttcatataccatccccaccccaagaattttgaaagcttttagcaaatactaatgtatttgcttccccttcataagttaaaaggataaatattgatactttcatattacattatgagggcagctgcagcctgtgtggagcggccactgagaagacgccaactgcagcggggtaggcacagctggggctgcgcgctccacagagccagttggagccaggaacaggcaggagcccagcccttttcagagttggaggggtgggggcctccccctcctgggtgcaactgtgcagccacccagcagtgacctgggtttccctgtgctttcaggggctgggaagtgtccctctccagccctggcccccacaggctcagaagtgcctgcccccactgtctggcctctccctgttcccggtgtccactctgattttagagcaaagttgaggctgagcctaggcactgtcgcgacccagctgcatgcacttacggcagggctgacaggccagccctctgccccctcagcaccccctctggactttgggtgcccgtgagcatgggagggaggctgaaggggcactgaggcagctcgatgtgggcctgcangctctgtggacgacatgatcaatggtggcaggaagcagacaggcttctgggcagaaangggtanggt

SEQ ID NO: 5326 - DNA, 695 bp, Homo sapiens
  misc_feature (574)..(574): "n" may be a, t, c, g, other or unknown
  misc_feature (657)..(657): "n" may be a, t, c, g, other or unknown
  misc_feature (661)..(661): "n" may be a, t, c, g, other or unknown
  misc_feature (679)..(679): "n" may be a, t, c, g, other or unknown
gtatttgtgttagatgttgttagatgtgttgtttttttgtgtgtgttttgtttcgttttctgagacagggtcttgctctgtcacccaggctggagtagtggcgcgatctcggctcactgtaacctccacctcccaggttcgagcaattctcctgcatcagtctcctgagtagctggcgttataggcacctgccaccacgccaggctaatttttgtattcttagcaaagacagggtttcaccatgttggccaggctggtctcgatctcctgactcaggtgatctgcccgccttcgactcacaaagtgctgggattacaggtgtgagccaccacacctggccagcctgtgagagctttaaaccatgagatagacatatggttttgcaaaagtttctacataaatcagaatggttcccagaacagaaaggctcctctgtcactttttttatctggttgcttaaccataagatgccaacccaattaacagtcacacccatatttgcattatatctgtttcatatgttccgtgtaactgcctcctttcaaagtgttggtatatttttcaagtcaactgnaaccaaaagtatagagaaactgaatgcaagccagctttctgcatatgtaacagtgtaagaatccaggttgtatagatgggttnttgnttgacacagatgtttctnccagtaaagagaggat

SEQ ID NO: 5327 - DNA, 745 bp, Homo sapiens
  misc_feature (676)..(676): "n" may be a, t, c, g, other or unknown
  misc_feature (722)..(722): "n" may be a, t, c, g, other or unknown
  misc_feature (738)..(738): "n" may be a, t, c, g, other or unknown
gcgctcctgcaagtgttctttctggtgttccccgatggcgtccggcctcagccctcttcctccccatcaggggcagtgcccacgtctttggagctgcagcgagggacggatggcggaaccctccagtccccttcagaggcgactgcaactcgcccggccgtgcctggactccctacagtggtccctactctcgtgactccctcggcccctgggaataggactgtggacctcttcccagtcttaccgatctgtgtctgtgacttgactcctggagcctgcgatataaattgctgctgcgacagggactgctatcttctccatccgaggacagttttctccttctgccttccaggcagcgtaaggtcttcaagctgggtttgtgtagacaactctgttatcttcaggagtaattccccgtttccttcaagagttttcatggattctaatggaatcaggcagttttgtgtccatgtgaacaactcaaacttaaactatttccagaagcttcaaaaggtcaatgcaaccaacttccaggccctggctgcagagtttggaggcgaatcattcacttcaacattccaaacacaatcaccaccatctttttacagggctggggaccccattcttacttacttccccaagtggtctgtaataagcttgctgagacaacctgcangagttggagctgggggactctgtgctgaaagcaatcctgcagtttnctaaagagtaaaagtncaacttg

SEQ ID NO: 5328 - DNA, 712 bp, Homo sapiens
  misc_feature (542)..(542): "n" may be a, t, c, g, other or unknown
  misc_feature (677)..(677): "n" may be a, t, c, g, other or unknown
  misc_feature (702)..(702): "n" may be a, t, c, g, other or unknown
  misc_feature (708)..(708): "n" may be a, t, c, g, other or unknown
tctttaattatgtcacagtttgttgatgaatacattgcctttgcttcagttaaatcaagtaggatgcagtgactccaagtctgaggggtgcttcccaggaagagccaccccccacagccatttgcagagcattggagtaagttttaccttcatcccttagatgtgaatttgttatcctcactgtgacaatcccttatcacatggcttttagaaggattctcaaaaagctagactctcacattcaactttgcaattgcctggctgggtgttacgtttctttgcctcctattagagaccctatcagcatctaaaactagcgttgtttgaggatgttggagccaacggttctttgccagatagaactttgtgtgtccaaataaatggttcaaaatcatcaagcaaataaataccctggaataagagaagcctcatgaggatttgactccaaattgacttcctctgttctgcagtaagaagttaggaattaaaccaaaccttgcctgaggttcaggtatactcaaaagcaatgaggtgtggctcangtgtgcgctggcaaggtcactgtgaagttcagccagaggctttgcaagcctgggcctgagaagccagacctcttagatccagaagggccaatggagctgggctggcctgctgccactcacaggcagagactctgncagcagaagggactctgctgcaaanctgganggca

SEQ ID NO: 5329 - DNA, 570 bp, Homo sapiens
  misc_feature (414)..(414): "n" may be a, t, c, g, other or unknown
  misc_feature (501)..(501): "n" may be a, t, c, g, other or unknown
  misc_feature (521)..(521): "n" may be a, t, c, g, other or unknown
  misc_feature (550)..(550): "n" may be a, t, c, g, other or unknown
gaattggagtcactgccaaaatgggtttgtatttcaggtaatcagagcccagttgatcgaataccttcagagaataagcacctgtactcctgggtctggcggaggaggggctggggaactggactcctgggtctgagggaggaggggtggggcccgtactcctggatgtaagggaggagggtctgaggcctggactccagggtctgagggaggaggggctgggggcccagacttcgggtctgagggaggaggcagctagagtctggactcttacttaggtctgaaggaggcgggcctggggtctgcacccctgagctctgggggagcaggacctgtcggtccttggtcttctaaggcctgtcagcacttgggtacccggaggccttcacttacctgtgtgccttccctggttgntttcttgtctgagctgatttccaggctgcgaccaaaggtctctggggtgggaggcgcttgcgtttgactttgccgcacatggagganggggccgggagctgactcanctctttccagcgagccctcgtcagggcanggaggggacttggccttctt

SEQ ID NO: 5330 - DNA, 746 bp, Homo sapiens
  misc_feature (726)..(726): "n" may be a, t, c, g, other or unknown
  misc_feature (733)..(733): "n" may be a, t, c, g, other or unknown
  misc_feature (741)..(741): "n" may be a, t, c, g, other or unknown
agggccgtccgctctgctgccgccgctgttgcagccaccgccgttgccgcctccctgccggcaagtgtgtggaagctgagcgttgtcgccgccgctatggggagaaagtcaagcaaagccaaggagaagaagcagaagcggttggaggagcgagcagccatggatgccgtttgtgccaaagtggacgctgccaacaggcttggagaccctctggaggctttcccagtgttcaagaaatatgatagaaacgggttgaatgtctccattgaatgtaagcgagtgtctggactggagccagccaccgtggattgggccttcgacctgaccaaaacgaatatgcaaaccatgtatgagcagagcgagtggggctggaaggaccgagagaaacgggaggaaatgacagatgaccgagcctggtacctcatcgcgtgggaaaacagctccgtccctgttgccttttctcacttccggtttgacgtggagtgtggggatgaagtcctgtactgctatgaagtgcagttggaaagcaaggtgcggcggaaaggcctggggaagttcctcatacagatcctgcagctcatggccaacagcacacagatgaagaaggttatgttaacagtatttaaacacaatcatggtgcctaccagttcttcagagaagcgttgcaatttgaaattgatgactctttccccaacatgtccggttgcttgtggggaagattgctnctatganatcctganccgga

SEQ ID NO: 5331 - DNA, 710 bp, Homo sapiens
  misc_feature (311)..(311): "n" may be a, t, c, g, other or unknown
  misc_feature (544)..(544): "n" may be a, t, c, g, other or unknown
  misc_feature (569)..(569): "n" may be a, t, c, g, other or unknown
  misc_feature (706)..(706): "n" may be a, t, c, g, other or unknown
ttttttttttttgagacagagtctcactcttgcccaggctggagtggagtggcataaacacagctcactacggcctcaaccttctgggctcggatgattctcctgcctcagcctcctgagtagcaggaactgcaggtgtgagtcatcacactcagctaatttttttttttttttttttactttttgtagagatggggttctcactgcattgcccaggctggtcttgaatttctgggctcaggtgatcttcccacctcagcctcctgagtagctgggaccacaggtgcatgctaatttttaaaattttttgnttttaaatgctggtcttcaactcttgtccccaagtagctgggattggggcatgaggcactgtgctaacttcatgttgaaattgaattgccattctaacagtgttaagagatggggcctgtaagaggtgattaggctgtgagggctccactctccaagggcggagttaatgttatgaaagggtaagtccagcccgcttgtgcctctcttgccctccagtgttcaaagcaccatnttggaggtggaattcccaagtcggncagttcctggatcttggactgtccggtctccagaaccgtgagccaataaacctctgttccttgtaaatgagtcagcctcaggtattctcttgtagcagcacaaatggaggcagacacttccttcaccaatctcatgngggg

SEQ ID NO: 5332 - DNA, 644 bp, Homo sapiens
  misc_feature (558)..(558): "n" may be a, t, c, g, other or unknown
  misc_feature (594)..(594): "n" may be a, t, c, g, other or unknown
  misc_feature (617)..(617): "n" may be a, t, c, g, other or unknown
taaaggtacaaaaattagccgggcgtggtggcgggcacctgtaatcccagctactgaagagcctgaggcaggagaatttcttgaacccgggaggcagagcttgcggcggtgagccgagattgcacgccattgccctccagcctgggcaacaagagcgaaagccagtctcaaaaaacaaagaaagaaagaaaagcacctggggtgcgtctggagccgcgttctgggagccgcgcttcactcgctggtggtacagctccaaggctggagcttacttggcatttttgttgccacagaagcagatgggaaaattctaggtctgtaccttgtgtgaaaaaaggctaagtaaaattttgcatttacgtgacttctgtgtggagagcagcgtcggcttttgtttgtctttggttctgtttggagcacaactagggtagagaggggtttggaaggttaggacagcgccctcggacgccagtgagacccagaggcgccaccaggccctgaacctcatgaacctgcgcggccctaggcatgcggtgaaaacgggacgttgccctcgtnctagcaccagagcaggcaggggcaccgctgctgganagcgccaggtggctcctgcggangacggtggcccagatcctacccctgac

SEQ ID NO: 5333 - DNA, 431 bp, Homo sapiens
  misc_feature (410)..(410): "n" may be a, t, c, g, other or unknown
  misc_feature (413)..(413): "n" may be a, t, c, g, other or unknown
  misc_feature (430)..(430): "n" may be a, t, c, g, other or unknown
caagttcgagcagttttcctgcctcagtcttctctgagtaggtgggaccacagtggcacaccaacacaccttgctaatttttcttttaataagagacggtggtctcagccgggcgcaatggctcatgcctgtgatcccagcactttgggaggccgaggcgggtggatcacgaggtcaggagttcgagaccagcctggccaatatggtgaaaccccgcctctactaaaaaaatacaaaagagtagccgggtgtggtggcggtcacctgtggtcctagctactcgggaggccgaggcagaagaatcgctcgaacccaggaggcggaggttgcagtgagccgaggttgtgccactgcactccagcctgggtggcagagcgagactctgtctcaaaaaaaaaaagggcggcggnggngaaggtggtctcactgng

SEQ ID NO: 5334 - DNA, 840 bp, Homo sapiens
  misc_feature (762)..(762): "n" may be a, t, c, g, other or unknown
  misc_feature (782)..(782): "n" may be a, t, c, g, other or unknown
  misc_feature (837)..(837): "n" may be a, t, c, g, other or unknown
attcaaatagaacatggggaagttcgctcccagttcaaattacgggcctgtaattcagtgtttacagcattagatcactgtcatgaagccatagaaataacaagcgatgaccacgtgattcagtatgtcaacccagccttcgaaaggatgatgggctaccacaaaggtgagctcctgggaaaagaactcgctgatctgcccaaaagcgataagaaccgggcagaccttctcgacaccatcaatacatgcatcaagaagggaaaggagtggcagggggtttactatgccagacggaaatccggggacagcatccaacagcacgtgaagatcaccccagtgattggccaaggagggaaaattaggcattttgtctcgctcaagaaactgtgttgtaccactgacaataataagcagattcacaagattcatcgtgattcaggagacaattctcagacagagcctcattcattcagatataagaacaggaggaaagagtccattgacgtgaaatcgatatcatctcgaggcagtgatgcaccaagcctgcagaatcgtcgctatccgtccatggcgaggatccactccatgaccatcgaggctcccatcacaaaggttataaatataatcaatgcagcccaagaaaacagcccagtcacagtagcggaagccttggacagagttctagagattttacggaccacagaactgtactccccttcagctgggtaccaaagatgaagatccccacaccagtgatcttgntggaagcctgatgactgacngcttgagaagactgtcagggaaaccaagtatgggttacttaagaatgtgccccanagc

SEQ ID NO: 5335 - DNA, 794 bp, Homo sapiens
  misc_feature (14)..(14): "n" may be a, t, c, g, other or unknown
  misc_feature (46)..(46): "n" may be a, t, c, g, other or unknown
  misc_feature (635)..(636): "n" may be a, t, c, g, other or unknown
  misc_feature (718)..(718): "n" may be a, t, c, g, other or unknown
  misc_feature (789)..(790): "n" may be a, t, c, g, other or unknown
agcgcagcggcgtncgaggcaacaagatggcagctgcggagccgtntccgcggcgcgtgggcttcgtgggcgcgggccgcatggcgggggccatcgcgcagggcctcatcagagcaggaaaagtggaagctcagcacatactggccagtgcaccaacagacaggaacctatgtcactttcaagctctgggttgccggaccacgcactccaaccaggaggtgctacagagctgcctgctcgtcatctttgccaccaagcctcatgtgctgccagctgtcctggcagaggtggctcctgtggtcaccactgaacacatcttggtgtccgtggctgctggggtgtctctgagcaccctggaggagctgctgcccccaaacacacgggtgctgcgggtcttgcccaacctgccctgtgtggtccaggaaggggccatagtgatggcgcggggccgccacgtggggagcagcgagaccaagctccttgcagcatctgctggaggcctgtgggcggtgtgaggaggtgcctgaagcctacgtcgacatccacactggcctcagtggcagtggcgtggccttcgtgtgtgcattctccgaggccctggctgaaggagccgtcaagatgggcatgcccagcannctggcccaccgcatcgctgcccagaccctgctggggacggccaagatgctgctgcacgagggccaacacccagcccagctgngctcagacgtgtgcacccccgggtgggaccaccatctatggactccacgccctggaacagggccgggctgnnacag

SEQ ID NO: 5336 - DNA, 708 bp, Homo sapiens
  misc_feature (663)..(663): "n" may be a, t, c, g, other or unknown
  misc_feature (667)..(667): "n" may be a, t, c, g, other or unknown
  misc_feature (675)..(675): "n" may be a, t, c, g, other or unknown
tctttccgccagcgcccgcaggacccggatgagagcgcacgcttcggggtctccgggaagtcgcggcgccttcggatgtggcggatgcggccgtgagccggcgggggaggtgctgctgctgcctccactgtactcagacccaggtagcacaggattgtccatcctccagcagcccagtgcaacggtgtgaactcagcctgtttcagagcctccacaccatgacctccaagaagctggcgaactcggtggctggctgtgctgatgacgctcttgctggcctggtggcctgcaaccccaacctgcagctcctgcagggccaccgcgtggccctccgttctgacctggacagcctcaagggccgggtggcactgctgtcgggtgggggctctggccatgagcctgcccatgctggtttcatagggaaggggatgctgactggggccatcgcgggagctgtgttcacctccccggcagtgggcagcatcctggcagccatcagggccgtggcccaggccggcacagtggggacgctccttatcgtgaagaactacactggggatcggctcaacttcggcctggcccgggagcaggcccgggctgaaggcatcccggtggagatggtggtgattggggacgacaagcgccttcactgtcctgaagaangcangcccggcngggggcttgtgccggaaccgtgcttatacacaa

SEQ ID NO: 5337 - DNA, 728 bp, Homo sapiens
  misc_feature (647)..(647): "n" may be a, t, c, g, other or unknown
  misc_feature (693)..(693): "n" may be a, t, c, g, other or unknown
  misc_feature (717)..(717): "n" may be a, t, c, g, other or unknown
agtgctggcagtgacagcagcaccagcgggagtggcggggcgcagcaaagggagctggagcgcatggctgaggtcttggtcaccggggaacagctacggctcaggctgcacgaagaaaaggttattaaagatagacgtcatcatctcaagacctacccaaactgttttgtcgcaaaagaactgattgactggctgattgaacacaaagaggcttctgacagagagacggcaattaaactcatgcagaaattagcagaccggggcattattcaccatgtgtgtgatgagcataaggaattcaaggatgtcaaactcttctaccgctttagaaaggatgacggcaccttcccattggataatgaagtgaaggcctttatgagaggacagaggctatatgaaaagctgatgagccctgaaaacacactcctgcagcccagggaggaggaaggggtcaagtatgagcgcaccttcatggcatctgaattcctggactggctggttcaggaaggtgaggccaccacgaggaaagaggcagagcagctttgccaccggcttatggagcatggcatcatccagcatgtgtccaacaagcacccatttgtggacagcaatcttctctaccagttcagaatgaacttccggcggangcgaagactgatggagctgctcaatgaaaagtcccccttcttccangaaactcatgacagtcccttctgnctgaggaagca

SEQ ID NO: 5338 - DNA, 872 bp, Homo sapiens
  misc_feature (660)..(660): "n" may be a, t, c, g, other or unknown
  misc_feature (739)..(739): "n" may be a, t, c, g, other or unknown
  misc_feature (828)..(828): "n" may be a, t, c, g, other or unknown
  misc_feature (841)..(841): "n" may be a, t, c, g, other or unknown
  misc_feature (862)..(862): "n" may be a, t, c, g, other or unknown
gaagcctgttatgtaaaatacatggaagtggatctgctcggggataaggagcttggagtttcttctgccctccaacccccaacctctgaggtacctcagcgattccatggagcctaatttgaaaaacacaagtatagggtctgtgttcagtacttagcatccaaatgccagcttctaatcctggctcatttcactctgatagagttgaaactttggccaaagcaatttaaaaggcctgagattaataaaaattggataatctttgcccattagaagttggtgattatttcaaggtttgcatcagagataatatttttgaaaatacttggtaaggttgtaaagcaatatgtaagccaacgtaaagtactttggctatgtaaaatgttgtatatttaattataaatctttaaaattaagaaacccagttttgcattgacaggactgtgtgctgaagaggttcatttgtgtggagaacctgctgctattgacctggtgatggagcttatgtacacaacgggggaggaagtggaggtattcgattagatgctttgttctccaggtggcatatcaaatagtccagagtacctaggcagtggcttcagaggccctagataatgccagcgtcagaacttaactaaaaagaaagcttcattttcttgngatcaactagaccatatatatttgattgaacctcatgatctgaagttctgacagagtggtcatcacaccctaagtcttncaagagtacaggaaattcttcacctcttgacaaaaccttgtggggcttgagtagatctcttcgaattaaataaatcagactcttagaanttggagaccccancaggttggccgttttcaaagngtggatggca

SEQ ID NO: 5339 - DNA, 837 bp, Homo sapiens
  misc_feature (724)..(724): "n" may be a, t, c, g, other or unknown
  misc_feature (743)..(743): "n" may be a, t, c, g, other or unknown
  misc_feature (777)..(777): "n" may be a, t, c, g, other or unknown
  misc_feature (836)..(836): "n" may be a, t, c, g, other or unknown
tagactattagacattccagttttaagcattttctaattctctcaattgctttttcttcaaaacagcatagtttgcaagctcaggcatgtttattgtttttaacaaaggcttatcgaaatgaacttggcagtttttcagtcgtatacagccaaagaaaagtattcagtgccgcttttggggttgtttatgcattcctcacctaaccagttgctttgcttttaaaaattgccaatttggaagctattttcttatgagtacctttccagtgtatataaaaagtcacccattgaaatgatataataatttaattgatgaaaactaaatacacagttgaagaggttgggggattttgaacagaaagattttccctctgataatatttttaatgtgctctacatcaaaggacatcagaaagtgtcattatctaacaatgtcctgtttgaaggtggtgtctgttgaacatttggggaacagtcacaatttctgatgcatgctaggcacctggagtagctgatttttttttttcttcattcacccaccactgtgccccatcagatacatatccttccttcatttaccgcgcattgacgagtagggttaattgctgtagccaggtaagatgttgcatgaaattaattaattatttaattagtgtgctcattcatttattaatttaatgaatatttattgaacttctacttcttattaaaagatttggataanggatttgtgtgaaaactgngttttgagcatctcttttctggtgctggtgacancaggacgtgtaaagacccagaacatgcctctgatgcacttacatctggtatggaaaaang

SEQ ID NO: 5340 - DNA, 761 bp, Homo sapiens
  misc_feature (728)..(728): "n" may be a, t, c, g, other or unknown
  misc_feature (735)..(735): "n" may be a, t, c, g, other or unknown
  misc_feature (750)..(750): "n" may be a, t, c, g, other or unknown
tccatttataaggagcctcctccaggaatgttcgttgtacctgatactgttgacatgactaagattcatgcattgatcacaggcccatttgacactccttatgaagggggtttcttcctgttcgtgtttcggtgtccgcccgactatcccatccacccacctcgggtcaaactgatgacaacgggcaataacacagtgaggtttaaccccaacttctaccgcaatgggaaagtctgcttgagtattctaggtacatggactggacctgcctggagcccagcccagagcatctcctcagtgctcatctctatccagtccctgatgactgagaacccctatcacaatgagcccggctttgaacaggagagacatccaggagacagcaaaaactataatgaatgtatccggcacgagaccatcagagttgcagtctgtgacatgatggaaggaaagtgtccctgtcctgaacccctacgaggggtgatggagaagtcctttctggagtattacgacttctatgaggtggcctgcaaagatcgcctgcaccttcaaggccaaactatgcaggacccttttggagagaagcggggccactttgactaccagtccctcttgatgcgcctgggactgatacgtcagaaagtgctggagaggcttcataatgagaatgcagaaatggactctgatagcaagttcatctgggacagagaccggaccttcatgggganccctganggttaaaacccttgnttccatttccc

SEQ ID NO: 5341 - DNA, 758 bp, Homo sapiens
  misc_feature (622)..(622): "n" may be a, t, c, g, other or unknown
  misc_feature (666)..(666): "n" may be a, t, c, g, other or unknown
  misc_feature (718)..(718): "n" may be a, t, c, g, other or unknown
  misc_feature (757)..(757): "n" may be a, t, c, g, other or unknown
aatggaatgtgtctcctgctgggggccacgggcgtcgggaagacgctgctggtgaaacggctgcaggaggtgagctcccgggatgggaaaggcgacctgggggagccgcccccgacacggcccacggtgggcaccaatcttactgacatcgtggcacagagaaagatcaccatccgggagcttggggggtgcatgggccccatctggtccagttactatggaaactgccgttctctcctggtgggttgtaatcctatatgggcttcctttagggaagtgtgtctacatttctgtgacgtccagtccccaaccttgctgtgtgtagaaaggggtttgggttatttagtgactatactactcatggaaataggtcttagctagtgttgcttcctgctgggcaccctgtctggtttctggtgcttgcgctcccaggcccccggtaggagctcacagagggcttgctgagggcagggctgctgctccgcagagaacagacttggccctctgtgtcactccccggtacgtctgtgtttatgttggacttatacgtacctctggttggtctcatcttgataaggcctgtgccgcggataccagtatggagaactgatggccacatgangacagagaccagtgacaccaggtcgtcttcataaaactcgattncctctgcttctgcttggtcccaaactttggttaaagctactttggccgggcncaatggcttactcctgtaatcccagcactttggaaactna

SEQ ID NO: 5342 - DNA, 886 bp, Homo sapiens
  misc_feature (686)..(686): "n" may be a, t, c, g, other or unknown
  misc_feature (748)..(748): "n" may be a, t, c, g, other or unknown
  misc_feature (768)..(768): "n" may be a, t, c, g, other or unknown
  misc_feature (815)..(815): "n" may be a, t, c, g, other or unknown
  misc_feature (883)..(883): "n" may be a, t, c, g, other or unknown
  misc_feature (886)..(886): "n" may be a, t, c, g, other or unknown
gaaattagggctcagggaagtctggtggggaaagcacagagctgtttaaatagaattgtagtgtccagagtaagggaagtgaaagcctcacttctctcccatgtgcttggagtaggatgtagactcttcaggtctggccaccctactatacggggagacattgacacagcagttccaaagagagcagccagggaggtaaaaaggccaatccccacttttttttttttttttttagagaagaccaagacaaagaaaaaggataattgatttggaaaagacttgaagagggatcggtgtctttacctaattaaaagatttgctcaggaaagagaaattagaccaactctgtcgttttggaagtagaatctagggccagcgggtgggagatgagaacacatggagctgggaataaaacgggcagcttcctcaatggtgagcaaagccaagggaagcagggctggggaagtgctgctgaggaaacctcaaggattggaccggatggcctccgagtcccttcccactctcagagtctgtgatcctaatcaggggactcaacagaaacttaagggaaaccccctgacttctcgactcgatgtatctattggagctggatttttacaccccgtgttagcagtaacagattggcaaagcaatagaaaacaaatgcaccaattcatgtttttcanaaacttaacaaaagttagcccctgaagtcatttctgggttatgtgtgtggaggaacacttgncggaggacccttgccagctntgccactcttttttttctttttttggatctcactctggcattcaggnctggaatgcatggcacaatcacgggttacgggcttaaactttccaaagtgctggaattccggtgtganccn

SEQ ID NO: 5343 - DNA, 801 bp, Homo sapiens
  misc_feature (604)..(604): "n" may be a, t, c, g, other or unknown
  misc_feature (659)..(659): "n" may be a, t, c, g, other or unknown
  misc_feature (696)..(696): "n" may be a, t, c, g, other or unknown
  misc_feature (704)..(704): "n" may be a, t, c, g, other or unknown
  misc_feature (786)..(786): "n" may be a, t, c, g, other or unknown
  misc_feature (800)..(800): "n" may be a, t, c, g, other or unknown
tccctaaaaacagttgttttttttctgaagtgaaatacaggtggagactaacacatcccctctgcttgtcataagctcattatctggacctcaggtccttttgagagagcccaccaaggccttgggctctgagcccaggtgaccagcagacatctcaggtgtgtcagggcctgagagcactggacatggacatggtggaaggactgtccagccagtgtcctggaaatatttgaacacagtggggagacctagcagggttttcccttgaagtagttgactgaaaatctgcattccttttggacacaggtggaagataatgaagtaaaattgtctgagaaaacccagcaagcagtgaggggggatgagtctttcctgggcacttatctaacaggaggagaaggagcatatctttattccagcaatctacagtcctggcctgaggaagggaatgttcatttcttctctagtggccttctgttttctcactgtcgtcatggaagtatcatcatatccaaggatcacatgaattccatttccttctatgatggggattccaccagtactgttgctgctcttctcatagacttcaaaagctcattgcttnctcacctccagttcatttccatggatcaagcaattttctgatgattgcccttttncccaaatcgaagatataccaagcattttacttcagangtcttctncctctggaaacagcaggatacttagggatctctttaaaagtgatccaggaagatggattatctgtggacaaaagaaaattgnaagtggcttgcttna

SEQ ID NO: 5344 - DNA, 724 bp, Homo sapiens
  misc_feature (711)..(711): "n" may be a, t, c, g, other or unknown
  misc_feature (714)..(714): "n" may be a, t, c, g, other or unknown
  misc_feature (716)..(716): "n" may be a, t, c, g, other or unknown
acacacacacacacacacacacgtgggaatgtaaggcttattttcttggcacatggatattcaattgcttctttaccatttattgaaaagactgtccattctgcattgaattgcctttgtacctttgtcaaaaatcatttgtctctagaaaaatcaggtttccaggaaaaaaaagactaatgtgttccactagtgttcttatttttcagttgtgttggcttttgtagattctttgcatttccatataaattttagaattagcgtatcaatttcttaaggcttggtgggatttccattgggattgtattgagtctatataaataaataaaactgagagagaattaacattttattttatttttttgagatggagtctcactctgttgcctaggctgtcgtgcggtggtgcggtctcggctcactgcaacctctgcctccgagattcaagcaattctcctgcctcagtctcccaagtagctgggattacaaatgcctgccactacactcagcttaatttttttatttttaatacagacagggtttcaccaggttggccaggctgttctcgagctcttgacttcaagtgatcagccctcctcagcctcccaaagtgctgagattacgggtgtgagcccccgcgcctgactgagaattaacattttaatattgagtgttttgattaaagtcttctctaatttccttcataaatgnttngnagcttttg

SEQ ID NO: 5345 - DNA, 835 bp, Homo sapiens
  misc_feature (808)..(808): "n" may be a, t, c, g, other or unknown
  misc_feature (831)..(831): "n" may be a, t, c, g, other or unknown
  misc_feature (833)..(833): "n" may be a, t, c, g, other or unknown
actgcgccatttcctgtccaaagctgggcgaatcagggattccggttcacaatggatgctgataaagagaaagatttgcagaaatttcttaaaaatgtggatgaaatctccaatttaattcaggagatgaattctgatgacccagttgtgcaacagaaagctgtcctggagacagaaaagagactactgcttatggaggaagaccaggaggaggatgaatgcaggaccaccttgaacaagactatgatcagtcctccacaaactgctctgaagagtgcagaagaaataaactcagaggccttcttggcatctgtggagaaggatgcaaaggaacgagccaagagaagaagggaaaacaaagtcttggcggatgccctaaaagaaaaagggaatgaagcatttgctgaaggcaattatgaaacagctatcctgcgctacagtgagggtttggagaagctgaaggacatgaaagtgctgtacaccaaccgagcccaggcttatatgaaacttgaggactatgagaaggcactggtggattgtgagtgggctctcaagtgtgatgaaaaatgcacaaaagcatattttcacatgggaaaagccaacctggccctgaagaactacagtgtgtctagagagtgttataagaagatcttagaaataaaccccaagctgcaaacccaggtgaaaggttacctgaatcaagtagatcttcaggaaaaagcagaccttcagaaaaggaacccacgactgtggttcaggaagacacagcggaccccagactctgaccttcagctgcagtccttgtttntggggatgactctgatgtatatncnac

SEQ ID NO: 5346 - DNA, 813 bp, Homo sapiens
  misc_feature (667)..(667): "n" may be a, t, c, g, other or unknown
  misc_feature (697)..(697): "n" may be a, t, c, g, other or unknown
  misc_feature (766)..(766): "n" may be a, t, c, g, other or unknown
  misc_feature (773)..(773): "n" may be a, t, c, g, other or unknown
  misc_feature (809)..(809): "n" may be a, t, c, g, other or unknown
gtttgcacattgatgaacacatttaaaattttcttaaatcagttatgctccgaaaaatcctgttcctacaacttaaagcacatgtgtgattttttttccttaggttatccttccagaaatagaactgttgagtaaggaatatgcatgttaaaatttctagtattggtccggcgaggtggcttacgcctgtaatcctagcactttgggaggccgaggcgggcggatcacctgaggtcagaagtttgagaccagcctggccaacatggtgaaacccagtatctactaaaagcacaaaaattagctgggcgtggtggctggtacctgtaatccctgctactcaggaggccaaggcaagagaatctcttgaacccggcaggtggaggttgcagtgagccgagattgcgccattgcactgcaacctgggggactaggttgagactgtctcaaaaaaaaaaagaattaaaaaaatattaataacatggtcaagtctccctccaaaaaaggccaacgtaggaggattattttttctcacattcttttttacactatcttgagtctttaaatgacagacaatatcttattttttttcatttggattttcttggatactggtaaaggtgttcgtttttatgaacatcttttaaattatcttttaggactttttcgnatcttgctctttggtctttttttgatgtanagtctcagtctcactcaggttggaatggcactggtgggatatcataaaaggttcttgggagaaattggnggagttnaaaggaatatgtagggatctgggaccccggattttnaaaa

SEQ ID NO: 5347 - DNA, 717 bp, Homo sapiens
  misc_feature (695)..(695): "n" may be a, t, c, g, other or unknown
  misc_feature (710)..(710): "n" may be a, t, c, g, other or unknown
  misc_feature (713)..(713): "n" may be a, t, c, g, other or unknown
gatgatcatctgttttcctgcaagtggaagatttcatcatgtttgtatttctttgttttacatttcttatgatatagttgataattaagatgcctacagaagctacaaagcacccacaaagcaggaaattagcaactctgcctctaccacttgtagtaaagcttgaagacattatcactgacttctccagctgaatgtattgttctgtggctttagttaaatgtgtcagtgactctcagggtttagaatctctcccaagactgtttaggaaggtgcatcaccctttgaagtgtagactgtgatggaaaactacttaattgcatattctaatattgttttagattaaaagaccattctgtcctctgcttaaaacaattgaggatattatatttgagggcatccctactggttaatatcatcattacatttgaaaatgttcaaatttactttccatcactaagtatgagttgaactttttggagtagaaaatgcactctaaggccgggcgtagtggctcacacctgtaatcctaccactttgataggccaaggcgggtggatcggttgagatcaggagtttgagaccagcctggccaacatggtgcaaccctgtctctactaaaaataccaaaaattagctgggcgtggtggcacatgcctgtagtcccagctctcgggagctgagggaggagaatnccttgaaccctggangcngagg

SEQ ID NO: 5348 - DNA, 767 bp, Homo sapiens
  misc_feature (728)..(728): "n" may be a, t, c, g, other or unknown
  misc_feature (753)..(753): "n" may be a, t, c, g, other or unknown
  misc_feature (761)..(761): "n" may be a, t, c, g, other or unknown
aaagccgttcgagtgtcctgtggaaggatgttgcgcgaggttctccgctcgtagcagtctgtacattcactctaagaaacacgtgcaggatgtgggtgctccgaaaagccgttgcccagtttctacctgcaacagactcttcacctccaagcacagcatgaaggcgcacatggtcagacagcacagccggcgccaagatctcttacctcagctagaagctccgagttctcttactcccagcagtgaactcagcagcccaggccaaagtgagctcactaacatggatcttgctgcactcttctctgacacacctgccaatgctagtggttctgcaggtgggtcggatgaggctctgaactccggaatcctgactattgacgtcacttctgtgagctcctctctgggagggaacctccctgctaataatagctccctagggccgatggaacccctggtcctggtggcccacagtgatattcccccaagcctggacagccctctggttctcgggacagcagccacggttctgcagcagggcagcttcagtgtggatgacgtgcagactgtgagtgcaggagcattaggctgtctggtggctctgcccatgaagaacttgagtgacgacccactggctttgacctccaatagtaacttagcagcacatataccacaccgacctcttcgagcaccccccgagaaaatgccagtgtccccggaactgctggctncaatcaaggtggaacccggactcgncttcttgnccaaga

SEQ ID NO: 5349 - DNA, 803 bp, Homo sapiens
  misc_feature (614)..(614): "n" may be a, t, c, g, other or unknown
  misc_feature (740)..(740): "n" may be a, t, c, g, other or unknown
  misc_feature (796)..(796): "n" may be a, t, c, g, other or unknown
  misc_feature (802)..(802): "n" may be a, t, c, g, other or unknown
ggactctggctgccttctcctgagagtcggagccacagccagagccctgcccaggccgagccggagctgcagcccgagcgcggtggtgccctcagccccgtcctcttgtcctcctcagcctcgatctgccggaggcgctgggcaatgaccccgggactccaggccagaggggtctgaagctgtttgggaaagcagcgggactccttgggaagatggccatggccccaagcccttccctggtgcaggtgtacaccagccccgcggctgtggccgtgtgggaatggcaggacgggctgggcacctggcacccctacagtgccaccgtctgcagcttcatcgagcagcagtttgtccagcagaagggccaacgttttgggcttgggagcctggcccacagcatccccttgggccaggcagacccctcgctggccccttacattattgacctccccagctggacccagttccgccaggacaccggcaccatgcgggctgtgcggagacacctgttcccccagcactcagcccctggccgaggtgtcgtctgggagtggctgagcgacgatggctcctggactgcctatgaagccagcgtctgtgactatctggagcancaggtggccaggggcaaccaagctcgtggacttggcccccctggggtacaactacactgtcaactacaccacccacacgcagaccaacaagactttcagcttctgccgaacgtgcggcgccaacanggccggcttacccggtgaccaccatcatcggttccgccgggccaaaaacaggcgtngcctgnt

SEQ ID NO: 5350 - DNA, 736 bp, Homo sapiens
  misc_feature (529)..(529): "n" may be a, t, c, g, other or unknown
  misc_feature (564)..(564): "n" may be a, t, c, g, other or unknown
  misc_feature (596)..(596): "n" may be a, t, c, g, other or unknown
  misc_feature (677)..(677): "n" may be a, t, c, g, other or unknown
  misc_feature (720)..(720): "n" may be a, t, c, g, other or unknown
  misc_feature (723)..(723): "n" may be a, t, c, g, other or unknown
gcttttcagattttgaagcgtgtttgtgggctgaatcttgcccttatcacccatttctaggatgctttttgctccactcattctttgtcttgcttcacttgactttgaactgtatacttttttccatcgttttactttcagtatcttcatacatgtatgtttttgtacgcctctcttagaacagtgtatggttttgtaaaaattcagcctgtagcttttacctgcctccttcatgacctttataatccccttggttctcagcctgccactcacaggacttttccctgtgctgcgttcccagtgccccctccccgcccccacctgtgctttttgttggattagtagaattgcttttgtcattccattgttttcatatatttgtttgggacattttacttttttctgttaacgcttaccctagaaattagaaatgacaccacgtattcttagcgaagtccagttttcagcattttgtccttattggacaatagcaaggatattagaacgtgttggttccgcgtgcttccgncttgagttatgtgctgctattggcggatattttgncttagatgtacgtactttcctgtcattggggnatgtgtaatttgcgttactttgaatttttactttctttggctctcatcacttactgcttttgggaccccccccatcggggntcacattcccttttcctagagcacacttccttgggatttcctngantgggggtctggct

SEQ ID NO: 5351 - DNA, 676 bp, Homo sapiens
  misc_feature (501)..(501): "n" may be a, t, c, g, other or unknown
  misc_feature (652)..(652): "n" may be a, t, c, g, other or unknown
  misc_feature (673)..(673): "n" may be a, t, c, g, other or unknown
  misc_feature (675)..(675): "n" may be a, t, c, g, other or unknown
gctttactgggtcccttctctcttcattcacagggggccctccctttagatctctgtctattcagacaggcggccctttctcagatgggatatagacagatgatcttttgaaataagtgagaagatttttaagattagaataatatgaagaatatctttctggccgggcgacgtggcttatgtctgtaatcccagcactttgggaggctgaggtgaggggattgcttgaacccaagagttcaagaccagcctgggcaacatggcgagaccctgtctcgaagaaaatacaaaaattagctgcatgtggtggtgcatgcctgtagtcccaggtactgaggaggctgaggcaggaggatcctttgagcccaggaggtcgaggctgcagtgagccgtgatcacaccagtgcactgcagcctgggcaacagcatgagaccctgtctcagaataaaaaagtgtttctttctcagaagacagagtacagaagatgtttgtttttgttntttctctctctgtgctacaggggaaggtgtggctcattgactttaatccatttggtgaagtcacagattcactgctgttcacctgggaagaactgatatctgagaacaacttaaacggcgattttagtgaagttgacgctcaagagcaggnacaacatttttaagacagatncng

SEQ ID NO: 5352 - DNA, 850 bp, Homo sapiens
  misc_feature (183)..(183): "n" may be a, t, c, g, other or unknown
  misc_feature (570)..(570): "n" may be a, t, c, g, other or unknown
  misc_feature (697)..(697): "n" may be a, t, c, g, other or unknown
  misc_feature (747)..(747): "n" may be a, t, c, g, other or unknown
  misc_feature (815)..(815): "n" may be a, t, c, g, other or unknown
  misc_feature (850)..(850): "n" may be a, t, c, g, other or unknown
atttggggtttcggttcccccccttccccttccccggggtctgggggtgacattgcaccgcgcccctcgtggggtcgcgttgccaccccacgcggactccccagctggcgcgcccctcccatttgcctgtcctggtcaggcccccaccccccttcccacctgaccagccatgggggctgcggngtttttcggctgcactttcgtcgcgttcggcccggccttcgcgcttttcttgatcactgtggctggggacccgcttcgcgttatcatcctggtcgcaggggcatttttctggctggtctccctgctcctggcctctgtggtctggttcatcttggtccatgtgaccgaccggtcagatgcccggctccagtacggcctcctgatttttggtgctgctgtctctgtccttctacaggaggtgttccgctttgcctactacaagctgcttaagaaggcagatgaggggttagcatcgctgagtgaggacggaagatcacccatctccatccgcagatggcctatgtttctggtctctccttcggtatcatcaagtggtgtcttctctgntatcaatattttggctgatgcacttgggccaggtgtggttgggatccatggagactcaccctattacttcctgacttcagcctttctgacagcaagccattatcctgctccataccttttggggaantgggttctttgatgcctgtgaaaagagacggtactggctttgggcctggnggttggaagtacctactgacatcggaatgaattctgaaccctggataagcagctgtgcattatcagcntgttcatggcttggcttataagtgagtctcaaatn

SEQ ID NO: 5353 - DNA, 643 bp, Homo sapiens
  misc_feature (554)..(554): "n" may be a, t, c, g, other or unknown
  misc_feature (566)..(566): "n" may be a, t, c, g, other or unknown
  misc_feature (621)..(621): "n" may be a, t, c, g, other or unknown
aacccatttacaaaatggatcactggccagactcctcactagccgtgtctatgagagagtgcttgcccatccccgaggtagaagaacagcaccctgaggtgccgctgccccagccggcctggtgctgacaggctggaagaagtgagttgccctctgtagagacccccagagcagatgtgagaagacggccctagtgggagtgccatctgacaagggtcggggagctttttatggacaagggatgccactaaaaattagggatcctctgttttatcctggactgctagctccttttaaataataagtcttatcgagttctttttttttgaggcagagtttcactttatcatccatgctggagtgcagtggcgcaatctcggctcactgcaacctctgcctcctggattccagcgattctcctccctcagcctcctgagtagccgggactacaggtgcctgccaccacgcctggctaatttttgtatttttagtagagatggggtttcaccatgttggccagggtagtctcaaactcctgacctcaggtgatccgnccacctaacctnccaaatttctgggattacaggcatgagcctctaggcccagccagagtttcattgngttttaatcaaagactggcttg

SEQ ID NO: 5354 - DNA, 784 bp, Homo sapiens
  misc_feature (649)..(649): "n" may be a, t, c, g, other or unknown
  misc_feature (743)..(743): "n" may be a, t, c, g, other or unknown
  misc_feature (764)..(764): "n" may be a, t, c, g, other or unknown
  misc_feature (779)..(779): "n" may be a, t, c, g, other or unknown
caagatccaattatagctcggatgtccatttgttcagaagacaagaaaagcccttccgaatgcagcttgatagccagcagccctgaagaaaactggcctgcatgccagaaagcctacaacctgaaccgaactcccagcaccgtgactctgaacaacaatagtgctccagccaacagagccaatcaaaatttcgatgagatggagggaattagggagacttctcaagtcattttgaggcctagttccagtcccaacccaaccactattcagaatgagaatctaaaaagcatgacacataagcgaagccaacgttcaagttacacaaggctctccaaagatcctccggagctccatgcagcagcctcttctgagagcacaggctttggagaagaaagagaaagcattctttgagaaaaacaagcaaaggagaagagtgttactgtacccttatgacagaattgtcctggattttgactccatccacgcccatcacctttctacattttgctgacagataactaaccgatgatgaggccgaggtaaaagagacatctgcagtgtgacagaagggagcatgagaagcatggctcaccagccagcctctgtggtctttgtaattagaagcttcagaactcactaatactactgnacctttcattggcgcattaccccataaaactttttgagacgaggtgagatctgagtataaagataggtcagaagtattttaaagggcttaatgngcccaaaaggaaaaaaagctngagaccccttttggnaaacc

SEQ ID NO: 5355 - DNA, 607 bp, Homo sapiens
  misc_feature (605)..(607): "n" may be a, t, c, g, other or unknown
cttgcggctgcgttttcaatctgcttccttgtgagtcaggtgggtcctgggcccaggaaccggcccggagccgtggacgccctacagctgagaaggggacccaaggggtcggccgcggccaaggcccctaggaccgccgccccagctcacgctgccgacggcagctatagacattctgcgtcaggtccgggctcctggacttcgcctttcccgagccctggaggtggggagaaaaggtgagcagttcgtgcctgcagcgcagagccccaaacccgcggttttagaaatcgaaaaagccctgccgggcgcggtggctcacgcctttaccgtaatcccagcactttgggaggccggggggcggggtggggcgggggaggatcacgagttcgggagttcgagaccagcctggctaacatagttgaaaccccgtctccactaaaaatacaaaaattagccaggtgtggtggcgcgcgcctgtagtcccagctactctggaggctaaggaaggagaatcgcttgaatccgggaggcggaagttgcagtgagccgagatcgcaccactgtacacctgggtgacagagtgagactctgtctcaaaaaaaaannn

SEQ ID NO: 5356 - DNA, 753 bp, Homo sapiens
  misc_feature (664)..(664): "n" may be a, t, c, g, other or unknown
  misc_feature (691)..(691): "n" may be a, t, c, g, other or unknown
  misc_feature (733)..(733): "n" may be a, t, c, g, other or unknown
ggaagtggatcgtgcggagcaagcatcacaccatggcgtatgagtgttcctctgtgtagactcaacctgcgcctcgccgtcccccattcgcacacccgatgcccgggggtcgctacggacttaaaatctccgcaccgcaccctccacctcagatatctcttgtaaatgtgtaaacacggatttgccaccaaaggggaagaacaatatgggagaagcgttctacacggtgaagttggagagacttgaaagctgtgacactgcaggcttgtccttccaggaagttcagaaaaatacatacgactttgagtgtcagtggaaagatgatgaaggaaattataaaacagtacttatgttgcaaaaagaaaatctccctggtagaagagctcaacgtgatagaagggctgcaggaaacaggcatattgaaaatcagcttggagtaagctttcagtcacatctccctgaactgcagcaatttcaacgtgaagggaaaatttatgaatacaatcaagttgagaagtctcctaataatcgaggaaaacattataaatgtgatgaatgtggcaaggtcttcagtcaaaactcacggctaacaagtcataagagaattcatactggagagaagccttaccagtgtaataagtgtggcaaagcctttactggtcgntcaaacctaacaatccatcagggcatncatactggagaaaaaccttaccaatgtaatgaatgtggaaanggctttagtcaaactttaaa

SEQ ID NO: 5357 - DNA, 831 bp, Homo sapiens
  misc_feature (805)..(805): "n" may be a, t, c, g, other or unknown
  misc_feature (814)..(814): "n" may be a, t, c, g, other or unknown
  misc_feature (826)..(826): "n" may be a, t, c, g, other or unknown
atggcgggggccgtgccgggcgccatcatggacgaggactactacgggagcgcggccgagtggggcgacgaggctgacggcggccagcaggaggatgattctggagaaggagaggatgatgcggaggttcagcaagaatgcctgcataaattttccacccgggattatatcatggaaccctccatcttcaacactctgaagaggtattttcaggcaggagggtctccagagaatgttatccagctcttatctgaaaactacaccgctgtggcccagactgtgaacctgctggccgagtggctcattcagacaggtgttgagccagtgcaggttcaggaaactgtggaaaatcacttgaagagtttgctgatcaaacattttgacccccgcaaagcagattctatttttactgaagaaggagagaccccagcgtggctggaacagatgattgcacataccacgtggcgggaccttttttataaactggctgaagcccatccagactgtttgatgctgaacttcaccgttaagcttatttctgacgcagggtaccagggggagatcaccagtgtgtccacagcatgccagcagctagaagtgttctcgagagtgctccggacctctctagctacaattttagatggaggagaagaaaaccttgaaaaaaatctccctgagtttgccaagatggtgtgccacggggagcacacgtacctgtttgccagccatgatgtccgtgctggccaggaagagcagggggcttcgttgtgcccagatcgccagaatcacgctttgccagaaaagncatgacgcngcaatacactanctggc

SEQ ID NO: 5358 - DNA, 745 bp, Homo sapiens
  misc_feature (695)..(695): "n" may be a, t, c, g, other or unknown
  misc_feature (705)..(705): "n" may be a, t, c, g, other or unknown
  misc_feature (741)..(741): "n" may be a, t, c, g, other or unknown
ctgaaaatgaagccacctcaggcagtgggcttcgattggctacaattgtgcccttcttactttagcactttggcaaacattgagaaaattattattatggaaattttctttctgttttgagacaggatctcactctgttgaccaggctggagtgcagtggtgttgtcatagcccactgcaacctcgatctcctatgcttaagcaatcctcccacctcagcttcctgagtagctagggccacaagcacatgccataactccgtggatgccgaaagtagataacgagacctactggatcagaatgaggcagattagtacacatcgcacagcaaatagcaggaatatcagcatgaaagtgctggtgcccctgacctcaagtctcgtggggtgacatgatgggcccagatgatgtctatgcatgaattgggtttgcctacagctgaggaaccaaggaccaccaaggacttagcactttcctttctttttttctttcttttttgtttttttgagatggagtttcgagtttcactcttgttgcccaggctggaatacaatggtgcaatctcggcccactgcaacctcctccgcctcctgggttcaagcaattctcttgcctcagcctagcgagtagctgggattacaggcatgcaccaccatgcccggctaatttttatttttagtagagacggggttctncatgttgcangctggctcgaactctgacctcggtgatctgctgctnggct

SEQ ID NO: 5359 - DNA, 767 bp, Homo sapiens
  misc_feature (528)..(528): "n" may be a, t, c, g, other or unknown
  misc_feature (545)..(545): "n" may be a, t, c, g, other or unknown
  misc_feature (562)..(562): "n" may be a, t, c, g, other or unknown
  misc_feature (659)..(659): "n" may be a, t, c, g, other or unknown
  misc_feature (744)..(745): "n" may be a, t, c, g, other or unknown
  misc_feature (764)..(764): "n" may be a, t, c, g, other or unknown
aaatgtgccctgctctctcccctcttaaaaatagcagcaacccatctttgcaaagaagcttgcctatagagctggcactctgtgaatggactgtgcttttacgaccctacagggtatcaagatactgtgcagctcgccaacaaggattaattgcaaggactggtagatcgaatttactgaagacttggagctcgcttctgagaacaaacgcaaaaggacagtaaactgtggaccttgaagttagcagggtttcactcttgttgcccaagctggagtgcaatggtaaaatctcggctcaccacagcctccgcctcccgggttcaagcagttctcctgcctcagcctcctgagtagctgggattacaggcatgtgccaccacgcccagctaattttgtatttttaggagagatggtgtttctccatgttggtcacgctggtctcaaactcccgacctcaggtgattcactcaccttggtctcccaaagcgctgggattacaggcatgagccaccgctatgccgtctttgntttaagatctttgcctncctttctgcccaaatgngtagattcaatctgctccaccccctttcctttcttctctggtgatttgtaaaatgcccatccatgagtcatggcccctgcactctgggaattttcangcttcttttaaatagattctaccctactagatatatccacattttactatcactttacaccattatttaaaatcttggataacannacctggacttacacacacncac

SEQ ID NO: 5360 - DNA, 705 bp, Homo sapiens
  misc_feature (607)..(607): "n" may be a, t, c, g, other or unknown
  misc_feature (694)..(694): "n" may be a, t, c, g, other or unknown
  misc_feature (704)..(704): "n" may be a, t, c, g, other or unknown
caaaagctcggcatggctgacgacgcgggtttggagaccccgctgtgttccgagcagttcggctccggggaggcacggggctgccgcgccgccgcggacgggagcctgcagtgggaggtcgggggctggcgctggtgggggctctccagggccttcacggtcaaacctgaaggacgagatgcgggcgaagtgggggcttccggggccccctcaccgcccctctccgggctccaggccgtgttcctgcctcagggcttccctgatagcgtcagcccggactacttgccctaccagctgtgggattccgtgcaggcgtttgcttccagcctctccggctccctagccacccaggcagtcttgctgggcataggggtggggaacgcaaaagccactgtttcagctgccacggccacctggctcgtgaaagattcaactggcatgctgggccgcatcgtctttgcctggtggaaagggagcaaactggactgcaatgccaagcagtggaggctttttgcggacatcctcaatgacgtagccatgttccttgagattatggctcctgtatacccaatctgtttcaccatgaccgtcttcaccagcaacctanccaagtgcatcgtgagtgttgctggtggggccactcgggctgccctgaccgtgcaccaagctcggaggaacaacatgctgacgtgtnacccaaggana

SEQ ID NO: 5361 - DNA, 762 bp, Homo sapiens
  misc_feature (650)..(650): "n" may be a, t, c, g, other or unknown
  misc_feature (694)..(694): "n" may be a, t, c, g, other or unknown
  misc_feature (710)..(710): "n" may be a, t, c, g, other or unknown
  misc_feature (760)..(760): "n" may be a, t, c, g, other or unknown
agcagctcccaggatgaactggttgcagtggctgctgctgctgcgggggcgctgagaggacacgagctctatgcctttccggctgctcatcccgctcggcctcctgtgcgcgctgctgcctcagcaccatggtgcgccaggtcccgacggctccgcgccagatcccgcccactacagggagcgagtcaaggccatgttctaccacgcctacgacagctacctggagaatgcctttcccttcgatgagctgcgacctctcacctgtgacgggcacgacacctggggcagtttttctctgactctaattgatgcactggacaccttgctgattttggggaatgtctcagaattccaaagagtggttgaagtgctccaggacagcgtggactttgatattgatgtgaacgcctctgtgtttgaaacaaacattcgagtggtaggaggactcctgtctgctcatctgctctccaagaaggctggggtggaagtagaggctggatggccctgttccgggcctctcctgagaatggctgaggaggcggcccgaaaactcctcccagcctttcagacccccactggcatgccatatggaacagtgaacttacttcatggcgtgaacccaggagagacccctgtcacctgtacggcanggattgggaccttcattggtgaatttgccaccctgagcaagctnactggtgacccggtgntcgaagatgtggccagaatggctttgatgccccttttgggaaaacccggnca

SEQ ID NO: 5362 - DNA, 802 bp, Homo sapiens
  misc_feature (722)..(722): "n" may be a, t, c, g, other or unknown
  misc_feature (740)..(740): "n" may be a, t, c, g, other or unknown
  misc_feature (742)..(742): "n" may be a, t, c, g, other or unknown
aacatcaagagcaggaaaatggactcattagggaggcaggcagtcattaccactcacactgtacttccagggagacaccgattataagaagagaaactcagcgctggggaagaaggcactgccaggacttaccgtacaacactccttggcttctggaattttatctctgctcacagtctacattacaacattagttcattctgggcactttagcttccttgaatctccagttgatctcacacccatgcctatgatattcttctcctggttaatcaagaattctctatttctgctccgtcatccatgccactacaaataaaaagaagtgttaagaattgcctttgggactctgaaggctgaagaattgatgaattgcaagtttgtgccccatagctgcacagactgcctgaagttacatttagagactgaaatcactgcaccttaaaaacaaaagattgagctgcactgtattcctaatgtttcatcattactaacaggatattcctcatgacattgctgtctgatctttgaccatcagtctgtgacctgccccttctctttacatgcagccgctctctgctccctgccccaatgaacatctgcactaggcccaagccttggagtaatttacctgaagagtgacaccattgattttgaaactactgaagaaacccaagacagctgaaaaccagaaggcatctgaggagaatgagattactcancccgggtggatccagcgncnagcccgggcctttcctgcctgaacttttgaagctggtttggcttcagacccagcccttat

SEQ ID NO: 5363 - DNA, 712 bp, Homo sapiens
  misc_feature (526)..(526): "n" may be a, t, c, g, other or unknown
  misc_feature (554)..(554): "n" may be a, t, c, g, other or unknown
  misc_feature (631)..(631): "n" may be a, t, c, g, other or unknown
  misc_feature (650)..(650): "n" may be a, t, c, g, other or unknown
  misc_feature (672)..(672): "n" may be a, t, c, g, other or unknown
ccctcatccggcacctgcgtgcactctccggcgtcccaagtgagtggaggggggatcccgactccagtccggggccttggccagcggagccgcggtattcggaagcgggaatcccactcagagcccgggcctgtaggggcggggcgtcccgggcacccgggattggggcgtctcccgtcgtgcaccggggcaccggcgactcacccggaaggagaagccgtgatctggctatatggtggggcgcgggcggtgtcgctgtggggagctggtgctgttctcaggagccagcctggatcatttgttggcagtacatattggctgaagtcagttttcatttcaagatgtttccttccaatgggcttttggtgtaggatgtcggagaaccaagaacaggaggaggtgattacagtgcgtgttcaggacccccgagtgcagaatgagggctcctggaactcttatgtggattataagatattcctccataccaacagcaaagcctttactgccaagacttcctgtgtgcggngccgctaccgtgagttcgtgtggctganaaagcagctacagagaaatgctggtttggtgcctgttcctgaacttcctgggaagtcaaccttcttcggcacctcanatgagttcattgagaatcnacgacaaggtctgcagcacttncttgaaaaggtcctgcataatgtggttctcctgtcaaaca

SEQ ID NO: 5364 - DNA, 866 bp, Homo sapiens
  misc_feature (625)..(625): "n" may be a, t, c, g, other or unknown
  misc_feature (678)..(678): "n" may be a, t, c, g, other or unknown
  misc_feature (699)..(699): "n" may be a, t, c, g, other or unknown
  misc_feature (800)..(800): "n" may be a, t, c, g, other or unknown
  misc_feature (808)..(808): "n" may be a, t, c, g, other or unknown
  misc_feature (821)..(821): "n" may be a, t, c, g, other or unknown
aagacagtctcgatctctgtcctgtggtatacagcatccagggaagtgcccagggaccagggcaggcagaggtcttcctgcctttaccccacctgggcccagttcctgcgcaggggcttggccagtcctggtcagctttccctctgatgactgcaggaagagagtcagacgcggaactcccagggtgcagaggcctgcggggtctgaagggcctcctccctctccagtgtggtgactgggctgaggagatgctgggactgagagtgtcatggtggagcctccgtccctgctcatcctctccgcatgttgcttctgctcccgatggctctctctgaaatgcagcacaacctcctaggccaatggaagaaggcccagagctggctccctgcctggaagcacgaggagacccgcacaggcatcctgagaaggcgtggagagcaggctgccttcatggggggagtgccagggcctgggcacccacacccgctgacccaagagggcccgggcacctgcgtgctggcctcttcactgaccttcgctctgtctgctctctttgtgtctctctctgacctccagaggcctcctttctctctgccaggaacagtagcccccctgcaaggccctncttttcctccagcccgcagcctgcggcctctccggtctgctccacagcccggntgccacacactcgcctctctnttcaggccccccgggtttccttccggctctcttggctgcctggtctctcctttttgcaaggttgcggtttaattggcttaatcttcttggggggtttgggngcttcttnccctttgggtttnccattgggaaaacttgggccttgggccccccaaggaaagggcccc

SEQ ID NO: 5365 - DNA, 763 bp, Homo sapiens
  misc_feature (742)..(742): "n" may be a, t, c, g, other or unknown
  misc_feature (744)..(744): "n" may be a, t, c, g, other or unknown
  misc_feature (760)..(760): "n" may be a, t, c, g, other or unknown
tttccccctgccccatcaatatgttctcttgcatatattggcgtgctgccatataaagtaaaaatactggagatattctatattttatatataggtttatgtgttgttggggatgttttcattgtgctcttttggacataataaataattctctattgaggctacattctttttttttttctttttttttaaaagaatggcatctcactctgttgcccaggctggagtatagtggctaagtcatagctcactgcagcttcgaactcctgggctcaggccattctcctgcctcagcctcttgagtatctaggattataggcatgctccaccacacctggttaacttcatttttattttttgtagagatgaggtctcactatggtgcccaggctggtcttgaactcctagaccaagtgatcctcctcctttggcctcccagactgctgggatcactgcaccggccaaggctgcattcttaacccaactagattgtttactgaatcccatatgacagcgatacattgtccttacatatttatttttagacattgcaaagttattaaaaacagttaactatagtttttacacaacgtaggcaacaatgaagagtatagactgtaagattttcatctatgactcataaatctgggaaaaaaaaattattaagactaatgagaaactgaaaaccttaaactaatgaatattatttctgctgctaaaaatatgaaactttctgggctgnanttgaaatttggatgancct

SEQ ID NO: 5366 - DNA, 807 bp, Homo sapiens
  misc_feature (723)..(723): "n" may be a, t, c, g, other or unknown
  misc_feature (744)..(744): "n" may be a, t, c, g, other or unknown
  misc_feature (790)..(790): "n" may be a, t, c, g, other or unknown
aattattgttcactttttcctttgtgtataaaattataaatattaatcatattattactttgtcttctactaaacatactgtttaaaacaattgcaaaagaagtattttacagcgagagggaaatgaatttgaatgtttacagaagaccacctttgaataattgcagtttgcttgtgttgtagagctgtttacgatctgtgctggaacaaatagcagcatatggccaggttgtgtttcgactccaggagttcattgatgaagtcatgggacacagttctgagagcatgctgcctggaagtgggtctgttcctaagaagtcaactgaagctccctttagaacctaccaggctttcatgtgggccctgtacaaatatttcattagtttcaaagaggaacttgcagaaattgagaagtgcatcatcaataatggtattaaatgttcttcatctttactcatactacacgtaactcataatttgaatgccacttagagtttttattatataagatttgaaagttgcctagcagataagtagttctcgtgaatgcttcttttaaaattattttaaatttatatttttaagccattcatatctctaaaaatcaaaaaactacagaagatttagaatgaaaaatctaaattattcttcctgcaccagtaccccagccagtcagttctcctctccagagacagccaggtccttggctcttacgcatccttncagaaagagtttcaacatacntgagcagtgcatatacatatacgcatcctagcagtcattacactgntcttcttcaaaattttt

SEQ ID NO: 5367 - DNA, 786 bp, Homo sapiens
  misc_feature (692)..(692): "n" may be a, t, c, g, other or unknown
  misc_feature (756)..(756): "n" may be a, t, c, g, other or unknown
  misc_feature (758)..(758): "n" may be a, t, c, g, other or unknown
aacatcctatgctcagctccttgcagcaacatgtctttcaaaacttgtcagccgagtcagtcctttacctgttgagcagaggatggacatcagaaactacattctgaattacgtggcatcacagcccaagctggctccctttgtcatccaagctcatattcaagtcattgctaaaatcactaagttggggtggtttgaggttcagaaagaccaatttgtcttcagagaaattattgctgatgtgaagaagtttctccagggtactgtggaacactgcataataggagtaataatcctttctgaattgactcaggaaatgaacctggttgattattctagaccttcagcaaaacacaggaaaatagctacctcatttcgtgatacttctctcaaagacgttttagtgctagcatgctctcttttaaaagaggcgtttgccaaacctttaaatcttcaggatcaatgtcagcaaaatctggtaatgcaggtcttgaaactggtccttaactgccttaactttgacttcattggcagttcagcagatgaatctgcagatgatctttgcacggtgcagattccaacaacttggagaacaattttcctggaaccagaaacattggatcttttcttcaatttggatcattcactttcaccactactatctcagttagcactttcatggttagttcaantttgcttcgacaagaaggccttatttaacagtcctgacgtgccaagtccttggtaatttaattnanggagtaaaaggatccttgaaaaccctta

SEQ ID NO: 5368 - DNA, 767 bp, Homo sapiens
  misc_feature (540)..(540): "n" may be a, t, c, g, other or unknown
  misc_feature (737)..(737): "n" may be a, t, c, g, other or unknown
  misc_feature (742)..(742): "n" may be a, t, c, g, other or unknown
  misc_feature (760)..(760): "n" may be a, t, c, g, other or unknown
tttcatagagatggggtctcactatgttgcccaggctgttctcaaactcctggcctcaggcgatccaccttggcctcctgaagtgctggggttacaggtgtgagccactgcgcctggactgagtgtttgtttctttaaaggatcttatatttttcctgtgctacataccaccacagcagcccagcttctgtggggagagaagttgaaggatcccgaagctttagaaaaaggatctcagctgtggcacaggcagtgttatgcgcctcactgccacattggtgctgttgtattgaaggtggtgcttctggccttggcccttttgagttggtttccatttgggctgcaggtgactcagtgactccctcctcaagctgtcctcctgctaagaccagcagtcacaaacccatggcaagggtgagtgtgaaggcctaaccctgtgcctatgtaataggctccaagcatcgactcccatcctgagaggaccggcccttttgacactcaccaaccaaatctgttcattcgatagagtgaccaggcctncctcacctgcccaggtgtatgatcctacagttcctgccttctctcctaccccgcacagctgccaactggtcctacatcctcagcccctctgccaccaccttaaataggactttactgattccccaactttggttttttggaggatgagatttcctttttatcccacccccccacaccccaaacagacattgctgganggcanactggaaggaaggggaangcatgcc

SEQ ID NO: 5369 - DNA, 860 bp, Homo sapiens
  misc_feature (661)..(661): "n" may be a, t, c, g, other or unknown
  misc_feature (684)..(684): "n" may be a, t, c, g, other or unknown
  misc_feature (803)..(803): "n" may be a, t, c, g, other or unknown
  misc_feature (818)..(818): "n" may be a, t, c, g, other or unknown
  misc_feature (847)..(847): "n" may be a, t, c, g, other or unknown
tgccaccggctggtaagcatcactgtgggccaggcactgtttacctatgggaccacgtgtaacaactcagacctttgctgagtcaagatagactaggctttgggtctaaattttggctctgctactttctaactgcacagtggtcaaaaaggtactgagcatatcaaagtctcagtattcccatttgtaggaaaggggcgcagtgagactcccttcctaacaggattcttgactggatgaatagagacaaggtatgcaaagtgcttaataaggtggcagatacgtgataagcactcagtaaatgtagctctccataaatcatcaatcctctcaacaatcgttggagcttggcattataatccccactgcacagatatggaaactgaggcctaagaggttgtcagttgtccaaagtcacatgattaggaagtggccaaagggatttcctctgatcctcctttctccagcccacggtcccattcagtgagggaaaggggctagagctcccggcttgcagaatattcaggaaacagatctttgctctctgatgctggtaagtttgggggaccctgaaactggctcctgaagagctcatggcaggaagcctgggttcagtgaagccacaggaggctgtccaggaaccagctgccacttgacctgntgcatttctttccttggcttcangagctgagtgaccagcgggttcggagttcgagaactctgatgtcagatgggcatcacggtgcctggcatctggaagcagccggccagcagtcatgagacaactgctaccagtgaggganagcaggcggtggaanccgaggaaaggctcagattccaggggggntgagcccgccagt

SEQ ID NO: 5370 - DNA, 751 bp, Homo sapiens
  misc_feature (703)..(703): "n" may be a, t, c, g, other or unknown
  misc_feature (731)..(731): "n" may be a, t, c, g, other or unknown
  misc_feature (743)..(743): "n" may be a, t, c, g, other or unknown
atttggagtcaggcctggctgttgctcaggtgaccagcttgtgtctctgggagggcgctgctttccccggccacccggcgcgatgatccagaatgtcggaaatcacctgcgacggggcttggcctctgtgttctccaaccgcacatcccggaagtcagccttacgtgcggggaacgacagtgccatggcagacggcgagggataccggaaccccacggaggtgcagatgagccagctggtgctgccctgccacaccaaccaacgtggtgagctgagcgtcgggcagctgctcaagtggattgacaccacggcttgcctgtccgcggagaggcacgctggctgcccctgtgtcacagcttccatggatgacatctattttgagcacaccattagtgttggacaagtggtgaatatcaaggccaaggtgaaccgggccttcaactccagcatggaggtgggcatccaggtggcctcggaggacctgtgctctgagaagcagtggaatgtgtgcaaggccttggccaccttcgtggcccgccgagagatcaccaaggtgaagctgaagcagatcacgccgcggacagaagaggagaagatggagcacagtgtggcggctgaacgccggcgcatgcgccttgtctatgcagacaccatcaaggaccttctggccaactgcgccattcaaggcgatctggaaaagcanagactgtaaccgcatggtgccggcttanaaaaaccctgtngaaaatgt

SEQ ID NO: 5371 - DNA, 680 bp, Homo sapiens
  misc_feature (673)..(673): "n" may be a, t, c, g, other or unknown
  misc_feature (675)..(675): "n" may be a, t, c, g, other or unknown
  misc_feature (680)..(680): "n" may be a, t, c, g, other or unknown
agtattgactgttaatgctttgcttgaagtgttacctgtgatcagaccccgacagtgtttaaggtaaagcgtggcctgtagatcccgggacgctcccagtttggccccaatcattcgttaccctcctggttctcagatccttcgaaatgtgcagatttgcagccctgcatcctgcttgtcactcagcgtggcccaagttttgtttcagaaaataggagccctattaggtcatccccagcttgttaagtctcattattgtgtgttttcccctgggttgttggaatttgacacagttttacctgatgtgatgcttgaaggcgaccctatgactctttttaaaggaagagtttgcaggacggttttggactggggcttgtgggaatggaggaggggaggtgggcacatggccggggaaacagctccaggctgcacgaccagaccagcgttcccaccctcaagagccagtgagaaaccttggggagaaaaagcaaggatgggcaaggcttccctgttcgtctccactcatatcaaaatttccagcctgagctgggtgtggtggctcacatctgtaatcccagcgtcatgggaggctgaggcaagaggatttcttgaagccaggagttggagatcaagtttggccaacatagcaagaccccccatctctaaacagtananaaaan

SEQ ID NO: 5372 - DNA, 762 bp, Homo sapiens
  misc_feature (726)..(726): "n" may be a, t, c, g, other or unknown
  misc_feature (739)..(739): "n" may be a, t, c, g, other or unknown
  misc_feature (758)..(758): "n" may be a, t, c, g, other or unknown
ttaccggctttacttcactgcagaatctgactgcggtcagatctatatgacagattgttgtattcgttttctgcgggtacgtcactatccagtctactttttccattgacgtggctgagtcatatgtagtatgactgtcagagacgttggaacctgaagcgaccccattttgagtgagggctagaaaaatgaggccgggacttacgggcctgcattctcagaaggatattcctagctttcagatgcttacggttaagggaacaaattaatgtttactgaagagacccgagcgtccagatagctggatatctggagaacaaaggcgttcctaattttgctttaaaggtagtaatagggattcttgcaaaatgtaataattaaagttaattctttatcacaaacccttgtagcagagcacctctccccatgtatacaagcattgtacctagggtggatacgttccttctcttagtttcgggaacgcccttctctgtctatggagtagctgttctttcaccactttactttcttgataaacttgcttttattttgcaccgcggactcgccctgagttatttcttgcgcgagacccaagaaccctctctttgggtctggatcggggcccttttcctgtgacgtatttctggccaccacagatgggactatagtgctttggggaagtggtggggcctataacatatttctgggcgaacgacggaaggggcnatctgaagaactncccaacccaaaggaagtanactg

SEQ ID NO: 5373 - DNA, 679 bp, Homo sapiens
  misc_feature (611)..(611): "n" may be a, t, c, g, other or unknown
  misc_feature (619)..(619): "n" may be a, t, c, g, other or unknown
  misc_feature (652)..(652): "n" may be a, t, c, g, other or unknown
gtgctgtttttgttgttggtgaaaggtgaggggaacagctgatccgtctgttgggaggacagatatctcaaggccaggatggaagaatcaccactaagccgggcaccatcccgtggtggagtcaactttctcaatgtagcccggacctacatccccaacaccaaggtggaatgtcactacacccttcccccaggcaccatgcccagtgccagtgactggattggcatcttcaaggtggaggctgcctgtgttcgggattaccacacatttgtgtggtcttccgtgcctgaaagtacaactgatggttcccccattcacaccagtgtccagttccaagccagctacctgcccaaaccaggagctcagctctaccagttccgatatgtgaaccgccagggccaggtgtgtgggcagagcccccctttccagttccgagagccaaggcccatggatgaactggtgaccctggaggaggctgatgggggctctgacatcctgctggttgtccccaaggcaactgtgttacagaaccagctcgatgagagccagcaagaacggaatgacctgatgcagctgaagctacagctggagggacaggtgacagagctgangagccgantgcaggagctcgagagggctctggcaactgcangcaggagcacacggagctgatggaaca

SEQ ID NO: 5374 - DNA, 738 bp, Homo sapiens
  misc_feature (622)..(622): "n" may be a, t, c, g, other or unknown
  misc_feature (694)..(694): "n" may be a, t, c, g, other or unknown
  misc_feature (734)..(734): "n" may be a, t, c, g, other or unknown
  misc_feature (737)..(737): "n" may be a, t, c, g, other or unknown
gtttaggcccaaagtggtgtcggagcagcgcctattagtgtcatcctcaccgtcacggccggcgcctcctcctggattcattcacccgctcttttcattcacgaaggtagtgaggcctagtggaaagccatggagagcgctctccccgccgccggcttcctgtactgggtcggcgcgggcaccgtggcctacctagccctgcgtatttcgtactcgctcttcacggccctccgggtctggggagtggggaatgaggcgggggtcggcccggggctcggagaatgggcagttgtcacaggtagtactgatggaattggaaaatcatatgcagaagagttagcaaagcatggaatgaaggttgtccttatcagcagatcaaaggataaacttgaccaggtttccgtgaaataaaagaaaaattcaaagtggagacaagaaccattgctgttgactttgcatcagaagatatttatgataaaattaaaacaggcttggctggtcttgaaatcggcatcttagtgaacaacgtgggaatgtcgtatgagtatcctgaatactttttggatgttcctgacttggacaatgtgatcaagaaaatgataaatattaatattctttctgnttgtaagatgacacaattggtactgcctggcatggtggaaagatccaaaggggctattctgaacatttcatntgcaatggcatgctcctgtcccactcttgaccatctattntgna

SEQ ID NO: 5375 - DNA, 706 bp, Homo sapiens
  misc_feature (666)..(666): "n" may be a, t, c, g, other or unknown
  misc_feature (672)..(672): "n" may be a, t, c, g, other or unknown
  misc_feature (687)..(687): "n" may be a, t, c, g, other or unknown
tgaattattaatttttgcggctggacgcggtgactcatacctgtaatctcaacactttgggaggccgaggtgggcagatcacctgaggtcaggagtttgagaccagcctggccagcatggtgaaactctgtctctactaaaaatacaataattagctgggtgtggtggcacgcacctgtaatcccagctactggggaggctgaggcaggagaatctcatgaacccaggaggcagaggtggcggtgagctgagattgcaccactacactccagactgggatttaagaaaatgtgtagttaaatattgcctaaaatgctcgaatgtaggttataaacaatgagaatagggcccatgaagagattttcgtttttcacagaggtgagacttaaaaaggccttgaaggataaatagaaatagaagcagagtagaagggttattccaggagaatattagtttggatgagggcacagaggcaggaagatggagcttagcttgagggaatggaggtcactggtgctgtgaatatttgcagacagccatatccagagctgagaggtgaaagaacagactggaatagttcttttctttttcactctcctaccttatttgcttttggtttagcaaggaggatcgaaagtaaaccaagagaaatggtggggggcacanaaggangtgggagggaaactncaggatgagttatggcacc

SEQ ID NO: 5376 - DNA, 506 bp, Homo sapiens
  misc_feature (392)..(392): "n" may be a, t, c, g, other or unknown
  misc_feature (487)..(487): "n" may be a, t, c, g, other or unknown
  misc_feature (496)..(496): "n" may be a, t, c, g, other or unknown
  misc_feature (503)..(503): "n" may be a, t, c, g, other or unknown
agacatacagaaaagtgcacataagtggacagctccatggatttcacaaagggagcacagtcacataatcagcatccaggtcgggaaacagcataaccagcaaagccccctgagcctcctaccagttaccacccagtcccctcccaaggtagccaacatcctcgcatccagatggctttcactctccctggttacaaactgcttttcttaacaagcttttttttttttttttttttgagacagagtcttgctctgtcatccaggctagagtgcagtggcccaatcggctcactgcaacctccgcctccggggttcaagtgattctcctgtcttaggctcccgcctgtaatcccagcactttgggaggccgaggcgggtggatcacttgaggncagagaccagtctggccaacatggtgaaaccctctctgctgggagtacaagaattagccgggcatggtggcacgtgcctgtaatcccagctactnggggctgangcagganagt

SEQ ID NO: 5377 - DNA, 851 bp, Homo sapiens
  misc_feature (698)..(698): "n" may be a, t, c, g, other or unknown
  misc_feature (776)..(776): "n" may be a, t, c, g, other or unknown
  misc_feature (834)..(834): "n" may be a, t, c, g, other or unknown
  misc_feature (847)..(847): "n" may be a, t, c, g, other or unknown
gttggaaggcagacagatctgtgttccctatttgtccctctgggaatatgacataatcttagggggtaggacacaggccaagaatgtcactaactgatttgggacatgagtctctcaccaacaaaatggtaatagaccattcattcattcatcaggaaatagctattaaacacctactatgtgctaagcacgttggtattattgggaatacagtgatgaataaatcatattcttttccctaaagtcactgttactctttccattttacagatgaagaaacttgggctcaaagaagttaagcaactggcccaaggttctactcccataagtggcagagaagggttttgaagccagataccctagttttcaatctctgctttactcttgtgctgtctgcctccccggcatcatgcatttggcaggggacatgatatggacctgttacgtgggcccacagcatccaggtccagcctaagctgggaagatcaaggaaggctccctggaggaggtgacgcctatacgaattctaaagaatttggccaggcagcagggagtgtgtttggctggtgtcataggcagacagcagcatgcccaaagacaagaaggagggagggtttgatgccttcaggaaccaaaataattgaacatgcctgaacccaatttcttaaccagtgagcattgtaagggtagactaaaangggctgccttgtgacttgctgacacaaacccttttccgggaagagtgcctgacaatactatttaatggatttcctggncagacaactttcaccatttccttaggagacaggtggtcaggaagcaggaaagactaanatgatggggactntttg

SEQ ID NO: 5378 - DNA, 682 bp, Homo sapiens
  misc_feature (631)..(631): "n" may be a, t, c, g, other or unknown
  misc_feature (643)..(643): "n" may be a, t, c, g, other or unknown
  misc_feature (652)..(652): "n" may be a, t, c, g, other or unknown
gaccgtggatcggctggagcggggccgccgccggctgcagcaggagctggacgacgccaccatggacctggagcagcagcggcagcttgtgagcaccctggagaagaagcagcgcaagtttgaccagcttctggcagaggagaaggcagctgtacttcgggcagtggaggaacgtgagcgggccgaggcagagggccgggagcgtgaggctcgggccctgtcactgacacgggcactggaggaggagcaggaggcacgtgaggagctggagcggcagaaccgggccctgcgggctgagctggaggcactgctgagcagcaaggatgacgtcggcaagagcgtgcatgagctggaacgagcctgccgggtagcagaacaggcagccaatgatctgcgagcacaggtgacagaactggaggatgagctgacagcggccgaggatgccaagctgcgtctggaggtgactgtgcaggctctcaagactcagcatgagcgtgacctgcagggccgtgatgaggctggtgaagagaggcggaggcagctggccaagcagctgagagatgcagaggtggagcgggatgaggagcggaagcagcgcactctgcccgtggcttgccgcaagaagctgganggagagctggangaactgaangcttaaatggccttttgccggccagggcaa

SEQ ID NO: 5379 - DNA, 791 bp, Homo sapiens
  misc_feature (627)..(627): "n" may be a, t, c, g, other or unknown
  misc_feature (772)..(772): "n" may be a, t, c, g, other or unknown
  misc_feature (781)..(781): "n" may be a, t, c, g, other or unknown
  misc_feature (783)..(783): "n" may be a, t, c, g, other or unknown
agttaaagcagcgttcagagggaaatgtttagctgtaagcatctacctttaaaaataagaaagccagcagtggtggctcatgccaacatcccagtattttgggaggctgaagcgggaggatcccctgaggtcaggagttcaagaccagtctaaccaacatggcaaaagcccatcgctactaaaaatacaaaaattagccaggcatggtgatgcaggcctgtaatcccagctacttgggaggctggggcaggagaatcgcttgaacctgggagagggaggttgcagtgagccgagatagcaccactgcattccagcctgggtgacagagtgagactcttatctcaaaaaaaatcaataaaaataaaaaataaaagtaagaaagatctcaaattagtcacctcactataccctctaaaggatctagaaaaagaagagctaaccccaacctagcagaataccagaaacaaagattagagtggaaataaataaaggaaattaagagaatagataaaattaaaagttttttttacagttcagcaaaattgacaaatttttagctagattgactaagaaacacaagaagactcaaatatccaaaatcagaaatgaaaatgaggccattactgngactttacaacaattaagggtatcgtaagagaatactataaacatatgtacaccagcaaattgaataaccaaatgaaatggcaaatctctagaaacacaaacctacccaggactggatcacaaaggaaattaaaaaatatgggtnaaacccaancnaggtgcaa

SEQ ID NO: 5380 - DNA, 851 bp, Homo sapiens
  misc_feature (757)..(757): "n" may be a, t, c, g, other or unknown
  misc_feature (800)..(800): "n" may be a, t, c, g, other or unknown
  misc_feature (809)..(809): "n" may be a, t, c, g, other or unknown
gagttcgacgttctctggaggcttgggagatgcagccagggcgcagagttggcagtggctgcagacatctcttttcaatgtggacctcctgccacagccacgagattcaaggattttctaggaaaatgaacgccagtggatgtgtggaattttttcacaaagtaagtgacgggggtccctttgcacttctcatgcccccatggttaattgtgtgtgtgtgctggaagtggaggagggcggtgggtggtgcagctgtttgaggactcacccttcttcggaaggctggggtcaatggggtgctgtttccccgagtcagttgaaacgcccatggctaaagcctgtggatcatctcacccctgcatttcctatttggctctcactttggtcgaaagacagcggagcgcagaaaatctgtcataattgtgaaagtaggacctgtcatcctctaagggtcattcttcctggcccaccgggcttgttgacacctggagttgggtagcagagagagggatgtcgggaccgtgaattaacagtggccaccacttcatggtgaatggcatccagacaacaccttcacctgtctggggaagaacataggctaggcctgggagaggctgtctactgaagtccctgcaggggtccaggctggactataccccttcagcttggccagagagccaaggaccacaaggggaagtgatgtacgctgagaacccgtccgggccgcccaacacgggtcaaggcctttggcttacangctgggtttatttctgagcaaccctatgcagtggcattacatnctaccggtnccactagccacttgggactcaaccgataagtactggctactg

SEQ ID NO: 5381 - DNA, 840 bp, Homo sapiens
  misc_feature (721)..(721): "n" may be a, t, c, g, other or unknown
  misc_feature (761)..(761): "n" may be a, t, c, g, other or unknown
  misc_feature (834)..(834): "n" may be a, t, c, g, other or unknown
  misc_feature (839)..(839): "n" may be a, t, c, g, other or unknown
caaaacaatttttttaagagcaaagttggaggatttatagaacctgattccaaaactgtcagtaaaactacaataattacaaagtatcagccaggtgccgtggctcacatctgtaataccagctctctgggaggctgaggcgggtggatcacttgaagtcgggagtttaagaccagcctggccaacttggtgaaaccttgtctctactagaaatacaaaaaattagccaggcatgatggcacacacctgtaatctcagttactcaggaggctgaagcagaatagcttgaacccaagagagtccagctcaaaaacaacaacaagaacaaaagtatcacattggcataagaatagacatgtaaatcaaataacaaaatagagaattcaggtataaatcttcatatttatggctgattgactttgaacaaaggtgacgaggcaagtcagtatagcagcatattcttttcaacaaatggtgctggcagaagaaaaaaaaagtacttggatccttacctcacaccatgcacaaaaattagctcaacgtggactatatcagggtttctcaacatcagcagtgttggcgtttgctggggtggataattctttcctgtggagagctgtcctgtgcactgtagaatgtttagctgcatcctggcctctgcctattagatgccagtggcatccctcccctgacacacacctagttttgacaatctctgctncagatattcccaaatgtgccctggagagcaaaactggttncagttgagaccattgacctaatgtaaaaaaataaaatgtccagaagaaagccttgccaggaaatcattctganctcang

SEQ ID NO: 5382 - DNA, 815 bp, Homo sapiens
  misc_feature (683)..(683): "n" may be a, t, c, g, other or unknown
  misc_feature (782)..(783): "n" may be a, t, c, g, other or unknown
  misc_feature (801)..(801): "n" may be a, t, c, g, other or unknown
atttaaaggagtcgggtctctaactgttgatctgtttttttcccttctgagcaatggagcttaccatctttatcctgagactggccatttacatcctgacatttcccttgtacctgctgaactttctgggcttgtggagctggatatgcaaaaaatggttcccctacctcttggtgaggttcactgtgatatacaacgaacagatggcaagcaagaagcgggagctcttcagtaacctgcaggagtttgcgggcccctccgggaaactctccctgctggaagtgggctgtggcacgggggccaacttcaagttctacccacctgggtgcagggtgacctgtattgaccccaaccccaactttgagaagtttttgatcaagagcattgcagagaaccgacacctgcagtttgagcgctttgtggtagctgccggggagaacatgcaccaggtggctgatggctctgtggatgtggtggtctgcaccctggtgctgtgctctgtgaagaaccaggagcggattctccgcgaggtgtgcagagtgctgagaccgggaggggctttctatttcatggagcatgtggcagctgagtgttcgacttggaattacttctggcaacaagtcctggatcctgcctggcaccttctggttgatgggtgcaacctgaccagagagagctggaangccctggaacggccagcttctctaagctgaactgcagcacattcaggccccactgtcctgggagtggtgcgccctcatatctatggatatctgggaaanntgtgagctgcagttaaancttgaaggcttaaa

SEQ ID NO: 5383 - DNA, 768 bp, Homo sapiens
  misc_feature (735)..(735): "n" may be a, t, c, g, other or unknown
  misc_feature (740)..(740): "n" may be a, t, c, g, other or unknown
  misc_feature (764)..(764): "n" may be a, t, c, g, other or unknown
gatgtgtaaaaaattggagacaatctatttgataggtattttagttttcgattgcagaatatcaaattaccaaaaacttagtgaatcgaaatgacacacatgtattatctcacagtttacctgcatcaggagtccaggctaggttgctgggtgctctgcctagggtctcacaaggcagaaactgaggcgtcatttggggctgaggcttgttggcagaatttgtttttttgcagtggtacgatggaggtttctgggtttttttttctggctattaactgggggctgctttcatccctggaggtcttctactgctccctggcatgggggtcccctctacaacaagcacttgtctttttaaggcaggagaatccctctcccttcaactctccaacgttaagtgcttgcctcattatatcagacctgcccaggaaaatctctcttttcatgaacccaaagtcatctgattagggactttaattgcagctgtaaaatgagtcatgggataatatcccatcatagtcacaagagccactcatgatcaaggagagggattatgcagggtgcatataccaggggtgggaatcttggaggccactcagaattctttctaccaccagggcatgaggcagatcataattatattataatatgagacatcctgacaagcatattttttgagatgaagtctcactctatcgcccaggctggaatgcatgggtgcgacccggttactgnacctncgcctctgggttcagcggtctcgngcct

SEQ ID NO: 5384 - DNA, 811 bp, Homo sapiens
  misc_feature (621)..(621): "n" may be a, t, c, g, other or unknown
  misc_feature (677)..(677): "n" may be a, t, c, g, other or unknown
  misc_feature (775)..(775): "n" may be a, t, c, g, other or unknown
  misc_feature (782)..(782): "n" may be a, t, c, g, other or unknown
  misc_feature (787)..(787): "n" may be a, t, c, g, other or unknown
tttgtcacttccagtgccctgcccagccctacagaaaatacgtgattatttaagggtgaagaagccaaagctgggagagttttagtcacctatctaggggaaagtgtgaagatttcaaagcccagggtccttcacggagccacacggctctccttggcacttaatcttcaagctctcctcagcccacacttgacccttaacaggggagacaaaggcagactccaggtaagttgtcagggttagcataagcagctcagggcaactggtgggtagggagctgtacagcccagggattgcagcctcttgttttgcatttcctggagtcaaggctaaactcatggtctcctcaggggtcaaagcaggcctgactttcagtgtcatcttcaggacacacacacgcacgcgcacacacacacacacacacacacacacacacacacacacacaggattatacatgcaactaaccaatcacacagagctggaccatctagcctggtagaaggtctgccgagttctgcgggtcaccatgaaccaggcttgtgagccctcttagtcatatgtaaagggctgtgtttgagacccggtagcccacaaagctcttttctgcccaagccttggnttttccgtatgttagtggggacagattggaactaaacagaccttgagtcttttcanggtcagtctcaactctcttagatgctagagggatataggcagggctagcacagaacagaagccagaaatagtcaaaatgaatattttggactggatanactcaanaatgngctttacttgggcacccaaggctt

SEQ ID NO: 5385 - DNA, 774 bp, Homo sapiens
  misc_feature (706)..(706): "n" may be a, t, c, g, other or unknown
  misc_feature (734)..(734): "n" may be a, t, c, g, other or unknown
  misc_feature (755)..(755): "n" may be a, t, c, g, other or unknown
ggaaagaggtttaattgactcacaattccacatggctgtaggtcagggcagtggggttcacaatcatggaggaaggcaaggatgagcgaagtcatgtcttacacggtggcaggcaagagagcatgtgcaggggaactgccctctataaaatcatcagatcttgtgacatatattcactaccacgagaacagcttgggaaagatgcacacccgtgattcgattacctccctccaggtccctctcatatcacacgggaattatgggagctacaattcaagatgagatttgggtggggatacagccaaaccatatcattcatcatctgagggaactgtggtctcagacagctgggcactgagagtgcacgctgccccctagaattccacacctacatcacagagagacagaacagtctcaaaggattcttaaggttaatgtggggagccaaaggaggagatgaattcacagcttgtgccttaccttctggtctaactaaaactacttttgtcctggcccaacaagattcccagactcttttctgggttgcaccaggggtaattcagaaagacaaaaagttattaatgcccctccattccccacagctcctgaggtctaagttgttcattccctgggttttaggttggtggtctccctctgcttccacagaatcagtgtgccccattccagtacctatgatttcacctgnattcttggcacttcctactttcttctanacattttatctaacagagccnggtgaacagagaccaggat

SEQ ID NO: 5386 - DNA, 759 bp, Homo sapiens
  misc_feature (707)..(707): "n" may be a, t, c, g, other or unknown
  misc_feature (722)..(722): "n" may be a, t, c, g, other or unknown
  misc_feature (725)..(725): "n" may be a, t, c, g, other or unknown
ctgcagtccccatcacagcccttccttccatcccactccctgcccttgttcaagccccagtgtccagcccagcccaacccattatctcagcctttgccctcatctctgtgtttacccaagtctctccctctagtcccccctatctctcatactctgcccctctcccagcctagactcaagtctgggtttcagctgccgccagccctattgctgctgttgctgttctctgtccttggcccaggggctggtatttccggtccggggcaccccctgtcatcaatcccctgcatacacacttcccaggggacacagctgtgcctggggttttctcactgaccctcagctggacactgcccaaccgcacctcaggcatctttaacgtcagcagccccttacctggggactggttcttggctgcccaccttccccaggcccacggccacatctctgtcaagggtctccaggatgagtgtcagtacctccttcagccgcagctgattgtccggcgtttgctggacgtcgctgtgctggttcctggccggccttcagagcaaaccctctccccacacaatcgctcagccctgtacaaggtctttgtgcccagcttcacttacagggtttcagcacaagctggtgtgtgtggggggccgtggggtatctgcctgccccctgtcactgcgtctgggtcccaaaagccccacccctgnacaacttaaagcttntgnggcctgtggaagtgccttaaggatgccaactgga

SEQ ID NO: 5387 - DNA, 739 bp, Homo sapiens
  misc_feature (695)..(695): "n" may be a, t, c, g, other or unknown
  misc_feature (711)..(712): "n" may be a, t, c, g, other or unknown
aaacagtttgatgatggtggctctgatgaggaagatatatgggaggaaaagcacatcgcattcacaccagaatcccaaagacgatccagctcggggagtacagacagtgaggaaagtacagactctgaagaagaagatggagcaaagcaagacttgtttgaacccagcagtgccaacacggaggataaaatggaggtggacctgagtgaaccacccaactggtcagctaactttgatgtcccaatggaaacaacccacggtgctccattggattctgtgggatctgatgtctggagcacagaggagccgatgccaactaaagagacgggctgggcttctttttcagagttcacgtcttccctgagcacaaaagattctttaaggagtaattctccagtggaaatggaaaccagcactgaacccatggaccctctgactcccagtgcggctgccctggcagtgcagccagaagcggcaggcagtgtggccatggaagccagctctgacggagaggaggatgcagaaagtacagacaaggtaactgagacagtgatgaatggcggcatgaaggaaacgctcagcctcactgtagatgccaagacagagactgcggtcttcaaaagtgaggaagggaaactgtctacctctcaagatgctgcttgtaaagacgcagaggagtgtcccgagacttgcanaagcgaagtgcgccgnngcccaagccttccagcagcagtcccga

SEQ ID NO: 5388 - DNA, 798 bp, Homo sapiens
  misc_feature (663)..(663): "n" may be a, t, c, g, other or unknown
  misc_feature (745)..(745): "n" may be a, t, c, g, other or unknown
  misc_feature (759)..(759): "n" may be a, t, c, g, other or unknown
  misc_feature (784)..(784): "n" may be a, t, c, g, other or unknown
gcgtcattcctcttggatatagatgttttcctggacacaccagctacacaataagccagtaaatctaagtttgacctgcttgttattattgggagccctaggtatgtcaaaggcttttcaccaagccagggttattaatcaaagctgactccctcgtattgatcagacctcaaatggtcgtgttccatgccaccctgtttatatattgctgtttaatttgcagccaccctgcgtgcactctatctaagtgacaacgattttgaaatcctgccgccagatattgggaagctcacaaagttgcagatagtaagtaatttatctaaattcttagaaaatcaattcactgctgcagccttgtaggggtagaatcaagtcaatttgagcaggagtaaggtttgttttgtgggaataaaccactactcctgatagtgtttcttgattatccgccggcacttgtaaatacatggaaaggattgagctttagtagaagagaggacatagaggatgagagtttctgtggagcaccttttaatgtgtaaatatgttgacaacttgttttcttctgtttagctcagccttagggataacgacctgatctcgctgcctaaggaaatcggggagcttacccagcttaaagagctccacattcaggggaaccggctnccgtctgcccccagaactaggtaaggttgctgatgaatgaacttagttctgggtttcatgaataacaattatcctaatgtancaattctgaacaanctctgtctcttcttggcaactactntccactaggcacac

SEQ ID NO: 5389 - DNA, 701 bp, Homo sapiens
  misc_feature (695)..(695): "n" may be a, t, c, g, other or unknown
  misc_feature (698)..(699): "n" may be a, t, c, g, other or unknown
gtttaataatgattatccaaccattctcttttcctttgaaatatccataacaaaagggaactactgacttggctttgtgacaagcttaaaataaaacttcaacacatgcttataattaatttttgtgaaaaaatgtaaaacagtcattatagagataggacataaaaatagtagctaacacttattaagtacttgttgcttgtcacatgttatattaaatgcccaaaaactctttataatgaattgggttataatacctctgtttgacttaaaagatgctgatacagtttgaatatttgtcccctccatatctcatggtgaaatgtgatccctaatgttggacatggagcctgctgggaggtgtctgggtcattgggatagatccctcttaagtgacttggtgccctccccatggtaatgagtgagttcttgctgttagttcacgagagagccggttgtttaaaggagcctgcacctcctcctctctctctttgctccctctcttgctatatgatgcgcctgctcttcctttgccttctgccatgatcggaagcttctgaggcctcaccagaagctgagcagatgctggtgccatgcttgtacagtctgaagaactgtgagccaaataaacctcttttttaaaatttaatttaattttttttttttgagacggagtcttgctctgtcgcccccanggnnca

SEQ ID NO: 5390 - DNA, 775 bp, Homo sapiens
  misc_feature (760)..(760): "n" may be a, t, c, g, other or unknown
  misc_feature (765)..(765): "n" may be a, t, c, g, other or unknown
  misc_feature (771)..(771): "n" may be a, t, c, g, other or unknown
gttttgcagatcacgttactagaaggacacatttatagttgtgggcggatgtggaatcagagggaaatttacactggacaccaccaccaagcccaaattattataatttagtcttgaatcactttaatcaacactttaaaatattttggtattcttagccataatttattttgttctcttacaagtgctctttagcagttttctggatcatcaaataagagttcagtaaaatttacttttgggtcaattagttggaatgacacttttggaattatcaattactttatttctgatgaattttgaacaggactcaccaacctcatttcttagtttagccgttttgagttacataaagacaaaaacatggcaaggattttacagcaggaaaatgatttgtttttgtttttcaacattcctataatccagagagctgaagaaatctttgatctagaaagcttggaaattcaaagcccctcaaggcacttcttttttttttttcaaattaaagaagaattaaaaacagtatttgtaatggaaaattttggtgccattaagtacataatggcttttactttagtctgtaattcatcctgtggatttaagattttggccaagagtaagttttaggtgtgatataacataagtgcctccaaggtttgctagtgttactgacattctagagtggtggaaaaacactggcattaatgcagaattggagtgactagtcccaggaatcaagtcagaaaaaaagaccactggncaaantggagntaat

SEQ ID NO: 5391 - DNA, 842 bp, Homo sapiens
  misc_feature (656)..(656): "n" may be a, t, c, g, other or unknown
  misc_feature (697)..(697): "n" may be a, t, c, g, other or unknown
  misc_feature (721)..(721): "n" may be a, t, c, g, other or unknown
  misc_feature (782)..(782): "n" may be a, t, c, g, other or unknown
  misc_feature (818)..(818): "n" may be a, t, c, g, other or unknown
gtaaagacaaaaaactatatgtatggttttgtggattatgtgtgttttgctaaaggaaaaaaccatccaggtcacggggcaccaaatttgagacaaatagtcggattagaaataaagcatctcattttgagtagagagcaagggaagtggttcttagatggtgatctgggattaggccctcaagacccttataaaaataagccaggtgtggcggtgggtgcctgtaatcccagctactcaggaggctgaggcaggagaattgctggaacccaggaggcagaggttgcagtgagccgagactgtgccactgcactccagcctgggagacaagagcgagactccctctcaaaaaaaaaaaaaaaaaaagcaaatactctattcccacatctctcagtgtccattttgattcttttaaatgcatttcatttccatctataagaagcaactatattctcttcaggggaaaaaactcaagtgtgtgatgctttgtggcttactaaatatggtggcagatagttgcagaatttgtccaaatataaattgttaatgactacttccccccccgccctcaatctgtggtcagatttttcttattagtcctaggggacaagcatgggtgtttgatttcagaaatcagtacctggcgagatttttgnctcaaaacgactatttgaatttcaagaactgtgctgcgaanacctctgagacatttgcaagtcangggcattttccttgcccttgactgatgctatgccggagactgatacattttcttaatgggncatggtcaagccaggtcccatgcctgaactggcttnacaccagaccttcctcatattaaa

SEQ ID NO: 5392 - DNA, 352 bp, Homo sapiens
  misc_feature (331)..(331): "n" may be a, t, c, g, other or unknown
  misc_feature (337)..(337): "n" may be a, t, c, g, other or unknown
  misc_feature (339)..(339): "n" may be a, t, c, g, other or unknown
cttagatggcacaatccaggctgttgcaccccttcttttcatcagtgagatgtaaagtctttatcagggacttcaaatttgcatttgtcctagaactcactgctaggtaaatctgctaactatgcgagacagagagctacttattctctgctttgagattcccggaaacagcatctacagccttggacaaggccatagtctgttttacccctattagcttaacaggtcctaccttctgccttgctttggtttctcctactgtattttttttttttttttttttgagatggagtctcgctctgtctcccaggctggagtgcggtggcacaanctcggntnactgcaacctccg

SEQ ID NO: 5393 - DNA, 720 bp, Homo sapiens
  misc_feature (689)..(689): "n" may be a, t, c, g, other or unknown
  misc_feature (694)..(694): "n" may be a, t, c, g, other or unknown
  misc_feature (712)..(712): "n" may be a, t, c, g, other or unknown
tttggaggaacgggccatgaggcagtttgccatggatgcggctgccactgcggctgcccagcgagacaccactctcatcagacactccccccagccctcgcccagcagcagtttcaacgaaggcctgctggcaggcaaccacaggcaccaggagatggagagcaggttgaaggtgctccatgcccagatcctagagaaagacgcagtgatcaaggtccttcaacagctttccaggaaagaccctggcaaggctacccagggcaccctacggcccgccaagtcggtgccgtccatctttgcagctgcagtggggactcagggctggcaagggttctcaaccagcgagcgacaaactgatgcacctgcccgacagacagtagaccgtggaccagcagaagagcccccggccacacctcctctccctgcccacaccaaacatggcagcagagacgggagcacccaaactgatggccctgcagacagcacctctgcctgcttggcctcagaacccgacagcctcctggggtgcaacggtagccagaggcaacctctctggactctatagctgcaaccagagtccaggatctgtcagacatggtggaaatactgatctgaaggaaggaggccttggggaccctgaagcctgctcccccatggcattccagcaattgtcttcaaatgctgacctnacttncttcaaccagcaatgggntttgtgca

SEQ ID NO: 5394 - DNA, 744 bp, Homo sapiens
  misc_feature (681)..(681): "n" may be a, t, c, g, other or unknown
  misc_feature (733)..(733): "n" may be a, t, c, g, other or unknown
  misc_feature (738)..(738): "n" may be a, t, c, g, other or unknown
gcatcaccatggagccgagggcaggtgtctccaaacaggacatacgtgaacaaatttggggctacatggaatcacaaaatttagctgactttccccgacctgttcatcacaggatacccaactttaaggggtcttatctggcttgccaaaacatcaaagacctagacgtttttgccagaacacaggaagttaaagtggaccctgataaaccactggaaggcgttcggctgctggtgctgcagagcaaaaaaacattgttggttccaacaccacgactgagaacgggattgtttaataagatcacaccaccccctggggcaactaaagacatcttgagaaaatgtgccacctctcagggtgtgaggaactacagtgtccccataggcttggactccagagtcctcgtggatttagttgtggtgggatccgtcgccgtttctgaaaaaggctggagaatcgggaagggagaaggctacgccgatctggaatatgccatgatggtatccatgggcgccgtcagcaaggagacgccggtggtcaccatcgtccacgactgccaggtcgtggacatccctgaagagcttgttgaggagcacgacatcactgtggactacatcctcactccaaccagagtcatcgccacaggctgcaagcgcccaaagccaatgggaatcacctggntcaagatcagcctggagatgatggagaaaatcccatactgaggagccttcgngcccnaaaaca

SEQ ID NO: 5395 - DNA, 781 bp, Homo sapiens
  misc_feature (603)..(603): "n" may be a, t, c, g, other or unknown
  misc_feature (703)..(703): "n" may be a, t, c, g, other or unknown
  misc_feature (721)..(721): "n" may be a, t, c, g, other or unknown
  misc_feature (755)..(755): "n" may be a, t, c, g, other or unknown
gacagagatggcactgatgcaggaactgtatagcacaccagcctccaggctggactccttcgtggctcagtggctgcagccccaccgggagtggaaggaagaggtgctagacgctgtgcggaccgtggaggagtttctgaggcaggagcatttccaggggaagcgtgggctggaccaggatgtgcgggtgctgaaggtagtcaaggtgagctccttcgggaatggcacggttctcaggagcaccagagaggtggagctggtggcgtttctgagctgtttccacagcttccaggaggcagccaagcatcacaaagatgttctgaggctgatatggaaaaccatgtggcaaagccaggacctgctggacctcgggctcgaggacctgaggatggagcagagagtccccgatgctctcgtcttcaccatccagaccagggggactgcggagcccatcacggtcaccattgtgcctgcctacagagccctggggccttctcttcccaactcccagccaccccctgaggtctatgtgagcctgatcaaggcctgcggtggtcctggaaatttctgcccatccttcagcgagctgcagagaaatttcgngaaacatcggccaactaagctgaaaaccttctgcgcctggtgaaacactggtaccagcagtatgtgaaagccaggtcccccagagccaatctggcccctntctatgctcttgaacttntaaccatctatccttgggaaatgggtacttgaanaagaccagaatttcatgttggaccaa

SEQ ID NO: 5396 - DNA, 775 bp, Homo sapiens
  misc_feature (659)..(659): "n" may be a, t, c, g, other or unknown
  misc_feature (728)..(728): "n" may be a, t, c, g, other or unknown
  misc_feature (753)..(753): "n" may be a, t, c, g, other or unknown
  misc_feature (761)..(761): "n" may be a, t, c, g, other or unknown
tcatgaactgctgacctcaaatgatctgcccgccttggcctcccaaagtgctgggattacaggcatgagtcactgcacctggcctggagcttggattctaactcctgtgtgttttctccaaaaactgtatttcagccactattttcattgtgtcatgcatatatcattttggatcctgttattttattagtattttaccagaaatgttcatcctcattttctcaatgatcatattaaattttatttataatatcatccagtatacagtccctttcactaaataatagtctgagttcattccctaggatattttatatttactataaattatatgcacatgctttgtaaagttttcttttttgaatgttggaactaaaaaaagtcaataaatattctaaaaagtctaacttttttccccatgtcaatacactgcaggacttgtatattctttttcaaatattcataatgtgtcactctagtggtaaagtataaaatagcctattgccttgaggaacttcagatgggcacgcattttatacctaagccaggttagaagcttttaatcaagagaatatttgaaagttaaatcaagccaggcgtggtggctcacacttgtaatcccagcattttgagaggctgaagtgggtggatcatttgangtcagcagttcatgaccagcctggccaacatggtgaaaccttggcgctactaaaattccaaaaaattancccagtggtaatggtgcatgcctgnaatcccanctacttgggaagct

SEQ ID NO: 5397 - DNA, 670 bp, Homo sapiens
  misc_feature (601)..(601): "n" may be a, t, c, g, other or unknown
  misc_feature (615)..(615): "n" may be a, t, c, g, other or unknown
  misc_feature (636)..(636): "n" may be a, t, c, g, other or unknown
agagcggatgtgaggggcgccgatggcggagggaacggcggaggctcctctagagaatggtggtggtggcgactcgggagccggagctttggaacgaggagtggcgcccattaagcgtcaatacctcaccaccaaggagcagtttcaccaattcctggaagccaaagggcaggagaagacttgccgggaaaccgaggtaggagaccctgctggcaatgagctggctgagcctgaggctaagcggatccgactggaggatggacagacggcggacgggcagacggaggaggcagcagagcccggggagcagctacagactcagaagagggcccggggacaaaacaagggccggccccatgtgaagcccacgaactacgacaagaacaggctgtgtccctccctaatccaggagtcggctgctaattgtttcttcggtgatcgctgccgctttctgcacgacgtggggcgctacctggagaccaagccggccgacctgggcccccgctgcgtgctcttcgagaccttcggccggtgcccctacggcgtgacctgccgcttcgctggggcccacctgaggcccgagggacagaacctggtgcangaggagttggcggnccgcgggacccagcccccgtncattcgcaacggctggacaaagccctgcacaaca

SEQ ID NO: 5398 - DNA, 770 bp, Homo sapiens
  misc_feature (649)..(649): "n" may be a, t, c, g, other or unknown
  misc_feature (682)..(682): "n" may be a, t, c, g, other or unknown
  misc_feature (723)..(723): "n" may be a, t, c, g, other or unknown
  misc_feature (751)..(751): "n" may be a, t, c, g, other or unknown
tccctttttaaaataaccatttaaaaattttctaccctgaattgcattttgaaagggatggttcctaggtaacacaaggtagaaaatttacatctcaaaggcagagaacttacatttcaggcctaaatattgttatttgccaagacagaaagttgatgctaagaagcccagttcagacaaaatggttgaaggtgagtttatttggactaatgctctcacctattgtaagaatttctactgattttcctttatagatacacgtttttacaaagagtttcaaaataactggctaaataccagaaacgcaaattttggagactgatttaattcaataggcggtcttttcaacttagcttctgtttcttaactagattactgagttcagggcagagcccattagcaaatagagcagacaaagggtttcctatttctggatgcagatggatagttctgaaaatgcaaatctgcttcacccaagggcctaatttttataaatattacctagctttctttttccctttggagtaaaacagtaactaagtgaaaagattggcagattcaattttcttataaactagttgcttaaacttttcatttgccttctacatgagctcttttaaagagacaaacatttttgaaatctttttanaagcttttgcacatcaataggtatccctagganggcctgattcagaagccctcatttttaaactcaattcttanatgaacagtcttattcatctggaaggtncacataatgggcatcataa

SEQ ID NO: 5399 - DNA, 792 bp, Homo sapiens
  misc_feature (610)..(610): "n" may be a, t, c, g, other or unknown
  misc_feature (614)..(614): "n" may be a, t, c, g, other or unknown
  misc_feature (729)..(729): "n" may be a, t, c, g, other or unknown
  misc_feature (778)..(778): "n" may be a, t, c, g, other or unknown
  misc_feature (780)..(780): "n" may be a, t, c, g, other or unknown
tccccagtgcctaactctgctgtctgctatatttcagcctttcatccgctgtagtttacaatgcagggatctggttgatgaagcaaagaagtttcatctgaggcctgaacttcggagtcagatgcagggacccaggacaagggctcgcctaggagccaatgaagtgcttttggtggttgggggctttggaagccagcagtctcccattgatgtggtagagaaatatgaccccaagactcaggagtggagctttttgccaagcatcactcgtaagagacgttatgtggcctcagtgtcccttcatgaccggatctacgtcattggtggctatgatggccgttcccgccttagttcagtggaatgtctagactacacagcagatgaggatggggtctggtattctgtggcccctatgaatgtccgacgaggtcttgctggagccaccaccctgggagatatgatctatgtctctggaggctttgatggaagcaggcgtcacaccagtatggagcgctatgatccaaacattgaccagtggagcatgctgggagatatgcagacagcccgggaaggtgccggactcgtagtggccagtggagtgatctactgnctangaggatatgaccggcttgaatatcttaaattcaagttgagaaatacgacccttatacaggacattggactaatggtacaccaatgggcaccaagcgtctgatatgatgggaattncctgctaatagcattgaatggtatgacctatcatcgacaggttgggaancngacattcatggg

SEQ ID NO: 5400 - DNA, 778 bp, Homo sapiens
  misc_feature (705)..(705): "n" may be a, t, c, g, other or unknown
  misc_feature (737)..(737): "n" may be a, t, c, g, other or unknown
  misc_feature (743)..(743): "n" may be a, t, c, g, other or unknown
cccctcggccccccgcacaccccggtcctcgatgacccctctccgcaggatggtttcccggtcctctggcgaggatcctccaaggcgtctcacatgaaccggctcagaaacgccaaaatctacgtggagagagctgtcaagcagaagaagatctttacaatccaaggctgctacccggtgatccggtgtctcttgcgccggaggggctgggtggagaagaagatggtccatcgctcaggccccaccctgctgccaccccagaaggatctggatagctcagcgatgggtgacagtgacaccactgaggatgaggatgaagatgaggacgaggagttccagccatcacagctgttcgacttcgatgatttactgaaatttgatgacctagatggaacacatgctctgatggtgggtctatgtctcaatctccggaatttgccgtggtttgatgaggttgatgccaactccttcttcccacgctgctactgcctgggggctgaggatgacaaaaaagccttcatagaggacttctggctgactgctgcccgcaacgttctcaagctggtggtgaagtctgagtggaagtcataccctattcaggcagtagaggaagaggcctcaggagacaagcagcccaagaaacaggagaaaaacccagtgttggtgtccccagagtttgtggatgaagctctgtgtgcgtgccangagtaccttacaacttggcccacatggacatngacaanggacctggaaggccccgttgtaccttaacccccga

SEQ ID NO: 5401 - DNA, 623 bp, Homo sapiens
  misc_feature (509)..(509): "n" may be a, t, c, g, other or unknown
  misc_feature (600)..(600): "n" may be a, t, c, g, other or unknown
  misc_feature (607)..(607): "n" may be a, t, c, g, other or unknown
  misc_feature (619)..(619): "n" may be a, t, c, g, other or unknown
gtctgtgtggagacgaaagctgcccacaagggagcgagggagctgggagggggtggtaagagatgaggtgggaaggatgggttgggtgaaccttgaaataattgtagttgtactttgtgaaaaaaaactttatcatcaaggctttgtcctgatccaacctgaccttcccctcagttaatccgaattactgaggtttgactccatgttcagtttctctgagatttgctttgatttctcttagaagtggagctgctgtttattctcccggtggctctgtgtacacgctctgcccgtggagctgcctgggatgagccgtgagtcctctgagaactgcttcctgtttcgtctggtaactcctaagcctgcctttctttcctacagtctgcatttgtggaaatctgcagtatttgaagtttggaggagatcaatttttcatcctttccttcgtgggataaagaatatttcaaccacctctggagaccaaagagttctgagaagttttgaaatancttgggaaatacaccacgtgcttcacacttcatttttctcctctctctttcattgtttgacttaattaaaatattgtaatgcaagaagganagatgangcaaacgtttanagaa

SEQ ID NO: 5402 - DNA, 873 bp, Homo sapiens
  misc_feature (735)..(735): "n" may be a, t, c, g, other or unknown
  misc_feature (812)..(812): "n" may be a, t, c, g, other or unknown
  misc_feature (871)..(872): "n" may be a, t, c, g, other or unknown
cattcttatttctttttttcttgaatttagaatattttctatttatatttaatagatccaaattaagtatgttgctattgtacccgtgaacccttaaaactgggataagccttgatgtgggtgtctgggaactctttaaacatgtattggcagtgtgcaccttttttttccttttgagtggatttgaaattgttcatttataaatccctttcaagcctccctggctgagatcgacacatgagaagttatttccaaggggtgtttggaaatggcagactctgcgcacaccatgcggcctctccctcaccccaccgcctctcacctcggcctgcctgtgttcccttctcttttgtcttgacttcctgagctgcagactcctggcatctttgactcccttttcttcgctccccagggcaacctggtatcctggagggcttcttgcctacccagaaagtatacccttggtaaaccagtggtgactgcccgagcatccatttgtgcaggaagcctcctgcctttcggtgcccgagaacctcttcagaagtctctcctttgagcatggaatatttatttgtgtggccatgcatatttgggtgccttcttaatctgtagaatggggctagccctgccagcctcacgggccatgcactagcatggtgtcatgtgaggtgttaataagtgttccaagggtaaaatgggttgctctgtcaagtaagttggcaaagaacaccgtancatactaaagggtctgggatgcccttagtaaaacacttaactcaagtttcctgacatgcttggcctaagaacacttntctttggagaacacttgggacaccctgaggctttagggacacacttcagtggtattacnna

SEQ ID NO: 5403 - DNA, 727 bp, Homo sapiens
  misc_feature (675)..(675): "n" may be a, t, c, g, other or unknown
  misc_feature (704)..(704): "n" may be a, t, c, g, other or unknown
  misc_feature (726)..(726): "n" may be a, t, c, g, other or unknown
gaggagagctaaaaaagaactcaggcctgaatggttgtcaggaatttacttgggtgactatcttctcatctcagaacataaaatgtaggaattaccacagttgcaaagggagatgtttatgttggagataaaaatgctcctcccttcaaaaatgagacagtattttagataggaaaggttatttatctgattacatgttttaaaattctgagcgtaaggttatatgtcaaatcctgtccatgggctgggcacagtggcccacacctgtgatcctagcactttggaaggctgagggggaggattgattgagcccaggaggtcaaggctacagtgaactatgatcacaccactgcacttcaacctgggcagcagagcgagaccctgtctcaaaaaataaaaataaattaacaaaaaaatctggtccatgtccatctcctcttagctgctaattcaattttagattagacacagtggacaaggacaagtatggtgagagtcctgtgatttctcaccagcttcctttccacataggccactgcttctcttcttccaaggtttttccccgcttttgcctcctggaggttgtatcctgggtgttaggagactgggttccggacacattccccacagaaggatagcaggaccttagaagatctttttctttcttttcctggnttcctcttggttgcaagaaggttgaatanggatgggctctaaaatcctggng

SEQ ID NO: 5404 - DNA, 780 bp, Homo sapiens
  misc_feature (701)..(701): "n" may be a, t, c, g, other or unknown
  misc_feature (745)..(745): "n" may be a, t, c, g, other or unknown
  misc_feature (761)..(761): "n" may be a, t, c, g, other or unknown
atatacttgcgcgccgacgccgccgctcgcttgtgaaactggaaggctgccatggctagcccagccgcctcctcggtgcgaccaccgaggcccaagaaagagccgcagacgctcgtcatccccaagaatgcggcggaggagcagaagctcaagctggagcggctcatgaagaacccggacaaagcagttccaattccagagaaaatgagtgaatgggcacctcgacctcccccagaatttgtccgagatgtcatgggttcaagtgctggggccggcagtggagagttccacgtgtacagacatctgcgccggagagaatatcagcgacaggactacatggatgccatggctgagaagcaaaaattggatgcagagtttcagaaaagactggaaaagaataaaattgctgcagaggagcagaccgcaaagcgccggaagaagcgccagaagttaaaagagaagaaattactggcaaagaagatgaaacttgaacagaagaaacaagaaggacccggtcagcccaaggagcaggggtccagcagctctgcggaggcatctggaacagaggaggaggaggaagtgcccagtttcaccatggggcgatgacaatgtttgccacagcctctgcctggaacctggctcgtgctgtgaccagaagggaaaggcggctgtttggctctttctcccccgcaaggacccgntgacccgctggatggagagcaaaggagaccccttccgagcccgntcacagtcctgatttngcaggttgggacctgaggg

SEQ ID NO: 5405 - DNA, 797 bp, Homo sapiens
  misc_feature (721)..(721): "n" may be a, t, c, g, other or unknown
  misc_feature (726)..(726): "n" may be a, t, c, g, other or unknown
  misc_feature (779)..(779): "n" may be a, t, c, g, other or unknown
ttcttagaagtggaaatgtgtgtagcaataggaacggttcctaaggccaagaataaatggattgcggttgtgggtcttttggtagcactaagctttctgttgcagtgtgtgagaggacccggggagagcccaatcttcgaagggacagatgaggggtatgacctggggagcccacaaccgcctttgcttttcgcagatgctgggaacgcagctctgctgccggcggggtggacagaccctcccccagccattgctgcccacctgctgcgtcagggcctcccctgcccagctcagtcttggccaagcccagtctggaggagcatgcaccgcctgtgagcggtctgggcagcgcttcccaggttgcccatcagatgagcccgtcccaggtgtcgaggaggagatctcctgagcggcagtctcggaaatccttccccgtggaaggacacgttaacctctcgtgcttcccatttcaaaattctgtttccaacacgatttgatgaaagattgaaatatctgaaaactcatttcgagcacagggtctggcattgtgattctcaggtgaactgggcgtatggttgaggtaggacttcaaaaaagtgttcgaacgtcatttgcagcatttaaactgagctccaaatgacgttcaaacacccctctcgggtagagttttcatggtggaacggttgcgcccaccaaacagaagcttatggttttggcacanaaggnctgggccattttcatggacacctggctggaacctcggtggaagtgaactccgnaggttgttgccgtcactg

SEQ ID NO: 5406 - DNA, 840 bp, Homo sapiens
  misc_feature (757)..(757): "n" may be a, t, c, g, other or unknown
  misc_feature (793)..(793): "n" may be a, t, c, g, other or unknown
  misc_feature (811)..(811): "n" may be a, t, c, g, other or unknown
tgcaacatgaggacataggactctttaattccaaaggctcttccaacccagagaacccatctgcccccatgaccttctcccagagcttgagacatggcctgagccccctgctgccataggacttggggcctatctgccattgcaggacctgatttaacagctctcttcttccaatactgggcagtagagtttcggaaactgacaaatgtgtggtctcttcagtgcccagtgtgtaacctggcatggtttgggtgtgctaggagtttgtgaaatgaatgttttcaagacgcaaacgctgctatgcccatcaggtgtgcacagcaggcctgaggatcatgatgagactccctttttatgcagcaaagcacaaagtgtgacagtcgtggccttcctggtggccagacttctagcaactttagccacccaccaaatgacatcacatacagaaggcctcagaaagggaggaggtcgtaaggacacacagctgatgaagggtcagtgctcagctatcaaggtcatcttctggcctggttgcctcccacagcccaggatgcattcaaggctgcacatcaggagcataaataagggtggtcagctcaggcccactggctgcaacaagtagccactgacagggagtctggggccatttggtgcagaacaacccccaacccagtggccatcttcacaactgcagcacagtgctggccctaatgccaggtgagccgtgcaaaagtcctggttctttggctttacatanggaccgggcaatcgctttaaagaaattccctattantttacaggaaaggagctntgaaaaggaaaaggcaggtttggaaccaa

SEQ ID NO: 5407 - DNA, 782 bp, Homo sapiens
  misc_feature (526)..(526): "n" may be a, t, c, g, other or unknown
  misc_feature (553)..(553): "n" may be a, t, c, g, other or unknown
  misc_feature (669)..(669): "n" may be a, t, c, g, other or unknown
  misc_feature (731)..(731): "n" may be a, t, c, g, other or unknown
  misc_feature (763)..(763): "n" may be a, t, c, g, other or unknown
  misc_feature (769)..(769): "n" may be a, t, c, g, other or unknown
tttcagctgttatggctaagtcagttaacctcatcaacaattttttcttctgtaaattgaggacaatttttgcttttatgaatgaagtcttaaccagcaggaagaaatataaacaaaggaacatatttttaatttaatgaagcaaaattccatacatcattttgaaaatagtgtttctttccctgataggcctgttctgcatcattcttttagcttccttctgccctgtttatcacttggtcccacttttatatttttcctcttcggtccagaatttcttatttagtttcttgtattttgcctactccctcccttctccatgattcagcctagtctttccgtcctctgtggacttgggtgtgccttcctctgggccacctcgtcttttgctgctgttagccctcccgcctgcgcacctgccacttcaccctcgcctgtggtccacttacgttccactcagcccggtcagtcctgctttgttcttctccaccgccttggtctcccgtgtgtcttatctagctctggntccttctcgtctccacatttattttgntttcttcctgtgcttgttagtccttgtgcacttggtccttgagctctttttctattaataggtattactagatggatttgttgtctgcctttacatagaacacacatccttactgngcatttcctgggtagccaggatgaatcaattattattaacttcccttcgaacattgagcttnctctggtttctggttctaagaattagattagnattctngaagactaatact

SEQ ID NO: 5408 - DNA, 601 bp, Homo sapiens
  misc_feature (525)..(525): "n" may be a, t, c, g, other or unknown
  misc_feature (552)..(552): "n" may be a, t, c, g, other or unknown
  misc_feature (599)..(599): "n" may be a, t, c, g, other or unknown
atacccaccatcgcatttccagggagatgagagtggaaagaccctgggcgctggtaggactacaccctgggataccagtgcagaagccgtgtcctggtgcagaaaggattttggtagggagcagaggaggcagaagtctgggctctggaccagttacctgaaggcattgcgaagtttctctcccactgggtatgtccggtccttcttctcaaactcatcgtcgaagagggctggagtgcagtggtgcagtcacggatcactgcagcttggaactcctgggctcaagccatcctccggcctcaacctcctgagtagctgggactacagggatggtgatgaaggaccccagaagcgctgcctgtacacccccaaccaggctccagtgggtgccacttgtcccggcctgaagtcacagcctccagatgctgcctccctctgccaattcctatacctgctggggtggacactgagggccagtcccagacttgggagcagggtgggagtgggatgggggtggtgcgtaanggaggacctctatgtggccctgattgntggctcagtttcctctgcctgggggatgggttgagatgtcccctggntg

SEQ ID NO: 5409 - DNA, 803 bp, Homo sapiens
  misc_feature (645)..(645): "n" may be a, t, c, g, other or unknown
  misc_feature (752)..(752): "n" may be a, t, c, g, other or unknown
  misc_feature (788)..(788): "n" may be a, t, c, g, other or unknown
  misc_feature (790)..(790): "n" may be a, t, c, g, other or unknown
tttctgctacagacaggccagggacttagacacaaatggcgagggatgaggagcttgatgacgtgtcaagggggattagatatcaagtgtgggggatgaaaagcaggattcttgctggaactgagcttgccacggttggacgtggaaggccaatgttgaggcctagtggagaagagggcttggaggagcctggctaaggtttggtcaaggagagtctgtcacaagatagacccatctgtatccaggctaacgcaatagggtgaccaaatgcagcccgcacgcttctctgtgtttctctccaggtcctttgggcacttagtttataattttttattttctattttttatttttatgggtacatagtataggtgtgtatggagtacatgagatgttttgatacaggcatgcaatgtgtaataatcacatcatggaaaacagggtattatgggcacttagtttagccataaggcttccgtgccaagtggcctgggagccagctggggccagcttctgccacaggcatccttcacccacccttctcacaaacaagcgattcttcaataaacaataaacagaatacacaaaaagcaaaccaaaacatctctagatttattaatagatgggtgaattaaaggagtcttttncaaataatgtgactaacagaagccaagggggatgaatgcccaaacttgggcttggcaaaactgctggaccgaagctgattgctgaatgtgaggaatttgggagccantgcaccattgcacttgatctgcaggcggattgttcncncggattaccacgt

SEQ ID NO: 5410 - DNA, 777 bp, Homo sapiens
  misc_feature (665)..(665): "n" may be a, t, c, g, other or unknown
  misc_feature (767)..(767): "n" may be a, t, c, g, other or unknown
  misc_feature (772)..(772): "n" may be a, t, c, g, other or unknown
  misc_feature (775)..(775): "n" may be a, t, c, g, other or unknown
cttttttgctgtcgccgcccccactgaagcaagagctccccggctccactgaaacaccagctcatttaagctttccccaacgaccggccctccgggacgatacctaacaacgaccggcgcccgcatctggaataggctggcgagatacttagtatccgagggctcgggacttggcgccatcgaggtcatggggacccaggatccagggaacatgggaaccggcgtcccagcctcggagcagataagctgtgccaaagaggatccacaagtttattgccctgaagagactggcggcaccaaggatgtgcaggttacagactgtaagagtcccgaagacagccgacccccaaaagagacggactgctacaatccggaggactctgggcagctgatggtttcctatgagggtaaagctatgggctaccaggtgcctccctttggctggcgcatctgtctggctcatgagtttacagagaagaggaaaccctttcaagctaacaacgtctccctaagcaacatgataaagcatataggcatgggcttgaggtacctgcagtggtggtaccggaagacccatgtggaaaagaagacacctttcatcgacatgatcaattctgtacccctaagacagatttatggttgtcccttgggtggcatcgggggangcactattacccgtggctggagaagccagttctgtcgttggcaagcttaccctggaatgtattaacaccggacagtcatcggttgaccaatttacagtgtgnctgcnttngg

SEQ ID NO: 5411 - DNA, 739 bp, Homo sapiens
  misc_feature (611)..(611): "n" may be a, t, c, g, other or unknown
  misc_feature (695)..(695): "n" may be a, t, c, g, other or unknown
  misc_feature (727)..(727): "n" may be a, t, c, g, other or unknown
  misc_feature (738)..(738): "n" may be a, t, c, g, other or unknown
gaagatatggcggcgtctgcgtctgcagctgcaggggaggaggactgggtccttccctctgaagttgaagtattggagtccatctatctagatgaactacaggtgattaaaggaaatggcagaacttcaccatgggagatctacatcactttgcatcctgccactgcagaggaccaggattcacagtatgtctgcttcactctggtgcttcaggtcccagcagagtatccccatgaggtgccacagatctctatccgaaatccccgaggactttcagatgaacagatccacacgatcttacaggtgctgggccacgtggccaaggctgggctgggcactgccatgctgtatgaactcattgagaaagggaaggaaattctcacagataacaacatccctcatggccagtgtgtcatctgcctctatggtttccaggagaaggaggcctttaccaaaacaccctgttaccactacttccactgccactgccttgctcggtacatccagcacatggagcaagagctgaaggcacaaggacaggagcaggaacaggaacggcagcatgctacaaccaaacagaaggcagtcggtgtgcagtgtccagtgtgcanagagcccctcgtgtatgatcttgcctcactgaaagcagcccctgaaccccaacagcccatggagcttgtaccagcccaatgcanaaaagcttgcgccagcaagaagaacgcaagcnggttttaccana

SEQ ID NO: 5412 - DNA, 642 bp, Homo sapiens
  misc_feature (581)..(581): "n" may be a, t, c, g, other or unknown
  misc_feature (586)..(586): "n" may be a, t, c, g, other or unknown
  misc_feature (623)..(623): "n" may be a, t, c, g, other or unknown
ccctcgcgctactgcgggagcagcgtcctcccgggccacggcgcttcccggccccggcgtccccggaccatggcgctctccgggctcttctctagctctcagcggctgcgaagtctgtaaacctggtggccaagtgattgtaagtcaggagactttccttcggtttctgcctttgatggcaagaggtggagattgtggcggcgattacagaaaacatctgggaagacaagttgctgtttttatgggaatcgcaggcttggaagagacagaagcaattccagaaataaattggaaattgaagatttaaacaatgttgttttaaaatattctaacttcaaagaatgatgccagaaacttaaaaaggggctgcgcagagtagcaggggccctggagggcgcggcctgaatcctgattgcccttctgctgagaggacacacgcagctgaagatgaatttgggaaaagtagccgcttgctactttaactatggaagagcagggccacagtgagatggaaataatcccatcagagtctcacccccacattcaattactgaaaagcaatcgggaacttctggtcactnacatncgcaatactcaatgtctggtggacaacttgcttgaanaatgactactttttgggcc

SEQ ID NO: 5413 - DNA, 706 bp, Homo sapiens
  misc_feature (668)..(668): "n" may be a, t, c, g, other or unknown
  misc_feature (673)..(674): "n" may be a, t, c, g, other or unknown
tgtgtctctcccgaccatggagggggtcgcggtggtgacggcgggcagcgtaggcgctgccaaaaccgagggagctgcagccttgccgcctccgcctccgcctcctgtctccccgcccgccctcacccctgcacccgcagcgggtgaggagggaccggcgcctctgtctgagacgggggctcccggctgctccggctcccggccccctgagctggagccggagcgcagcctgggccgcttcagaggccgcttcgaggacgaggacgaggagttggaagaagaagaggagctggaggaggaagaagaggaggaggaggaggacatgagtcacttctcgttgaggctggagggaggccggcaggactcggaggacgaggaggagcgcctgattaatctctctgagctgaccccatacatcttgtgttccatttgcaaaggttacttaatagatgcaactaccatcacagaatgtcttcataccttttgtaaaagctgcatcgtaagacatttttactacagcaacagatgtccaaaatgcaatatagtagtacatcagacacaacctctttataacataaggttggaccgacagttacaagacatagtgtacaaattagtgatcaatctagaggaaatctggggtttaatcattttttaggaagaaaccnccccnnatccttgaattcttttaaggaaagaaggtctt

SEQ ID NO: 5414 - DNA, 673 bp, Homo sapiens
  misc_feature (613)..(613): "n" may be a, t, c, g, other or unknown
  misc_feature (629)..(629): "n" may be a, t, c, g, other or unknown
  misc_feature (652)..(652): "n" may be a, t, c, g, other or unknown
acacctccctttctcctgcagccatggatgccgctctgctcctgaacgtggaaggggtcaagaaaaccattctgcacgggggcacgggcgagctcccaaacttcatcaccggatcccgagtgatctttcatttccgcaccatgaaatgtgacgaggagcggacagtcattgacgacagtcggcaggtgggccagcccatgcacatcatcatcggaaacatgttcaagctcgaggtctgggagatcctgcttacctccatgcgggtgcacgaggtggccgagttctggtgcgacaccatccacacgggggtctaccccatcctatcccggagcctgaggcagatggcccagggcaaggaccccacagagtggcacgtgcacacgtgcgggctggccaacatgttcgcctaccacacgctgggctacgaggacctggacgagctgcagaaggagcctcagcctctggtctttgtgatcgagctgctgcaggttgatgccccgagtgattaccagagggagacctggaacctgagcaatcatgagaagatgaaggcggtgcccgtctccacggagagggaaatcggctcttaagctgggccgttccaagaggcctnttcaagtccaggaggncatcatctgctaaggaacctgcnaccaaggagaaccctggaagt

SEQ ID NO: 5415 - DNA, 728 bp, Homo sapiens
  misc_feature (674)..(674): "n" may be a, t, c, g, other or unknown
  misc_feature (679)..(679): "n" may be a, t, c, g, other or unknown
  misc_feature (682)..(682): "n" may be a, t, c, g, other or unknown
atgctgccggcgggctgctcgcgccggtgaggcctgcgcggcaggagggggtgggaggatgcgggcgggccggtagccaggcgcggggcccgaggcccgacgctggccgaggtgctgagccgccggtgcgtcccccaggctggtggccgagctgcagggcgccctggacgcctgcgcacagcgacaattgcaattggagcagagcctgcgcgtttgccgtcggctgctgcatgcctgggaaccaactgggacccgggctttgaagccacctccagggccagaaactaatggagaggacccccttccagcatgcacacccagtccacaagacctcaaagagttggagtttctgacccaggcactggagaaggctgtacgagttcgaagaggcatcactaaggccggagagagagacaaggcccccagcctgaaatctaggtccattgtcacctcttctggcacgacagcctccgccccaccgcattccccaggccaagctggtggccatgcttcagacacgagacccaccaagggcctccgccagaccacggtgcctgccaagggccaccctgagcgccggctgctgtcagtgggggatgggacccgtgttgggatgggagcccgaacccccagcctggggcgggcctcagggaccagcaaatggccccatccgntgctnctnagccccagaagccttcacacttaaaggagaaaggggcacctgctgc

SEQ ID NO: 5416 - DNA, 791 bp, Homo sapiens
  misc_feature (603)..(603): "n" may be a, t, c, g, other or unknown
  misc_feature (726)..(726): "n" may be a, t, c, g, other or unknown
  misc_feature (782)..(782): "n" may be a, t, c, g, other or unknown
  misc_feature (784)..(784): "n" may be a, t, c, g, other or unknown
ctccccccagtcggcggcgcttggtgccgcccgggagaaccaggtcatcggtcggttcccgtgaaaacaaaaacaatcggccgcgccgtcgcaggcacccgaacgtcgcgagcggggcctggggacgcggagccgagtgcagcgagcgaacgggagcagcggcgactcgccggggggctagggcgccatggggcaggcgggctccggctgcgcggggctcccccggcgccgcggctagtgcgcccgccgcctcggccgcctcagcctcccgcgccgcccgcttggggaacgaggagcaggacgcggcctcggtggggcccgggccgaacggctgcggacacctgggcgccgaggagccgagcgccgccgtctccggcatggatcagtgcgtgacggtggagcgcgagctggagaaggtgctgcacaagttctcaggctacgggcagctgtgcgagcgcggcctggaggagctcatcgactacaccggcggctcaagcacgagatcctgcagagccacggccaagatgctgaattatcagggacactttcacttgttttgacacagtgctgtaaaagaataaaggatactgttcaaaaattggncttcgaccacaaagacatccacagcagtggttctcgggttggaaaagccattgataagaattttgattctgcattagcagtgtgggaaatagatggctgctggcaggcagacaagcccaaagnttctttaaatgaagtgatggtggaagacttttttcgacaaggaatgcttgattggntnaagactt

SEQ ID NO: 5417 - DNA, 829 bp, Homo sapiens
  misc_feature (807)..(807): "n" may be a, t, c, g, other or unknown
  misc_feature (818)..(818): "n" may be a, t, c, g, other or unknown
  misc_feature (820)..(820): "n" may be a, t, c, g, other or unknown
actgagtgagcaactgtatgatgtgggctatcgggatatagtgaacatcgacatcagtgaggttgtcatcaagcaaatgaaggaatgtaatgccacccgacggccccagatgagcttcttgaagatggacgtgacgcagatggagtttcctgatgcctcgttccaggtggtgttggacaagggcaccctggatgctgtcctgacagatgaggaagagaagaccttacaacaggtggacaggatgctggctgaggttggccgtgtcctgcaggtgggcggtcgctatctctgcatctccctggctcaggctcacatcctgaagaaagcagtgggccacttctcccgggaggggtggatggtgagggtgcaccaagtggccaacagccaggaccaggtgttggaagcagagcctcagttctccttgcctgtctttgccttcatcatgaccaagttcaggccagtccctggctctgcccttcagatctttgagctgtgtgctcaggagcagcgcaagcctgtgcggctggagagtgccgagcggctggccgaggcggtgcaggagcgacagcagtatgcctggctgtgcagccagctgcgccgcaaggccaggctggggagtgtgtctctggacttgtgcgatggggacacgggggagccacgctacaccctccacgtggtggacagccccacttgtgaaaccatcgcgggacaatcattttgcgattttcatcatcccttaaggcccgggaagaccgagtgggctctttggcatggatgaaggcccggaaacaagctggccggccagtngcttggctttnangaaggttga

SEQ ID NO: 5418 - DNA, 787 bp, Homo sapiens
  misc_feature (52)..(52): "n" may be a, t, c, g, other or unknown
  misc_feature (211)..(211): "n" may be a, t, c, g, other or unknown
  misc_feature (235)..(235): "n" may be a, t, c, g, other or unknown
  misc_feature (703)..(703): "n" may be a, t, c, g, other or unknown
  misc_feature (770)..(770): "n" may be a, t, c, g, other or unknown
  misc_feature (786)..(786): "n" may be a, t, c, g, other or unknown
aagccggagtctagagctccgggcgcggggaggcgcggccatggcagctccngagccgctgtccccggcgggcggtgcgggcgaggaggcgccggaggaggacgaggactaagcggaggccgaggaccctgagcggccgaatgcgggagcgggcggtggacgcagtggcggcggcggcagtagcgtcagcggaggaggcggcggcggcggngccggagcggggggctgcggcggncccgggggcgcgctcaccaggcgcgcggtcacactgcgggtgctcctcaaagacgcgctgctggagcctggcgccggggtgctgtccatctactacctggggaagaagttcctgggctacctgcagccagacggaaggatcatgtggcaggagaccggtcagaccttcaactcacccagcgcctgggccacccactgcaagaagctggtgaaccctgccaagaagtcgggctgtggctgggcctctgtcaagtacaaaggccagaaactggacaagtacaaggccacctggctccggctgcaccagctgcacacgcctgccacggctgctgatgagagcccagccagtgaaggggaggaggaggagttgctgatggaagaaaaggaggaggacgttctggcgggggtctcaacagaggacaagagtcggagaccactggggaagagccctttaaaaccttgccacccngaggccacaaccccagggaaaccggttggacaagcaaagaatcccgggtttccggtccgctaattgnatgcttgggcaagccnc

SEQ ID NO: 5419 - DNA, 791 bp, Homo sapiens
  misc_feature (740)..(740): "n" may be a, t, c, g, other or unknown
  misc_feature (743)..(743): "n" may be a, t, c, g, other or unknown
  misc_feature (760)..(760): "n" may be a, t, c, g, other or unknown
gtccggctccggcggcggcggtcggtgctgcgagagcggcggcggcggcgcgggtcggcagcgggagggcgcgcggccgagcggaggcggagtcggcgccgagaacatggctggaggcaaagctggaaaggacagtgggaaggccaaggctaaggcagtatctcgctcacagagagctgggctacagtttcctgtgggccgcatccacagacacttgaagactcgcaccacaagccatggaagggtgggtgccactgctgccgtgtacagtgctgcgattctggagtacctcactgcagaggtgctggagctggcaggtaatgcttctaaggatctcaaagtaaagcgtatcactccgcgtcacttgcagcttgcaatccgtggtgatgaagagttggattctcttatcaaggctaccatagctgggggtgagaagagaaggtgttcttagatcagaagatgccattgtattaggtgacggcaaggttttgctgatttagtggaacaagattctactgggatgtgtgctgagctgaaccaaggaactgcccgaatgtgctgaacaaggacatttgcttctcagatacgtgaattcaattttaagcaagattcttgatctgcttcagagcagctttgatttaaagtaatttcagagcacttttccttgcatgagtaattttctgaatgtataaaatattctatttatgttttgaccttttggataaactgtgttgctgcantgntggtccacactaccatnctaagtgaagacttaataagtctgaggatct

SEQ ID NO: 5420 - DNA, 841 bp, Homo sapiens
  misc_feature (686)..(686): "n" may be a, t, c, g, other or unknown
  misc_feature (808)..(808): "n" may be a, t, c, g, other or unknown
  misc_feature (816)..(816): "n" may be a, t, c, g, other or unknown
  misc_feature (823)..(823): "n" may be a, t, c, g, other or unknown
ttttcctgaccccaaccatcctgcccagtctccgcttccccgtcttgtacacccctaactcctgaggctcctccgaatcacgcgagtggaagcggagaagctcaagtggccgccatgtcagaggcttatttccgagtggagtcgggtgcgctggggcctgaggagaactttctttctttggacgacatcctgatgtcccacgagaagctgccggtgcgcacggagaccgccatgcctcgccttggcgctttcttcctggagcggagcgcaggcgccgagactgacaacgcggtcccacagacttttatcggacgttttcgccgcatcatggactcctcacagaatgcttacaacgaagacacttcagccctggtagccaggctagacgagatggagaggggcttatttcaaacagggcagaaaggactgaatgactttcagtgttgggagaaggggcaggcttctcagatcacagcttccaacctcgttcagaattacaagaagagaaaattcactgatatggaagactgaaagccggaagaacacagaatggctcctcacagacgtatccctccgtgtgtccttgataggagctggttgaccttgtacagaaccagaatcctgtcccatttcatggcttatttcctgtggccatagagaattatagggaactggacatgctggangatgtggtgtccctggctctgtgagtcttccaggacgtccaccctgctgacccacagccagccctttaacccaagacccatgggcaaggagaaatcaaagtccttctaataagaatcatgcntttaattntccagtnagtgcactggaatccttg

SEQ ID NO: 5421 - DNA, 834 bp, Homo sapiens
  misc_feature (239)..(239): "n" may be a, t, c, g, other or unknown
  misc_feature (374)..(374): "n" may be a, t, c, g, other or unknown
  misc_feature (400)..(400): "n" may be a, t, c, g, other or unknown
  misc_feature (430)..(430): "n" may be a, t, c, g, other or unknown
  misc_feature (476)..(476): "n" may be a, t, c, g, other or unknown
  misc_feature (773)..(773): "n" may be a, t, c, g, other or unknown
  misc_feature (801)..(801): "n" may be a, t, c, g, other or unknown
  misc_feature (834)..(834): "n" may be a, t, c, g, other or unknown
gatagtttatggaaagaatttgaaactccagagaaagcaaacaaaatagtaaagctaaaacattttgagaaatttcaggatacagcagaagcattagcagcattcacagctctgatggagggcaaaatcaataagcagctgaaaaaagttctgaagaaaatagtaaaagaagcccatgaaccgctggcagtagctgatgctaaactaggaggggtcataaaggaaaagctgaatctcanttgtatccatagtcctgttgttaatgaacttatgagaggaattcgttcacaaatggatggattaatccctggggtagaaccacgtgaaatggcagctatgtgtcttggattggctcacagcctgtctcgatatanattgaagtttagcgctgataaagtanacacaatgattgttcaggcaatttccttgntagatgacttggataaagaactaaacaactacattatgcgatgtanagaatggtatggctggcatttccctgaattaggaaaaattatttcagataatttaacatactgcaagtgtttacagaaagttggcgataggaagaactatgcctctgccaagctttctgagttgctgccagaagaagttgaagcagaagtgaaagcagctgcagagatatcaatgggaacagaggtttcagaagaagatatttgcaatattctgcatctttgcacccaggtgattgaaatctctgaatatcgaacccagctctatgaatatctacaaaatcgaatgatggccattgnacccaatggtacagtcaccggttggggnaattagttggaaccccggtttattgctcatgcn

SEQ ID NO: 5422 - DNA, 803 bp, Homo sapiens
  misc_feature (42)..(42): "n" may be a, t, c, g, other or unknown
  misc_feature (651)..(651): "n" may be a, t, c, g, other or unknown
  misc_feature (713)..(713): "n" may be a, t, c, g, other or unknown
  misc_feature (777)..(777): "n" may be a, t, c, g, other or unknown
  misc_feature (788)..(788): "n" may be a, t, c, g, other or unknown
acttccggtcgtgggccatgccgggggcgggcccggaaccgncacggctagaagaagtcttcacttcccaggagagccaaagcgtgtctggccctaggtgggaaaagaactggctgtgacctttgccctgacctggaagggcccagccttgggctgaatggcagcacccacgcccgcccgtccggtgctgacccacctgctggtggctctcttcggcatgggctcctgggctgcggtcaatgggatctgggtggagctacctgtggtggtcaaagagcttccagagggttggagcctcccctcttacgtctctgtgcttgtggctctggggaacctgggtctgctggtggtgaccctctggaggaggctggccccaggaaaggacgagcaggtccccatccgggtggtgcaggtgctgggcatggtgggcacagccctgctggcctctctgtggcaccatgtggccccagtggcaggacagttgcattctgtggccttcttagcactggcctttgtgctggcactggcatgctgtgcctcgaatgtcactttcctgcccttcttgagccacctgccacctcgcttcttacggtcattcttcctgggtcaaggcctgagtgccctgctgcctgcgtgctggccctagtgcanggtgtgggccgcctcagtgcccgcagcccccatcaacggacccctggcccccgctcgacttncttgagcgttttccgccagcaccttcttctggcactgactggccttcttggtcgcttcaactgnttgcctttcanggtcttctgctgctg

SEQ ID NO: 5423 - DNA, 790 bp, Homo sapiens
  misc_feature (739)..(739): "n" may be a, t, c, g, other or unknown
  misc_feature (760)..(760): "n" may be a, t, c, g, other or unknown
  misc_feature (770)..(770): "n" may be a, t, c, g, other or unknown
ctctgccagccccgggctgggaagaagcagctacctcggaggcagggcgcgcaggcgggcggcgatgagagggggcgcagccgcagccccgcgctggggagcccaccgctaaccctgcaccccacccacccctgcacaaaagagctggcgggcgctggccacgtcgccctgggtgaccttcctcggatgcagaatccgcccctgcgagcatcctcttcctcctaggctctgaaggcccggggagcgtgagcgatgcccagctgcacccgggcagggctcgcctttgtttgccagtaaggaggagaggctgtctcggctgcagaggggtcatccctgcttcaagccagtgcctcttcccagctcccatggggaccaccgaagccacgctccggatggaaaacgtggacgtgaaggaggaatggcaggacgaagatcttcccaggccactcccagaagagacgggggtggaactgcttggcagcccggtggaagacacatcctctcctcccaacacgctaaatttcaacggagcgcatcgtaagaggaagacgctggtggccccagagatcaacatttctctggatcagagtgaggggtccctgctgtccgatgacttcttggatacccctgatgacctggatattaacgtggatgacatcgagacccccgatgagaccgactcgctggagttcctggggaatggcaacgaactggagtgggaagacgacacccccgtggncaccggccaagaacatgcccngggaacaagngccggatctattttggggac

SEQ ID NO: 5424 - DNA, 753 bp, Homo sapiens
  misc_feature (708)..(708): "n" may be a, t, c, g, other or unknown
  misc_feature (739)..(739): "n" may be a, t, c, g, other or unknown
  misc_feature (744)..(744): "n" may be a, t, c, g, other or unknown
cctcgatcccctcgccgcggtcccatggaggaggaggcgagccgcagcgccgcggcgacgaacccagggagtcggcttacccgctggccgcctcctgacaagcaggagggatccgcggtggacccagggaagcggaggagcctggcggccaccccctcttcctcacttccctgtactctcatcgctctcggcctccgacacgaaaaggaagcaaatgagctgatggaagatctgtttgaaactttccaagatgagatgggattctccaacatggaagatgatggcccagaagaggaggagcgtgtggctgagcctcaagctaactttaacacccctcaagctctacggtttgaggaactactggccaacctactaaatgaacaacatcagatagcgaaggaactatttgaacagctgaagatgaagaaaccttcagccaaacagcagaaggaggtagagaaggttaaaccccagtgtaaggaagttcatcagaccctgattctggacccagcacaaaggaagagactccagcagcagatgcagcagcatgttcagctcttgacacaaatccaccttcttgccacctgcaaccccaatctcaatccggaggccagtagcaccaggatatgtcttaaagagctgggaacctttgctcaaagctccatcgcccttaccatcagtacaaccccaagtttcagacccttgttncaacccttgtaacttgatgggagctatgcanctgantgaagactt

SEQ ID NO: 5425 - DNA, 762 bp, Homo sapiens
  misc_feature (714)..(714): "n" may be a, t, c, g, other or unknown
  misc_feature (739)..(739): "n" may be a, t, c, g, other or unknown
  misc_feature (748)..(748): "n" may be a, t, c, g, other or unknown
aagagacgccgccgctgcccggatgttgcgatggctgatcgggggaggccgagaaccgcagggactggccgagaaatctcctttacagacaataggtgaagaacaaacccagaatccctacactgaactgctagtactgaaggctcatcatgatattgtacgatttctggtacagttagatgactacagatttgcatctgctggtgatgatggaattgtagttgtgtggaatgcccagacaggggaaaaacttttagaactgaatggacacactcaaaagataacagctattattacatttccttccttggaatcttgtgaagagaaaaatcaactcatcttgacagcctctgctgatagaacagttattgtgtgggatggtgatactaccagacaagttcagagaatatcatgcttccagtctactgtaaagtgtttaactgttcttcagagactagatgtttggctttctggtgggaatgacctgtgtgtgtggaaccgaaaattagatctcctgtgtaagactagccacctttctgatacaggtattagtgctttggttgaaatacctaagaactgtgttgtggcagcagttggcaaagaactgataattttcaggttggtagcacccacagaaggatcactagaatgggatattcttgaagttaagcgccttcttgatcaccaggataatattctctcattgattaatgncaatgatttgagttttggcaccggnttccacgtnggaaagctgatcat

SEQ ID NO: 5426 - DNA, 727 bp, Homo sapiens
  misc_feature (657)..(657): "n" may be a, t, c, g, other or unknown
  misc_feature (662)..(662): "n" may be a, t, c, g, other or unknown
  misc_feature (722)..(722): "n" may be a, t, c, g, other or unknown
aacacgattcctctggccaggccaaggggagggcgacactgacaggcgccccccacccaggggccgtggcgaagcaaggggccggctgctcagaaaaggataagaagtggtttctcctcccctcttcccttcctcatcctgcagcccgcgcctcccccctcgccgcgctgcgcacggatggcggcgggagccgcagagccaccatgttcagccagcagcagcagcagcagctccagcaacagcagcagcagctccagcagttacagcagcagcagctccagcagcagcaattgcagcagcagcagttactgcagctccagcagctgctccagcagtccccaccacaggccccgttgcccatggctgtcagccgggggctccccccgcagcagccacagcagccgcttctgaatctccagggcaccaactcagcctccctcctcaacggctccatgctgcagagagctttgcttttacagcagttgcaaggactggaccagtttgtaatgccaccagccacgtatgacactgccggtctcaccatgcccacagcaacactgggtaacctccgaggctatggcatggcatccccaggccttgcagcccccagcctacacccccacaactggccactccaaatttgcaacaagttctttncccangccacttgccagtccttggttgggaccttcttctgttgggggtccccatggaaccccttnccaag

SEQ ID NO: 5427 - DNA, 693 bp, Homo sapiens
  misc_feature (667)..(667): "n" may be a, t, c, g, other or unknown
  misc_feature (672)..(672): "n" may be a, t, c, g, other or unknown
  misc_feature (685)..(685): "n" may be a, t, c, g, other or unknown
tcaatgaagcccaagaagctgcatcaagtgataatattatggtccagtaccatgcattgggagtcctgtatcaccttagaaagaatgatcgacttgctgtttccaagatgttgaataagtttactaaatctggtctcaagtcacagtttgcttactgcatgctgatccgaattgccagtcgcttactaaaagaaactgaggatggccatgaaagtccactgtttgatttcattgagagctgcttgcgaaataaacatgaaatggttatttatgaagctgcttcagctatcatccatcttcctaactgcactgcaagagagttggcacctgctgtttcagttcttcagcttttctgtagttctcctaagccagccttgagatatgcagctgtgaggaccttgaacaaggtggcaatgaagcacccctctgctgttactgcctgcaatctggacttagaaaacttaatcacagactcaaacagaagcattgctaccttagccattactacactcctcaaaacaggaagtgagagcagtgtggaccggctcatgaagcagatatcttcttttgtgtctgaaatctcagatgagttcaaggtggtggttgtcaggcaattagtgctctctgtcagaaataccctcgaaagcccagtgtcatgatgactttnctctncacatgctcccanatgatgga

SEQ ID NO: 5428 - DNA, 781 bp, Homo sapiens
  misc_feature (711)..(711): "n" may be a, t, c, g, other or unknown
  misc_feature (744)..(744): "n" may be a, t, c, g, other or unknown
  misc_feature (757)..(757): "n" may be a, t, c, g, other or unknown
gtcacgtgctcgctgccgccgctgccgccgccgaagcggagaccggagccgcgagcgccaccagggcagcagccgccgcagccgccgccgctgggcagaggagccggagacgcgagcgggcgaggtggcggcggcggcggagcgggagcgggtaccgggcgcgggcagagcgcggcggcgcgggtgtgttccagagaacaagccttcagacatttgctatattgacgctgagctgtcaggggactcaggcttatgaggaggtattgttacacaaaacagtgtctagtgaagacgacaagaaagaggggaaaggatcggaaaaagaagctaaaatactatagaaaaccatgagatctattcgatcttttgctaatgatgatcgccatgttatggtgaaacattcaacaatctatccatctccggaggaacttgaagctgttcagaatatggtatctactgttgaatgtgctcttaaacatgtctcagattggttggatgaaacaaataaaggcacaaaaacagagggtgagacagaagtgaagaaagatgaggccggagaaaactattccaaggatcaaggtggtcggacattgtgtggtgtaatgaggattggcctggttgcaaaaggcttgctgattaaagatgatatggacttggagctgggtttaatgtgcaaagacaaacccacagagaccctgttaaatacagtcnaagataatcttcctattcagattcagaaactcncagaagagaaatntcaagtggaacaatgtgtaaatga

SEQ ID NO: 5429 - DNA, 817 bp, Homo sapiens
  misc_feature (687)..(687): "n" may be a, t, c, g, other or unknown
  misc_feature (789)..(789): "n" may be a, t, c, g, other or unknown
  misc_feature (799)..(800): "n" may be a, t, c, g, other or unknown
gggttggaagatggcgtctcccacagacgggacagatctggaagcatctttgctaagttttgaaaaacttgaccgtgcctcaccagatctttggccagaacaattaccaggtgttgctgaatttgcagcttccttcaaaagtcctattactagttctccacccaaatggatggctgagatagaacgtgatgacatcgacatgttgaaagaactggggagtctcaccacggctaatttgatggagaaggttcgaggcctacagaacctagcctatcagctggggctggatgagtccagagagatgacacgggggaaattcctcaatattctagagaagcccaagaagtagcagctgcttgcggacaggatgtcctggggtccgaaaccaagctcccttcccggtgcacctctaacaatgcacacctcactgcttgcttgggagaggccagagggtgtacctccaggactgccctctcccctgctcctggcactctacacgtctgaggacattcagcagcaagagaagaatctgctctacccaaggatcattgcagttactcaatcaactttcagacttgaaccttcttagcctcggatattggtaacagctgagggcatatcattcttaaaggtcgaagtcctgctttctcatttctggaagtgattcaggagccccaggatcttacnggtgatttgactcaatcatggcaagtcagttgtgacatgttgattggatgggtcttttgaatggtcttgactcttaaaaagggttaccatgtgaggagaccngagaccagtnnatttggaccaaaccttc

SEQ ID NO: 5430 - DNA, 649 bp, Homo sapiens
  misc_feature (614)..(614): "n" may be a, t, c, g, other or unknown
  misc_feature (626)..(626): "n" may be a, t, c, g, other or unknown
  misc_feature (643)..(643): "n" may be a, t, c, g, other or unknown
gagttgtggctgaggaccccggcggcagacgcaggttcgggaccatgagttggattccttttaagattgggcagcccaagaaacagattgtgcccaaaacagtggagagagactttgaaagggagtatggaaaacttcagcagctggaagagcagacccggaggctgcagaaagacatgaagaagagcaccgacgcagacctggccatgtcaaaatctgccgtgaagatatccttggacttactctccaatcccctctgtgagcaagaccaggaccttctgaacatggtgacggccctggacacggccatgaagcggatggatgccttcaatcaggaaaaggtgaaccagatccagaagactgtgatcgagcccttaaaaaagttcggcagtgtcttcccgagcctcaacatggctgtgaagaggcgggaacaggccttgcaggactacaggaggctgcaggccaaggtggagaagtatgaggaaaaggagaagacggggccagtgctggccaagctccaccaggcacgagaggagctgcggcctgtgcgggaggactttgaagccaagaacaggcagctgctggaggagatgccgcgcttctacggcagccgnctcgactacttncagcccagctttgagtnccttat

SEQ ID NO: 5431 - DNA, 828 bp, Homo sapiens
  misc_feature (813)..(813): "n" may be a, t, c, g, other or unknown
  misc_feature (820)..(820): "n" may be a, t, c, g, other or unknown
  misc_feature (828)..(828): "n" may be a, t, c, g, other or unknown
cagggccagtgaggcaaatagactatctgacatatttgactttatgaaaacatattgcctgatggcagaatcaactttataagtggtcaacttctacacaagcgtatgaaatactggtcagtagaacagccattgtgattggactggtttctctgcaatggcgccaaccccaggcttgccaatactgcctatgtaaagggcaagtgtgagaagctattctcatttcgctgacatacaggtaggactatgggggatgggacatttgagtgggactgagataggaaaggcttgaaaagaacccagaaacaccaccaggaagttggcaaagtaaaagaaaatgacttccccctcaaagggcaatgagagggagagaaacaaaccaaaatagaagaactagactttttagaaaatgagtattgctagggaattcaactacctaatcttcccttattcttatatataagcagagaatttttgcaaggtatttattttttaatatgccctgaatgtcttttgctattatgtgtacattttgcatatgaaagtctaaaacgaaacttcctttactttttatactgtagtgaaaattttctattcttcccaagaatgttgtcccaaatctgaaattactggttcaatttcctgatataaacatttacaattagaagctagatagtactggcagagtctgcaaatcagaacacttaaatatatcatggcagcaaaaagaccaagggaaacaaaatgaccaatgtatttatcagaaagcaagcaatgctgactgcttggtagaaacccctctagctatcttangtcccanaactttan

SEQ ID NO: 5432 - DNA, 486 bp, Homo sapiens
  misc_feature (459)..(459): "n" may be a, t, c, g, other or unknown
  misc_feature (461)..(461): "n" may be a, t, c, g, other or unknown
  misc_feature (478)..(478): "n" may be a, t, c, g, other or unknown
aagcaaaatccttttaaacacagaaatcctgagttcttctcattggtggactcaagcaattctgtagcaaataaatcctttgaaagagctccaaattggtggcattatcctttcaaaatctcagggatttgggatgaagtgaagaggtcaaattactttttagaagaagggaatctaaaaaccatctctcctaaacaaatggtagactggctttacttaagggatatttgtctttataggagtacataaatttatcttaatgatatttaagtagttttttttttttttttttgggacgaagttttgctcttgttgcccaggctgtatcgcaatggcgcggtctctgctcactgcagcatccgcctcccgggttcgggcggttctcctgcctcagcctcccgagtagctgggattacaggcgcccgccaccacacccagctaattttttgtatatttggnanagacggggtttcaccgngttgacca

SEQ ID NO: 5433 - DNA, 651 bp, Homo sapiens
  misc_feature (208)..(208): "n" may be a, t, c, g, other or unknown
  misc_feature (363)..(363): "n" may be a, t, c, g, other or unknown
  misc_feature (571)..(571): "n" may be a, t, c, g, other or unknown
  misc_feature (582)..(582): "n" may be a, t, c, g, other or unknown
  misc_feature (651)..(651): "n" may be a, t, c, g, other or unknown
gcgcgccgctttctgttgccgggcgcaatggcggatacgctggagtcctcgctggaggacccactgcggagctttgtgcgagttttggagaagcgggatggtacagtgctacgactacagcagtatagctccggtggcgtgggttgcgttgtgtgggactctgccattgtcctttctaaatacctggaaacgcccgagttttctggcnacggggcccacgcgctgagccggcggtcggtgctggagctgggttcgggcaccggggccgtggggctcatggctgctaccctcggggctgatgttgtagtcaccgatcttgaggaattgcaagacttgctgaagatgaatattaatatgaacaancatcttgtcactggttctgttcaagccaaggggggaagaaatagaaggctttccttctccacccgacttcatactgatggccgactgcatatactatgaagagtctttggagccattgctgaaaactctaaaagatatcagcggatttgaaacttgtattatatgttgttatgaacaacgaacaatggggaaaaattcagaaattganaaaaaatattntgagctccttcagctagattttgactttgaaaaaattcctttggaaaaacgtgatgaagagtatcgaan

SEQ ID NO: 5434 - DNA, 704 bp, Homo sapiens
  misc_feature (452)..(452): "n" may be a, t, c, g, other or unknown
  misc_feature (660)..(660): "n" may be a, t, c, g, other or unknown
  misc_feature (671)..(671): "n" may be a, t, c, g, other or unknown
  misc_feature (680)..(680): "n" may be a, t, c, g, other or unknown
aaaatggcggcggcggcgacggccgggcgctcctgaagcagcagttatggagcttccctcagggccggggccggagcggctctttgactcgcaccggcttccgggtgactgcttcctactgctcgtgctgctgctctacgcgccagtcgggttctgcctcctcgtcctgcgcctgtttctcgggatccacgtcttcctggtcagctgcgcgctgccagacagcgtccttcgcagattcgtagtgcggaccatgtgtgcggtgctagggctcgtggcccggcaggaggactccggactccgggatcacagtgtcagggtcctcatttccaaccatgtgacacctttcgaccacaacatagtcaatttgcttaccacctgtagcacccctctactcaatagtccccccagctttgtgtgctggtctcggggcttcatggagatgaatgggcggngggagttggtggagtcactcaagagattctgtgcttccacgaggcttccccccactcctctgctgctattccctgaggaagaggccaccaatggccgggaggggctcctgcgcttcagttcctggccattttctatccaagatgtggtacaacctcttaccctgcaagttcagagacccctggtctctgtgacggtgtcagatgcctnctgggtctcanaactgctgnggtcacttttcggccctttcacgg

SEQ ID NO: 5435 - DNA, 857 bp, Homo sapiens
  misc_feature (589)..(589): "n" may be a, t, c, g, other or unknown
  misc_feature (750)..(750): "n" may be a, t, c, g, other or unknown
  misc_feature (818)..(818): "n" may be a, t, c, g, other or unknown
  misc_feature (821)..(821): "n" may be a, t, c, g, other or unknown
  misc_feature (856)..(856): "n" may be a, t, c, g, other or unknown
gtgacagatggcacagaaaccgctgcgcctcttggcttgtggagatgttgaaggaaagtttgatattttattcaatagagttcaagcaattcagaagaaaagtggaaactttgatctgctgttgtgtgtaggaaatttctttggctccacccaagatgctgaatgggaggagtataagactggcatcaagaaagggagaagtggataccaaaaaatgtggttctgctttggtttccagtcttgccacgggcttgaaaccaagataccattttgctgctttggaaaagacctattatgagaggcttccatatcgaaaccatatcattctacaggaaaatgcacagcatgccacccggtttatagctctggcaaatgttggaaatccagaaaagaaaaagtatctttacgcgttcagtattgttcccatgaagctaatggatgcagcagaactggtaaaacagcctccggatgtcactgaaaacccttacagaaaatctgggcaggaagcatccataggaaagcaaattcttgcccctgtggaagaatcagcctgtcagtttttctttgatttaaatgaaaagcagggaangaagcgttcatccacaggtagagatagcaaatcttctcctcatccaaagcagcctcgcaaacctccctccaggaccctgctggttttgccttgctagccctgaagtggaaaaacatttggtggtcaacatcggcacacattgctaccttgccctgccaaangagcttatctgatgaccatgtcctcatcctgcctattggacctacccagtcagtggtggaactttcancanaagtggtagaagaagtggagaaatttaaggccctnt

SEQ ID NO: 5436 - DNA, 498 bp, Homo sapiens
  misc_feature (485)..(485): "n" may be a, t, c, g, other or unknown
  misc_feature (489)..(489): "n" may be a, t, c, g, other or unknown
  misc_feature (493)..(493): "n" may be a, t, c, g, other or unknown
tggcttgtgtatctgtattcaacaagaataacgtttttgtgggggattagagtcgggagagtgagtgtggttttctccagagtgggagttaaccagtatgtaggaggaagggtgtttcagggccatagatgtgtcctgctataacttcgtagtcctggatgctgtaataaggcctcctgcagaccttcgttctattccacagctgcccggggtgtttataaaagtgcaacttcaaggtttattccagagctaaagtcagaaaaacttttggcccttctctgtatctcagcacttgcaaggctgtcctggtccaaggtagagagtgtgcaactgaaaatagggacgctgtggactttctgggccaagttccccgtctagatgtgttgggcgcctttctttttttttttttttttttttgagacactttcgctctgttgcccactctggttgcaatgagctgagattgcaccactgcactctaaccngggngacncagca

SEQ ID NO: 5437 - DNA, 829 bp, Homo sapiens
  misc_feature (692)..(692): "n" may be a, t, c, g, other or unknown
  misc_feature (754)..(754): "n" may be a, t, c, g, other or unknown
  misc_feature (791)..(791): "n" may be a, t, c, g, other or unknown
  misc_feature (806)..(806): "n" may be a, t, c, g, other or unknown
agtctgaggaacataatgacaaagaacattcttctgataaaggaagagagcgactaaattcatctgaaaatggtgaggacaggcacaaacgcaaagaaagaaagtcatcaagaggcagaagtcactcaagatctaggtctcgtgaaagacgccatcgtagtagaagcagggagcggaagaagtctcgatccaggagtagggagcggaagaaatcgagatccagaagcagagagaggaagaaatcgagatccagaagcagggaaagaaaacggcggatcaggtctcgttcccgctcaagatcaagacacaggcataggactagaagcaggagtaggacaaggagtaggagtcgagatagaaagaagagaattgaaaagccgagaagatttagcagaagtttaagccggactccaagtccacctcccttcagaggcagaaacacagcaatggatgcacaggaagctttagctagaaggttggaaagggcaaagaaattacaagaacagcgagaaaaggaaatggttgaaaaacaaaaacaacaagaaatagctgcagctgcagctactggaggttctgttctcaatgttgctgccctgttggcatcaggaacacaagtaacacctcagatagccatggcagctcagatggcagccctgcaagctaaagctttggcagagacaggaatagctgtnctagctactatacccagcccgctgttaatccaatgaaatttgcttgaacaagagaaaaaaanggaaaatgctttggcagggccaggaaagaaaggggancaaatcccaatctgnttgaaattttgggaaaaaatgga

SEQ ID NO: 5438 - DNA, 735 bp, Homo sapiens
  misc_feature (644)..(644): "n" may be a, t, c, g, other or unknown
  misc_feature (657)..(657): "n" may be a, t, c, g, other or unknown
  misc_feature (731)..(731): "n" may be a, t, c, g, other or unknown
gcggagagcgcgggccgttttctttcctggtgtcccgtcgcggcttgggacccggcaagatgggcaagaagggcaagaaggagaagaagggccgcggcgcggagaagacggccgccaagatggagaagaaggtgtctaagcgctcgcggaaggaggaggaagacctggaagcgctcatagcccatttccagacactcgatgccaagaggactcagactgtggaacttccgtgccccccaccctcaccaaggttaaatgcctccctctcggttcatcctgagaaagatgagttaatcctttttggaggtggatatttcaacggccaaaaaacttttttgtataacgagctctatgtctacaataccagaaaggacacctggaccaaagttgacatacccagtccacctccgaggcgctgtgctcaccaggcggtggtagtgcctcaaggtggcggacagctgtgggtctttggaggggagtttgcctctcccaacggagagcagttctaccactacaaggatctctgggtcctgcatttggccaccaagacctgggaacaagtcaaatcaacaggcggtccttcgggtcggagtggacatcggatggtggcctggaagagacaattgatcctgtttggtggcttncatgaaagtcacnggattacatctactacaacgacgtgtatgcctttaatctggacaccttcacatggagcaagctgtccccgtcanggac

SEQ ID NO: 5439 - DNA, 782 bp, Homo sapiens
  misc_feature (621)..(621): "n" may be a, t, c, g, other or unknown
  misc_feature (742)..(742): "n" may be a, t, c, g, other or unknown
  misc_feature (745)..(745): "n" may be a, t, c, g, other or unknown
  misc_feature (770)..(770): "n" may be a, t, c, g, other or unknown
gtggttaggcggctccccggcggctcctccgcggcggtgacggcgaccgcactccccgcttcccgctccccgcgctcctccgcccgggtccgccagccgaggccgctcccgagcgtcggaagatgccggccgtgtccaagggggacgggatgcggggcctggcggtcttcatctcggatacccgcaactgtaaaagtaaagaagcagaaataaaaaggataaacaaggaactggcaaatatcagatcaaaatttaaaggtgacaaggctcttgatggctatagtaaaaaaaagtacgtctgcaagttgctcttcatctttctccttggtcatgacattgactttggacacatggaggctgtgaacctgctgagttcaaacagatacacggaaaagcagatcggctaccttttcatctctgtgttggtgaactcaaacagtgagctgatccgcctgatcaacaacgccatcaagaatgacctggccagccgcaaccccaccttcatgggcctggccctgcactgcatcgccagcgtgggcagccgggagatggccgaggccttcgccggggagatccctaaggtcctcgtagcccggagacactatggacagcgtgaagcanagcgcggccctgtgcttgctgcgcctgtacaggacgtccccgatcttgtccccatgggccaactggacattccgagtggtgcacctgctcaatgaccagcacttgggtgtggtaactgcanccncaagtctgatcacccacttttagcncagaagaacccc

SEQ ID NO: 5440 - DNA, 660 bp, Homo sapiens
  misc_feature (579)..(579): "n" may be a, t, c, g, other or unknown
  misc_feature (604)..(604): "n" may be a, t, c, g, other or unknown
  misc_feature (645)..(645): "n" may be a, t, c, g, other or unknown
agtgcagctttcagagggtccgggctcagaggggctatgattcggagggttctgccgcacggcatgggccggggcctcttgacccggaggccaggcacgcgcagaggaggcttttctctggactgggatggaaaggtgtctgagattaagaagaagatcaagtcgatcctgcctggaaggtcctgtgatctactgcaagacaccagccacctgcctcccgagcactcggatgtggtgatcgtgggaggtggggtgcttggcttgtctgtggcctattggctgaagaagctggagagcagacgaggtgctattcgagtgctagtggtggaacgggaccacacgtattcacaggcctccactgggctctcagtaggtgggatttgtcagcagttctcattgcctgagaacatccagctctccctcttttcagccagctttctacggaacatcaatgagtacctggccgtagtcgatgctcctcccctggacctccggttcaacccctcgggctacctcttgctggcttcagaaaaggatgctgcagccatggagagcaacgtgaaagtgcagaggcagganggagccaaagtttctctgatgtctnctgatcagcttcggaacaagtttccctggataaacacaganggagtggctttggcg

SEQ ID NO: 5441 - DNA, 796 bp, Homo sapiens
  misc_feature (682)..(682): "n" may be a, t, c, g, other or unknown
  misc_feature (768)..(768): "n" may be a, t, c, g, other or unknown
  misc_feature (784)..(784): "n" may be a, t, c, g, other or unknown
  misc_feature (795)..(795): "n" may be a, t, c, g, other or unknown
ctcaggtgcttgcgaggtgatcagaaggcaaagatgtcggagcgaaaagtattaaacaaatactacccgccggactttgacccatcaaagatccccaaactcaagctccccaaagaccggcagtacgtggtgcggctgatggcccccttcaacatgaggtgtaagacgtgcggagaatacatctacaaggggaagaaattcaatgctcggaaggagacggtgcagaacgaggtctacctgggcctgcccatcttccgcttttacatcaagtgcacgcgctgcctggcagagatcaccttcaagacagaccctgaaaacacagactacaccatggagcatggagccacgcggaatttccaggctgagaagctcctggaggaggaggagaagagggtgcagaaggagcgggaggacgaggagctgaacaaccccatgaaggtgctggagaaccggaccaaggactccaagctggagatggaggtgctggagaacctccaggagctgaaagacctgaaccagcggcaggcgcacgtggacttcgaggctatgctgaggcagcaccgcctgtcggaggaggagcggcggaggcagcagcaggaggaggacgagcaggagaccgcggccctgttggaggaagccagaaagcgaagactgctggaggacttccgactcagaggatgangctgctccctcgccccttgcaagcccagcccttttgggcccaaccccaccggcattcctggattgaagccccaaaagccccaaganggaaaggtggaaggtnccgggaaccana

SEQ ID NO: 5442 - DNA, 640 bp, Homo sapiens
  misc_feature (592)..(592): "n" may be a, t, c, g, other or unknown
  misc_feature (615)..(615): "n" may be a, t, c, g, other or unknown
  misc_feature (631)..(631): "n" may be a, t, c, g, other or unknown
ctactgggagaggctcctgctaggctcaggcagtgggcaagccagcgtcagcctgcgactgacctccccgcttaggcctcccgagggcgtccggcttagggaaaagacactcacagagcatgcgttgctggggaggcagcccaggacgcctgagcggcagaaaccatgtgcacaggaggtccctgggagaacctttgggagcgcccaggacctggaggctgccggcggtcggggacatcaccgaatgggtgcagtttggcaggagcctcatagtctcctcggtggccaggagccctcgacctgggacgagctgggcgaggctcttcacgctggggagatgtccttcgaatgcagggcgtgcagcaaagtgttcgtgaagagctccgacctcctcaagcacctacgcacccacaccggggagcggccctacgagtgcgcccagtgcggcaaggccttcagccagacgtcgcacttgacgcagcaccagcgcatccacagcggcgagacgccctacgcgtgccccgtgtgcggcaaggccttccggcatagctcctcctggtgcggcaccagcgcatccacacggccgagaagncctttcgctgctccgagtgcggnaaggcttcaccacggntcaacctca

SEQ ID NO: 5443 - DNA, 903 bp, Homo sapiens
  misc_feature (725)..(725): "n" may be a, t, c, g, other or unknown
  misc_feature (789)..(789): "n" may be a, t, c, g, other or unknown
  misc_feature (843)..(843): "n" may be a, t, c, g, other or unknown
  misc_feature (864)..(864): "n" may be a, t, c, g, other or unknown
  misc_feature (903)..(903): "n" may be a, t, c, g, other or unknown
atgcaaataaccgtttgctgctcacaggcacacctgtacagaacaatctgttagaactcatgtcgctgttgaattttgttatgccacacatgtttagtagtagcaccagtgaaatacgaagaatgttttcctctaagacaaaatcagcagatgagcaaagcatatatgaaaaggagagaatagcacatgcaaaacaaattataaagccatttattctcagaagagtaaaagaagaggttctcaagcagttaccccccaagaaagatcgaattgagttgtgtgcaatgtcggagaagcaggagcaactctatttgggtcttttcaacagattgaaaaaatctatcaataacttggtcacagaaaaaaacacagaaatgtgcaatgtcatgatgcagttgaggaaaatggccaatcatcctttattacatcgccaatattacacagctgaaaaactcaaggaaatgtctcagcttatgctaaaggaacctacacattgtgaggctaaccctgacctgatctttgaagatatggaagttatgacagacttcgaactacatgtactttgtaaacagtaccgacacattaataactttcagttagacatggacttgattttagattctggaaaatttcgagttttaggatgcatcttgtctgaattgaaacagaagggtgatagagttgtgttatttagccaatttaccatgatgctggatatcttagangttctattaaaacatcatcagcataggtacctcagattagatggaaagactcagattctgaaanggattcatctaattgatgagtttaataccgatatggatatctttggggttctgntttcaacaaaagctggtggantaggaatagactgacttcagccaaaggtggtatacttcn

SEQ ID NO: 5444 - DNA, 845 bp, Homo sapiens
  misc_feature (676)..(676): "n" may be a, t, c, g, other or unknown
  misc_feature (717)..(717): "n" may be a, t, c, g, other or unknown
  misc_feature (728)..(728): "n" may be a, t, c, g, other or unknown
  misc_feature (799)..(799): "n" may be a, t, c, g, other or unknown
  misc_feature (828)..(828): "n" may be a, t, c, g, other or unknown
  misc_feature (833)..(833): "n" may be a, t, c, g, other or unknown
atggacgcctgggtccgcttcagtgctcagagccaagcccgggagcggctgtgtagggccgcccagtatgcttgctctcttcttggccatgcgctgcagaggcatggagccagtcctgagttacagaaacagattcgacaactggagagccacctgagccttggaagaaagcttctacgcctgggtaactcagcagatgcccttgagtcagccaaaagagctgttcacctatcagatgttgtcctgagattctgcatcactgttagtcacctcaatcgagccttgtacttcgcctgtgacaatgtcctgtgggctggaaagtctggactggctccccgtgtggatcaggagaagtgggcccagcgttcattcaggtactatttgttttccctcatcatgaatttgagccgtgatgcttatgagattcgcctactgatggagcaagagtcttctgcttgtagccggcgactgaaaggttctggaggaggagtcccaggaggaagtgaaactgggggacttgggggaccagggactccaggaggaggtctgccccaactggctctgaaacttcggctgcaagtcctgctcctggctcgagtccttagaggtcatcccccacttctgctagacgtggtcagaaatgcctgtgatctcttcattcctctggacaaactangcctctggcgctgtggccctgggattgtggggctttgtggnctcgtgtcctncatcctgctattctaccctaatctatccctggctacgactcaagccctgactttcggtacaggataaggangggacctgaattgtgaaatggaatcttanatcgnccccatgtgcca

SEQ ID NO: 5445 - DNA, 856 bp, Homo sapiens
  misc_feature (682)..(682): "n" may be a, t, c, g, other or unknown
  misc_feature (797)..(797): "n" may be a, t, c, g, other or unknown
  misc_feature (800)..(800): "n" may be a, t, c, g, other or unknown
  misc_feature (844)..(844): "n" may be a, t, c, g, other or unknown
gtgtatgaacgcagcggcggacctgtgaggggatccgacttgccggcagaacttacgctgcgggaccccgggcactgttgctgctgcgggagactgtgggctgtttagtgccatgcaccctttacagtgtgtcctccaagtgcagaggtctctggggtggggaccattggcctctgtgtcttggctgtcgctgaggatgtgcagggcacacagcagtctctctagtaccatgtgtcccagtccagagaggcaggaggatggagctcggaaggatttcagctccaggctggctgctggaccgacttttcaacattttttaaaaagtgcctcagctcctcaggagaagctgtcttcagaagtggaagacccacctccctatctcatgatggatgaacttcttggaaggcagagaaaagtctacctcgagacctatggctgccagatgaatgtgaatgacacagagatagcctggtccatcttacagaagagtggctacctgcggaccagtaacctccaagaggcagatgtgattctccttgtcacgtgctctatcagggagaaggctgagcagaccatctggaaccgtttacatcagcttaaagccttgaagacaaggcggccccgctcccgggttcctctgaggattggaattctaggctgcatggctgagaggttgaaggangagattctcaacagagagaaaatggtagatattttggctggcctgatgcctaccgggaccttccccggctgctgctgttgctgaatcggccagcaagctgccaacgtgctgtctnttntggacgagactatgctgatgtcatgccagtccaaacaaccccantgccacgttctg

SEQ ID NO: 5446 - DNA, 713 bp, Homo sapiens
  misc_feature (647)..(647): "n" may be a, t, c, g, other or unknown
  misc_feature (649)..(649): "n" may be a, t, c, g, other or unknown
  misc_feature (674)..(674): "n" may be a, t, c, g, other or unknown
ataacccctcattgttcgcagctgatgtcactcgcagttgtgagcggccgcctctcccggggacaatgtgggactgagcggcccagccgccgtgccgccgccgccgccgccgcaggacagccccagcgagagccggccaggttgcagcgcggacacactcgcaggtcgctgtggccccagcctcgcctgacagaatgagcggctcggacgggggactggaggaggagccagagctcagcatcaccctcacgctgcggatgctgatgcacgggaaggaagtgggcagcatcatcgggaagaagggcgagactgtaaagcgaatccgggagcagagcagtgcccggatcaccatctccgagggctcctgccctgaacgcatcaccaccatcaccgggtctacagcagctgtcttccatgcagtctccatgattgctttcaaactggatgaggacctttgtgctgctcctgcaaatggtggaaatgtctccaggcctccagtgaccctgcgccttgtcatccctgccagtcagtgtggctcactgattgggaaggctggcaccaagatcaaggagatccgagagactacgggtgcccaggtacaggtggcaggggacctgctccccaactccacagagcgagctgttacngnatctggggtgcctgatgccatcatnctgtgtgtgcgccagatcttgcgctggtattcctggagt

SEQ ID NO: 5447 - DNA, 794 bp, Homo sapiens
  misc_feature (701)..(701): "n" may be a, t, c, g, other or unknown
  misc_feature (762)..(762): "n" may be a, t, c, g, other or unknown
  misc_feature (783)..(783): "n" may be a, t, c, g, other or unknown
agcacacagctgagccctgcagatctcacagaagggaaacccacagatccctctaagctggaaagtccgtcattcacaggaactggtgacacagaaatagctcatgcaactgaggatttagagaataatggcagtaagaaagatggcgtgtgtggtcctcctccatcaaagaaaatgaagttatttggatttaaagaagatccatttgtatttattcctgaagatgacccattatttccacctattgagaaattttatgctttggatccttcattcccaaggatgaatttgttaactcggactacagaagggaagaaaaggcagctctacatggtttctaaggagttgcggaatgtgctgctgaataacagtgagaagatgaaggttattaacacagggatcaaagtctggtgtagaaataacagcgatgaagagtttgactgtgctttccggctggcacaggagggaatatatacattgtatccatttattaactcaagaattattactgtatcaatggaagatgttaagatactgttgacccaggaaaatcccttttttagaaaactcagcagtgagacctacagtcaagcaaaggacctggcaaagggaagcatcgtgctgaagtatgaaccagattctgcgaatccagacgctctgcagtgtcccatcgtcttatgcggatggcggggaaaggcctncattcgaacttttgtgcccaagaatgaacggcttcattatctcaggatgatggggctggangtattgggagaaaagaagaanggaaggggtat

SEQ ID NO: 5448 - DNA, 815 bp, Homo sapiens
  misc_feature (718)..(718): "n" may be a, t, c, g, other or unknown
  misc_feature (721)..(721): "n" may be a, t, c, g, other or unknown
  misc_feature (787)..(787): "n" may be a, t, c, g, other or unknown
aaaaaaaaaaacacaggcttgatgctcgctcccgtttctacaggaggttttgacggctggatgctgcagggcatcccctcgcctggaggaggttcacttgtggccaggttcccagcacacccacttgctcactggggccctggggacaccgccacactcgagcccatcctacggcctcaatccttaccagtccccaggccatggactgccacactgtaggtcttcaatcaaggtttagtggagtttcgaatgtacacacaccctgaaagacagcgaggccacctcagaaaacaacgcgcgcccagctggctcccctccgacagggcccacggctactgggtcggcctcctccggaccctgagcacagcctggtatgcgtgcgggctcggaatacggatctgagcagaagaaatgcgagtggagagcggttctgcgcaggaaagaggaattttgttggaaagcctgtcgacgttgctagaaaagaccacagcatctcacgaggggcgtgcgccgggaaaccgggagttgacggacctcctgccccccgaggtctgcagtctcctgaacccagcagccatctacgccaacaacgagatcagcctgcgtgacgttgaggtctacggctttgactacgactacaccctgcccagtatgcagacgcactgaccccgagatcttaataccgccgtgaatcctgatcgaacactacaagtcccanaanggattcggaagtatgactacaaccccagctttgccatccggggccttcactatgacattcagaaanagccttttgatgaaaaatggacgccctt

SEQ ID NO: 5449 - DNA, 847 bp, Homo sapiens
  misc_feature (766)..(766): "n" may be a, t, c, g, other or unknown
  misc_feature (803)..(803): "n" may be a, t, c, g, other or unknown
  misc_feature (812)..(812): "n" may be a, t, c, g, other or unknown
taatccacacctactactcaatacctcagaaaatcttcgcttccctaataatgttgaaccagttacaaatcattttattacacagtggcttaatgatgttgactgtttcttggggcttcatgacagaaagatgtgtgttctcggactctgtgctcttattgatatggaacagataccccaagttttaaatcaggtttctggacagattttgccggcttttatccttttatttaacggattgaaaagagcatatgcctgccatgcagaacatgagaatgacagtgatgatgatgatgaagctgaagatgatgatgaaaccgaggaactggggagtgatgaagatgatattgatgaagatgggcaagaatatttggagattctggctaagcaggctggtgaagatggagatgatgaagattgggaagaagatgatgctgaagagactgctctggaaggctattccacaatcattgatgatgaagataaccctgttgatgagtatcagatatttaaagctatctttcaaactattcaaaatcgtaatcctgtgtggtatcaggcgctgactcacggtcttaatgaagaacaaagaaaacagttacaggacatagcaactctggctgatcaaagaagagcagcccatgaatccaaaatgattgagaacatggaggatacaaattcagtgctccagttgtgccaagttctttcaattttggaggcccacacccagggatgaattgagttatctctttctttcctgctgggngccttgtagtgaaaaagctggggtccctcctaatagngggttccanaactgggtcatggtatctattctaaactaataatc

SEQ ID NO: 5450 - DNA, 721 bp, Homo sapiens
  misc_feature (658)..(658): "n" may be a, t, c, g, other or unknown
  misc_feature (677)..(677): "n" may be a, t, c, g, other or unknown
  misc_feature (707)..(707): "n" may be a, t, c, g, other or unknown
gtgggttgggtagtgcgggttggggcgggggctgcggagagggtgcttaactgaggggcatgatgggggaggcggccgtggccgcggggccttgtccgttgcgcgaggacagcttcacgcgcttctcgtcgcagagcaatgtgtacgggctggcaggcggcgccggcgggcgcggggagctgctggccgccacccttaaaggcaaggtgctcggcttccgctaccaagacctccgacagaaaatccggccagtggccaaggagctgcagttcaactacattcccgtggatgcggagattgtctccatcgacactttcaacaagtcaccccccaagcggggtctggttgtggggatcacgttcatcaaggattcaggggacaagggcagccccttcctgaacatttactgcgactacgagcccggctctgagtacaaccttgactctattgcccagagctgcctgaacctggagctccagttcactccgttccagctgtgccatgcggaggtccaggtcggggatcaacttgagactgtgtttctcttgagtgggaacgacccggccattcatctctacaaggagaacgaggggctgcatcagtttgaggaacagcccgtggaaaacctcttcccagagctgacgaacctgaccagtancgtcctctggcttgacgtncacaactttcccggcacgtcccggcgcctntcactcttggcttg

SEQ ID NO: 5451 - DNA, 807 bp, Homo sapiens
  misc_feature (712)..(712): "n" may be a, t, c, g, other or unknown
  misc_feature (740)..(740): "n" may be a, t, c, g, other or unknown
  misc_feature (798)..(798): "n" may be a, t, c, g, other or unknown
gtaaccgaaccctgagccgcctgcgcggatcggcgtccgcagcgggcggctgctgagctgccttgaggtgcagtgttggggatccagagccatgtcggacctgctactactgggcctgattgggggcctgactctcttactgctgctgacgctgctggcctttgccgggtactcagggctactggctggggtggaagtgagtgctgggtcaccccccatccgcaacgtcactgtggcctacaagttccacatggggctctatggtgagactgggcggcttttcactgagagctgcagcatctctcccaagctccgctccatcgctgtctactatgacaacccccacatggtgccccctgataagtgccgatgtgccgtgggcagcatcctgagtgaaggtgaggaatcgccctcccctgagctcatcgacctctaccagaaatttggcttcaaggtgttctccttcccggcacccagccatgtggtgacagccaccttcccctacaccaccattctgtccatctggctggctacccgccgtgtccatcctgccttggacacctacatcaaggagcggaagctgtgtgcctatcctcggctggagatctaccaggaagaccagatccatttcatgtgcccactggcacggcagggggacttctatgtgcctgagatgaaggagacagaatggaaatggcgggggcttgtggangccattgacacccaagtggatggcacangaactgacacaatgagtgacaccaattcttgtaaccttggaaatgaacccctggcaanccgggaaac

SEQ ID NO: 5452 - DNA, 737 bp, Homo sapiens
  misc_feature (714)..(714): "n" may be a, t, c, g, other or unknown
  misc_feature (721)..(721): "n" may be a, t, c, g, other or unknown
  misc_feature (736)..(736): "n" may be a, t, c, g, other or unknown
tgaaagcactagtggcttgccagattgtcctaccagacccaggtattgcaggctttactgtcattgactacttccatcaacttttgcagacttttaatttcaggaaacttcagtgtgactctcaggcacctaacaatcacttacttgctttagatcactcaaatagtgatctcagcagcatatatacttctgacagcacttctgattttttcaagtcctgcagcaaggatactttttcaaaattctggcagccatcacttgaattcacttgcattgtttcacaactaacagataatgatgatttttcagcttcagaacaaagtaaggcctctggtactcttcagcagaacagaaagtccatctccattgcagaggccactggttccagtagctgccatgatcccattcaggattcatggagccttgtttcatatatggataaaaagagtacagcagaaaagttgggtaaagaacttggcttacaagctaaggagctgagtgcagttcacagcagtcatcatgaaattggagttaatgactctaatttattctctttggaaatgcgagagccccttgagtcaagtaatacaaaatccttccacagtgcagtggaaattaaaaataggtcccagcatgagctaccatgttttcagcatcatggtatagataccccaactagccttcagaagagatctgcatgttggccaccttcgntacttanacttgaagagacagnc

SEQ ID NO: 5453 - DNA, 720 bp, Homo sapiens
  misc_feature (687)..(687): "n" may be a, t, c, g, other or unknown
  misc_feature (697)..(697): "n" may be a, t, c, g, other or unknown
  misc_feature (718)..(718): "n" may be a, t, c, g, other or unknown
tatgctttaactggacagaagaaatatttctcagacaatgtcgatgctgctgatgacaactgagatgcctggagctcacccttgatggagacttccttggtgattggagatgggggactctggtggcagaaatggctttggggtaggtgtgaagtcgcttcagtccctctgagttgcctcttctggatggaacgtgtgtatcaacaacaatgaaatgcacctccgtgtgcatggaggcggctgatgagaatacagataggccagtcctcgctcttccctccagaaccggccgctcccggtctgacgttggagcacgtgaactaagagtgacaattttttctacttgcttctgtgaataaagtgttctacagtcagcccagcactaaactcaccagaaaagaggagggaacagcacggagccattcatctggaattactcgatgtgcagaggctgccccttggccgcacttgggaacatcgtggacatcttccttcctctcaggctcctcctgacagactcctggcagcactggagacctcaggactatggagatcagaattgtaatggctttgtcatctcagtgtggccactcctgaggcaagaggctcctcctgggagcaggagagagagagtttgtgatgttggttggaaaataggatttatggatgcaggaaggcccgtgctangcccctctgnccgcttctctccctgctggtngc

SEQ ID NO: 5454 - DNA, 805 bp, Homo sapiens
  misc_feature (766)..(766): "n" may be a, t, c, g, other or unknown
  misc_feature (779)..(779): "n" may be a, t, c, g, other or unknown
  misc_feature (781)..(781): "n" may be a, t, c, g, other or unknown
agcggccgcacgccgcggagcaggggctcggaggtcccgggattacggtgctcgagcacgctggtgggaaaggacccgggacttgaacagtgttgtgcggcgccatgcaggtctccagcctcaatgaggtgaagatttacagcctcagctgcggcaagtcccttcctgagtggctttctgataggaagaagagagcgctacagaagaaagatgtagatgtccgtaggagaattgaacttattcaggactttgaaatgcctactgtgtgtaccactattaaggtgtcaaaagatggacagtacattttagcaactggaacatataaacctcgggttcgatgttatgacacctatcaattatccttgaagtttgaaaggtgtttagattcagaagttgtcacctttgaaattttgtctgatgactactcaaagttctgaagtttataggttaaacttagaacaaggacgatacctgaatcctctacaaactgatgctgcggagaataatgtttgtgacataaattcagtgcatggcttgtttgccacaggaaccatagagggtagagtggagtgctgggacccaagaactcgaaacagagttggcctgttagactgcgccttaaacagtgtcacagcagattcagagataaacagtttaccaacaatctctgctttgaaatttaatggtgccttgaccatggcagttggaacaaccacagggcaggttttattatatgaccttcgatctgataagccattgctagttnaagatcaccagtntnggctggccattaagtccgtcattt

SEQ ID NO: 5455 - DNA, 765 bp, Homo sapiens
  misc_feature (651)..(651): "n" may be a, t, c, g, other or unknown
  misc_feature (720)..(720): "n" may be a, t, c, g, other or unknown
  misc_feature (740)..(740): "n" may be a, t, c, g, other or unknown
  misc_feature (760)..(760): "n" may be a, t, c, g, other or unknown
atcatcaggaagtgcacaggcgtccggcgtgctcctccctccctgcagccccgggcagcatctcccagaggctccgcggcccaggctcctggtgtgtctgcagtgcaggtggctcctggaagaccctcagcctgcctgctgaggccatgtcggactacgagaacgatgacgagtgctggaacgtcctggagggcttccgggtgacgctcacctcggtcatcgacccctcacgcatcacaccttacctgcggcagtgcaaggtcctgaaccctgatgatgaggagcaggtgctcagcgaccccaacctggtcatccgcaaacggaaagtgggtgtgctcctggacatcctgcagcggaccggccacaagggctacgtggccttcctcgagagcctggagctctactacccgcagctgtacaagaaggtcacaggcaaggagccggcccgcgtcttctccatgatcatcgacgcgtccggggagtcaggcctgactcagctgctgatgactgaggtcatgaagctgcagaagaaggtgcaggacctgaccgcgctgctgagctccaaagatgacttcatcaaggagctgcgggtgaaggacagcctgctgcgcaagcaccaggagcgtgtgcagaggctcaaggaggagtgcnaggccggcagccgcgagctcaacgctgcaaggaggagaactacgacctgccatgcgcctggcgcaccanaatgaggagaagggcgccgngcttcatgcggaaccgtganctgca

SEQ ID NO: 5456 - DNA, 824 bp, Homo sapiens
  misc_feature (744)..(744): "n" may be a, t, c, g, other or unknown
  misc_feature (773)..(773): "n" may be a, t, c, g, other or unknown
  misc_feature (815)..(815): "n" may be a, t, c, g, other or unknown
gtctctgcccatccgcgcacccgggcttcggctggagagggccagctcgcttcaggaggccgaaccccgttcccaccaaccctctcagctcagacgcggggtgctgagtcacggggggggggtggttctgtggatagttggaatgcatacacagaggaaagggggatgcggcaccagcagacagagagacaagaccccagccagcccctgtccaggcagcatggcacataccgccagatcttccatccagagcagctcatcacaggcaaggaagatgctgccaataactatgcctggggccactacaccattgggaaggagttcatcgacctgctactggaccggattcggaagctggctgaccagtgcacaggacttcagggcttcctggtgttccacagccttggtcggggcactggctctgacgtcacctcattcctgatggagtggctttctgttaactatggcaagaaatccaagctgggattctccatctacccagccccccaggtgtctacagccatggtccagccctacaactctatcctgaccacccacaccaccctggagcactcagactgtgccttcatggtggacaacaaagcaatctatgacatctgccaccgcaacctagacattgagcgcccaactacaccaacctcaatcgcctcattagccaaattgtctccttcatacagcttctctgcgctttgacgggccctcaatgtggacctgacagagttncagaccaacctggggtcctaccttacatncactttccccttgggcacctatgccccaatcattttttgcanaaaaagttt

SEQ ID NO: 5457 - DNA, 745 bp, Homo sapiens
  misc_feature (666)..(666): "n" may be a, t, c, g, other or unknown
  misc_feature (718)..(718): "n" may be a, t, c, g, other or unknown
  misc_feature (740)..(740): "n" may be a, t, c, g, other or unknown
aagagaaccctcggcggcaagatggcagcggcgggcgagggcaccccgagctcccgcgggccgcgtcgggacccgcctaggcggccgccccggaacggttatggtgtctacgtatacccaaattccttctttcgatatgaaggagaatggaaagcagggaggaagcacggtcacgggaagttgttatttaaagatggcagttattacgaaggggcgtttgtggacggagagatcacgggagaaggccgccggcactgggcctggtcaggagacaccttctctggacagtttgttctgggagagcctcaaggctacggcgtcatggagtacaaagccggcggatgttatgaaggggaggtctcccacggcatgcgggaaggacacgggtttctggtggaccgggatggacaagtgtaccagggctccttccatgacaacaagaggcacggccctgggcagatgctctttcagaacggtgacaagtacgacggcgactgggtccgggaccggcgtcagggacacggggtgctgcgctgcgccgacggctccacctacaagggacagtggcacagcgacgtcttcagtggactgggcagcatggcccactgctcaggggtcacctattatgggttgtggatcaatggccacccagcagaacaagctacnaggatcgtgatcttgggtcccgaggtgatgaagtggcccaagggtctccttntcggtgaacgttcactgctgangacac

SEQ ID NO: 5458 - DNA, 802 bp, Homo sapiens
  misc_feature (741)..(741): "n" may be a, t, c, g, other or unknown
  misc_feature (765)..(765): "n" may be a, t, c, g, other or unknown
  misc_feature (779)..(779): "n" may be a, t, c, g, other or unknown
gaaacaattgctgccatgaaagaagaagagaagctcaaagtggacaaaatggcccatgacttagaaattaagtggactgaaaatcttagacaagagtgttctaaacttcgtgaagagttaaggcttcaacatgaagaggataagaagtcagcaatgtctcaacttttgcagttgaaagatcgagagaaaaatgcagcaagagattcatggcagaagaaagtagaagatctcttaaaccagatttccttgctgaaacagaatctggagatacagctttcccagtctcagacttctttgcaacaactgcaagcccagtttacgcaagaacgacagcggcttacgcaagagcttgaagaattagaggagcaacatcagcaaagacacaaatcattaaaagaagcacatgtccttgcatttcaaactatggaagaggaaaaggaaaaggagcaaagagctcttgaaaatcatttacaacagaagcattctgcagagcttcaatcactaaaagatgcacacagagagtcaatggagggcttccggatagaaatggaacaggaacttcagactcttcggtttgaattagaagatgaaggaaaggctatgcttgcttccttgcgctcagaactcaaccatcaacatgcagctgcaattgatttgttacggcataatcatcatcaagaattggcagctgctaaaatggaattagagagaacatagacatcagcagaaagacagagtaanggagccccatatgtaggaattacnggatctaccagganggaattaaggaccccggagagcc

SEQ ID NO: 5459 - DNA, 867 bp, Homo sapiens
  misc_feature (822)..(822): "n" may be a, t, c, g, other or unknown
atccaccgctgagctgggagaaagatggcggcagccgtgcgacaggatttggcccagctcatgaattcgagcggctctcataaagatctggctggcaagtatcgtcagatcctggaaaaagccattcagttatctggagcagaacaactagaagctttgaaagcttttgtggaagcaatggtaaatgagaatgtcagtctcgtgatctcgcggcagttgctgactgatttttgcacacatcttcctaacttgcctgatagcacagccaaagaaatctatcacttcaccttggaaaagatccagcctagagtcatttcatttgaggagcaggttgcttccataagacagcatcttgcatctatatatgagaaagaagaagattggagaaatgcagcccaagtgttggtgggaattcctttggaaacaggacaaaaacagtacaatgtagattataaactggagacttacttgaagattgctaggctatatctggaggatgatgatccagtccaggcagaggcttacataaatcgagcatcgttgcttcagaatgaatcaaccaatgaacaattacagatacattataaggtatgctatgcacgtgttcttgattatagaagaaaattcattgaagctgcacaaaggtacaatgagctctcttacaagacaatagtccacgaaagtgaaagactagaggccttaaaacatgctttgcactgtcgatcttagcatcagcagggcagcagccgttctcggatgctactactcttttaaggatgaaaggtgccacaacttgctgcctatgggatcctagagaaaagnatctagataggatcatcagaggaaatcacttcaagaatttgctgc

SEQ ID NO: 5460 - DNA, 762 bp, Homo sapiens
  misc_feature (17)..(17): "n" may be a, t, c, g, other or unknown
  misc_feature (713)..(713): "n" may be a, t, c, g, other or unknown
  misc_feature (727)..(727): "n" may be a, t, c, g, other or unknown
  misc_feature (740)..(740): "n" may be a, t, c, g, other or unknown
attgggctgtcagtcangaggcggcgtggagatcgctgggagcggttgcggcgtgccgggagctgagttatagctgtgacttctgccctgccaggccgcacacaagctggctgacccggtttgtaaaaatggaatttcaagcagtagtgatggcagtaggtggaggatctcggatgacagacctaacttccagcattcccaaacctctgcttccagttgggaacaaacctttaatttggtacccattgaacctgcttgagcgtgttggatttgaagaagtcattgtggttacaaccagggatgttcaaaaggctctatgtgcagaattcaagatgaaaatgaagccagatattgtgtgtattcctgatgacgctgacatgggaactgcagattctttgcgctacatatatccaaaacttaagacagatgtgctggtgctgagctgtgatctgataacagacgttgccttacatgaggttgtggacctgtttagagcttatgatgcatcacttgctatgttgatgagaaaaggccaagatagcatagaacctgttcccggtcaaaaggggaaaaaaaaagcagtggagcagcgtgacttcattggagtggacagcacaggaaagaggctgctcttcatggctaatgaagcagacttggatgaagaactggtcattaagggatccatcctacagaagcatcctagaatacgtttncacacgggtcttgnggatgcccacctntactggttgaaaaaatacatcg

SEQ ID NO: 5461 - DNA, 505 bp, Homo sapiens
  misc_feature (128)..(128): "n" may be a, t, c, g, other or unknown
  misc_feature (468)..(468): "n" may be a, t, c, g, other or unknown
  misc_feature (471)..(471): "n" may be a, t, c, g, other or unknown
  misc_feature (487)..(487): "n" may be a, t, c, g, other or unknown
agtctcgggcggggagtggagccacggtccccgccctgcagctcgccccgccctgctaatgggaccggccagcccgggaggcccctgacccttggggaagcccgctgggcgatggggaccctcgcctnccgccaagtgagctgtgaaccacgtcctgcgcaacctctcgctctccaaaactgtttgtaatatttaaacgatatttggcttaggagaatttcataaagttagccagatctcgggtctcaatttagactcggggtgctggggggcatagcatccctggagtacattggacagcaaaagtccaatcgttgcctgccgagtggacctgcagtgcttaaaccccgtcacccggctggcggggtcccaggccctggggtttctttcgcccgggagtccacgccctgatgctggggtggcccggtccccccgcgggtggctgggggcctggggctgcctcacacnacngtcccagcagggaatntctcgccgtcccgacctt

SEQ ID NO: 5462 - DNA, 776 bp, Homo sapiens
  misc_feature (722)..(722): "n" may be a, t, c, g, other or unknown
  misc_feature (736)..(736): "n" may be a, t, c, g, other or unknown
  misc_feature (751)..(751): "n" may be a, t, c, g, other or unknown
tttgaaaagctacagtttttgctccaacagaatccctttcctccagagacttttggcaacctgttgctgctctactgtaaatatgagtattttgacctggcagcagatgtcctggcagaaaatgcccatttgacgtataagttcctcacaccctatctctatgacttcttagatgccctgatcacttgccagacagctcctgaagaggctttcattaagcttgatgggctagcagggatgctgactgagcagcttcggagactcaccaagcaagtacaggaagcaagacacaacagggatgatgaagctatcaaaaaggcagtgaatgaatatgatgaaaccatggagaaatacattcctgtgttgatggctcaggcaaaaatctactggaatcttgaaaattatccaatggtggaaaagatcttccgcaaatctgtggaattctgtaacgaccatgatgtgtggaagttgaatgtggctcatgttctgttcatgcaggaaaacaaatacaaagaagccattggtttctatgaacccatagtcaagaagcattatgataacatcctgaatgtcagtgctattgtactggctaatctctgtgtttcctatattatgacaagtcaaaatgaagaagcagaggagttgatgaggaagattgaaaaggaggaagagcagctctcttatgatgacccaaataggaaaatgtaccatctctgcattgngaatttggtgatanggaactctttattgngcccaaaggaaactatgaagtttgg

SEQ ID NO: 5463 - DNA, 812 bp, Homo sapiens
  misc_feature (774)..(774): "n" may be a, t, c, g, other or unknown
  misc_feature (776)..(776): "n" may be a, t, c, g, other or unknown
  misc_feature (791)..(791): "n" may be a, t, c, g, other or unknown
aagcgcgggggagggagtgtaaatagagcgaaggctgctctgtgtcagccccgtcaccgccgggcggcccgcgcggagtctgagggagatggaagttgagcaagagcagcggcgcagaaaggtggaggccgggaggacgaagcttgctcacttccgacagagaaaaacaaaaggtgacagttcgcattcggagaaaaagacggcgaagaggaagggctcggctgtcgatgcgtctgtccaggaggagagtccggtaaccaaggaggacagcgcactctgtggaggaggggacatttgcaaaagcacattatgtgacgacacccctgatggggcaggaggggcctttgcagctcagccggaggactgtgatggagagaagagagaggacttggaacagctgcagcagaagcaagtcaatgaccatcctccagagcagtgtgggatgttcacagtcagtgaccacccaccagaacagcatgggatgttcacagtcggtgaccacccaccagaacagcgtgggatgttcacagtcagtgaccacccaccagaacagcgtgggatgttcacaatcagtgaccaccaaccggaacagcgtgggatgttcacagtcagtgaccacacaccagaacagcgtgggatcttcacaatcagtgaccacccacagaacagcgtgggatgttcacaaaggagtgtgaacaagaatgtgaactttgccattacttgacctggagagcggccgtgaagatgaagctggccttgcattcagagtcagangncttttcttccgccgnaagccgtgcatgggccttgaa

SEQ ID NO: 5464 - DNA, 820 bp, Homo sapiens
  misc_feature (734)..(734): "n" may be a, t, c, g, other or unknown
  misc_feature (786)..(786): "n" may be a, t, c, g, other or unknown
  misc_feature (811)..(811): "n" may be a, t, c, g, other or unknown
acgaataacaactgcagccgctctgtctctcaataaggctacacgctccaatgtccgggtgacagtgacagcaacagcagtcatcatcaacctcgtggtcatcctcatcctggacgagatctacggcgctgtggccaagtggctcaccaaaattgaggttccgaaaacagaacagacttttgaagagcgcctgatcctcaaagctttcttgctcaagtttgtcaatgcctactcccccatcttctatgtggcctttttcaaagggaggtttgtgggcaggcctggaagctacgtctatgtattcgatggttaccgcatggaagagtgtgctccagggggctgtctcatggagctctgcattcagctcagcatcatcatgttggggaagcagttgatccagaacaacatctttgagattggagtcccgaagctaaagaaactatttcgaaagctgaaagatgagaccgaagctggagaaactgactctgcccattcgaaacatccagagcagtgggacctagactacagcttggaaccatacacaggactgactccggagtacatggaaatgatcatccagtttggttttgtcaccctcttcgtggcctcctttcccctggcacctgtgtttgccctcctcaacaacgtcattgaagtgcggctcgatgcaaagaagtttggtacagagctgagacggccggatgctgtaagaaccaaagatatcggaatctggnttgacattctctctggaattggcaagttctctggtatcagcaacgcttttgncattgcgatcaccttcgactttatnccccgctgg

SEQ ID NO: 5465 - DNA, 768 bp, Homo sapiens
  misc_feature (713)..(713): "n" may be a, t, c, g, other or unknown
  misc_feature (719)..(719): "n" may be a, t, c, g, other or unknown
  misc_feature (747)..(747): "n" may be a, t, c, g, other or unknown
gacggcgagaccccgccccatccccgactgcctgaaccgcgccaggagacggaccgcaagtccagcgtacccacagacgactcaggcgggagacgagcggtgtcatggccgccgacagtgacgatggcgcagtttcagctcccgcagcttccgacggtggtgtcagcaaaagcacaacatctggggaggagctagtagtccaggttcccgtagtggatgtgcaaagcaacaacttcaaggagatgtggccatccctcctgctagccataaagacagctaatttcgtggctgtggacacggagctgagtgggcttggggacaggaagagtttgctgaaccagtgcattgaggaacgttacaaggccgtgtgtcatgctgccaggacccgttctatcctttccctgggcctcgcctgcttcaagcggcagccagacaagggtgaacattcctatctggctcaagtgttcaatctcactctgctgtgcatggaggagtatgtcatagaaccaaagtctgtgcagttcctgatacagcatggcttcaacttcaaccagcagtatgcccaaggcatcccctaccataagggcaatgacaagggtgatgagagccagagccagtcagtacggaccctattcctggagctaatccgagcccgccggcctctggtgctacacaatggccttatagacttggtggtcctgtaccagaacttntatgcncaccttccttgagagtctgggaaccttnaccggttacctgtgtgagatg

SEQ ID NO: 5466 - DNA, 771 bp, Homo sapiens
  misc_feature (705)..(705): "n" may be a, t, c, g, other or unknown
  misc_feature (727)..(727): "n" may be a, t, c, g, other or unknown
  misc_feature (736)..(736): "n" may be a, t, c, g, other or unknown
gctaagaaggggagactgaggctgaggctggggaacatcgggcagcatgagcggctgcgggctcttcctgcgcaccacggctgcggctcgtgcctgccggggtctggtggtctctaccgcgaaccggcggctactgcgcaccagcccgcctgtacgagctttcgccaaagagcttttcctaggcaaaatcaagaagaaagaagttttcccatttccagaagttagccaagatgaacttaatgaaatcaatcagttcttgggacccgtggaaaaattcttcactgaagaggtggactcccgaaaaattgaccaggaagggaaaatcccagatgaaactttggagaaattgaagagcctagggctttttgggctgcaagtcccagaagaatatggtggcctgggcttctccaacaccatgtactcacgactaggggagatcatcagcatggatgggtccatcactgtgaccctggcagcgcaccaggctattggcctcaaggggatcatcttggctggcactgaggagcagaaagccaaatacttgcctaaactggcgtccggggagcacattgcagccttctgcctcacggagccagccagtgggagcgatgcagcctcaatccggagcagagccacactaagtgaagacaagaagcactacatcctcaatggcttcaaggtctggattactaatggaggactggncaatatttttactggggttgcnaagactgangtcgtgattctgatggatcagtgaaagacaaaatc

SEQ ID NO: 5467 - DNA, 787 bp, Homo sapiens
  misc_feature (712)..(712): "n" may be a, t, c, g, other or unknown
  misc_feature (750)..(750): "n" may be a, t, c, g, other or unknown
  misc_feature (787)..(787): "n" may be a, t, c, g, other or unknown
tatgcatgttttttgacagttgtagtcagaaagcagaattaagtttggggattagatcataatcccaaaacatacaatcacaaatgttgaaatcctgacatccaaattctggggaagtgattagtgtgttttgggttgcatgcaggatagttgcatcatgtcagttgtatcatgttaggcacaactattaccatgttattgtctttatttggaaattaaatatggcttaaggagatgcgtatgagtgccaagctgacaaggggtggacttgtggacctaattttaggtatcagcttgaccagattaaggaatatcagaaacctggtaaaacattgttttgttttacacattgagggtgtgtctatgagagtgtttccagaagagattagtgtataaatctgagtgtactaggtggagactatctgccctcaatgttggcgggcaccatccaatcagccagtggccaggagagaacaaatacttaagacaaaatgggctgggatcggtggctcatgcctgtaatcctagcactttggaaggtcgaggtgggtggatgacctgaggtcaggagttcgagaccagcctgaccaacatggcaaaaccctgtctctgctaaaaatacaaaaattagccaggcgtggtggtgcacacctgtggtcccggctacttgggaggctgagacaggagaattgcttgaacccaagaggcagangtcgcagcagtgagccgagatcacgccactgtattcancctgggtgataagctgagactctgctcaaaaaaaaan

SEQ ID NO: 5468 - DNA, 796 bp, Homo sapiens
  misc_feature (665)..(665): "n" may be a, t, c, g, other or unknown
  misc_feature (765)..(765): "n" may be a, t, c, g, other or unknown
  misc_feature (768)..(768): "n" may be a, t, c, g, other or unknown
  misc_feature (782)..(782): "n" may be a, t, c, g, other or unknown
gctccgggagagttagggctccgagccgagcgcgcggagcagctggggccggggcgcggatgctggaagttcacatcccgtcggtggggcccgaggccgaggggcccaggcagagcccggagaaaagccacatggtgttccgagtggaggtgctgtgcagcgggcgcagacacacggtgccaaggcgctacagcgagttccacgcgctgcacaagcggatcaagaagctgtacaaagtgcccgacttcccctcgaaacgcctgcccaactggaggaccagagggttggaacagcgccggcagggcttggaggcttacatccagggcatcctgtacctgaaccaggaggtgcccaaggagttactggaattcctgagacttcggcacttccccacagaccccaaggctagcaactggggcaccctgagggagttcctgcctggcgacagcagctcccagcagcaccagcggcctgtcctgagcttccatgtggatccctatgtttgcaacccctccccagagtcgctgcccaacgtggtggtgaatggtgtgctccagggcctctacagcttcagcatcagcccagataaagcccagccaaaggcggcctgtcaccctgctcctctgcactgatgccctgatcagtccagagcctttggcttgctnctaagaaagtcatgtgcctctgtcctatgaactcatataaggctggtcctctttggctgacccaggacttaataccatgccagtgtgcaattccatcagntanactggtcgatgtantgagggagattgat

SEQ ID NO: 5469 - DNA, 828 bp, Homo sapiens
  misc_feature (772)..(772): "n" may be a, t, c, g, other or unknown
  misc_feature (814)..(814): "n" may be a, t, c, g, other or unknown
  misc_feature (828)..(828): "n" may be a, t, c, g, other or unknown
agcggaggaggaagctgagcagggcggcggcggcggtggaacctgcggggctggggcgcgcgccatgggccgcctgcactgcactgaggacccggtgccggaggccgtgggcggcgacatgcagcagctgaaccagctgggcgcgcagcagttctcagccctgacagaggtgcttttccacttcctaactgagccaaaagaggtggaaagatttctggctcagctctctgaatttgccaccaccaatcagatcagtcttggctccctcagaagcatcgtgaaaagcctccttctggttccaaatggtgctttgaagaagagtctcacagccaagcaggtccaggcggatttcataactctgggtcttagtgaggagaaagccacttacttttctgaaaagtggaagcagaatgctcccacccttgctcgatgggccataggtcagactctgatgattaaccagctcatagatatggagtggaaatttggagtgacatctgggagcagcgaattggagaaagtgggaagtatatttttacaactaaagttggtggttaagaaaggaaatcaaaccgaaaatgtgtatatagaattaaccttgcctcagttctacagcttcctgcacgagatggagcgagtcagaaccagcatggagtgtttctgctgatttctgtccctgcatctcccctgccccgttccctgccttctccttcctgggtgactgctctgaaaagcacttcactcacaggcctgtgggatgcttccatggggnccctgcttggcttccatgggggcccaggtgccaaagggtttnttgaaaaaccagcn

SEQ ID NO: 5470 - DNA, 852 bp, Homo sapiens
  misc_feature (842)..(842): "n" may be a, t, c, g, other or unknown
  misc_feature (846)..(846): "n" may be a, t, c, g, other or unknown
aaaaaccttcagaggagtctcagaaaggacacggctggctgcttttctcagcgccgaagccgcgccatgctcgtcctcagaagcgccctgactcgggcgctggcctcacggacgctggcgcctcagatgtgctcatcttttgctacgggacccagacaatacgatggaatattctatgaatttcgttcttattaccttaagccctcaaagatgaatgagttcctggaaaattttgagaaaaacgctcatcttcggacagctcactctgaattggttggatactggagtgtagaatttggaggcagaatgaatacagtgtttcatatttggaagtatgataattttgctcatcgaactgaagttcagaaagccttggccaaagataaggaatggcaagaacaattcctcattccaaatttggctctcattgataaacaagagagtgagattacttatctggtaccatggtgcaaattagaaaaacctccaaaagaaggagtctatgaactggccacttttcagatgaaacctggtgggccagctctgtggggtgatgcatttaaaagggcagttcatgctcatgtcaatctaggctacacaaaactagttggagtgttccacacagagtacggagcactcaacagagttcatgttctttggtggaatgagagtgcagatagtcgtgcagctgggagacataagtcccatgaggatcccagagttgtggcagctgttcgggaaagtgcaactacctagtatctcagcagaatatgcttctgattcctacatcggtttcaccactggaatagtttctactggaaatccaaacatttcattactgntttnggatcg

SEQ ID NO: 5471 - DNA, 798 bp, Homo sapiens
  misc_feature (655)..(655): "n" may be a, t, c, g, other or unknown
  misc_feature (749)..(749): "n" may be a, t, c, g, other or unknown
  misc_feature (753)..(753): "n" may be a, t, c, g, other or unknown
  misc_feature (755)..(755): "n" may be a, t, c, g, other or unknown
agcaaatctccctgagagcgggaccggcctcagctccaacacagcctccactgtgattaaaaataaaaattgctagagcagccctcactcgccacatctactttgatagctggctatttggaatttaaaggatatttgactttttctaacctcccatgaggctgtaaggattgtaggaaacttgaaagttccactgctccaaacccacccaccaaggactctgaacctgtccaccccgggcgcatcaagatcttccagctgggtacccccgatttgggccgactttgcacctccaaacaaccttagcatgatgtcttatcttaagcaaccgccttacgcagtcaatgggctgagtctgaccacttcgggtatggacttgctgcacccctccgtgggctacccggccaccccccggaaacagcgccgggagaggacgacgttcactcgggcgcagctagatgtgctggaagcactgtttgccaagacccggtacccagacatcttcatgcgagaggaggtggcactgaaaatcaacttgcccgagtcgagggtgcaggtatggtttaagaatcgaagagctaagtgccgcaacaacagcaacaacagcagaatggaggtcaaaacaaagtgagacctgccaaaaagaagacatctncagctcgggaaagtgagttcagagagtggaacaagtggccaattcactcccccctctagcacctcagtcccgaccattgccagcagcaatgctnctgngnctatctggagcccaactttcatctcccactgtcagatccctgg

SEQ ID NO: 5472 - DNA, 669 bp, Homo sapiens
  misc_feature (574)..(574): "n" may be a, t, c, g, other or unknown
  misc_feature (604)..(604): "n" may be a, t, c, g, other or unknown
  misc_feature (610)..(610): "n" may be a, t, c, g, other or unknown
agtgcgcacgctccgactcggccgtggcggacctgactaaaggaggccgcggacctgactgaaggaggccacggccacttctggttggcctcggggcgcgctggctcggctcttcctccgccctcgaggcccccgcagtcccatcattcagttccgtagggtcaccggcgcggcagtggcctcgcagggcgctgggtccctctccccagctctcctccccctggccccgtcgccccgccctcgccgggctgggctgcggggtcaggggccgagcggagagggttatcatttaacatggaagaagatgagttcattggagaaaaaacattccaacgttattgtgcagaattcattaaacattcacaacagataggtgatagttgggaatggagaccatcaaaggactgttctgatggctacatgtgcaaaatacactttcaaattaagaatgggtctgtgatgtcacatctaggagcatctacccatggacagacatgtcttcccatggaggtgaagtcttgctctgtcacccaggctggagtgcagttgcgtgatctcagctcactgcaacctncgcttctgggttcaagcagttctctgcctnaccttncgagtaactgggactacaggggttaccactacacctggctaattttttggattttagta

SEQ ID NO: 5473 - DNA, 749 bp, Homo sapiens
  misc_feature (702)..(702): "n" may be a, t, c, g, other or unknown
  misc_feature (707)..(707): "n" may be a, t, c, g, other or unknown
  misc_feature (718)..(718): "n" may be a, t, c, g, other or unknown
atttagcaacaacagtgtgaggctccacttccgttgaatatgagcggctgtcacacccatgagcaagtttccttgatggaagatgctgtttctccggcagaaccaaccctccaggacgaagtttcagaattggctgatggtcgtgagtgcaggtgtccctgttgtaatttgcagggaaattgactgcaggcgatagtgttgacgtccgacgtctgacaacctcctatgtgcatgtctaaatagtcacaatgaagatgaaaataaggatgatggggacggggtccaggagggccactgggaaggcactatccagaaatagtggacagaggtctggcatgtggaaaccttggatctcggtcacagggaggaaggcagctagaaatgggagggaagcttctgggtaggcaccatagtaggggaatgtctaaagacccactgctctgagatgtggtcagagaggtttctgtggactgcagatgaggcctgagccctgcctatgctcaaagccatcagggttgggggtccgcctcctcactgctcctcaacagctgtaaccctttcctgagggccccgacttttcagaataggagcagagagaagcccagacttccttccctggagtgtagacctgtgtgtgggacctgctccaggctgatccctgtccgcacaggtgggtgatgtccttggctgctgccgtcagangcagncccctgcacanggagggggctgatcctgccttaactgtgtgg

SEQ ID NO: 5474 - DNA, 554 bp, Homo sapiens
  misc_feature (535)..(535): "n" may be a, t, c, g, other or unknown
  misc_feature (547)..(547): "n" may be a, t, c, g, other or unknown
  misc_feature (550)..(550): "n" may be a, t, c, g, other or unknown
agctggacggccccgggaggccgcagaccgccgggctccccgaggacacctcgcaccggaggaggagaggaggcagcgcccggccaggctgggagcacctacggccgcgcgggggcgggagccaggtggcctcggcgcgcccgcctcgcccgggcaccgagcaggaagtggctgcggcgcggcctcctcgcggtgcaacagggcggggaggcggccgcagcccgagccggagcccgagcgccgggagcgagacctcatggcagcggtggcgcccgcgggccccggggactccgcctcggccgccctggacgagctgtcactgaatttcacgtacggggcaccaggcgccggcaacggctccctctcgggcgactggtaccgcaggaaccagattcacctttttggagttttgctggctattttaggaaacttggtgatcagtatttctctaaatattcagaaatattctcaccttcagctggcacaacaagagcacccaaggccatacttcaagagtgtgctgtggtggggtggngtctgtgatggncgnggga

SEQ ID NO: 5475 - DNA, 855 bp, Homo sapiens
  misc_feature (625)..(625): "n" may be a, t, c, g, other or unknown
  misc_feature (644)..(644): "n" may be a, t, c, g, other or unknown
  misc_feature (789)..(789): "n" may be a, t, c, g, other or unknown
  misc_feature (830)..(830): "n" may be a, t, c, g, other or unknown
  misc_feature (844)..(844): "n" may be a, t, c, g, other or unknown
taggtggtggggggtcgccagcaggttccctctccccggccccagctctggacgctcaccccagtgcaacgccctgagtgacggaaagaggtctggcggcttctctgttgacaactcagctggttccacaccctggcaattgtgaagagctggccaaatgtttgtccactgagctgatctcctctctggagcaccggggccaccaggagggagccaagacaatgcaaactccagtgaacattcccgtgcctgtgctccggctgccccggggccctgatggcttcagccgtggctttgcccctgatggacgcagagcccccttgaggccagaggttcctgaaatccaggagtgtcccatagctcaagaatccctggaatcccaggagcagcgggcacgagccgcccttcgggagcgttacctccgcagcctgctggccatggtgggtcatcaggtgagcttcacgttgcacgagggtgtgcgtgtggccgccactttggagccaccgacctggatgtggccaacttctacgtgtcacagctgcagactcccataggtgtgcaagcagaggcgctgctccgatgtagtgacattatttcatataccttcaagccataaagatattgngttcacttttctgcttgangctaaggcactgtatcccaagccttccaatgttcccgagccaggaactctgggccccatggagttatgagctccttggaattttgagccaagctttaaacaagtcttggacttctgagacttctggggtctagtcagtaaaactnttgcactttaggaattctaaaatcccttggaaggaatgctntacttacaaaactntgaaccctaca

SEQ ID NO: 5476 - DNA, 766 bp, Homo sapiens
  misc_feature (696)..(696): "n" may be a, t, c, g, other or unknown
  misc_feature (746)..(746): "n" may be a, t, c, g, other or unknown
  misc_feature (749)..(749): "n" may be a, t, c, g, other or unknown
gggtttcgttgacccgcggcgttcacgggaattgttcgctttagtgccggcgccatggggtcggagctgatcgggcgcctagccccgcgcctgggcctcgccgagcccgacatgctgaggaaagcagaggagtacttgcgcctgtcccgggtgaagtgtgtcggcctctccgcacgcaccacggagaccagcagtgcagtcatgtgcctggaccttgcagcttcctggatgaagtgccccttggacagggcttatttaattaaactttctggtttgaacaaggagacatatcagagctgtcttaaatcttttgagtgtttactgggcctgaattcaaatattggaataagagacctagctgtacagtttagctgtatagaagcagtgaacatggcttcaaagatactaaaaagctatgagtccagtcttccccagacacagcaagtggatcttgacttatccaggccacttttcacttctgctgcactgctttcagcatgcaagattctaaagctgaaagtggataaaaacaaaatggtagccacatccggtgtaaaaaaagctatatttgatcgactgtgtaaacaactagagaagattggacagcaggtcgacagagaacctggagatgtagctactccaccacggaagagaaagaagatagtggttgaagccccagcaaaggaaatggagaangtagaaggagatgccacattaaaccacagaaaggatgaagaatcttgacnccnggaatttttgaaagaat

SEQ ID NO: 5477 - DNA, 523 bp, Homo sapiens
  misc_feature (111)..(111): "n" may be a, t, c, g, other or unknown
  misc_feature (213)..(213): "n" may be a, t, c, g, other or unknown
  misc_feature (246)..(246): "n" may be a, t, c, g, other or unknown
  misc_feature (306)..(306): "n" may be a, t, c, g, other or unknown
  misc_feature (453)..(453): "n" may be a, t, c, g, other or unknown
  misc_feature (506)..(506): "n" may be a, t, c, g, other or unknown
  misc_feature (523)..(523): "n" may be a, t, c, g, other or unknown
acggcggcgcatgctaggggattctgccgggtagaagagctgggcctggaacccagccctgaggacatcctgcggcccatgggcaagtgacacctgctgagagaggcccangatggtggaggctgaggaactggcacagctgcggctgctcaatctggagctcctgaggcagctgtgggtggggcaggatgctgtgcggcggtcagtggccanggcagcctcggagtcaagcctggaatccagcancagctacaactcagagactccatcgaccccagagacgttctcaacttccttgagcacctnctgcccacggggccggtccttcgtgtggggcccaccagatgcctgtcgaggggacctccgtgatgtggccagatcgggggtggcctctctcccacctgccaagtgccagcaccaggagtccctgggccgaccgagaccccactcagnaccctcactgggcacctcaagcctgagggacccagagccctcatggatgctgngtgatccaggaccccan

SEQ ID NO: 5478 - DNA, 776 bp, Homo sapiens
  misc_feature (710)..(710): "n" may be a, t, c, g, other or unknown
  misc_feature (763)..(763): "n" may be a, t, c, g, other or unknown
  misc_feature (768)..(768): "n" may be a, t, c, g, other or unknown
tccaccgccgccacagtcttccagctccacatcctgagaggacgcctctggagccgcgactgcccggggttgtgccggccgccgctgccgcccaggccgcctcagctctcctctgcgccggcccgctcactccgcccggccccagccctagcgctggccgcgaccccggcgcctttgaaacttctgctggtgtgagtgccctcaggggttccccaggaatatcgatacaacaccaacaggagatcatgaatcagacagataaaaatcaacaagaaatcccatcataccttaatgatgaaccaccagaaggttcaatgaaagatcacccacagcagcagccaggcatgttgtcccgtgtgactgggggtatcttcagtgttacaaagggagctgttggtgccaccattggtggtgtggcttggattggtggaaagagtctggaagtgaccaaaacagctgttacaactgtgccttccatgggaatagggctggtgaaagggggtgtctctgctgtggctggaggtgttacagctgttgggtctgctgttgtaaacaaagtgcccttaacaggaaagaagaaagacaaatctgactgaaatatagagatacacttgcgctccacagcactgtaatgccagtggcattgaattgctaaattatggactacaaccaagtcaactgttttggacgtttatcttctaaactgctgngttgaaagtattgatgactggctttcatctaaaagaagagaccaatacgagcncagtntatgaagg

SEQ ID NO: 5479 - DNA, 800 bp, Homo sapiens
  misc_feature (729)..(729): "n" may be a, t, c, g, other or unknown
  misc_feature (753)..(753): "n" may be a, t, c, g, other or unknown
  misc_feature (771)..(771): "n" may be a, t, c, g, other or unknown
agggaggggatcaacatggccgctgcaccccggactgtgttgatctccggctgctcatcaggaattggtctggaacttgcagtgcaactggcccatgaccccaagaagcgctaccaggtcgtggccaccatgagggacctggggaagaaggagacactggaggcagctgctgggaggctctggggcagaccctcaccgtggcccagctggacgtgtgcagtgatgagtcggtggcccagtgtctcagctgtatccagggagaagtggacgtgctggtgaataatgctggaatgggcctggtggggcccctggaggggctcagccttgctgccatgcagaatgtctttgacaccaactttttcggagctgtccgtctcgtcaaagctgtgcttccaggcatgaagaggaggcggcagggccacatcgtggtgatcagcagtgtcatgggcctgcagggtgtcatcttcaacgatgtctatgcagcttccaagttcgccctggagggattcttcgaaagcctcgctatccagctgctgcagttcaacatcttcatctccctggtggagccaggccccgtggtcaccgagtttgaggggaagcttctggcgcaagtttctatggctgagttcccaggcactgaccctgaaccctgcactacttccgggaccttatctccagccttcaggaactgtttgctccgtgggacagaacccacaggacgtggttcangccattggcaacgtcatcagcttngacttgaacaccccttgngcccgacagaaccaacattccggttactt

SEQ ID NO: 5480 - DNA, 780 bp, Homo sapiens
  misc_feature (693)..(693): "n" may be a, t, c, g, other or unknown
  misc_feature (706)..(706): "n" may be a, t, c, g, other or unknown
  misc_feature (737)..(737): "n" may be a, t, c, g, other or unknown
ggatacgtcgacaatagatgacggggctcacgttgtacgttcacatcaggtcccggcccgccggaacctgggcgatccacgatgccgagtttgccacgctgcgacagcccataggcttgcccccccgggcattcgggtggactacgaacacaaactgaagccctaggacttgtcgcccgtttgcgctctcgccgaggcacaggctgctcgcggaccaccctgctccgaaaactaagaaggggaccagtagacggggtggattcgaggtggggacatgggacgcagcggtcggagccgcctggaggggtacccggtggtcccgatggagctatcatctttgagaggtaggtggtagcccattcatctggttactgatactggccggcatcagtggactgtcggcaggtccttgagcaactggtgtgtgaaatgggacggacgtcaaaggacaagcgggatgtctactaccgcctggccaaggagaatggctggcgtgctcgcagcgccttcaaactgctacaactggataaggaattccaactcttccaaggcgtgacacgggcagttgacctgtgtgcagccccaggcagctggagccaggtgctgagccggaagatcgggggccaagggtccggccacgtggtggctgtggacctgcaggctatggctccactaccaggtgtggtacagatncaggggggacatnacccagcttgtccactggcaaggagatcatncaggcacttttaagggcttgccttgcggacctaatggtgtgtt

SEQ ID NO: 5481 - DNA, 827 bp, Homo sapiens
  misc_feature (774)..(774): "n" may be a, t, c, g, other or unknown
  misc_feature (785)..(785): "n" may be a, t, c, g, other or unknown
  misc_feature (817)..(817): "n" may be a, t, c, g, other or unknown
aataacaggcggagggtcggcgtaggtactttgaacccaagtaaacaaaagggaagattttctcgttgatactggagactgcacaacaatggggccacgaaagaaaagtgtgaaaacatgtatcatgaataatgaaattccagaagaaatgacagcagatgaaacaaaggactatatgaatcaactttcacatgaagtactttgccatatttttaggtacctccctctgcaggatatcatgtgtatggaatgtctttcccggaagctaaaggaagcagtgaccctatatctgcgagttgtgagagttgtagatctctgtgcagggcggtggtgggaatacatgccaagtggctttacagatgccagttttctaacactattaaagaagatgccagatgttgaacagctatatggccttcaccctcgataccttgagaggcgaagagtaaggggccatgaggcttttagcattccaggagtcctagaagctttgcaggcatgcccaaacttagtgggtgtggaaacttctcatttggagttggtagaatccatttggacatatatgccccatgttcatattttggggaaatttcgtaatcgtaatggagcttttccaattcctcctgaaaataaactgaaaattcctataggagccaaaattcaaactttacatttagttggggtgaatggtcctgaaattccttggatcccaatgctaaggcacctttatatgaagtgggtaagactccttaaccccagccatttaaagacttnctttggatcancttaagactttcgcatgaggaactggccgganccacaaattc

SEQ ID NO: 5482 - DNA, 788 bp, Homo sapiens
  misc_feature (554)..(554): "n" may be a, t, c, g, other or unknown
  misc_feature (728)..(728): "n" may be a, t, c, g, other or unknown
  misc_feature (757)..(757): "n" may be a, t, c, g, other or unknown
  misc_feature (786)..(786): "n" may be a, t, c, g, other or unknown
aacgccagcgcctgcgcactgagggcggcctggtcgtcgtctgcggcggcggcggcggctgaggagcccggctgaggcgccagtacccggcccggtccgcatttcgccttccggcttcggtttccctcggcccagcacgccccggccccgccccagccctcctgatccctcgcagcccggctccggccgcccgcctctgccgccgcaatgatgatgatggcgctgagcaagaccttcgggcagaagcccgtgaagttccagctggaggacgacggcgagttctacatgatcggctccgaggtgggaaactacctccgtatgttccgaggttctctgtacaagagatacccctcactctggaggcgactagccactgtggaagagaggaagaaaatagttgcatcgtcacatgatcacggatacacgactctagccaccagtgtgaccctgttaaaagcctcggaagtggaagagattctggatggcaacgatgagaagtacaaggctgtgtccatcagcacagagccccccacctacctcagggaacagaaggncaagaggaacagccagtgggtacccaccctgcccaacagctcccaccacttagatgccgtgccatgctccacaaccatcaacagggaccgcatgggccgagacaagaagagaaccttccccctttggtgtggatgcatcggtgcactcacccttccgtgctgattccgcttagntcttccactttgatgaaccattgacccancttgtgaatccattgaggaacgcattttnaa

SEQ ID NO: 5483 - DNA, 830 bp, Homo sapiens
  misc_feature (785)..(785): "n" may be a, t, c, g, other or unknown
  misc_feature (806)..(806): "n" may be a, t, c, g, other or unknown
  misc_feature (812)..(812): "n" may be a, t, c, g, other or unknown
gcaatgcactgagtaacggggcgggccgagagcagtcaccaacccctctcgttgaggctgctcggttgtggccagaaacgctggctctggcattaactgtctacacccctccccttacttgggacaggaccgcatagccctcccctccccccgtcctgcaagatcttatgcggctaggtgcctgggaagtaacagcaagaggtttgatttaattttggatgagatcgttcttgcagcaagatgttaataagacaaaatctagactaaatgtgttaaatgggcttgccaacaatatggatgatttgaagataaacaccgatattactggtgctaaagaagaactcctagatgacaacaattttatctcagacaaagagagcggagttcataagccaaaagattgtcaaacatcatttcagaaaaataatacgttgactctgcctgaagaactgtcaaaggacaaatctgaaaacgccttaagtggaggccagtctagtctatttatacatgctggtgctcctactgtttctagtgaaaactttatcttgcctaaaggagctgctgttaatggaccagtttcacactcctccttaactaagacttccaatatgaataaaggcagtgtttcattaaccactggacagcctgtggatcagccaacaacagaatcttggtcaactttgaaggtagcagctgatcttcagctgtctacaccacagaaagcaagtcaacaccaagttttatttttggtatcagatgtacacatgctaagaatccacccattncaataaaaaactacctacctntgcttnagttggttgggacattca

SEQ ID NO: 5484 - DNA, 813 bp, Homo sapiens
  misc_feature (39)..(39): "n" may be a, t, c, g, other or unknown
  misc_feature (607)..(607): "n" may be a, t, c, g, other or unknown
  misc_feature (786)..(786): "n" may be a, t, c, g, other or unknown
  misc_feature (799)..(800): "n" may be a, t, c, g, other or unknown
agcatttaatcatgaggcgctccaaagaatatgagatanaaggggaggggtaggaggagagggaggagggtaggaagacagtttgcattcttgcaacattaaaccaaagggacttggagtgcagatggcatccttcggttcttccagacaagctgcaagacgctgaccatggccaagatggagctctcgaaggccttctctggccagcggacactcctatctgccatcctcagcatgctatcactcagcttctccacaacatccctgctcagcaactactggtttgtgggcacacagaaggtgcccaagcccctgtgcgagaaaggtctggcagccaagtgctttgacatgccagtgtccctggatggagataccaacacatccacccaggaggtggtacaatacaactgggagactggggatgaccggttctccttccggagcttccggagtggcatgtggctatcctgtgaggaaaccgtggaagaaccaggggagaggtgccgaagtttcattgaacttacaccaccagccaagagaggtgagaaaggactactggaatttgccacgttgcaaggcccatgtcaccccactctccgatttgganggaagcggttgatggagaaagcttcccttccctccccttccttggggctttgtggcaaaaatcctatggttatccctgggaacgcagatcacctacatcggacttcaattcatcagctttcttctgttctaacagacttgctactcactgggaacccttgctgtgggcttcaaactgancgccctttgctgnntggttccctctgg

SEQ ID NO: 5485 - DNA, 684 bp, Homo sapiens
  misc_feature (393)..(393): "n" may be a, t, c, g, other or unknown
  misc_feature (459)..(459): "n" may be a, t, c, g, other or unknown
  misc_feature (591)..(591): "n" may be a, t, c, g, other or unknown
  misc_feature (662)..(662): "n" may be a, t, c, g, other or unknown
  misc_feature (676)..(676): "n" may be a, t, c, g, other or unknown
actgggctctaatttcactttgcaactggtgactgtgatgcttgtcggtggacgtttctatggaatgccaacaattcttcaggaagcaaaatctgctgtccttccagtctctgagaaagctgccaattctcaggtcggatttgaatccactgcttttcaactcatgaacatcactgctggcacaagccacgttatgatttctaggagaggcacatatggagctctctcggttgcctggaccactggatatgctcctgggttagaaattcctgaattcattgttgttggcaacatgaccccaacactggggagcctttcattttcccacggtgaacaaaggaaaggagtttccctgtggacgtttcctagccctggttggccagaggcctttgntcttcacctatcaggagtgcagagcagtgctcctggcggagctcaactccgatcaggtttcattgntgctgaaattgaaccaatgggcgtcttccaattttccactagctcaagaaatatcatagtgtcagaagatacacagatgatcagattacatgtacaaagactatttgggttccacagcgatcttattaaagnttcttatcagaccactgcaggaagcgccaagccactggaagattttgagcctgttcagaatggggaactgntttttcaaaaattncaaactga

SEQ ID NO: 5486 - DNA, 675 bp, Homo sapiens
  misc_feature (351)..(351): "n" may be a, t, c, g, other or unknown
  misc_feature (664)..(665): "n" may be a, t, c, g, other or unknown
  misc_feature (668)..(668): "n" may be a, t, c, g, other or unknown
cgcacaacgtgaacctgcagcagaagccttgcgcctaccacccgggcgataaatacccggagccgtcgggcgccctgcccggtgacgacctgtcctctagggccaaggagttcgccttctaccccagcttcgccagctcctaccaggcgatgcccggctacctggacgtgtcggtggtgcccgggatcagcgggcacccggagccgcgtcacgacgccctcatccccgtcgaaggctaccagcactgggctctctccaatggctgggacagtcaggtgtactgctccaaggagcagtcgcagtccgcccacctctggaagtctcccttcccagacgtggttcccctgcagnccgaggtgagcagctaccggcgcgggcgcaagaaacgcgtgccctacactaaggtgcagctgaaggagctagagaaggaatacgcggctagcaagttcatcaccaaagagaagcgccggcgcatctccgcaccacgaacctctctgagcgccaggtaaccatctggttccagaaccggcgggtcaaagagaagaaggtggtcaagcaaatcgaaagcgcctcatcttcacttcaccttgaccacccacccgatgcttgccccatctatttatgtctccgctttgtaccataaccgaacccacggaaagacctnngcngggtgca

SEQ ID NO: 5487 - DNA, 747 bp, Homo sapiens
  misc_feature (671)..(671): "n" may be a, t, c, g, other or unknown
  misc_feature (677)..(677): "n" may be a, t, c, g, other or unknown
  misc_feature (700)..(700): "n" may be a, t, c, g, other or unknown
tatgaggccgccgtggagcagctcaagagcgagcagatccgggcgcaggctgaggagaggaggaagaccctgagcgaggagacccggcagcaccaggccagggcccagtatcaagacaagctggcccggcagcgctacgaggaccaactgaagcagcagcaacttctcaatgaggagaatttacggaagcaggaggagtccgtgcagaagcaggaagccatgcggcgagccaccgtggagcgggagatggagctgcggcacaagaatgagatgctgcgagtggagaccgaggcccgggcgcgcgccaaggccgagcgggagaatgcagacatcatccgcgagcagatccgcctgaaggcgtccgagcaccgtcagaccgtcttggagtccatcaggacggctggcaccttgtttggggaaggattccgtgcctttgtgacagaccgggacaaagtgacagccacggtggctgggctgacgctgctggctgtcggggtctactcagccaagaatgcgacagccgtcactggccgcttcatcgaggctcggctggggaagccgtccctagtgagggagacgtcccgcatcacggtgctggaggcgctgcggcaccccatccaggtcagcccggcggttctcagtcgaccccaggacgtgctggaaggtgttgngcttantcccaacctggaagcacggtgcncgacattggccttacaaccaggaacacccagaagaaccggggcctgt

SEQ ID NO: 5488 - DNA, 789 bp, Homo sapiens
  misc_feature (705)..(705): "n" may be a, t, c, g, other or unknown
  misc_feature (732)..(732): "n" may be a, t, c, g, other or unknown
  misc_feature (766)..(766): "n" may be a, t, c, g, other or unknown
aaaaacaggtggaatccgggctggagccggagctccggcggcgcgggtggcggcacgtccctccagacagtaccacaggcacctggagtaccggcatcggtcgctgtggcccccgagtgtccgtcagagcctaggggagcctgccctcccgcgcctcgtcggggcccggccaggcaccttggccgccggcgcacggacgcgggcacgagcactagatcacggctgctggacctcggcacgttgacaagatttctctggggtaccgcggaggattactttgaatttcggtggtcgcctgtggtctggcatatttagaacttaagtctattatttcgggcaccatgactttgaggcttttagaagactggtgcagggggatggacatgaaccctcggaaagcgctattgattgccggcatctcccagagctgcagtgtggcagaaatcgaggaggctctgcaggctggtttagctcccttgggggagtacagactgcttggaaggatgttcaggagggatgagaacaggaaagtagccttagtagggcttactgcggagactagtcacgccctggtccctaaggagataccgggaaaagggggtatctggagagtgatctttaagccccctgacccagataatacattttttaagcagattaaatgaatttttagcgggagaaggcattgacagtgggtgagttgancaaaagctctttggacatgaaaatggnttccttaaacccagaaccagggcattgaatcccnggaaatggggggccccctatgtt

SEQ ID NO: 5489 - DNA, 689 bp, Homo sapiens
  misc_feature (657)..(657): "n" may be a, t, c, g, other or unknown
  misc_feature (669)..(669): "n" may be a, t, c, g, other or unknown
  misc_feature (680)..(680): "n" may be a, t, c, g, other or unknown
gtgctgccgagtagtcccggaagcgaagcagcgatggcggagagtccgactgaggaggcggcaacggcgggcgccggggcggcgggccccggggcgagcagcgttgctggtgttgttggcgttagcggcagcggcggcgggttcgggccgcctttcctgccggatgtgtgggcggcggcggcggcagcgggctcccgccctcagccgctgcccacggggccgcgctgcttagccactgggaccccacgctcagctccgactgggacggcgagcgcaccgcgccgcagtgtctactccggatcaagcgggatatcatgtccatttataaggagcctcctccaggaatgttcgttgtacctgatactgtcgacatgactaagattcatgcattgatcacaggcccatttgacactccttatgaagggggtttcttcctgttcgtgtttcggtgtccgcccgactatcccatccacccacctcgggtcaaactgatgacaacgggcaataacacagtgaggtttaaccccaacttctaccgcaatgggaaagtctgcttgagtattctaggtacatggactggacctgcctggagcccagcccagagcatcttctcagtgctcatctctatccagtccctgatgactgagaacccctatnacaatgagcccngctttgaacangagagacat

SEQ ID NO: 5490 - DNA, 804 bp, Homo sapiens
  misc_feature (730)..(730): "n" may be a, t, c, g, other or unknown
  misc_feature (744)..(744): "n" may be a, t, c, g, other or unknown
  misc_feature (767)..(767): "n" may be a, t, c, g, other or unknown
gataacagctcgatgtcctctggccatgactgaagaacttctccaagacctggctcagtataaaacacacaaggataagaatgtaatgatgtctgctagaactttgattcacctcttccgaacactgaatcctcagatgctgcagaagaaattccggggtaagcctacagaggcctccatagaagcaagagtacaagaatatggagaattagatgctaaagattacattccaggagcagaagttctggaagttgagaaagaagagaatgctgaaaatgatgaagatggatgggaaagtaccagtctcagtgaggaggaggatgctgatggtgaatggattgatgtgcaacactcttccgatgaagaacagcaagaaatctccaagaagctgaacagcatgcccatggaggagcggaaggccaaagctgcagccatcagcactagccgagttttaactcaggaagacttccagaaaatccgcatggcccaaatgagaaaagaacttgatgctgcccccgggaaatcccagaagaggaaatacattgaaatagacagtgatgaagagcccaggggtgaattactttctcttcgggacattgaacgccttcataaaaagccaaagtctgacaaagagacaggactagcaactgcaatggctggaaagacagaccgaaaagaatttgtgaggaagaaaaccaaaacaaatccattttccagttcgacaaataangagaagaaaaaacngaagaactttatgatgatgcggnatagcccgaatgtccgggccaaaaaataagccgttcc

SEQ ID NO: 5491 - DNA, 844 bp, Homo sapiens
  misc_feature (815)..(816): "n" may be a, t, c, g, other or unknown
  misc_feature (833)..(833): "n" may be a, t, c, g, other or unknown
cgcagcgcggcctgggctcccgcgtgtttaaaagtgcgcttgtggctgctgctgtcttaactcctgtgcttggcggacagacaggcgagatggcggcggaggtgttgccgagtgcgaggtggcagtattgtggggcgcccgacgggagccagagagctgtactggtccagttctccaacgggaagctacagagtccaggcaacatgcgctttaccttgtatgagaacaaagattccaccaaccccaggaagaggaatcaacggatcctggcagctgaaacagataggctctcctatgtgggaaacaattttgggactggagccctcaaatgcaacactttgtgcaggcactttgtgggaattttgaacaagacctctggccaaatggaagtatatgatgctgaattgttcaacatgcagccactattttcagatgtatcagttgagagtgaactggcgctagagagtcagaccaaaacttacagagaaaagatggattcttgtattgaagcctttggtaccaccaaacagaagcgagctctgaacaccaggagaatgaacagagttggcaatgaatctttgaatcgtgcagtggctaaagctgcagagactatcattgatacgaagggtgtgactgctctggtcagcgatgctatccacaatgacttgcaagatgactccctctaccttcctcctgctatgatgatgcagccaacctgaagacgtgtataaatttgaagaatcttcttttccctgcggagtattgaaagctcttcaaagcccattttgaacttttcaaggaaccgttaccgtcannaagaaaatacttgaaanaatgaattgga

SEQ ID NO: 5492 - DNA, 828 bp, Homo sapiens
  misc_feature (659)..(659): "n" may be a, t, c, g, other or unknown
  misc_feature (690)..(690): "n" may be a, t, c, g, other or unknown
  misc_feature (709)..(709): "n" may be a, t, c, g, other or unknown
  misc_feature (806)..(806): "n" may be a, t, c, g, other or unknown
  misc_feature (820)..(820): "n" may be a, t, c, g, other or unknown
tggaactccagctttgttcttaattcaattaattttcaacaatttcttggaatgtggtgtatcagatgaaaggttctttctcagtttggaatcacttgtaggctgtgttctttctggtccaacttcaccactagctttcagtgactcagttttaaatgttattaatcaaaatgcaaagcagttggaaaataaggagcatctctggaaaatgtggagtgttatagtcaccccattaactgaattgattaatcagaccaatgaagtaaatcaaggtgatgccttagaacataattttagtgccatctatggtgcattgactttaccagtaaaccacattttttcagaacagagatttccagtggccaccatgaagactttgcttagaacttggtcagaattatatagagcatttgctcgttgtgctgctttggtggcaacagcagaagagaacttgtgctgtgaggaactttcttccaagataatgtccagtttggaagatgaaggcttttctaatttgttgttcgtggatagaattatttatattattactgtaatggttgattgcattgacttctcaccatataatattaaatatcagcccaaagttaaatcaccacagagaccttcagattggtccaaaaagaagaatgagcccctanggaaattgacttctttatttaaacttattgngaaagtgatctattctttncacacactgagcttcaagggaacacattctgatccctcttcactattggcaactcaatcaccagcattattttcagtgacttgggcatattctttgncttctatgatcccnaaaatatt

SEQ ID NO: 5493 - DNA, 705 bp, Homo sapiens
  misc_feature (82)..(82): "n" may be a, t, c, g, other or unknown
  misc_feature (689)..(689): "n" may be a, t, c, g, other or unknown
  misc_feature (699)..(699): "n" may be a, t, c, g, other or unknown
  misc_feature (703)..(703): "n" may be a, t, c, g, other or unknown
aaaaaattaactgggcatggtggtgggcacctgtagtcccagctactcgggaggctgaggcaggagaatctcttgaacccangaggcagaggttgcagtgagccaagatcatgccactgcactccagcctggcgacagagcgagactccatttaaaaaaaaaaacaccagggcatctgtaagccactttgggagtcaaaagaatgtagagctgggctggactccttagaagaaagttaagttctgagtgtgggaggaagtgcctgcacccccacatccagacagcccgtcactcctgctgccgaagactgacttgctgattcgggctctgcctccatagtgggggcacagagccagggagagtgcccacaggcccagggatcctgggtgtgggaccagggagaatgcccacaggccccagggcctttttgagcccagggcgctctctgcacaggcctgctacaacttcatccgaagcatggccgcctacagcctcctgctgttcctgctgcagatcaaggacagacacaacggcaacattatgctggacaagaagggccatatcatccacatcggtcagccagccacagcgccacccttctctcccttaccccggcacccaggggtggatagggatccccaccccacagagaggagaatgcccaggaccacccttgccaggaatgtcanggtccagctntgangt

SEQ ID NO: 5494 - DNA, 772 bp, Homo sapiens
  misc_feature (739)..(739): "n" may be a, t, c, g, other or unknown
  misc_feature (741)..(741): "n" may be a, t, c, g, other or unknown
  misc_feature (760)..(760): "n" may be a, t, c, g, other or unknown
aagatgcacgcaacccacaagtcaatgaccaggtccctctgtgttggttgctgctctgggctctccgttagcccccctccacctgctccactcgctcctgcctgggtggcaggaatttgagtttgctattcctgttttataacctgttctgcagaaacctatttttattaaagatttttataagaaagggaaacctccatgtcttcagcttgttccctgggccaacggctctgaggtgacagtggcattaggatgtgaccagtcactaaggggcactgccttcctgcaggggagtccctgaagccccagccccaagtgtggcaaagacaggaccagatcccaggagtctaggtgggagtgagccgacccaccatggcgtccgtggccacagctgtagacagggctccttgcagtgggctgcaccgtggcctgctgaaagcacacagtggacacgagctgagtccagagcttcctctgaactggggcttagctctccagtggggaaccatggtcagcggctgtagcccctgggcaagatggtgcctggcttcctgccctctgcagggtcatgggagtgtctgggaactcagggtcagggccagatggctgttcctggggcctggggctccagctcaagctgtttgggaataggaggaactcttggcttggagaacccatcacacagcggggaggcctgggatggttggtctgcggggagcacttaaactgggggtggcananccgtgtgtggctgtgtgtnggccaatcggga

SEQ ID NO: 5495 - DNA, 804 bp, Homo sapiens
  misc_feature (668)..(668): "n" may be a, t, c, g, other or unknown
  misc_feature (746)..(746): "n" may be a, t, c, g, other or unknown
  misc_feature (767)..(767): "n" may be a, t, c, g, other or unknown
  misc_feature (799)..(799): "n" may be a, t, c, g, other or unknown
cccttgttccccgccgccgccgtcgctgacccagcccgccaggcgctcctgaccgtcgcttcctccggtcccaggtccccggccctcgcctcagccccggcccctggtccccagccctcgtcgcagccccggccgtccgccgccgccatgtccaaggaggagcgccccggtcgggaggagatcctggagtgccaggtgatgtgggagcctgacagtaagaagaacacgcagatggaccgcttccgggcggctgtgggcgccgcctgcggcctggcgctggagagttatgatgacttgtaccattggtccgttgagtcatattcagacttctgggcagagttctggaaattcagtgaaattgtcttctcacgtgtgtatgatgaggttgtggacacatcgaaaggaatcgcagatgtccccgagtggttcaaaggcagtcggctcaactatgcagaaaacctcctgcggcacaaagagaatgacagagttgccctttacattgcaagggaaggcaaagaggaaattgtggaggtgacttttgaagagctgaggcaagaagtggctttgtttgcagcagcaatgaggaaaatgggtgtgaagaaaggagatcgggttggtggttatttacccaacagtgagcacgctgtcgaggcgatgctggctgcggnaaagcattggtgccatctggacttcacgtccccggacttcggtgtgaatggtgtgctggaccggttttttaaatttancccaaagcttatcttctctgngaagcttgtggctatatggcaaaaacccaacncctgg

SEQ ID NO: 5496 - DNA, 784 bp, Homo sapiens
  misc_feature (686)..(686): "n" may be a, t, c, g, other or unknown
  misc_feature (741)..(741): "n" may be a, t, c, g, other or unknown
  misc_feature (777)..(777): "n" may be a, t, c, g, other or unknown
gtccgctccgtccgcccttagacctgttgcccagcatccctgcagttcgcggtacagtctctattagagcgcgtgtatagaggcagagaggagtgaagtccacagttcctctcctcctagaggtagaaggggcgcggggaaacgacctggtatcggttttccgcttgctgatcaagagctccctttaatgccgcacgcaggccggcgcccctcactgataaacgattggggctgggcctcggcctggagggcgttcgtcctctcagtgccctcagctcgtaaaggaggaaaccgaggcgtggggttgggcgagaacccaggggtcctcctgcacccccgccgccgtgtgtctcgtgtccagcgctggctggagcgcctcagccctggcgcggtgtagtcgtgagctggaacttctgacactgccccttccttccccgtccagcctgccgaccatgcccgcgggcgtgcccatgtccacctacctgaaaatgttcgcagccagtctcctggccatgtgcgcaggggcagaagtggtgcacaggtactaccgaccggacctgacaatacctgaaattccaccaaagcgtggagaactcaaaacggagcttttgggactgaaagaaagaaaacacaaacctcaagtttctcaacaggaggaacttaaataactatgccaagaattctgngaataatataagtcttaaatatgtatttcctaatttattgcatcaaactacttgnccttaacacttagtctaatgctaactgcaagaagangtgctca

SEQ ID NO: 5497 - DNA, 741 bp, Homo sapiens
  misc_feature (663)..(663): "n" may be a, t, c, g, other or unknown
  misc_feature (706)..(706): "n" may be a, t, c, g, other or unknown
  misc_feature (737)..(737): "n" may be a, t, c, g, other or unknown
gtgcaacggccgttagaggagctgagggagggaaccaccgctcaccgcagacgtagtggctgcagtcagtcttcccgagtgagggatttcgccgcccgctttcaggcccgtttggcttaaataactgtgattgatggccatgcaggagaaatatccaactgaggggatctctcacgtcacttcaccgagttccgatgtgattcagaagggcagttccctggggactgaatggcagaccccagttatctcggagccctttcggagccgcttcagccgctgttcaagtgtagccgacagtggggacacagccattggtacatcatgctcagatattgcggaggatttttgcagctcaagtggcagtcctcctttccagcccatcaaaagccacgtaaccattccaacagcccatgtgatgccttctactttagggacctctcctgccaagccaaattctacacctgttggaccctcttcctctaaactccctttgtcagggttggctgaaagtgtgggaatgacaagaaatggagacctcggtgcaatgaaacattctccaggcctatctagagatctcatgtatttctctggtgctactggagaaaatggaattgagcagtcctggtttccagcagtgggccatgaaagacaagaagaggcgangaagtttgatattcctagcatggaatctacccttaatcagtcngcaatgatggagacactttattcagatcctnacca

SEQ ID NO: 5498 - DNA, 811 bp, Homo sapiens
  misc_feature (717)..(717): "n" may be a, t, c, g, other or unknown
  misc_feature (759)..(759): "n" may be a, t, c, g, other or unknown
  misc_feature (810)..(810): "n" may be a, t, c, g, other or unknown
tcctcgtgctcctcccggggtgcttggcacagcctcggattcctccctctcgctgctcgagtcagtttccctatcggcggcagcgggcaaggcggcggcggcggcggcggcagccgcggtggcggcgtggggaacatctcggcagccaccgcgcttctcccgctggagcgggcgtccagcttggctgccctcggtccttccctgccacgtttcgggtcgccctgcaccccccacccaggctcgcttctcttcgaagcgggaagggcgccttgcaggatcctgccgcccctccaaccggatcctgggtctagagctccccagagcgaggcgctcgccaggactcctgccccgccaaccctgaccgccggggggtgcccccgggacgtagcgccgcggagaggaagcggcaaaggggaccatgcggcgcctgactcgtcggctggttctgccagtcttcggggtgctctggatcacggtgctgctgttcttctgggtaaccaagaggaagttggaggtgccgacgggacctgaagtgcagacccctaagccttcggacgccgactgggacgacctgtgggaccagtttgatgagcggcggtatctgaatgccaaaaagtggcgcgttggtgacgacccctataagctgtatgctttcaaccagcgggagagtgagcggatcttcagcaatcggccattccggaactcgcatctgagtgnattaaaccgacccctacgcatctgatccgggaaatatattantggatgacttcacaatgacctgatgctgtaaacagttatcaaatgccaagng

SEQ ID NO: 5499 - DNA, 728 bp, Homo sapiens
  misc_feature (519)..(519): "n" may be a, t, c, g, other or unknown
  misc_feature (667)..(667): "n" may be a, t, c, g, other or unknown
  misc_feature (681)..(681): "n" may be a, t, c, g, other or unknown
  misc_feature (693)..(693): "n" may be a, t, c, g, other or unknown
gtgcaaggggagccgtggcccgggcccggggcgtgcgagacggcggaagcagcccagggccttgctgccgccatgactgaggaatcagaggagacagtcctgtacattgagcaccgctatgtctgctctgagtgcaaccagctgtatggatcactggaagaggtgcttatgcaccaaaactcccacgtgccccagcagcactttgagctggtgggcgtggctgatcccggagtcactgtggccacagacacagcttcaggcacgggcctctatcagacccttgtgcaggagagccagtaccagtgcctggagtgtggtcaactgctgatgtcacccagccagctcctggagcaccaggagctgcacctgaagatgatggcaccccaggaggcagtgccagctgagccatcacctaaggcaccacccctgagctccagcaccatccactacgagtgtgtggattgcaaggctctctttgccagccaggagctctggctgaaccaccggcagacgcacctncgggccacacccaccaaggctcctgcccctgttgtcctggggtccccagttgttctagggcctcctgtgggccaagcccgagtggctgtggagcactcataccgaaaggcagaagaaggtggggaaagggcgactgtccatctgccgntgcacaccactgangtagtgactgangtggactgttctttacagtgctctgatgctccagt

SEQ ID NO: 5500 - DNA, 788 bp, Homo sapiens
  misc_feature (728)..(728): "n" may be a, t, c, g, other or unknown
  misc_feature (776)..(776): "n" may be a, t, c, g, other or unknown
  misc_feature (787)..(787): "n" may be a, t, c, g, other or unknown
tcatggccggctcctaccctgaaggtgcacctgcaatcctcgccgataagaggcagcagttcggaagccggttcctgagcgatccggcgcgggtcttccaccacaatgcctgttgattatgagatcaatgcccacaaatactggaatgacttctacaaaatccacgaaaatgggtttttcaaggatagacattggctttttaccgaattccctgagctggcacctagccaaaatcaaaatcatttgaaggattggttcttggagaacaagagtgaagtatgtgaatgtagaaacaatgaggatggacctggtttaataatggaagaacagcacaagtgttcttcgaagagccttgaacataaaacacagacacctcctgtggaggagaatgtaactcagaaaattagtgacctggaaatttgtgctgatgagtttcctggatcctcagccacctaccgaatactggaggttggctgtggtgtgggaaacacagtctttccaattttacaaacgaacaatgacccaggactctttgtttattgctgtgatttttcttccacagctatagaactggtccagacaaattcagaatatgatccttctcggtgttttgcctttgttcacgacctgtgtgatgaagagaagagttacccagtgcccaagggcagtcttgatattatcattctcatatttgtctttcagcaattgttccagacaagatgcagaangctatcaacaggctgagcaggcttctgaaacctggggggatggacttntgcgaaatacng

SEQ ID NO: 5501 - DNA, 724 bp, Homo sapiens
  misc_feature (657)..(657): "n" may be a, t, c, g, other or unknown
  misc_feature (671)..(671): "n" may be a, t, c, g, other or unknown
  misc_feature (680)..(680): "n" may be a, t, c, g, other or unknown
atgtctgtccctagcggaggcgcgggtgccgtgctgagagcgcctgcctgtgcgccccgagcggggctgggactcttccaagatgcccacgttcgcacagagaccccggatcgcggaagctcgcgtctcgaaaggcggtctcacgccctgcccgtcctgggttcacggtttttcatcacctgcggctgtcctgcgatcgaccacagctgtgcaggaggggcaggaggtatctgttgctgcagttaccggaacctttgccaggactagtacaggaccacgggctggtagctcagggatgtctcgtctgtgagttacagctgcacgctctccaggaaagaaggaatttcctcttctctggaaaccccaccacacagctggtttctcattggtgctgcttgcccattccctgagctgtgactgccagaggagtgggaggttggtggtgcctccagcccatcaggggcaggccctgggaccgcctgggaacaggaggactatggcacaaaccgagtgagtgatgggagcaacccgcagggctctgccacatccctgtcttccttcactgacatgaaacgcagaaaaggcagctttgccacaacacaggagcacgcaccgaatgtggccgcccaaggctctgtccttgaccctgttgtccangactgtttaccaanggctgacangcactgaatgccccgtgcacctggccagacacttgactcatgca

SEQ ID NO: 5502 - DNA, 741 bp, Homo sapiens
  misc_feature (654)..(654): "n" may be a, t, c, g, other or unknown
  misc_feature (678)..(678): "n" may be a, t, c, g, other or unknown
  misc_feature (739)..(739): "n" may be a, t, c, g, other or unknown
agagctcgcagctccgccggcgcctggtcccagcgcccgcggcgccgcgtccccggcccaaccatggcgtcctccgcggccggctgcgtggtgatcgttggcagtggagtcattgggcgaagctgggccatgctgtttgccagtggaggcttccaggtgaaactctatgacattgagcaacagcagataaggaacgccctggaaaacatcagaaaggagatgaagttgctggagcaggcaggttctctgaaaggctccctgagtgtggaagagcagctgtcactcatcagtggttgtcccaatatccaagaagcagtagagggtgccatgcacattcaggaatgtgttccagaagatctagaactgaagaagaagatttttgctcagttagattccatcattgatgatcgagtgatcttaagcagttccacttcttgtctcatgccttccaagttgtttgctggcttggtccatgtgaagcaatgcatcgtggctcatcctgtgaatccgccatactacatcccgctggttgagctggtcccccacccggagacggcccctacgacagtggacagaacccacgccctgatgaagaagattggacagtgccccatgcgagtccagaaggaggtggccggcttcgttctgaaccgnctgcaatatgcaatcatcaacgangcctggcggctagtggaggaaggaatcgtgtcttctaatgacctggaccttgtcatgtcanaa

SEQ ID NO: 5503 - DNA, 702 bp, Homo sapiens
  misc_feature (633)..(633): "n" may be a, t, c, g, other or unknown
  misc_feature (668)..(668): "n" may be a, t, c, g, other or unknown
  misc_feature (683)..(683): "n" may be a, t, c, g, other or unknown
atgcgccctccgtcccgcgctttgttgcgaaagcgagggggcgaggtgctgcggtgctagagcgcggcgcgaccggacgctgcgggcggggaagaggatggagactgtggcgtccgctgcaacggttggggctgcgcgtgagaaggtggcggtgtaggcacctgcgctcggggaaggctggcggcggcggccgagccatggcgggagacccccttctctgggctccctgaagtctcggggagccgtgacccatgggatcgttgagcagccgggtgctgcgccagccaagaccagcccttgcccagcaggcgcagggtgccagggcggggggctcggcccggaggccggacactggagacgatgcggcgggccacggattctgttactgtgcgggcagccacaagcgcaagcggagcagcgggtccttctgctactgtcaccctgactcggagacggacgaggatgaggaggagggggacgagcagcagcggctcctcaacacccctcgaaggaaaaaattaaagagtacatctaaatatatttatcaaacattatttttgaatggtgaaaacagtgacattaagatttgtgctctaggagaagaatggagcttacacaaaatatatttattgncaatctggctactttttctagtattgttcagtggntcttgggaaagaatncagcattgaatattatttg

SEQ ID NO: 5504 - DNA, 839 bp, Homo sapiens
  misc_feature (679)..(679): "n" may be a, t, c, g, other or unknown
  misc_feature (811)..(811): "n" may be a, t, c, g, other or unknown
  misc_feature (815)..(815): "n" may be a, t, c, g, other or unknown
  misc_feature (838)..(838): "n" may be a, t, c, g, other or unknown
cttgatgcagcacatcatcgacactggcctggagtattgaaggtggtatcaggatgccacatatccttatttcagattccattaccagaagatggaatgcaatttggaggatcaatgagcttacatggaaatcatatgacactggcatgttttcatggtccaaattttcgttcaaaatcttgggccctttttcatttagaagaaccaaatattgctttttggactgaagctcagaaaatctgggaagatggctccagtgatcattctacatatattgtacaaacactagattttcacctgggtcataatactatggttaccaaaccatgtggtgctttggaaagtcctatggcaacaataaccaagataacaaggcgtcgccatgaaaatccaccccatggagtagcaagtgtgaaagaatggttcaattatgttacagctacaaggaatgaagagctaaatctgcttcgtaatgttgatgctaacaacactgagaatagcactactgtgaagaattctagtttgttgagtggattcagaggaggttctagctacaaccatgaaacagagactatctttgcattaccaaggatgcagcttgactttaaatccattcatgttcaagaaccacaggagccttcattacaggatgccagcctgaaccaaaagtagaatgtantgtggtgacagagttcactgaccacatttgtgtgactatggatgctgagctcatcatggttcttcatgaattaatatcagcttatcttaaagaaaaagaaaagccatcttttcacctcggatttatctactngacnggacaaaaaagtccaattttatnc

SEQ ID NO: 5505 - DNA, 740 bp, Homo sapiens
  misc_feature (696)..(696): "n" may be a, t, c, g, other or unknown
  misc_feature (708)..(708): "n" may be a, t, c, g, other or unknown
  misc_feature (726)..(726): "n" may be a, t, c, g, other or unknown
tacctgctgctgcacacggatggtcccttggccagctcctggcgccactacattgccatcatggctgccgcccgccatcagtgttcttacctggtaggctcccacatggccgagtttctgcagactggtggtgaccctgagtggctgctgggcctccaccgggcccccgagaagctgcgcaaactcagcgagatcaacaagttgctggcgcatcggccatggctcatcaccaaggaacacatccaggccttgctgaagaccggcgagcacacttggtccctggccgagctcattcaggctctggtcctgctcacccactgccactcgctctcctccttcgtgtttggctgtggcatcctccctgagggggatgcagatggcagccctgccccccaggcacctacaccccctagtgaacagagcagccccccaagcagggacccgttgaacaactctgggggctttgagtctgcccgcgacgtggaggcgctgatggagcgcatgcagcagctgcaggagagcctgctgcgggatgaggggacgtcccaggaggagatggagagccgctttgagctggagaagtcagagagcctgctggtgaccccctcagctgacatcctggagccctcttcacacccagacatgctgtgctttgtggaagaccctactttcggatatgaaggacttcactcgganaaggggcttcangcaccccctaacctttcngggcccagggatta

SEQ ID NO: 5506 - DNA, 713 bp, Homo sapiens
  misc_feature (589)..(589): "n" may be a, t, c, g, other or unknown
  misc_feature (632)..(632): "n" may be a, t, c, g, other or unknown
  misc_feature (658)..(658): "n" may be a, t, c, g, other or unknown
  misc_feature (695)..(695): "n" may be a, t, c, g, other or unknown
tgaagaaaaggaagtccctgaggactcactggaggagtgtgccatcacttgttcaaatagccatggcccttatgactccaaccagccacataggaaaaccaaaatcacatttgaggaagacaaagtcgactcaactctcattggctcatcctctcatgttgaatgggaggatgctgtacacattatcccagaaaatgaaagtgatgatgaggaagaggaagaaaaagggccagtgtctcccaggaatctgcaggagtctgaagaggaggaagtcccccaggagtcctgggatgaaggttattcgactctctcaattcctcctgaaaggacatcggtgggatcaagtgaaaaaggaggaccaagaggcaacaggtcccaggctcagcagggagctgctggctgagaaagagcctgaagtcttgcaggactcactggatagatgttattcaactccttcagtttatcttggactgactgactcatgccagccctacagaagtgccttttacgtattggagcaacagcgtgttggcttggctgttgacatggatgaaattggaatccccggcggcagtggggctgttgctgntgctgtggctgtcgctgcccgtcaggctgccttcttttgtcgnttcccagcgcttgcgcaggacttctnctggcggcgctgcggatccagggggtcggcttgccangtacaggacttgcaattg

SEQ ID NO: 5507 - DNA, 837 bp, Homo sapiens
  misc_feature (829)..(829): "n" may be a, t, c, g, other or unknown
gcgtgaagcgcggacctttcaacaagggctttattaattctcacgctgcggccccggaaagcgatggaggtggcggctaattgctccctacgggtgaagagacctctgttggatccccgcttcgagggttacaagctctctcttgagccgctgccttgttaccagctggagcttgacgcagctgtggcagaggtaaaacttcgagatgatcaatatacactggaacacatgcatgcttttggaatgtataattacctgcactgtgattcatggtatcaagacagtgtctactatattgatacccttggaagaattatgaatttaacagtaatgctggacactgccttaggaaaaccacgagaggtgtttcgacttcctacagatttgacagcatgtgacaaccgtctttgtgcatctatccatttctcatcttctacctgggttaccttgtcagatggaactggaagattgtatgtcattggaacaggtgaacgtggaaatagcgcttctgaaaaatgggagattatgtttaatgaagaacttggggatccttttattataattcacagtatctcactgctaaatgctgaagaacattctatagctaccctacttcttcgaatagagaaagaggaattggatatgaaaggaagtggtttctatgtttctctggagtgggtcactatcagtaagaaaaatcaagataataaaaaatatgaaattattaagcgtgatattctccgtggaaagtcagtgccacattatgctgctattgacctgatggaaatggtctaatgattggatcctacaagtctttaacattggttangctgggca

SEQ ID NO: 5508 - DNA, 817 bp, Homo sapiens
  misc_feature (790)..(790): "n" may be a, t, c, g, other or unknown
  misc_feature (807)..(807): "n" may be a, t, c, g, other or unknown
  misc_feature (815)..(815): "n" may be a, t, c, g, other or unknown
cttgttcccgaagaagtagaagcatcgaaagcgttggagaggtgttaccggaacggcggcgacaagggtgttcccgaactagagtggggcatacataatcttgctgctatgcttcgaagctgtagtctgaatcaacctaagttttaaacagaaggtgaacctctgagatagaaaatcaagtatattttaaaagaagggatgtgggatcaaggaggacagccttggcagcagtggcccttgaaccagcaacaatggatgcagtcattccagcaccaacaggatccaagccagattgattgggctgcattggcccaagcttggattgcccaaagagaagcttcaggacagcaaagcatggtagaacaaccaccaggaatgatgccaaatggacaagatatgtctacaatggaatctggtccaaacaatcatgggaatttccaaggggattcaaacttcaacagaatgtggcaaccagaatggggaatgcatcagcaacccccacacccccctccagatcagccatggatgccaccaacaccaggcccaatggacattgttcctccttctgaagacagcaacagtcaggacagtggggaatttgcccctgacaacaggcatatatttaaccagaacaatcacaactttggtggaccacccgataattttgcagtggggccagtgaaccagtttgactatcagcatggggctgcttttggtccacccgcaaggtggatttcattcctcctttattggccaacccaggaccttccaggacctttcaagcaccttnccccagaaatccggaanaagaaaangg

SEQ ID NO: 5509 - DNA, 827 bp, Homo sapiens
  misc_feature (751)..(751): "n" may be a, t, c, g, other or unknown
  misc_feature (809)..(809): "n" may be a, t, c, g, other or unknown
  misc_feature (813)..(813): "n" may be a, t, c, g, other or unknown
attttggtgcgagagaaacaataggacggaaacgccgaggaacccggctgaggcggcagcagagcatcctggccagaacaagccaaggagccaagacgagagggacacacggacaaacaacagacagaagacgtactggccgctggactccgctgcctcccccatctccccgccatctgcgcccggaggatgagcccagccttcagggccatggatgtggagccccgcgccaaaggcgtccttctggagccctttgtccaccaggtcggggggcactcatgcgtgctccgcttcaatgagacaaccctgtgcaagcccctggtcccaagggaacatcagttctacgagaccctccctgctgagatgcgcaaattcactccccagtacaaaggtgtggtatctgtgcgctttgaagaagatgaagacaggaacttgtgtctaatagcatatccattgaaaggggaccatggaattgtggacattgtagataattcagactgtgaaccaaaaagtaagctcctgaggtggacaacaaacaaaaaacatcatgtcttagaaacagaaaagacccctaaggactgggtgcgtcagcaccgtaaagaggagaaaatgaagagccataagttagaagaagaatttgagtggctaaagaaatctgaagtcttgtactacactgtagagaagaaggggaatataagttcccagcttaaacactataacccttggagcatgaaatgtcaccagcaacagntacagagaatgaaggagaatgcaaagcattggaaccagtacaaaattatcttactggnaaancttgactttccgct

SEQ ID NO: 5510 - DNA, 750 bp, Homo sapiens
  misc_feature (629)..(629): "n" may be a, t, c, g, other or unknown
  misc_feature (698)..(698): "n" may be a, t, c, g, other or unknown
  misc_feature (700)..(700): "n" may be a, t, c, g, other or unknown
  misc_feature (729)..(729): "n" may be a, t, c, g, other or unknown
tcttctctgtgctgcgagtggctagctgggcagagccctgggggcgcggtgctgccgcctccaggtctccgccccgtgtgtgcgccctgcacttagggatccctccctcactgccccggtactcacaagcttctcggccccgaccttcgccctgggaggttctggccaggtgccgggaggggcgctgtgtcgagggcgatccccccaaagcagcgtcccgtgctaaagaaacagagcctcactctgtcacctaggctggagtgcagtggtgcaattatggctcactgcagtttcaacctcccagattccagtcatcctcctgcctcagccacccaagaagctgggaccacagggatcacatgcagtggtctaaggaagaagaagcagcagccagaaaaaaagtaaaagaaaactcagctgtgcgagtccttctggaagagcaagttaagtatgagagagaagctagtaaatactgggacacattttacaagattcataagaataagtttttcaaggatcgtaattggctgttgagggaatttcctgaaattcttccagttgatcaaaaacctgaagagaaggcgagagaatcatcatgggatcatgtaaaaactagtgctacaaatcgnttctcaagaatgcactgtcctactgtgcctgatgaaaaaaatcattatgagaaaagtctgggtcttcananggtcaaagcaaaacagaatctgatttttncaacctagacttttgaaaaac

SEQ ID NO: 5511 - DNA, 821 bp, Homo sapiens
  misc_feature (649)..(649): "n" may be a, t, c, g, other or unknown
  misc_feature (729)..(729): "n" may be a, t, c, g, other or unknown
  misc_feature (795)..(795): "n" may be a, t, c, g, other or unknown
  misc_feature (801)..(801): "n" may be a, t, c, g, other or unknown
cctgcagagaggaggaaagcctgcctcggaacagccctggacaaaggggctcagatgccccatcatactgcaggctccaagctccacagcacctgttgccttcattagcagcttttcctcctcttccctgcacttcccagaaccaaagaatgtgaagggggtccatggagggctcacgtccccgcgccccgagcggccacttagcgccgtcgccgccggctttcgacggcgagctggatctgcagcgatactccaacgggccagccgtgagcgcagggtcgctcgggatgggagcggtgagctggtctgagagtcgtgcaggcgaacggcgcttcccctgccctgtatgcgggaagcgcttccgcttcaactctatccttgctttgcacctgcgggcgcacccaggagcccaggccttccagtgccctcactgcggccaccgcgcggcgcagcgggctctgctgcgctcgcacctgcgcacacaccagcccgagcgcccacgtagtcctgctgcacgcctgttgctggagttggaagagcgcgcgctactacgcgaggcccgactggggagagcccgaagctcagggggcatgcaggccacccctgcactgagggtctggcgcggccccaggctccttcatcgtcccgncttccgttgcccctactgcaaaggcaaagtttcgcaccttcggcgggaaccgcgaacgccacctggaacatcctgcatangcccttggaaagtgccggcctgtgcaatttcgggtttccagcccaggaaggaaggaacttgcttgnacccanaagcccttgacgggccccac

SEQ ID NO: 5512 - DNA, 753 bp, Homo sapiens
  misc_feature (701)..(701): "n" may be a, t, c, g, other or unknown
  misc_feature (731)..(731): "n" may be a, t, c, g, other or unknown
  misc_feature (738)..(738): "n" may be a, t, c, g, other or unknown
aagagcagccattgtcccgcgcgcggacgcttgctgtcgccgagcagctcggcccttcagacttaacccccagcggccttgcggatgctgactaggagaggggaccgaactagcttaacccgagtcggccgtgttgcagaatcggggcagggggttgcctaacccgagttcgtcctgccgcagagccgtgctaggcactgaggcggtgacaggcccagcctgggctgcgggccagcggacgcccagtgcagctcaggacctcagcaccctgctgtgcctggaggagagcatggaagagcaggatgagaagcccccagagcccccgaaggcctgtgcacaggattctttccttcctcaagagattatcatcaaagtcgagggagaagacactgggtctctgaccatcccatctcaggaaggagtgaacttcaaaattgtgactgtggacttcacacgggaggaacagggtacttggaaccctgctcagaggaccctggacagagatgtgatcctggagaaccacagggacctagtctcttgggacttggcaactgcagttggaaaaaaagattcaacttcaaagcagaggatttttgatgaagaaccagctaatggagtgaagatagaaaggtttacaagggatgatccttgggtatcttcatgtgaagaagtggatgattgtaaaagaccagttggagaancaacaggaaaaacaagagatctttttgcanggaagtnggcatttacttcaaa

SEQ ID NO: 5513 - DNA, 612 bp, Homo sapiens
  misc_feature (581)..(581): "n" may be a, t, c, g, other or unknown
  misc_feature (584)..(584): "n" may be a, t, c, g, other or unknown
  misc_feature (601)..(601): "n" may be a, t, c, g, other or unknown
gggtctgcgcaccttcccggcccagccggcgattcattcaaaaggcgcgcaggctgcgcggctgtccgggcgctcgccgagccgggccgcggcgccgagtcgaacggggagccgagctggagctgccgcggcgcagccaggccggcgaccaccaggggcctgaggatgaagccaagtctgctgtgccggcccctgtcctgcttccttatgctgctgccctggcctctcgccaccctgacatcaacaaccctttggcagtgcccacctggggaggagcccgacctggacccagggcagggcacattatgcaggccctgccccccaggcaccttctcagctgcatggggctccagcccatgccagccccatgcccgttgcagcctttggaggaggctggaggcccaggtgggcatggcaactcgagatacactctgtggagactgctggcctgggtggtttgggccttggggggttccccgcgttccatgtcaaccatgttcctgggcacctctgggtactcatggctgtgatgagtgggggcggcgggcccgacgtggcgtggaggtggcagcaggggccancancggtggtgagacacggnagcctgggaac

SEQ ID NO: 5514 - DNA, 759 bp, Homo sapiens
  misc_feature (671)..(671): "n" may be a, t, c, g, other or unknown
  misc_feature (699)..(699): "n" may be a, t, c, g, other or unknown
  misc_feature (756)..(756): "n" may be a, t, c, g, other or unknown
gaccagcagcctgaactggctggggcatccggaaggcttagatcttgtggccaagagttcagaccgtggcgaagtggagagtgacatgcagttggatggcggtgactgcgtggtatggaagaaaattcagctgaaatttgctagaaaatgagttgttttggaaagagactgtagagaaaggcaaatggaagaagaaagcttctgtgcccccacagataccgactgaaaagtgttagcatgagcaaaagttcctatctaatattatatgctttcctttgctcccaaagtgctgggattacaggcgtgagccaccatgctcagccaaagctgttatttttttaagtatgtattcctagatgttttatacttttatagttattgtgaatggaatgatttttttcctagataacttttaatgaatagaaacagttcctgctttatctccaaattctagaacagtcactggcacacaagtgctcagtgtttaagtgacattgttttcctgcacccaaaagtagaatgctgctcctcattggaagcatgttactttagcaaagtgccactaaaatgaccatagtccatgtgctctgatcacttgtcacagatggtgataaaattcattcacagcttcctttctaggcctgcagcatttgggagacaaaactctgctnaacctttggaagaaaaaagagaccagangccattggtcccgaaagtggatggaagatagggaggtagaaggaatgttacaggctnaaa

SEQ ID NO: 5515 - DNA, 792 bp, Homo sapiens
  misc_feature (714)..(714): "n" may be a, t, c, g, other or unknown
  misc_feature (748)..(748): "n" may be a, t, c, g, other or unknown
  misc_feature (766)..(766): "n" may be a, t, c, g, other or unknown
agtgcgcgccggccgggcaaccctatgctggcgtaatcgggttcctccgagccgccgtaggactggttccggcgggctggtgaggaatggagccggtaggctgctgcggcgagtgccgcggctcctccgtagacccgcggagcaccttcgtgttgagtaacctggcggaggtggtggagcgtgtgctcaccttcctgcccgccaaggcgttgctgcgggtggcctgcgtgtgccgcttatggagggagtgtgtgcgcagagtattgcggacccatcggagcgtaacctggatctccgcaggcctggcggaggccggccacctggaggggcattgcttggttcgcgtggtagcagaggagcttgagaatgttcgcatcttaccacatacagttctttacatggctgattcagaaactttcattagtctggaagagtgtcgtggccataagagagcaaggaaaagaactagtatggaaacagcacttgcccttgagaagctattccccaaacaatgccaagtccttgggattgtgaccccaggaattgtagtgactccaatgggatcaggtagcaatcgacctcaggaaatagaaattggagaatctggttttgctttattattccctcaaattgaaggaataaaaatacaaccctttcattttattaaggatccaaagaatttaacattagaaagacatcaactcactgaagtangtcttttagataacccttgaacttcgtgtggggnccttggcttttgggtatnaattgctgtaaaggtgggaagccagt

SEQ ID NO: 5516 - DNA, 827 bp, Homo sapiens
  misc_feature (563)..(563): "n" may be a, t, c, g, other or unknown
  misc_feature (695)..(695): "n" may be a, t, c, g, other or unknown
  misc_feature (745)..(745): "n" may be a, t, c, g, other or unknown
  misc_feature (771)..(771): "n" may be a, t, c, g, other or unknown
  misc_feature (810)..(810): "n" may be a, t, c, g, other or unknown
aaacgcgctggctgactggggtcggcgtttagttcagcgcagcgactcggggacctggagctgacgcctagacacttgtattagctttaatagaagagaaatggaggagccatagaatattaaggatgaattcaggaaggcctgagaccatggaaaacttgcctgctctctacactattttccaaggagaggttgctatggtgacagactatggggcctttatcaaaatcccaggctgtcggaagcaaggtctggtccatcgaactcatatgtcatcctgtcgggtggataagccctctgagatagtagatgttggagataaagtgtgggtgaagcttattggccgagagatgaaaaatgatagaataaaagtatccctctccatgaaggttgtcaatcaagggactgggaaagaccttgatcccaacaatgttatcattgagcaagaagagaggcggaggcgatccttccaggattacactgggcagaagatcacccttgaggctgtcttgaacactacctgcaagaagtgtggctgtaaaggccactttgcaaaagattgnttcatgcaaccaggtgggactaaatactctctgatacctgatgaggaagaggaaaaggaagaggcaaagtcagcagagtttgagaagcctgaccctacaaggaatccttctagaaaaagaaagaaggagaanaagaaaaagaaacatagagataggaagtcatctgactctgacagcttcanactcttgagaagtgatacaggccaanaaggcaaaggcacacatcaaaaggacagccagggcagcnaaagaaagaaagaaaaa

SEQ ID NO: 5517 - DNA, 880 bp, Homo sapiens
  misc_feature (673)..(673): "n" may be a, t, c, g, other or unknown
  misc_feature (746)..(746): "n" may be a, t, c, g, other or unknown
  misc_feature (771)..(771): "n" may be a, t, c, g, other or unknown
  misc_feature (842)..(842): "n" may be a, t, c, g, other or unknown
  misc_feature (847)..(847): "n" may be a, t, c, g, other or unknown
agctcctccccctgcgtctctggcctcgccggtcttggggggatggttccatcatggcgtcaatgcagaccacaggaaggagggtggaagtatggtttccaaaacgactacagaaagaactgttggctttgcaaaatgacccacctcctggaatgaccttaaatgagaagagtgttcaaaattcaattacacagtggattgtagacatggaaggtgcaccaggtaccttatatgaaggggaaaaatttcaacttctatttaaatttagtagtcgatatccttttgactctcctcaggtcatgtttactggtgaaaatattcctgttcatcctcatgtttatagcaatggtcatatctgtttatccattctaacagaagactggtccccagcgctctcagtccaatcagtttgtcttagcattattagcatgctttccagctgcaaggaaaagagacgaccaccggataattctttttatgtgcgaacatgtaacaagaatccaaagaaaacaaaatggtggtatcatgatgatacttgttgatgccactgttatcatcctcctagcagaagatagtcctactgagaaaatgagcactttgatcattcagtctttgaactttaacctttgactggaagtgacctataggcaatgaagactacttcttttactgnatttttactcgtgtgcattctgggcgcatgttgatcgctggtcagtccaggcaactgacatgcttttattagncatacagtattaatgcaggtgtcangaaatgtcaaatataattccatttttaattttatttttttaagcttttgggaaaactccaggtcctcatgnattgngcaataacaatgactttccttggcgggtttggt

SEQ ID NO: 5518 - DNA, 581 bp, Homo sapiens
  misc_feature (531)..(531): "n" may be a, t, c, g, other or unknown
  misc_feature (533)..(533): "n" may be a, t, c, g, other or unknown
  misc_feature (564)..(564): "n" may be a, t, c, g, other or unknown
gtagcggcggcaacgaccatggaggccacgtcccgggaggcggcgccagcgaagagctcggcctcgggccccaacgctccccccgccctgttcgagctgtgcgggcgggcggtgagcgcccatatgggggttctggagagcggggtgtgggccctcccaggcccaatacttcaaagcatcctacctctgctcaatatatattacttggagaggattgaggaaactgccctcaagaaaggcctctcaactcaggccatctggcgccgactctgggatgaactgatgaagacaaggccttccagtttggaaagtgtgacatgttggcgagccaagtttatggaggccttttttttcccatgttctacgtgggaccattgatgtgtcttctgacaggcgtctttgtgatcagcggttctcacctcttctgcacagctcccgccatgtccgacagctcaccatctgtaacatgctgcagggtgcaaccgagctggtggctgagcccaaccgcagggttctggagaccctgccagntncctgcacactctcaagttccgcacctgctgntctctgatgtggctgct

SEQ ID NO: 5519 - DNA, 812 bp, Homo sapiens
  misc_feature (658)..(658): "n" may be a, t, c, g, other or unknown
  misc_feature (748)..(748): "n" may be a, t, c, g, other or unknown
  misc_feature (794)..(795): "n" may be a, t, c, g, other or unknown
tctctcgtgcaatggcgtccgggctggtaagattgctgcagcagggacatcgctgcctcctggctccagtcgcccccaagctggtccctccggttcggggagtgaagaagggattccgcgccgccttccgcttccagaaggagttagagcggcagcgccttctgcggtgcccgccgccgcccgtgcgccgttcagagaagccgaactgggattaccatgcagaaatacaagcttttggacatcggttacaggaaaacttttccttagatcttctcaaaactgcatttgttaatagctgctatattaaaagtgaggaggccaaacgccaacaacttgggatagagaaagaagctgttcttctgaatcttaaaagtaatcaagaactatccgaacaagggacatctttttcacagacttgccttacacagtttcttgaagacgagtacccagacatgcccactgaaggcataaaaaatcttgttgactttctcactggtgaggaagtcgtgtgtcacgtggctagaaacttggctgtggagcagttaacactgagtgaggaattcccagtgcccccagctgtgttacagcagactttctttgcagttattggagccctgttacagagcagtggacctgagaggactgcacttttcatcanggacttcttaattactcaaatgactggaaaagactctttgagatgcggaagataataaatcccatggggctattggtagaagaactgaanaaaaggaatggttcaacttctggaatcaaggaatttacttaggcanncttgggggggaccccaa

SEQ ID NO: 5520 - DNA, 724 bp, Homo sapiens
  misc_feature (671)..(671): "n" may be a, t, c, g, other or unknown
  misc_feature (677)..(677): "n" may be a, t, c, g, other or unknown
  misc_feature (702)..(702): "n" may be a, t, c, g, other or unknown
acgccacccgcttcctcgccgcagggggcccgcccgctggcccgtttccggtccggtgggtacaagatgacggagccgggcgcctctcccgaggacccttgggtcaaggtggagtatgcctacagcgacaacagcctggaccccgggctttttgtagaaagcacccgcaaggggagtgtagtgtccagagctaatagcatcggttccaccagtgcctcttctgtccccaacacagatgatgaggacagtgattaccaccaggaggcctacaaggagtcctacaaagaccggcggcggcgcgcacacactcaggctgagcagaagaggagggacgccatcaagagaggctatgatgaccttcagaccatcgtccccacttgccagcagcaggacttctccattggctcccaaaagctcagcaaagccatcgttctacaaaagaccattgactacattcagtttttgcacaaggagaagaaaaagcaggaggaggaggtgtccacgttacgcaaggatgtcaccgccctaaagatcatgaaagtgaactatgagcagattgtgaaggcacaccaggacaacccccatgaaggggaggaccaggtctctgaccaggtcaagttcaacgtgtttcaaggcatcatggattccctgttccagtccttcaatgcctncatctnatggccagctttcaggagctgtcancgtgtgtcttcagctggatcga

SEQ ID NO: 5521 - DNA, 670 bp, Homo sapiens
  misc_feature (472)..(472): "n" may be a, t, c, g, other or unknown
  misc_feature (542)..(542): "n" may be a, t, c, g, other or unknown
  misc_feature (626)..(626): "n" may be a, t, c, g, other or unknown
  misc_feature (635)..(635): "n" may be a, t, c, g, other or unknown
  misc_feature (668)..(668): "n" may be a, t, c, g, other or unknown
gaagccctggcaggtcagtggcaggcactgtcacgctgagtcctatgctggcagcggggaaccttggggagaacacgggacaccgcggaagccgggaaatgattgtgcggctgtaaccggcacaggttcgcggtccgagtcactgcaccgagactccaaggcctgcagcagaaacagtttaatagggggagaggagagaagaccccagttccgcctccatgagaggtttggggatgggggtgtttaggggtctggacaggggcggctgaagtgtggggtcgctggttggtggggaagtgacaggcgaatcctgggacgggaggtgaagaaaccgcattctcctgctgagtgggttccctcgtggggttttcaccctgcttggcgccagcctttccgttggaattcaagatctgagaaagaacttgggcaactcgagcagctctccgagatcttatccccaggcacaatgcanaagccggcggtcagtgtcttctgtgacctgactctcaggaaggcggcccccgcgaggcagtggggctcangtttccattccttggggacacacggctggtcagccagttgaatgattgtatttgggggagaagacagaagtgatctcttccttnctgactctnagactaatgaagagagaaaacaatatgattcanta

SEQ ID NO: 5522 - DNA, 849 bp, Homo sapiens
  misc_feature (704)..(704): "n" may be a, t, c, g, other or unknown
  misc_feature (762)..(762): "n" may be a, t, c, g, other or unknown
  misc_feature (806)..(806): "n" may be a, t, c, g, other or unknown
gatgaattcacgtcgaaggaaagctcagttttttctgggaactacaaacaaacgtgccaaaacagtggttttgcatatagatggccttgatgatacgtctcggagaaatctatgtgaagaggctttgttaaaaattaaaggtgttattagctttacttttcaaatggctgttcaaaggtgtgtggtgcgaatccgttcagatttgaaagctgaggctttggcatcagcaatagcatcaaccaaggttatgaaagctcagcaagttgtgaaaagtgaaagtggagaagagatgttggtcccattccaagatactcctgtggaagttgaacagaacacagagctacctgactacctgcctgaggatgagagtcccacaaaggaacaggacaaagcggtgtcccgggtcggctcacacccagaaggtggagctagctggcttagcacagctgcaaactttttatccagatcattttattggtgacttcacttttgggctcaaggactgtgtgaaccaacaaggggccagttttccattgttgtggtgaactgtcaagtgcaatttgcaataagttatcatgaaaagtttttagattacacgatcgcatatgctgcatttcacattttattggacattttaccccactgagtggtaaaaaggacagaggctacagatggagttgctttggttatgaaagtattttggnttggtttctttcatttaattgctcatatttaaaaaccatgggtccactggtaaaaccncatgtgtatgtgcactttacattttatttacgtgaacatgtgantaggaaactcatttcttttcaagccttaggacctaccttgaaa

SEQ ID NO: 5523 - DNA, 845 bp, Homo sapiens
  misc_feature (784)..(784): "n" may be a, t, c, g, other or unknown
  misc_feature (805)..(805): "n" may be a, t, c, g, other or unknown
  misc_feature (809)..(809): "n" may be a, t, c, g, other or unknown
atcctgagcttcgtgagttgagcgctgctgctccgcggtggagtcaccgcaccgctcccgggatcatggtgttctacttcaccagcagcagcgttaattcatctgcctacactatttacatgggaaaagataaatatgaaaatgaagatctgatcaagcatggctggcctgaagatatctggtttcatgtggacaaactctcttcggctcatgtataccttcgattacataagggagagaatatagaagacatcccaaaggaagtgctgatggactgtgcccaccttgtgaaggccaatagcattcaaggctgcaagatgaacaacgttaatgtggtatatacgccgtggtctaacctgaagaaaacagctgacatggatgtggggcagataggctttcacaggcagaaggatgtaaaaattgtgacagtggagaagaaagtaaatgagatcctgaaccgattagaaaagaccaaagtcgagcggttcccagacctagcagcagagaaagaatgcagagatcgtgaagagaggaatgagaagaaagcccaaattcaggaaatgaaaaagagagaaaaagaagaaatgaagaagaagagggaaatggatgaacttaggagctattcatcactaatgaaagttgaaaatatgtcttcaaatcaggatggcaatgattcagatgaattcatgtaaaaggagaaaaggagaaaaggacctttgaaagatgtgaatgtagagacaattgcagaccttttgggttcatctggggtctgaagtataaaatncaccaaaattctacctttatnctanccagaaattattgattttcaagttttaaaaaaattg

SEQ ID NO: 5524 - DNA, 849 bp, Homo sapiens
  misc_feature (662)..(662): "n" may be a, t, c, g, other or unknown
  misc_feature (761)..(761): "n" may be a, t, c, g, other or unknown
  misc_feature (811)..(811): "n" may be a, t, c, g, other or unknown
  misc_feature (840)..(840): "n" may be a, t, c, g, other or unknown
aggctcggcggacctgctgattgggaaccgatatggcggcgactctgggcagcggggagcgctggacggaagcttacattgacgcagttagaagaaacaaatacccagaagacacacctcctgagagtcatgacccctgtggctgctgtaactgcatgaaggcacaaaaggaaaagaagtctgagaatgagtggactcagacccggcagggtgaggggaactccacgtacagtgaggaacagctgcttggggtacaaaggatcaagaaatgcagaaattactatgaaattctgggagtttctcgagatgctagtgacgaagagcttaagaaagcttacagaaaactcgccctgaaatttcaccctgacaagaactgtgctcctggagcaacagatgctttcaaagcaataggaaatgcatttgcagtcctgagcaatcctgataagagacttcgctatgatgaatacggagatgaacaggtgactttcactgcccctcgagccagaccttataattattacagggattttgaagctgacatcactccagaagagctgttcaacgtcttctttggaggacattttcctacaggaaatattcatatgttttcaaatgtgacagatgacacttactattaccgtcgacggcacccgacatgagangacacagactcagaaggaggaggaagaagagaaaccttagactacatattctgcatttattcagctacttccagttcttgggaatgggattatatctgncattactcactgctggctctaatccccatatagctggtctataaatcgancttgggctacccatttctagagaacttanaacctgaag

SEQ ID NO: 5525 - DNA, 756 bp, Homo sapiens
  misc_feature (632)..(632): "n" may be a, t, c, g, other or unknown
  misc_feature (683)..(683): "n" may be a, t, c, g, other or unknown
  misc_feature (697)..(697): "n" may be a, t, c, g, other or unknown
  misc_feature (754)..(754): "n" may be a, t, c, g, other or unknown
agctgtccgcgaaacctagtgctgaagcaggcgcggacgtgcccggtgcctggcgcgtggtagcaggcgcccggtgccccggccggcgaagaccatggcgttcatggtgaagaccatggtgggcggccagctgaagaacctcactgggggcctgggaggcggcgaggataagggagatggggacaagtcggcagccgaagctcagggcatgagccgggaggagtacgaggagtatcagaagcaactcgtggaagagaagatggagcgggatgcacagttcacacagaggaaggcagagcgggccacactgcggagccacttccgagacaaataccggctacccaagaacgagacagatgagagccagatccagatggcaggtggagacgtggagctgccccgggagctggccaagatgatcgaggaggacacagaggaggaggaggagaaggcctcagtccttgggcagctggccagccttcctggcttgaacctgggctcactcaaggacaaggcccaggccacactgggggatctcaagcaatcagctgagaagtgtcacgtcatgtgaccacttcccggggttacccactgggctgggcccccatgagggctaagagtgtgtcaacttncagggacccatactccatttggggctttggttcccttgcccatcctagttncaagactttccatncatgccccagcctatcttctggttcttcctctccgtgggagtaaagtccccatcttnat

SEQ ID NO: 5526 - DNA, 804 bp, Homo sapiens
  misc_feature (718)..(718): "n" may be a, t, c, g, other or unknown
  misc_feature (730)..(730): "n" may be a, t, c, g, other or unknown
  misc_feature (773)..(773): "n" may be a, t, c, g, other or unknown
aacaatgctcattgaagctgcaaagggtggccatactaatgtagtttcttatctgttggattatccaaataatgttctgtcagttcccaccacagatgtgtctcagctccctccaccttctcaagatcagtctcaggtgccacgtgtgccaacgcatacacttgccatggttgtacctccccaggaacctgacagaacttcacaggagaactctcctgcccttttaggagtgcaaaaagctgtgagtaccagagtgcccactggttccaacagttcttctcagaccacagagtgtcttacacctgaatcctgttcgcagactacaagcaatgtggcttcccaatcgatgcctcctgtgtatccttcagttgacattgatgcacatactgagagcaatcatgacacagcattaacactagcttgtgcaggtggtcatgaagaacttgtatctgtgctcattgcacgggatgccaaaattgaacacagagacaaaaaaggtttcacaccactaatcctggcagcaacagcagggcatgttggagttgttgaaatccttttggataaaggtggagatatagaagcacagtctgaacgaactaaggatactccgctttcattggcatgttctggtggacgtcaggaggtggtagacttgctgctggctcgaggtgcaaataaagaacataggaacgtatctgattgtcaccactgagtctanctgcgtctggangatatggtaatatcattaagaatctgcttaatgcttgggcaanaaattaattcaaggactgggagtaaactagg

SEQ ID NO: 5527 - DNA, 743 bp, Homo sapiens
  misc_feature (666)..(666): "n" may be a, t, c, g, other or unknown
  misc_feature (704)..(704): "n" may be a, t, c, g, other or unknown
  misc_feature (707)..(707): "n" may be a, t, c, g, other or unknown
aagcattcccttcgtgccgctaccaagatggcggcgcccatcttgcggtccttttcctggggccggtggtctggtaccctaaatctctcagtattgttgcccttggggctgcgtaaggcccactcgggcgctcaggggttactggcagcgcagaaggctcgaggtctgttcaaggacttcttcccggagacggggacgaaaatagagctcccagagctcttcgaccgtggcacggcgagttttccccaaaccatttactgtggcttcgaccccacggcagactcgcttcatgtgggtcatctacttgcgctgctgggcctgtttcatttgcagcgagcgggccacaacgtgatcgcgctggtgggaggcgccacggcgcgcctgggagacccgagcggccgtaccaaggaacgcgaggcgctggagacagagcgcgtgcgagccaacgcgcgagctctgcgcctagggcttgaggccctggcggctaatcaccagcagcttttcactgatgggcgctcctggggcagcttcactgtgctggacaactcggcctggtaccagaagcagcacctggtggacttcctggcggcagtggggggtcacttccgcatggggacgctgctgagcccggcagaagcgtgcaacttgcggctcaagagccccganggcatgagcttggccgaagttcttttaccaagtgcttncangcctatgacttctattaccttctttccaacggttat

SEQ ID NO: 5528 - DNA, 755 bp, Homo sapiens
  misc_feature (695)..(695): "n" may be a, t, c, g, other or unknown
  misc_feature (715)..(715): "n" may be a, t, c, g, other or unknown
  misc_feature (736)..(736): "n" may be a, t, c, g, other or unknown
gaaagtaactccaggacgagaccggagcgacccgcgcagcgagcataggcggcgaagctgcgcccggcgcccgagaccggcagctgcgtggggcgggggctgcgcccgagcccgatctgccgctccggctccgagcagtggtctcggaaagagggtcgtggtcccgcacggatgcgcttgttgggagaaaccttggagattcacggcaaggcgtaaagcctggggcttccaacgatactctgggcagggatggaagcctagatgcctcaccgcaaggagcggccgagcgggtcctcgcttcacacacacggcagcaccggcaccgcggagggaggaaacatgtcccggctgtctctcacccggtcgcctgtgtctcccctggctgcccagggcatccccctgccagcccagctcaccaagtccaatgcacctgtgcacatcgatgtgggcggccacatgtacaccagcagcctggccacgctcaccaagtaccctgactccaggataagccgcctcttcaatggcactgaacccatcgtcctggacagtttgaagcaacattatttcattgaccgggatggggagattttccgctacgtcctgagcttctgcggacgtccaagctgctgcttcggatgactttaaggacttcagtcttgcttgtacgaggaggccgccgcttactatcaagcttncaagccccattggtgcgccnaaccttggaaccgcttggcancaaggaaccagggaaccaa

SEQ ID NO: 5529 - DNA, 799 bp, Homo sapiens
  misc_feature (720)..(720): "n" may be a, t, c, g, other or unknown
  misc_feature (761)..(761): "n" may be a, t, c, g, other or unknown
  misc_feature (784)..(784): "n" may be a, t, c, g, other or unknown
gaaaatgtttcctgttatttgctggacaagtcccaaagaacaggcagatgttcttattaaaagatcagcctataagattggtcaggaccaggcgcctctggccacgtgcctctcccctccagcacctgcggtctgcggtggcacctggcagctggaccacagccaggagaagggtactattagccctgcttcaaacatgcagaaactgaggcccggggagattaaataacctgcctgaaatgacagtgagtagctgcgcctggatttgagttctgctctggccaatccccaagctccacgctgtcagccaccccgctctcctacctcccagaggagcaggctacactcctgttccttttagagagagaaatattgcggccgggcgcggtggctcacgtctgtaatcccagcattttggcaggccaagggttttgccatgttcgtggggctggtctcaaactaattacctcagatgatccgcccacctcggcctcccaaagtgctgggattacagccgtcctgggccgccggacacccccgctggggccgatgcccaacagtgacatcgacttgagcaacctggagcggctggagaagtaccggagcttcgaccgctaccggcgccgggcagagcaggaggcgcaggccccgcactggtggcggacctaccgagagtatttcggggagaagacagagttccagcttctaaaatatttgctnctaaaatcttgaccacctgactttccggattgggatgccgntctgtgcgccttaaatactctgnagatcccaaagagaa

SEQ ID NO: 5530 - DNA, 810 bp, Homo sapiens
  misc_feature (731)..(731): "n" may be a, t, c, g, other or unknown
  misc_feature (755)..(755): "n" may be a, t, c, g, other or unknown
  misc_feature (766)..(766): "n" may be a, t, c, g, other or unknown
aaatgaaatgttttgaaatatacttaaacaacaaactttgaagaaagtgttgttataaaattattgaagcgatttctatgtggaaataaatgtgaaaaataactatgatattttggtaaaatattcaccacttataatgcctcatcttaatagctaactcaggtttaatagtcttataaaaagtaatcagttaaatgattacttgcttataaatatctaaactagtccagttatgaaatcagtgtaatacattgatttttaaaactgctgctttttatgctttaaggaaaatgtatttcatatttgagtttaaaggaattgaaattacttcaggaaatgaatataaaataggttcacagttaaatgaataagcttttgtttatttgtgggtggagttattctccaattttttctgccatttttggctctagttcaggttttagcttgattagcaaaggtttttgacaaacagtttatgaaaaaataaaacttaaatacattacacgggttgtaaggacaaaggattttaaaatctgagcacttaggtgaagggacaagcaggtttatgtgtttaaacagaaagaagggaaaaggtctatgtgatatggtactgaaattttgatcccaatagaattcatttctcttacgttgaatccccaatcataattaagcccgtataccccggattaaaattaaccggaagcatttcacataaatggttggtttcaagncattcaacctacccatggaaattncctggcccaanggattactttaaatccgggaatttaaaaatttttcctaatggaa

SEQ ID NO: 5531 - DNA, 696 bp, Homo sapiens
  misc_feature (666)..(666): "n" may be a, t, c, g, other or unknown
  misc_feature (673)..(673): "n" may be a, t, c, g, other or unknown
  misc_feature (678)..(678): "n" may be a, t, c, g, other or unknown
agcgccctccgcgatttgggctccagcgggcagggtgacttcctttttctgcccactctggtaacttattgctctgctgggctctttcccttagggtctctggccctgttcttgccccagcatgacttttatcgggacgccgttgtggaagcctcacgcaggagccctgcccccgtggagaagatcccactggtgactccaaccctaccaccatgaatggggtcctgatcccccatacgcccatcgcagtggacttctggagcctgcgccgggctggcaccgcacgtctcttcttcttgtctcacatgcactcggaccacaccgtgggcctgtctagcacctgggcccggcccctctactgctccccaattacagcccacctcttgcatcgtcacctacaggtatctaagcaatggatccaagccctggaggttggtgagagccatgtattacccctagatgaaattgggcaagagaccatgaccgtaaccctcctcgatgccaatcactgtcctggttctgtcatgtttctctttgaaggatattttggaaccatcctctacacaggtgattttcgatacacaccatccatgctaaaggagccagccctgacactggggaaacagatccatactttatacctagacaacaccaattgcaatccanccctggntcttncttcccgacaagaagctg

SEQ ID NO: 5532 - DNA, 820 bp, Homo sapiens
  misc_feature (685)..(685): "n" may be a, t, c, g, other or unknown
  misc_feature (691)..(691): "n" may be a, t, c, g, other or unknown
  misc_feature (755)..(755): "n" may be a, t, c, g, other or unknown
  misc_feature (792)..(792): "n" may be a, t, c, g, other or unknown
  misc_feature (795)..(795): "n" may be a, t, c, g, other or unknown
acaagatgggctatgacacaccgttgcattttgcttgtaagtttggaaatgcagatgtagtcaacgtgctttcgtcacaccatttgattgtaaaaaactcaaggaataaatatgataaaacacctgaagatgtaatttgtgaaagaagcaaaaataaatctgtggaactgaaggagcggatcagagagtatttaaagggccactactacgtgcccctcctgagagcggaagagacttcttctccagtcatcggggagctgtggtccccagaccagacggctgaggcctctcacgtcagccgctatggaggcagccccagagacccggtactgaccctgagagccttcgcagggcccctgagtccagccaaggcagaagattttcgcaagctctggaaaactccacctcgagagaaagcaggcttccttcaccacgtcaagaagtcggacccggaaagaggctttgagagagtgggaagggagctagctcatgagctggggtatccctgggttgaatactgggaatttctgggctgttttgttgatctgtcttcccaggaaggcctgcaaagactagaagaatatctcacacagcaggaaataggcaaaaaggctcaacaagaaacaggagaacgggaagcctcctgccgagataaagccaccacgtctggcagcaattccatttncgtganggcgtttctagatgaagatgacatgagcttggaagaaataaaaaatcggcaaaatgcagctcgnaataacagccggccacagtcggtgcttttggcatacnagngcacgccttcccttggagcagagca

SEQ ID NO: 5533 - DNA, 711 bp, Homo sapiens
  misc_feature (616)..(616): "n" may be a, t, c, g, other or unknown
  misc_feature (644)..(644): "n" may be a, t, c, g, other or unknown
  misc_feature (697)..(697): "n" may be a, t, c, g, other or unknown
agctgctggctgggctgcctgttgagtcagccttcttccctcacggctcttctcccggtccctgaaactcggctgccaggggagctggagccacctgcgaaggtgtcctcccatactggacccctacaggaagctccgtgtgcccagctggggcacagccccagctgatgccccagaggggccacccatcgcaagaggggctttgggctctgccctccctccccatggcgcatgggccaaagcctgagactgaaggactgttggacctcagcttcctgacagaggaggagcaggaggccattgctggcgtcctccaacgagatgcccgcctgcgccagctggaggaggggcgggtcagcaagctccgggcctcagtggcagaccctgggcagctgaagatcctgacaggggactggttccaggaagcacgctcccagcggcaccacaatgcccacttcggctctgaccttgtccgagcgtctatgcgcaggaagaagagcaccaggggagaccaggctccaggccacgacagggaggctgaggctgctgtgaaagagaaggaagaggggccagagcccaggctcaccattgatgaggcccctcaggagaggctcanggagactgaggcttcagatcctgaggangcgtccaagcccaggaagatcctggccaaggagaccaacaggtctgtgccgangaagcttacccgga

SEQ ID NO: 5534 - DNA, 746 bp, Homo sapiens
  misc_feature (654)..(654): "n" may be a, t, c, g, other or unknown
  misc_feature (700)..(700): "n" may be a, t, c, g, other or unknown
  misc_feature (702)..(702): "n" may be a, t, c, g, other or unknown
actgaaacccaagagcctagatgtgcggcaggaggagctgggggccgtggtcgacaaggagatggcggccacatccgcagccattgaagatgctgtgcggaggattgaggacatgatgaaccaggcacgccacgccagctcgggggtgaagctggaagtgaacgagaggatcctcaactcctgcacagacctgatgaaggctatccggctcctggtgacgacatccactagcctgcagaaggagatcgtggagagcggcaggggggcagccacgcagcaggaattttacgccaagaactcgcgctggaccgaaggcctcatctcggcctccaaggctgtgggctggggagccacacagctggtggaggcagctgacaaggtggtgcttcacacgggcaagtatgaggagctcatcgtctgctcccacgagatcgcagccagcacggcccagctggtggcggcctccaaggtgaaggccaacaagcacagcccccacctgagccgctgcaggaatgttctcgcacagtcaatgagagggctgccaatgtggtggcctccaccaagtcaggccaggagcagattgaggacagagacaccatggatttctccggcctgtccctcatcaagctgaagaagcaggagatggagacgcangtgcgtgtcctggactggagaagacgctggaagctgaacgcatgcngntgggggaattgccggaacaacactacgtgctggctggggcatca

SEQ ID NO: 5535 - DNA, 776 bp, Homo sapiens
  misc_feature (707)..(707): "n" may be a, t, c, g, other or unknown
  misc_feature (758)..(758): "n" may be a, t, c, g, other or unknown
  misc_feature (771)..(771): "n" may be a, t, c, g, other or unknown
ccggagactcgggaggctgagctttcctcggcctgagccagccagaccccgggcaccgcgctcacccctcttcgccgccacgtccgcgaaggcctcacgcgcgaggccaggcgaggccccgaggcgcccaccacttcacgacaccggagcgaaccgggcgccagaggctgcgacccccctgccccgaatcctgccggtgggagtggctgcatttgaaccaaacggccttcgcgggcagcagccgtcgccccgcagtcccggggctcccaagggcctgtgaccgacgccgccctccgcgtcttcgtccccgaagccccgggaaccatccgccctcgggagaccatgctgcagatgcgaggaaagccgtttcctggaacatcggaattctaaccccagggtgaaggactcacgacaggcgaggggcagacatgctgaattccacgggcgaactggagttttcgaacgaagaagatcccgagatcatctcccaactcacttccctgcctctgtccggtgggaaaagctcagctggtgtgcccgaaaaaacgggctatccggactccgtttatgtcatggcagccaacatttttcagggtattcgaatcgaaaagtcggcacagaaagtcttaatcaagtatgggaatgaacccctgcggtccttgtccgagtctgaggatcagtcctttaacgttggcttatgagctggntttaatgcccttgaaatatcaagatatttggaaactatattgatagacagntgatttccaagtncacac

SEQ ID NO: 5536 - DNA, 774 bp, Homo sapiens
  misc_feature (659)..(659): "n" may be a, t, c, g, other or unknown
  misc_feature (698)..(698): "n" may be a, t, c, g, other or unknown
  misc_feature (721)..(721): "n" may be a, t, c, g, other or unknown
  misc_feature (771)..(771): "n" may be a, t, c, g, other or unknown
gcttgtcgtgcagctggccccaagcgcgcggggcaaggcggccctgcaggggtgagctttcctctgagaacccggggccttagcgacacgtaatccggttttccgtctccttggtgcagatgaagaaaccgacgcccatgggcgaaagggacctgctcaagttcactcaagaccacagagctgggcagcaagaaggagctcaagtccatgcccttcatcacctacctctcaggtttgctgacagcccagatgctgtcagatgaccagctcatttcaggtgtggagattcgctgtgaggagaaggggcgctgtccatctacctgtcacctttgccgccggccaggcaaggagcagctgagccccacaccagtgctgctggaaatcaaccgtgtggtgccactttataccctcatccaagacaatggcacaaaggaggccttcaagagtgcaccgatgagttcctactggtgctcagggaaaggggatgtgatcgatgactggtgcaggtgtgacctcagcgcctttgatgccaatgggctccccaactgcagcccccttctgcagccggtgctgcggctgtccccaacagtggagcccttcagtactgtggtctccttggagtgggtggatgttcagccagctattgggaccaaggtctncgactatattctgcagcataagaaagtggatgaatcacngacacttgacctgtacacagganaattcctgagttttgctgatgacttactctctggcctgggcacatcttgngta

SEQ ID NO: 5537 - DNA, 854 bp, Homo sapiens
  misc_feature (825)..(825): "n" may be a, t, c, g, other or unknown
  misc_feature (844)..(844): "n" may be a, t, c, g, other or unknown
  misc_feature (852)..(852): "n" may be a, t, c, g, other or unknown
agcgcaccgcgggaagatggcgttggaggtcggcgatatggaagatgggcagctttccgactcggattccgacatgacggtcgcacccagcgacaggccgctgcaattgccaaaagtgctaggtggcgacagtgctatgagggccttccagaacacggcaactgcatgtgcaccagtatcacattatcgagctgttgaaagtgtggattcaagtgaagaaagtttttctgattcagatgatgatagctgtctttggaaacgcaaacgacagaaatgttttaaccctcctcccaaaccagagccttttcagtttggccagagcagtcagaaaccacctgttgctggaggaaagaagattaacaacatatggggtgctgtgctgcaggaacagaatcaagatgcagtggccactgaacttggtatcttgggaatggagggcactattgacagaagcagacaatccgagacctacaattatttgcttgccaagaaacttaggaaggaatctcaagagcatacaaaagatctagacaaggaactagatgaatatatgcatggtggcaaaaaaatgggatcaaaggaagaggaaaatgggcaaggtcatctcaaaaggaaacgacctgtcaaagacaggctagggaacagaccagaaatgaactataaaggtcgatacgagatcacagcggaagattctcaagagaaagtggctgatgaaattcattcaggttacaggaaccaaagaaagacctgatagcccgagtagtgaggattattgtaccaaaaggcaattgacttctgatggaaaccgttgaattgaacaaatgnggctcttatatgaatggantcgaaganac

SEQ ID NO: 5538 - DNA, 774 bp, Homo sapiens
  misc_feature (626)..(626): "n" may be a, t, c, g, other or unknown
  misc_feature (719)..(719): "n" may be a, t, c, g, other or unknown
  misc_feature (739)..(739): "n" may be a, t, c, g, other or unknown
  misc_feature (766)..(766): "n" may be a, t, c, g, other or unknown
gtatcgccacgcctggtctctgggacgcccctccggaccggtttcgcctcgcggagccggtaggtccaggtgcagcggccgcagtgctgcgtccgtgcgccgcgggctggggcggtctcaggtgtgccgaagctctggtcagtgccatgatccggcaggagcgctccacatcctaccaggagctgagtgaggagttggtccaggtggttgagaactcagagctggcagacgagcaggacaaggagacggtcagagtccaaggtccgggtatcttaccaggcctggacagcgagtccgcctccagcagcatccgcttcagcaaggcctgcctgaagaacgtcttctcggtcctactcatcttcatctacctgctgctcatggctgtggccgtcttcctggtctaccggaccatcacagactttcgtgagaaactcaagcaccctgtcatgtctgtgtcttacaaggaagtggatcgctatgatgccccaggtattgccttgtaccccggtcaggcccagttgctcagctgtaagcaccattacgaggtcattcctcctctgacaagccctggccagccgggtgacatgaattgcaccacccagaggatcaactacacggaccccttntcaatcagactgtgaaatctgcctgattgtcaggggccccggaagtgaaaaagcggactgtcttctcagttcgctgacaaagtatgagacttnacgcatgatactcttttctnttcagagtctgaagccaaaaggagctnatcagctg

SEQ ID NO: 5539 - DNA, 826 bp, Homo sapiens
  misc_feature (709)..(709): "n" may be a, t, c, g, other or unknown
  misc_feature (733)..(733): "n" may be a, t, c, g, other or unknown
  misc_feature (809)..(809): "n" may be a, t, c, g, other or unknown
  misc_feature (812)..(812): "n" may be a, t, c, g, other or unknown
gacatctccgggaacccagcccaggccctgcctcccggacacaccgacgctcacgtagtcgcgcttgccacaaccctgcgggctctccgatgcggcgagcgagctggggagggggcttctccgcggcccaaaagcctgttcatctagccccatgatggctgtggacatcgagtacagatacaactgcatggctccttccttgcgccaagagaggtttgcctttaagatctcaccaaagcccagcaaaccactgaggccttgtattcagctgagcagcaagaatgaagccagtggaatggtggccccggctgtccaggagaagaaggtgaaaaagcgggtgtccttcgcagacaaccaggggctggccctgacaatggtcaaagtgttctcggaattcgatgacccgctagatatgccattcaacatcaccgagctcctagacaacattgtgagcttgacgacagcagagagcgagagctttgttctggatttttcccagccctctgcagattacttagactttagaaatcgacttcaggccgaccacgtctgccttgagaactgtgtgctcaaggacaaggccattgcaggcactgcgaaggttcagaacctcgcatttgagaagaccgtgaaaataaggatgacgttcgacacctggaagaactacacagacttttcttgtcagtacgtgaaggacacttatgccggntcagacagggacacgttcttcttngacatcagtttgcccgaaaagattcagtcttatgaaagaatggaatttgctgggtacttacgaatgcaatgggcanacntctgggacaggaac

SEQ ID NO: 5540 - DNA, 816 bp, Homo sapiens
  misc_feature (688)..(688): "n" may be a, t, c, g, other or unknown
  misc_feature (747)..(747): "n" may be a, t, c, g, other or unknown
  misc_feature (761)..(761): "n" may be a, t, c, g, other or unknown
  misc_feature (789)..(789): "n" may be a, t, c, g, other or unknown
agttaataggctggctgtcgcttggggttgctgcataaatgctaggagcagcagctctatggttatgaggtggggagaacggaatgacgtcatcgcttgggagctgctgcaggatggagtggaaagctgctgctgatggcattgtttttgtggcagcaagctgaatgacagatcctcactacaaagatacccctttggcccccgtgtaggcctccttggttcgggtgtttcaccatgccagcacagcgccatgagtcctggatgcatgctgctgtttgtgtttggctttgttggcggggcggtggtcattaattctgctatcttagtatctctctctgttttgctgcttgtgcacttttctatttctaccggtgtgccagctctgacgcagaacctaccaaggatactcagaaaagaacgccctatatcattaggaattttcccattacctgctggagatggattgcttacacctgatgctcagaaaggaggagagacccctggatctgagcaatggaaatttcaggaattaagtcaaccacgttctcataccagcctgaaggatgagctttctgatgttagccaaggcggatctaaagctaccactccagcatcaacagctaattcagatgtggcaacaattcctactgatactcccttaaaggaagaaaaccaaggatttgtgaangttacagatgccccaaataaatcagagataacaaacacattgaaatacaggtagcccangaaactagaaatgnatctactgggctcttgctgaaaatgaanaaaaagtcagaagttcaaccatcatcg

SEQ ID NO: 5541 - DNA, 850 bp, Homo sapiens
  misc_feature (750)..(750): "n" may be a, t, c, g, other or unknown
  misc_feature (809)..(809): "n" may be a, t, c, g, other or unknown
  misc_feature (847)..(847): "n" may be a, t, c, g, other or unknown
acggcgccggagagatggcggagttggacatcgggcagcactgccaggtggagcattgccggcagcgagattttcttccatttgtgtgtgatgattgttcaggaatattttgccttgaacacagaagcagggagtctcatggttgtcctgaggtgactgtaatcaatgagagactgaagacagatcaacatacatcttacccatgctctttcaaagactgtgctgagagagaacttgtggcagttatatgtccttattgtgagaagaatttttgcctgagacaccgtcatcagtcagatcatgagtgtgaaaaactggaaatcccaaagcctcgaatggctgccactcagaaacttgttaaagacattattgattccaagacaggagaaacagcaagtaaacgatggaaaggtgccaaaaatagtgaaacagctgcaaaggttgcattgatgaaattaaagatgcatgctgatggcgataagtcattaccacagacagaaagaatttactttcaggttttcttacctaaagggagcaaagagaagagcaaaccaatgctcttttgccaccgatggagcattggaaaggccatagactttgccgcttctctagccaggcttaaaaatgacaataacaaatttacagctaagaaattaaggctgtgtcacattacttcaggagaagccttacccttggatcatactttggaaacctggattgctaaggaggattgtcctttatataatgggnggaaatataatcttggaatatctcaatgatgaagacaattctgtaaaaatgttgaatcntacttggaatagcattcaaggattcaagtccgaaatcncag

SEQ ID NO: 5542 - DNA, 727 bp, Homo sapiens
  misc_feature (676)..(676): "n" may be a, t, c, g, other or unknown
  misc_feature (683)..(683): "n" may be a, t, c, g, other or unknown
  misc_feature (721)..(721): "n" may be a, t, c, g, other or unknown
tttccttttccttctctcctgagcgctcctgcagttcctggggcgtagtaggggatccacaagcgtttgtgaccagtgaagttctttacaagggtgagatctgcacgggaggacccgagcgagggtctcggcttgccaggaagccggggttccccgggaagcgtggagttcacccgcgcactcgaagtgcctttgcaaaattatatctgggtgttggcacccagccactattctgccaatgaagtacatcctggtcacgggtggggtcatctcaggcattggtaaagggatcattgccagcagcattggaacgattctaaaatcatgtggactccgagttactgccataaaaatcgacccctatattaacatcgatgctggcactttttcaccttatgaacacggtgaagtcttcgtcttaaatgatggtggagaagttgatttagaccttggaaattatgaaagatttttggatattaatctttataaagacaacaatatcaccacggggaagatatatcagcatgtgatcaataaagagaggcgtggtgattacctggggaaaacagtgcaagttgtccctcacattactgatgctgtccaggaatgggttatgaatcaagccaaggtgccggtggatggtaataaggaagagccccaaatatgcgttattganctgggangcaccattggagacatcgaaggaatgcccgttgtggangcgtta

SEQ ID NO: 5543 - DNA, 795 bp, Homo sapiens
  misc_feature (655)..(655): "n" may be a, t, c, g, other or unknown
  misc_feature (677)..(677): "n" may be a, t, c, g, other or unknown
  misc_feature (723)..(723): "n" may be a, t, c, g, other or unknown
  misc_feature (773)..(773): "n" may be a, t, c, g, other or unknown
  misc_feature (787)..(787): "n" may be a, t, c, g, other or unknown
agtttcctcttggcctgaacttggctgacctccgcagcttccgcccgactctggctaaagtcttggaggctactgccttgaagatgacctctagggaccagcccagacccaagggcccccccgaaaagcacttcgccttgtcctgggatctcgaactctgagagctctccgacgctgaattatcagggcattctaaatcggctcaagcagttccccaggttttctcctcattttgctgcggagttggagagcatttactactcgctgcacaagatccagcaggatgtggcagaacatcacaagcagataggaaacgtcttacagattgtggagagctgcagccaactccagggtttccagtctgaggaggtctcacctgctgaaccagccagccctgggacgccccagcaggtgaaggacaagaccctgcaggagtcgagctttgaggacatcatggccaccaggtcctccgactggctccggcggcctttgggggaggacaatcagccggagacccagctgttctgggacaaggagccttggttttggcacgacactctgaccgagcaactctggcggatttttgccggcgtccacgatgagaaggcaaagcccagagacagacagcaggcaccaggcctgggcaggaaacaangcaccaggatcctgtgacccangaacagacccatgtcctgaagatgcctcacccccaggccacctgangcctctcagtccccctgaggttccaagacaggaaccaagttgggggtggncaagacctctgganacctttgg

SEQ ID NO: 5544 - DNA, 783 bp, Homo sapiens
  misc_feature (739)..(739): "n" may be a, t, c, g, other or unknown
  misc_feature (753)..(753): "n" may be a, t, c, g, other or unknown
  misc_feature (766)..(766): "n" may be a, t, c, g, other or unknown
ggcagaccgtcacgtgacgacgtcgattcgcgtgcggcagtggcgaagttgacaaaccccgcgaaaatcgactctttgcatcgcacattttgttgattttccctcgtttttctttctctctttcccccgtccatccgaaagagggttggaaaaaaacaaaacaaacaaacaaacaaaaaaaaaaaacctaacgctgttgggacccggaagcggaaagggcatctttgaggtcgatacttccgggtcattgggagagtgcgggattcctgggccgagagcgggtggctgagccgggacctcgcgtgattctcggaacccgaggagaagcggcgtccggggctatggctgtgactctggacaaagacgcttattatcggcgagtgaagagactgtacagcaattggcggaaaggagaagatgagtatgccaacgttgatgccattgttgtatcagtgggtgttgatgaagaaattgtttatgccaaatcaactgccttacagacatggctctttggttatgaactaactgatactatcatggtcttttgtgatgacaaaatcatctttatggccagcaagaaaaaagtggagttcttgaaacagattgccaacactaagggcaatgagaatgctaatggagcccctgccatacactgctaatacgagaaaagaatgaaagtaataagagtagctttgacaaaatgattgaagccattaaagaaagcaagaatggcaagaanattggagtgttcancaaagacaaattncctggagagttcatgaa

SEQ ID NO: 5545 - DNA, 765 bp, Homo sapiens
  misc_feature (654)..(654): "n" may be a, t, c, g, other or unknown
  misc_feature (706)..(706): "n" may be a, t, c, g, other or unknown
  misc_feature (708)..(708): "n" may be a, t, c, g, other or unknown
  misc_feature (765)..(765): "n" may be a, t, c, g, other or unknown
gtaaaacctttagtcgaagcttctctcttaaacttcatcagaacattcatacgggagagaagccttttgaatgcagtaattgtagaaaagctttcagacagatctcatccatcctacttcatcagagaattcacagtggaaagaaaagccatgaatgcaataaatgtggggaaagcttcaatcaaagaacaacccttattctacatatgagaattcatgatggaaaggaaattcttgactgtgggaaggccttgagtcaatgtcagtctttcaatatacatcagaaaattcatgttgttgggaatgtctgccagtgcagaaagtgcggaaaagccttcaatcagatgtcatcccttttacttcataagaaaattcacaatggaaagaaaacacataaatataataaatgtgggagaggcttcaaaaagaaatcagtctttgttgtacataaaagaatccatgctggagagaaaatccctgaaaatgcgaaggccttaagtcagagtctacagcaaagaagtcaccatttagagaatccttttaaatgcagaaaatgtgggaaattatttaataggatttcacccctgatgcttcaccagagaattcacacttcagagaaaccgtcaaatgtgataaatgtgacaagttcttcangcggctttcaacccttattctgcatctaagaattcataatggagaaaaactntncagatgccataaatgtgaaaagggctgcaatcggcattcatcccttattcaacatcn

SEQ ID NO: 5546 - DNA, 811 bp, Homo sapiens
  misc_feature (685)..(685): "n" may be a, t, c, g, other or unknown
  misc_feature (702)..(702): "n" may be a, t, c, g, other or unknown
  misc_feature (779)..(779): "n" may be a, t, c, g, other or unknown
  misc_feature (794)..(794): "n" may be a, t, c, g, other or unknown
  misc_feature (805)..(805): "n" may be a, t, c, g, other or unknown
ggaagtggatggcgtggagatatggcgcaactgcggcgcggacacttgacattcagggacgtggccatagaattctctcaggaggagtggaaatgcctggaccctgtgcagaaggctttatacagggatgtgatgttggagaactacaggaacctggtctccctgggaatctgtcttcctgacctgagtattatctccatgatgaagcaaaggacagagccctggactgtggagaatgaaatgaaagtagcaaaaaatccagataggtgggaaggtatcaaagatatcaacacagatggagtcctgttctgtcgcccaggctggagtacagtggtgtgatctcggctcactgcaacttccgcctcccagggaggagctgtgcagtgagaagcaaagcaggaaacaagcctattacaaatcaacttggattaacctttcagttacctctgccagaactggagatatttcaaggtgaagggaagatttatgaatgtaatcaagttcaaaagttcatcagccacagttcttcagtttcgccacttcaaagaatttactctggggtcaaaacccacatatttaataaacataggaatgattttgttgattttccattgctgtcacaagaacagaaagcacacattaggagaaaaccttacgaatgtaatgagcagggcaaagtcttcanagtgtcttcaagccttnctaatcatcaagtaatccacacttgcagattaacctaacagatgtcattggatgtggtaaaaaccgtcagggacaanttaaggcctttgcanaaccattgggnaaattc

SEQ ID NO: 5547 - DNA, 810 bp, Homo sapiens
  misc_feature (659)..(659): "n" may be a, t, c, g, other or unknown
  misc_feature (714)..(714): "n" may be a, t, c, g, other or unknown
  misc_feature (783)..(783): "n" may be a, t, c, g, other or unknown
  misc_feature (797)..(797): "n" may be a, t, c, g, other or unknown
ggaggctgacgcgctagcgtggctctaagacgcgtcacccacgctgcgggcaagccatggcgggaagcgagccgcgcagcggaacaaactcgccgccgccgcccttcagcgactggggccgcctggaggcggccatcctcagcggctggaagaccttctggcagtcagtgagcaaggagagggtggcgcgtacgacctcacgggaggaggtggatgaggcggccagcaccctgacgcggctgccgattgatgtacagctatatattttgtcctttctttcacctcatgatctgtgtcagttgggaagtacaaatcattattggaatgaaactgtaagagatccaattctgtggagatactttttgttgagggatcttccttcttggtcttctgttgactggaagtctcttccagatctagaaatcttaaaaaagcctatatctgaggtcactgatggtgcattttttgactacatggcagtctatagaatgtgctgtccatacacaagaagagcttcaaaatccagccgtcctatgtatggagctgtcacttcttttttacactccctgatcattcagaatgaaccacgatttgctatgtttggaccaggtttggaagaattgaatacctctttggtgttgagcttgatgtcttcagangaactttgcccaacagctggtttgcctcaaaggcagattgatggtattggatcangagtcaattttcagttgaacaaccaacataaattcaacattctaatcttatattcaactacccagaaanggaaagagattganccaggggaagagc

SEQ ID NO: 5548 - DNA, 500 bp, Homo sapiens
  misc_feature (417)..(417): "n" may be a, t, c, g, other or unknown
  misc_feature (423)..(423): "n" may be a, t, c, g, other or unknown
  misc_feature (437)..(437): "n" may be a, t, c, g, other or unknown
  misc_feature (461)..(461): "n" may be a, t, c, g, other or unknown
  misc_feature (464)..(464): "n" may be a, t, c, g, other or unknown
  misc_feature (474)..(474): "n" may be a, t, c, g, other or unknown
  misc_feature (477)..(477): "n" may be a, t, c, g, other or unknown
actaaggcacatgacgtagaaatattgaggtacaaaatgcaaatttctgcataagatttttaagatattcattttggaaaatgaaggtgaacatcatctcccagaatattcagcttttagcttgttttttcttttggaccagttcaaccagcaacttgtacctagcgatacagtcttccttgctcttggacgggacacatctggctattttgtcccagcggtcagaggatccccttgggtactgctgcaacgccagttccagaagtttctgttgattttgagtccacggctcctctgcagaccgagctctctcttttctcaggctctcctcgtcgctggactcgttttgttctgctatgtcaaaagtccttctgccgcttggctctggacttctctctggcttccgcttcctggaancctcancaagcctggcttgntttccgcttccaaggcccggcttnaangggccccggntcntgttacccggagtttccctcctg

SEQ ID NO: 5549 - DNA, 522 bp, Homo sapiens
  misc_feature (6)..(6): "n" may be a, t, c, g, other or unknown
  misc_feature (25)..(25): "n" may be a, t, c, g, other or unknown
  misc_feature (44)..(44): "n" may be a, t, c, g, other or unknown
  misc_feature (93)..(93): "n" may be a, t, c, g, other or unknown
  misc_feature (177)..(177): "n" may be a, t, c, g, other or unknown
  misc_feature (229)..(229): "n" may be a, t, c, g, other or unknown
  misc_feature (399)..(399): "n" may be a, t, c, g, other or unknown
  misc_feature (409)..(409): "n" may be a, t, c, g, other or unknown
  misc_feature (411)..(411): "n" may be a, t, c, g, other or unknown
  misc_feature (479)..(479): "n" may be a, t, c, g, other or unknown
  misc_feature (488)..(488): "n" may be a, t, c, g, other or unknown
  misc_feature (490)..(490): "n" may be a, t, c, g, other or unknown
  misc_feature (493)..(493): "n" may be a, t, c, g, other or unknown
  misc_feature (512)..(512): "n" may be a, t, c, g, other or unknown
  misc_feature (517)..(517): "n" may be a, t, c, g, other or unknown
  misc_feature (520)..(520): "n" may be a, t, c, g, other or unknown
catggncacttctttatttttgatncaaatgtacatgacacgtnttgacagcccacccaccaccacacaggtagggcctggcccccagggaanaagcgggatggggagagagctggtgggtcccaccgtctgcctctccagccttcccaggctgcagccaggttcccaggcctccanagggtgggaccacagcaggtgcaggtagtgatggtgggtgctggccttgcanaggttacggggaggggactcagctccacagccaccagctgagtcggggaccccggggagccagccccaggctcaggtgctcagtcctccaccctagccagcacacattccccctccacgcaggagcaggaggagatggagggaagtggtttttgatttaagttcataganaaggggctananttgggagggatcaagggaggcacttgcaggacaaaacttgctacccggacaagtcctggctccaagtngggaaaggnanctnatcccattcttgtccaatngtttnggncc

SEQ ID NO: 5550 - DNA, 545 bp, Homo sapiens
  misc_feature (350)..(350): "n" may be a, t, c, g, other or unknown
  misc_feature (501)..(501): "n" may be a, t, c, g, other or unknown
  misc_feature (541)..(541): "n" may be a, t, c, g, other or unknown
gtgggagacagagtctcgctctgtcacccaggctggagtgcactggcgtgatctcagcccactgcaatgtctgcctcctgggttcaagcaattctcctacctcagcctcccaagtagctgggactacaggtgcccgccaccacgcccggctaattttttgtattttagtagagacagggtttcaccatgttgcccaggctggtctcaaactcctgagctcaggcaatccgcctgcctcaccctcccaaagtgctaggattacaggcatgaagccaccgtacccagccaaaaagctgggatttttaaagatattttctttgcttttaaaagaacactataaactagtcttngaaaacaaagtacaatgtgtcaacagaaaaaaatatcaatttgcactgatgggaaactggaatcatatcctaactatacagcccttttaaattggtgaaatcaaaaaacgaaggcttattattagagaaattcctaatttcttgagccagntgcttgaaaaagttgccaattttggctgacgtccttaatnacaa

SEQ ID NO: 5551 - DNA, 543 bp, Homo sapiens
  misc_feature (443)..(443): "n" may be a, t, c, g, other or unknown
  misc_feature (459)..(459): "n" may be a, t, c, g, other or unknown
  misc_feature (530)..(530): "n" may be a, t, c, g, other or unknown
  misc_feature (540)..(540): "n" may be a, t, c, g, other or unknown
  misc_feature (543)..(543): "n" may be a, t, c, g, other or unknown
aatctctgcttttcaggtcaaataattctcttgatctgcctgcagtttggctagcatttcttctgccactcttttcttttttttttgagatggagtcttgcactgtcgcccaggctggagtgcagtggcgtgatctcggcccactgcaagctctggcctcccgggttcacatcattctcctgcctcagcctcccgagcagctgggaccacaggcacccgccaccatgcccggctaattttttgtacttttagtagagacggggtttcagtgtgttagccaggatggtctcaatctcctgacctcgtgatctgcccaccttggcctcccaaagtgctgggattacaggcacgagccactgtgccccggcctcttctgccattcttaactattattatacccatctactacatattttcagttctaaaattttattttttacagntataattctctactgnaactttccctctggttactcattatgaccatgttttcctttaattccttggctatatttataactggcttnaaatcctggntgn

SEQ ID NO: 5552 - DNA, 502 bp, Homo sapiens
  misc_feature (423)..(423): "n" may be a, t, c, g, other or unknown
  misc_feature (430)..(430): "n" may be a, t, c, g, other or unknown
  misc_feature (442)..(442): "n" may be a, t, c, g, other or unknown
  misc_feature (454)..(454): "n" may be a, t, c, g, other or unknown
  misc_feature (459)..(459): "n" may be a, t, c, g, other or unknown
  misc_feature (479)..(479): "n" may be a, t, c, g, other or unknown
  misc_feature (489)..(489): "n" may be a, t, c, g, other or unknown
ctcccaaagtctcactgtcaacatgtatttggggagacatcaaactcagtatgaattgacaggatgatctagcttccaagaagaccaaatttaacctcaggctgcattaagagaagtatagtagcctaccctgagaaaggtgacagttcctctgctttgcactaatcagaatatatctagagggctgtgctattctcttcactgtatttttagagggttctctgcaaactgaagcacagccagggcaggatgactaggatggtgaggcttttaggaacacgccattgaataagggttgtgaattagcactgtttgacctggaaaggagaaggatgacaggaggaaaggaggatctgatgtaattgacttcacatgtgtgagaagctaggatagggaagaaggagtaaatcagaaatgtcccanagggcanaccttggatcantgggaagttcancgaancaaattgggcttcatattangcatactttntacgagaactact

SEQ ID NO: 5553 - DNA, 463 bp, Homo sapiens
  misc_feature (429)..(429): "n" may be a, t, c, g, other or unknown
  misc_feature (439)..(439): "n" may be a, t, c, g, other or unknown
  misc_feature (444)..(444): "n" may be a, t, c, g, other or unknown
  misc_feature (451)..(451): "n" may be a, t, c, g, other or unknown
  misc_feature (456)..(456): "n" may be a, t, c, g, other or unknown
  misc_feature (458)..(459): "n" may be a, t, c, g, other or unknown
gagatggagtctcactctgtcacctaggctagagtgcaatggcgcgatcttggcttactgcaacctccgcctgccccacctcgggttcaagtgattctcctgcctcagcctcctgagtacctgggactacaggcatgcaccaccacgcccggctaatttttgtatttttagacgagacagggtttcaccctgttggccaggctggtctcaaactcctaacctcaggtgatccaactgcctcggcctcccaaagtgctgggattacaggtatgagccaccgtgcccagcagaattttttaactatttggttacgactaatttggataatgtagtgcatgcagctttgatttgtgccactaagagtgggcaaactgtcttcctttttgtgaatcagtaaaaattttccctcaacatgtgtttgacagttgncattcactgnttaantaaaggnatttngnnaacc

SEQ ID NO: 5554 - DNA, 538 bp, Homo sapiens
  misc_feature (40)..(40): "n" may be a, t, c, g, other or unknown
  misc_feature (130)..(130): "n" may be a, t, c, g, other or unknown
  misc_feature (189)..(189): "n" may be a, t, c, g, other or unknown
  misc_feature (232)..(232): "n" may be a, t, c, g, other or unknown
  misc_feature (287)..(287): "n" may be a, t, c, g, other or unknown
  misc_feature (344)..(344): "n" may be a, t, c, g, other or unknown
  misc_feature (359)..(359): "n" may be a, t, c, g, other or unknown
  misc_feature (363)..(363): "n" may be a, t, c, g, other or unknown
  misc_feature (408)..(410): "n" may be a, t, c, g, other or unknown
  misc_feature (434)..(434): "n" may be a, t, c, g, other or unknown
  misc_feature (460)..(460): "n" may be a, t, c, g, other or unknown
  misc_feature (484)..(484): "n" may be a, t, c, g, other or unknown
  misc_feature (501)..(501): "n" may be a, t, c, g, other or unknown
  misc_feature (511)..(511): "n" may be a, t, c, g, other or unknown
  misc_feature (534)..(534): "n" may be a, t, c, g, other or unknown
ccttttttttttttttttttttgagacagagtcttgctgngtcacccaggctggagtgcaatagtgccatctcagctcactgcaacctctgtcttctgggttcaagcgattcacgttcctcaggctccanagtagctgggactacaggcgtgcgccaccacaccaggctaatttttgtatttttagtanatatggggtttcaacatgttggccaggctagtctcaaactcanattttttttttttctgaagacaaatgctctctgattggcatgctccagtcactgnctcaccatttaaagacttctagattaaaattaagcatgggctcaacagttctaaagngaaaacatgcatagngganatccctgccttcttctctcctctcttcctttcctttctttctttnnnttttttttctacttcccatccttnttaaagagacaccagtcagaaatatngatatgcttatgcttgcttggggnccttgattataaaaagncccaacatcnggaactaaatcaaggggattttntacc

SEQ ID NO: 5555 - DNA, 512 bp, Homo sapiens
  misc_feature (32)..(32): "n" may be a, t, c, g, other or unknown
  misc_feature (86)..(86): "n" may be a, t, c, g, other or unknown
  misc_feature (91)..(91): "n" may be a, t, c, g, other or unknown
  misc_feature (132)..(132): "n" may be a, t, c, g, other or unknown
  misc_feature (180)..(180): "n" may be a, t, c, g, other or unknown
  misc_feature (308)..(308): "n" may be a, t, c, g, other or unknown
  misc_feature (318)..(318): "n" may be a, t, c, g, other or unknown
  misc_feature (383)..(383): "n" may be a, t, c, g, other or unknown
  misc_feature (431)..(431): "n" may be a, t, c, g, other or unknown
  misc_feature (433)..(433): "n" may be a, t, c, g, other or unknown
  misc_feature (465)..(465): "n" may be a, t, c, g, other or unknown
  misc_feature (476)..(476): "n" may be a, t, c, g, other or unknown
  misc_feature (480)..(480): "n" may be a, t, c, g, other or unknown
  misc_feature (497)..(497): "n" may be a, t, c, g, other or unknown
  misc_feature (509)..(509): "n" may be a, t, c, g, other or unknown
ctatcccattttttcatttatttttatgaggngcctcaaaaaatagaagtggccttggtagggaaggaatgtcgtgattctgagtncagtntggcaaattcttttgcctcagtttccctaactccatccagngcatatgaaaatgtctatgtgcgtacaaggtaggtctggactaagctntggccctccggttgttttcccattgcgggagcctaagccagggtgcccaggactcctgtgtggctggtgggcctgatgcccacagctgatgattcaggaaggaggggcctggagtctgctgcagactntcccgccccntacagcccaaaccgggcactgcagcaatgaggtggtcagtccagggaaaggtccgacaagttctnggcacaatgcttcaggaagtcaaaagtcagggcccggaaaaaggcacncnggaccactttttggcctggatccccccttganggggtttccancaanattcttggggcttttgncccttggggaanttt

SEQ ID NO: 5556 - DNA, 514 bp, Homo sapiens
  misc_feature (391)..(391): "n" may be a, t, c, g, other or unknown
  misc_feature (430)..(430): "n" may be a, t, c, g, other or unknown
  misc_feature (445)..(445): "n" may be a, t, c, g, other or unknown
  misc_feature (454)..(456): "n" may be a, t, c, g, other or unknown
  misc_feature (491)..(491): "n" may be a, t, c, g, other or unknown
  misc_feature (497)..(497): "n" may be a, t, c, g, other or unknown
gggtttagaagttgcaattttaggtactattaacagaaaatacataacaaaagcttcctaacaagtgaaaaaaataattataaatgctggaaaaattggcctcattaacatatttacagacttttacttaatacatacgcctttggaaattaattatctgacatttatacaagcatcaaaatttccaaatcactgagtagtgagcacttcagttctttattgtctatacccaaatttgaaagtcatttagtttctgaaagtagaaatgacaagtaacagaaatggtcaatctgagatactattgacatattgttctgttccttcgcctaaaggtgcttctgttgagtaagtgtccttatgctttcttttctctttgctctgatcttcctgnagcttcagaattatgtttcggatttcttccctttttggncccaatcttgggggngggaaaccnnnttgcccaattctatgggggggtcaaaaccgggaanatgggntctaaaaaagcttttta

SEQ ID NO: 5557 - DNA, 484 bp, Homo sapiens
  misc_feature (413)..(413): "n" may be a, t, c, g, other or unknown
  misc_feature (419)..(420): "n" may be a, t, c, g, other or unknown
  misc_feature (427)..(427): "n" may be a, t, c, g, other or unknown
  misc_feature (444)..(444): "n" may be a, t, c, g, other or unknown
  misc_feature (480)..(480): "n" may be a, t, c, g, other or unknown
  misc_feature (484)..(484): "n" may be a, t, c, g, other or unknown
gagttggagtctcactctgttgcccaggctagagtgcaatggtgggatctcagctcactgtagcctctgcctcccaggtttaactgattctcctgcctcagcttcccaagtagctgggattacaggcgcctgccaccacactcagctaatttttgttatttttagtagagacgggggtttcactatgttagccacactggtcttgaactcctgacctcaagtgatccgcccgcctcagcctcccaaagtgctgggattacaggcatgagccactgcgctcggcactcctctagcttcttacttgtcactatataggtgtatgacctcgaccaagtcacttttcctaatctacaagatgtctgagattaatgacgtaacgtcaaacattcctcctggctctaatttcctacctnttccanntgcttgnataagggagcccaatgncttaaaagccaatgtgagcccctgggtttgggaacnaaan

SEQ ID NO: 5558 - DNA, 468 bp, Homo sapiens
  misc_feature (1)..(468): "n" may be a, t, c, g, other or unknown
nnnnnnnnnnnnnnnnnnnnnnnnnnnnnnnnnnnnnnnnnnnnnnnnnnnnnnnnnnnnnnnnnnnnnnnnnnnnnnnnnnnnnnnnnnnnnnnnnnnnnnnnnnnnnnnnnnnnnnnnnnnnnnnnnnnnnnnnnnnnnnnnnnnnnnnnnnnnnnnnnnnnnnnnnnnnnnnnnnnnnnnnnnnnnnnnnnnnnnnnnnnnnnnnnnnnnnnnnnnnnnnnnnnnnnnnnnnnnnnnnnnnnnnnnnnnnnnnnnnnnnnnnnnnnnnnnnnnnnnnnnnnnnnnnnnnnnnnnnnnnnnnnnnnnnnnnnnnnnnnnnnnnnnnnnnnnnnnnnnnnnnnnnnnnnnnnnnnnnnnnnnnnnnnnnnnnnnnnnnnnnnnnnnnnnnnnnnnnnnnnnnnnnnnnnnnnnnnnnnnnnnnnnnnnnnnnnnnnnnnnnnnnnnnnnnnnnnnnnnnnnnnnnnn

SEQ ID NO: 5559 - DNA, 466 bp, Homo sapiens
  misc_feature (42)..(42): "n" may be a, t, c, g, other or unknown
  misc_feature (45)..(45): "n" may be a, t, c, g, other or unknown
  misc_feature (53)..(53): "n" may be a, t, c, g, other or unknown
  misc_feature (65)..(65): "n" may be a, t, c, g, other or unknown
  misc_feature (108)..(108): "n" may be a, t, c, g, other or unknown
  misc_feature (137)..(137): "n" may be a, t, c, g, other or unknown
  misc_feature (384)..(384): "n" may be a, t, c, g, other or unknown
  misc_feature (397)..(397): "n" may be a, t, c, g, other or unknown
  misc_feature (446)..(446): "n" may be a, t, c, g, other or unknown
  misc_feature (458)..(458): "n" may be a, t, c, g, other or unknown
  misc_feature (460)..(462): "n" may be a, t, c, g, other or unknown
cctttttccaaatctttattctcggggttggccccccccganagncacttcanggcctcggttantgggtcaatcttcggaaactctggcaatgggcaaaaactggantgggggttggctggttggcactaaagganaaggggcccttcaagcttccctctggatcgagggggctcttctttgacgtgtacaggatgcacgggcttgcataggagatctgcctggactgctgtcactctcgttgctgttggtatgctccattgccccgttcagctcttcccgtattgcgctggctaagttgcccagagtgggatttcccatggaagcggtagtgtatagaggtatactattctcagccattgaagcctgtaaagctgcattganaggtgtgcagtangcgtggctgctctgcatgtttttaaataagggaaaggggtaccactgancttttgggggcntnnntttt

SEQ ID NO: 5560 - DNA, 417 bp, Homo sapiens
  misc_feature (1)..(417): "n" may be a, t, c, g, other or unknown
nnnnnnnnnnnnnnnnnnnnnnnnnnnnnnnnnnnnnnnnnnnnnnnnnnnnnnnnnnnnnnnnnnnnnnnnnnnnnnnnnnnnnnnnnnnnnnnnnnnnnnnnnnnnnnnnnnnnnnnnnnnnnnnnnnnnnnnnnnnnnnnnnnnnnnnnnnnnnnnnnnnnnnnnnnnnnnnnnnnnnnnnnnnnnnnnnnnnnnnnnnnnnnnnnnnnnnnnnnnnnnnnnnnnnnnnnnnnnnnnnnnnnnnnnnnnnnnnnnnnnnnnnnnnnnnnnnnnnnnnnnnnnnnnnnnnnnnnnnnnnnnnnnnnnnnnnnnnnnnnnnnnnnnnnnnnnnnnnnnnnnnnnnnnnnnnnnnnnnnnnnnnnnnnnnnnnnnnnnnnnnnnnnnnnnnnnnnnnnnnnnnnnnnnnnnnnnnnn

SEQ ID NO: 5561 - DNA, 461 bp, Homo sapiens
  misc_feature (226)..(226): "n" may be a, t, c, g, other or unknown
  misc_feature (356)..(356): "n" may be a, t, c, g, other or unknown
  misc_feature (403)..(403): "n" may be a, t, c, g, other or unknown
  misc_feature (417)..(417): "n" may be a, t, c, g, other or unknown
  misc_feature (425)..(425): "n" may be a, t, c, g, other or unknown
  misc_feature (429)..(430): "n" may be a, t, c, g, other or unknown
  misc_feature (454)..(454): "n" may be a, t, c, g, other or unknown
  misc_feature (460)..(460): "n" may be a, t, c, g, other or unknown
aattttttttgttttgttttgtttttttttttttggaagtgtcaaggatcagttctgtggcaccgtttaaccacagactgggagcaacacgcatctgtggcattttaaaatggaattggcaactgcatgacattgaaaatgcgtattacacttacagtgtctagactttcctatgtgtgctcagatacaattagtgaagcaaaagtatacatatcacccctactgntactcagttgctacagagccataaatgtgaaaagcaatactctgaaataaagattttttgttttttttgccctagccctacttagcagcacagtttaagtaaacacaaaaactgtggttgagatgcttgnctttccaaagatgtaaacatcagtcccagtggcgtaaactttgctgnatcgaatgagaccnaagatctnaggnncaaaggcaattcaccccttttacncaaacnt

SEQ ID NO: 5562 - DNA, 438 bp, Homo sapiens
  misc_feature (373)..(373): "n" may be a, t, c, g, other or unknown
  misc_feature (380)..(380): "n" may be a, t, c, g, other or unknown
  misc_feature (392)..(392): "n" may be a, t, c, g, other or unknown
  misc_feature (410)..(410): "n" may be a, t, c, g, other or unknown
  misc_feature (420)..(420): "n" may be a, t, c, g, other or unknown
  misc_feature (423)..(423): "n" may be a, t, c, g, other or unknown
  misc_feature (437)..(437): "n" may be a, t, c, g, other or unknown
cgagatggagtcttgctctgttgaccaggctggagtgcagtggcacgatctcggctcactgcagcctccgccttctgagttcaagcaattctcctgcctcagcctccccgggtagctgggattacaggcatgtgccactacgcccggctaacttttgtatttttggcagagatggggtttcacaatgttggccaggctggtcgtgaactcctgacctcaagtaatcgacccgccttggcctcccaaagtgctgggattacaggggtgagccactgagcccagccaggggtgggggatttaaaacagaaaactacactcccaggaggccaacttcttccagccaagaaaaggacaggagaaaggtcaaggtganggatgangaaacccctaantgccagtataggggcctnatttgggggngcncaactaaaagggtnc

SEQ ID NO: 5563 - DNA, 548 bp, Homo sapiens
  misc_feature (538)..(538): "n" may be a, t, c, g, other or unknown
agttataatcccattttttttaaaaaaaggaatacagatattgatcacatcaaacattttcattgagaaattgacacggacactaatgaggtttatcatggatggtctcagaagctttcctgtgtatgtgaagcagaactacaggcctttttgtataagttcctgtacatcttgtccatgctgttctcaaagatgggtcggtgggattttcccttataagaggctgccctgttggaccagtattcaccgtcatccaaatggaaagtgccacgtggctgctgacatgagctatactcggggtcactgtcataggcagagtctctacataaaagacttcttttcagttccagttcatcatctttctctaggtctctctcatcatataaatgtctttgatgagcctgatgtgatttcaagacattttttacccggtcatggatctcatcgcagtttgaaggtgaacaccaatcagaatgaaatctttcctgagagaagctctatttaacacagggcttggagaatgcttggcattgttgangggtgctgaa

SEQ ID NO: 5564 - DNA, 153 bp, Homo sapiens
  misc_feature (139)..(139): "n" may be a, t, c, g, other or unknown
  misc_feature (143)..(145): "n" may be a, t, c, g, other or unknown
  misc_feature (148)..(148): "n" may be a, t, c, g, other or unknown
  misc_feature (150)..(151): "n" may be a, t, c, g, other or unknown
gaagagattgaacatgacctgttgccttttatttaaaaactgttactagccctgcctggggctcctatacaaaaacaaaacacaacctaaaataaggtttcttcctgaccccagagactggggaggggtagggagggtnttgnnntantnntg

SEQ ID NO: 5565 - DNA, 539 bp, Homo sapiens
  misc_feature (336)..(336): "n" may be a, t, c, g, other or unknown
  misc_feature (503)..(503): "n" may be a, t, c, g, other or unknown
  misc_feature (506)..(506): "n" may be a, t, c, g, other or unknown
  misc_feature (515)..(515): "n" may be a, t, c, g, other or unknown
  misc_feature (521)..(521): "n" may be a, t, c, g, other or unknown
  misc_feature (528)..(528): "n" may be a, t, c, g, other or unknown
  misc_feature (538)..(538): "n" may be a, t, c, g, other or unknown
aggtgaggttaagcctgtcacccatttctttatttctataattacacaagcataataaatacatctgattttaaaggtcacttaaaatgagtcataatttacagtacagtacgtttcagttcaagtgcaaaaaataactatttgctgaattctatttctttcagttattttatttttaagctgtgttttattgtgaagcgagacatccaagtgtagaatttcttatcccaaatgcagtattgggcagaactatggtgtcatggagaagccctcactttacaattgatcctgtctaatcagggtcagagggtaaggtgagttgctcatttcgactgntcttttctttcctctctctcctgtgctcatccacagctattataaattatataattcacctttattcagctaaacagttttcccctttccacactccccccaggtttcctgttaacctctgctttgatttttagtggcaagctttaccgtgcgaccaccagcattgntcnggctgcaantggacngttgcangttgaatccnt

SEQ ID NO: 5566 - DNA, 546 bp, Homo sapiens
  misc_feature (481)..(481): "n" may be a, t, c, g, other or unknown
  misc_feature (490)..(490): "n" may be a, t, c, g, other or unknown
  misc_feature (500)..(500): "n" may be a, t, c, g, other or unknown
  misc_feature (511)..(511): "n" may be a, t, c, g, other or unknown
  misc_feature (527)..(527): "n" may be a, t, c, g, other or unknown
  misc_feature (546)..(546): "n" may be a, t, c, g, other or unknown
catttatgagagtttattcattcaaaacatatttactgtcgggcgtggtggttcataccagtaatcccagcactttgggaggccaaggcaggtggatcgcttgaactcaggagttcaagaccagcctgggcaacatggtgaaacctcgtctctacaaaacatataaacatcagccaggcatgatggcacatagctgcagtcccagctacttgtgggagctgaagtaggaggatcacttgagcccaggaggtcgaggctgcggtgagctgtgtttgtgccactgcactccagactgggtgacaaagtgaaaacccaggggctcattcaggttcaggagtggggtgctggggtcctgagctatatctaaatctgtctccactgcctcagtgtctttcccggaggtgaagagtctgtgcacattctcggtgcccacaggtagttcatctgggagatcagcccaaagaggactttgggggtgccntgtggccancggggtgctnggaatggctgntctgaaaccccttccngatgggtcccaggaaggcn

SEQ ID NO: 5567 - DNA, 535 bp, Homo sapiens
  misc_feature (1)..(535): "n" may be a, t, c, g, other or unknown
nnnnnnnnnnnnnnnnnnnnnnnnnnnnnnnnnnnnnnnnnnnnnnnnnnnnnnnnnnnnnnnnnnnnnnnnnnnnnnnnnnnnnnnnnnnnnnnnnnnnnnnnnnnnnnnnnnnnnnnnnnnnnnnnnnnnnnnnnnnnnnnnnnnnnnnnnnnnnnnnnnnnnnnnnnnnnnnnnnnnnnnnnnnnnnnnnnnnnnnnnnnnnnnnnnnnnnnnnnnnnnnnnnnnnnnnnnnnnnnnnnnnnnnnnnnnnnnnnnnnnnnnnnnnnnnnnnnnnnnnnnnnnnnnnnnnnnnnnnnnnnnnnnnnnnnnnnnnnnnnnnnnnnnnnnnnnnnnnnnnnnnnnnnnnnnnnnnnnnnnnnnnnnnnnnnnnnnnnnnnnnnnnnnnnnnnnnnnnnnnnnnnnnnnnnnnnnnnnnnnnnnnnnnnnnnnnnnnnnnnnnnnnnnnnnnnnnnnnnnnnnnnnnnnnnnnnnnnnnnnnnnnnnnnnnnnnnnnnnnnnnnnnnnnnnnnnnnnnnnnnnnnnnnnnnnnnnn

SEQ ID NO: 5568 - DNA, 534 bp, Homo sapiens
  misc_feature (62)..(62): "n" may be a, t, c, g, other or unknown
  misc_feature (321)..(321): "n" may be a, t, c, g, other or unknown
  misc_feature (332)..(332): "n" may be a, t, c, g, other or unknown
  misc_feature (347)..(347): "n" may be a, t, c, g, other or unknown
  misc_feature (351)..(351): "n" may be a, t, c, g, other or unknown
  misc_feature (364)..(364): "n" may be a, t, c, g, other or unknown
  misc_feature (381)..(381): "n" may be a, t, c, g, other or unknown
  misc_feature (386)..(386): "n" may be a, t, c, g, other or unknown
  misc_feature (446)..(446): "n" may be a, t, c, g, other or unknown
  misc_feature (490)..(490): "n" may be a, t, c, g, other or unknown
  misc_feature (492)..(492): "n" may be a, t, c, g, other or unknown
  misc_feature (525)..(525): "n" may be a, t, c, g, other or unknown
  misc_feature (534)..(534): "n" may be a, t, c, g, other or unknown
gagacagagttttgctcttgttgcccaggctggagtgcaatgacacaatctcagctcactgnaaccaccacctcccaggttcaagtgattctcctgccttggcctcctgcgtagctgggattacaggcatgagccaccgtgcctggcctttttcttttttaaacagggtcttgctctgtcacccagactagaggtgcagtggcacagtcatggctcactgcagcctcaatctcctgggctcaagtggtcctcaagggcctccagagtagcccaccaccatgcctggctttttttttttttttttttttgtaagtagagacncatttcactgngttggccaggctggngtcnaactcctgggctnaagccattgcccacctnaaagngctgggattacaagtgtgagccaccacacccaaccaggttatttgaacatttttaaagtnctggattttctctattggaaaattgactggcaatttttgggcangntttttaaggggtgcttaaggttgaaaccctttnaaatttttn

SEQ ID NO: 5569 - DNA, 542 bp, Homo sapiens
  misc_feature (473)..(473): "n" may be a, t, c, g, other or unknown
  misc_feature (487)..(487): "n" may be a, t, c, g, other or unknown
  misc_feature (540)..(540): "n" may be a, t, c, g, other or unknown
gtaaattggctcatgtcctttgcctatttttctattgaagtgatcatttttgaacatttttcttacgaatttggaagaacttttcatatatgaagggcattagctctttgacatgacggttttcttttcttcctgttactttgtccttttctttcattttcttttttgagacagagtctcagtctgtcacccaggctggagtgcagtagcatgatcttggctcactgtaacctctgcctcccaggttcaagcgattcttgtgcctcagcctctcaaagtgctgggattacaggcatgagccaccgtgccctccgtaattaatattcttaaaccatattcatgaaacaataataggattttgaggactcagctctgatttgttaaatcttgcccaaattcctgtctaaggggcctagagagtcatgccctacaaatcataaattctcatcaaggtgggttttatttaaccctgnatatcttgactttncaatctggactctggcataacaagggagaaaataaaaatgtttacccaaaatntt

SEQ ID NO: 5570 - DNA, 515 bp, Homo sapiens
  misc_feature (428)..(428): "n" may be a, t, c, g, other or unknown
  misc_feature (456)..(456): "n" may be a, t, c, g, other or unknown
  misc_feature (481)..(481): "n" may be a, t, c, g, other or unknown
  misc_feature (490)..(490): "n" may be a, t, c, g, other or unknown
  misc_feature (508)..(508): "n" may be a, t, c, g, other or unknown
  misc_feature (510)..(510): "n" may be a, t, c, g, other or unknown
  misc_feature (512)..(512): "n" may be a, t, c, g, other or unknown
ccattttcttttttgttgttgttgttttagcacctgtacaataaaactgtaccatctccaaccagagccggccacggcgaggccctcctgcctttggatggtacatactctacaaggattgttcggaaaaatagcaattggtagaaaaataagagtgggagggacaatgccacagagggggcggggacagggaagcaacccaagctcctctctctctctcactcgacaaacccagcgctggaggcccagaggccagggggaggccaggtagggataccactcagccccaggcccccaggcatgagtggagcaagggctggagaccactttcctgcccttgcctagcaaacaagcttgacgcctggatttcacattccggcagtgagtcccagagccctctgcagattcccaaggagaatgaggggctnaagggaagaaggttggaaggaaaggaanggaaaaggggtgctgtgagtctcanaaggggccngggattggggggtggctnangnctt

SEQ ID NO: 5571 - DNA, 541 bp, Homo sapiens
  misc_feature (506)..(506): "n" may be a, t, c, g, other or unknown
  misc_feature (522)..(522): "n" may be a, t, c, g, other or unknown
gtagtaacttaaaagatccttaatgcatttattttaaaccacaaaatcaaaatacagcaatcttaaaatgaatcactataaaccatacattgtctcttcttttattatttaaatactgatatcattcttctcttcatgggacagttctgcacctagtttaaaccatcattactaatgccatgctgaatgcttgtctctgaaaaaatctagtaaaattggcagggatgtgataaccttaactacaaatgaaataacttcaaatttaaggggctgtcagaaaaatggaatttcacaactaattatttccaaaaaagtctcctgctcaccatttgttagaaggatataaaaacctagctgcatcacataggaatccttgtatccttgtcttatatttgttgcgaagttgatgtctcttaatggtcatgtcttctacaagttgcctctgctctgctcctgatcacagaaaggaagtcccaagtggagctgtaatacaggtcatactggangggtgggtagctatgncctggaggaggtaaccatg

SEQ ID NO: 5572 - DNA, 550 bp, Homo sapiens
  misc_feature (323)..(323): "n" may be a, t, c, g, other or unknown
  misc_feature (485)..(485): "n" may be a, t, c, g, other or unknown
  misc_feature (487)..(487): "n" may be a, t, c, g, other or unknown
  misc_feature (489)..(489): "n" may be a, t, c, g, other or unknown
  misc_feature (494)..(494): "n" may be a, t, c, g, other or unknown
  misc_feature (518)..(518): "n" may be a, t, c, g, other or unknown
  misc_feature (529)..(529): "n" may be a, t, c, g, other or unknown
  misc_feature (544)..(544): "n" may be a, t, c, g, other or unknown
cctgagaatttaattttatttgctgtagattcaaaatgaggaagtggtaaatgcattatttactcaaagcataaagtcagccttaggtaggagatgaaacaactcctcaactttacactatccagttaaagccaatttttaaaacctttttttttcttatgatgacccttgagtcatagaaaacttttcattttagaaaatgttaagcatgaacacaaaaagactagataacagtgttataaacactcatgtacccaaggcccagctttaacattcatcacttagcatgtttaaggtagtgcttaggttgaaatttatattgngtgtatcagaataaagagcagttcttgcagatagctagaattacttcatttttatagagtttagagcataaactaacaagggaatctaggctctttatagtaaatatctaaaagcattttattttacagaattgacagcgtatgccatggctattcatttgnangncacanggttcccaaaaaggggaaaaaaanggccaaacccncttaaggccttttcnggcccc

SEQ ID NO: 5573 - DNA, 549 bp, Homo sapiens
  misc_feature (1)..(549): "n" may be a, t, c, g, other or unknown
nnnnnnnnnnnnnnnnnnnnnnnnnnnnnnnnnnnnnnnnnnnnnnnnnnnnnnnnnnnnnnnnnnnnnnnnnnnnnnnnnnnnnnnnnnnnnnnnnnnnnnnnnnnnnnnnnnnnnnnnnnnnnnnnnnnnnnnnnnnnnnnnnnnnnnnnnnnnnnnnnnnnnnnnnnnnnnnnnnnnnnnnnnnnnnnnnnnnnnnnnnnnnnnnnnnnnnnnnnnnnnnnnnnnnnnnnnnnnnnnnnnnnnnnnnnnnnnnnnnnnnnnnnnnnnnnnnnnnnnnnnnnnnnnnnnnnnnnnnnnnnnnnnnnnnnnnnnnnnnnnnnnnnnnnnnnnnnnnnnnnnnnnnnnnnnnnnnnnnnnnnnnnnnnnnnnnnnnnnnnnnnnnnnnnnnnnnnnnnnnnnnnnnnnnnnnnnnnnnnnnnnnnnnnnnnnnnnnnnnnnnnnnnnnnnnnnnnnnnnnnnnnnnnnnnnnnnnnnnnnnnnnnnnnnnnnnnnnnnnnnnnnnnnnnnnnnnnnnnnnnnnnnnnnnnnnnnnnnnnnnnnnnnnnn

SEQ ID NO: 5574 - DNA, 553 bp, Homo sapiens
  misc_feature (525)..(525): "n" may be a, t, c, g, other or unknown
  misc_feature (549)..(549): "n" may be a, t, c, g, other or unknown
ctgaaattgacctggtagagccttcaatgaccctttgaagaacaaggtgcaaaagattcacgtttgagattaacaggagggctgcacagaataaagccttcaattcaacatacaactatcaaattcagaaaaaaacatatcatagcctaaaaaggaaaaaattcctcaccagagaaaggttgataaaatgcaaatttaaaggtgtaaacctgtgcagagaccatggagttatgaggctcactgaaggggaaggaaatgccagatcattcttatttcaagaagcttcaggctgaatagttgcttggatatgctaagtttttctttttctttttctaaatcaagtagtgctactgaaatccagtgcctaatggagcagatggtggaggtcttagactctggaacatttatagtgatgcttctgaatgcaaaacaccaagagtggatttcacaggctgtgaatctgatttgattttgatgggagtaaagcttccattttcactggcttgaccccattggaaaaaagcntgtgtgactggcacaactttttanaaaa

SEQ ID NO: 5575 - DNA, 540 bp, Homo sapiens
  misc_feature (464)..(464): "n" may be a, t, c, g, other or unknown
  misc_feature (481)..(481): "n" may be a, t, c, g, other or unknown
  misc_feature (502)..(502): "n" may be a, t, c, g, other or unknown
  misc_feature (506)..(506): "n" may be a, t, c, g, other or unknown
  misc_feature (510)..(510): "n" may be a, t, c, g, other or unknown
  misc_feature (525)..(525): "n" may be a, t, c, g, other or unknown
  misc_feature (540)..(540): "n" may be a, t, c, g, other or unknown
cttttgagatggagtctcgctctgtcacccaggctggaatgcagtggcgcaatctcagctcactgcaagctctgccgcccggattcaagccattctccttcctcagcctcccaagcagctgggactacaggcacctgccaccatgccaggctaattttttttgtatttttagtagagacagggtttcaccgtgtcagccaggatggtctcaatctcttgacctcgtgatctgcccgcctcggcctcccaaagtgctaggataccatggctcttgatgcaatcaagtgcaaatcctctctgaaggaaattgttgggagacaattctctatgggtctcatgtttctacagatcttgtgagcagaagacctgtctttgttacgaactatttttcacggatgcttgtatagtgaagagccttgaaagatagagatggtgttttcctaaggagtaaacattgggtttgngtactatccaatcaatnaagatgtttccctttggctcntctngcangcatgcttggtgccnttttaaagatccccn

SEQ ID NO: 5576 - DNA, 553 bp, Homo sapiens
  misc_feature (438)..(438): "n" may be a, t, c, g, other or unknown
  misc_feature (470)..(471): "n" may be a, t, c, g, other or unknown
  misc_feature (499)..(499): "n" may be a, t, c, g, other or unknown
  misc_feature (502)..(502): "n" may be a, t, c, g, other or unknown
  misc_feature (514)..(514): "n" may be a, t, c, g, other or unknown
  misc_feature (516)..(516): "n" may be a, t, c, g, other or unknown
  misc_feature (551)..(551): "n" may be a, t, c, g, other or unknown
ggtagagacaaggtctcattatgttgcccaggctggaaggccttttgaggcttgtatgacaaaggtggggtggggggtgactgtcaactggtttcacttcaccagccaagggggctggtggtaatcttgattgtcaaaggccaaggataataacagtgaatatgtactgagagctcaccatgtgccaggcacattcagagcaagctacataaattaacacacttaattctccaaacaccttaaagtgggtacctagtatcattatgtctttcacagataagcaaactgaggcactgagaattaagtaacttgcccgagatcacaagttagtaagtaggggacagggatttgagcccaagcagtctaagactagagtctctgctttttttttttttttaacctcaactttattcatcttccatgtgcctgctgagtctnagaccccctttctttccatcagctctggcagnnctcatcaagatgactgaatccctacttnagntcctttgcctancnacctgagatgcccatgggggctgaaacctgccatnac

SEQ ID NO: 5577 - DNA, 531 bp, Homo sapiens
  misc_feature (451)..(451): "n" may be a, t, c, g, other or unknown
  misc_feature (499)..(499): "n" may be a, t, c, g, other or unknown
  misc_feature (513)..(513): "n" may be a, t, c, g, other or unknown
  misc_feature (520)..(520): "n" may be a, t, c, g, other or unknown
  misc_feature (526)..(528): "n" may be a, t, c, g, other or unknown
atttgttatgttgcagcaattacactgtaaaagtgctgcccaagattgattgctctgatctgtagttcaattgtaaattagaatacacatccccccagggacacacggcccctatttgtgattaagaaaaaagccccataatagactaatagctaaagttctctctcttttactttcaggcaattagcttgatgaaatggcctctttttgtgtaccctggaagtgtaaaccgatatcataatgaagtatatgatgtttattctattattttcaccttgctggatatgcaggaatgcataagtaatggctgctttgtctagtacgtttactgattcacaagtaaactatttcttaaagatgcagtgtacgctttctgaggcttgagttaagcaactcctaactgtggattaaccttcacgcaaatgtctactgcaggggaggaaaacgaatnccctaagttgggggagagcatgatgctgatattcaagagggcttcagncactggggcaactnttggatngatgtnnnggc

SEQ ID NO: 5578 - DNA, 553 bp, Homo sapiens
  misc_feature (1)..(553): "n" may be a, t, c, g, other or unknown
nnnnnnnnnnnnnnnnnnnnnnnnnnnnnnnnnnnnnnnnnnnnnnnnnnnnnnnnnnnnnnnnnnnnnnnnnnnnnnnnnnnnnnnnnnnnnnnnnnnnnnnnnnnnnnnnnnnnnnnnnnnnnnnnnnnnnnnnnnnnnnnnnnnnnnnnnnnnnnnnnnnnnnnnnnnnnnnnnnnnnnnnnnnnnnnnnnnnnnnnnnnnnnnnnnnnnnnnnnnnnnnnnnnnnnnnnnnnnnnnnnnnnnnnnnnnnnnnnnnnnnnnnnnnnnnnnnnnnnnnnnnnnnnnnnnnnnnnnnnnnnnnnnnnnnnnnnnnnnnnnnnnnnnnnnnnnnnnnnnnnnnnnnnnnnnnnnnnnnnnnnnnnnnnnnnnnnnnnnnnnnnnnnnnnnnnnnnnnnnnnnnnnnnnnnnnnnnnnnnnnnnnnnnnnnnnnnnnnnnnnnnnnnnnnnnnnnnnnnnnnnnnnnnnnnnnnnnnnnnnnnnnnnnnnnnnnnnnnnnnnnnnnnnnnnnnnnnnnnnnnnnnnnnnnnnnnnnnnnnnnnnnnnnnnnnnn

SEQ ID NO: 5579 - DNA, 548 bp, Homo sapiens
  misc_feature (1)..(548): "n" may be a, t, c, g, other or unknown
nnnnnnnnnnnnnnnnnnnnnnnnnnnnnnnnnnnnnnnnnnnnnnnnnnnnnnnnnnnnnnnnnnnnnnnnnnnnnnnnnnnnnnnnnnnnnnnnnnnnnnnnnnnnnnnnnnnnnnnnnnnnnnnnnnnnnnnnnnnnnnnnnnnnnnnnnnnnnnnnnnnnnnnnnnnnnnnnnnnnnnnnnnnnnnnnnnnnnnnnnnnnnnnnnnnnnnnnnnnnnnnnnnnnnnnnnnnnnnnnnnnnnnnnnnnnnnnnnnnnnnnnnnnnnnnnnnnnnnnnnnnnnnnnnnnnnnnnnnnnnnnnnnnnnnnnnnnnnnnnnnnnnnnnnnnnnnnnnnnnnnnnnnnnnnnnnnnnnnnnnnnnnnnnnnnnnnnnnnnnnnnnnnnnnnnnnnnnnnnnnnnnnnnnnnnnnnnnnnnnnnnnnnnnnnnnnnnnnnnnnnnnnnnnnnnnnnnnnnnnnnnnnnnnnnnnnnnnnnnnnnnnnnnnnnnnnnnnnnnnnnnnnnnnnnnnnnnnnnnnnnnnnnnnnnnnnnnnnnnnnnnnnnnn

SEQ ID NO: 5580 - DNA, 555 bp, Homo sapiens
  misc_feature (555)..(555): "n" may be a, t, c, g, other or unknown
aaatagatatgaaatacgtaccaagtttatttgcctttaaatgatacaaacagaaaagacatgttagtcaaaatattaaattttcttgcattttacagaagaaaaataaactgaagtaaaactgtaggaactgctgaacgtcagataaatgtttcttcagaacaagagatattagttcctaaaagattcttctaaagtttttttaaaagagattaagaaaaacagtaagccactgggttattacattctaaaaaaaaactacatgtttcttaatggacatatgtttacatttacagatagtaaacttagtttcctgtctcataaaactcagaagacgccagtgatgtctaaactatggaaaagaataaaagcctctttttcatatgaaaaaacattcaaactaaatctaccttaacattattttctatgaaaacttaataaagaatggctcttctgaaaacaaaatgctatacaaatcagtttcaaaaaagaaatacattatgaggattaggcttatagctagtggtatcaagtaaaaccccaaacgatgccccn

SEQ ID NO: 5581 - DNA, 568 bp, Homo sapiens
  misc_feature (1)..(568): "n" may be a, t, c, g, other or unknown
nnnnnnnnnnnnnnnnnnnnnnnnnnnnnnnnnnnnnnnnnnnnnnnnnnnnnnnnnnnnnnnnnnnnnnnnnnnnnnnnnnnnnnnnnnnnnnnnnnnnnnnnnnnnnnnnnnnnnnnnnnnnnnnnnnnnnnnnnnnnnnnnnnnnnnnnnnnnnnnnnnnnnnnnnnnnnnnnnnnnnnnnnnnnnnnnnnnnnnnnnnnnnnnnnnnnnnnnnnnnnnnnnnnnnnnnnnnnnnnnnnnnnnnnnnnnnnnnnnnnnnnnnnnnnnnnnnnnnnnnnnnnnnnnnnnnnnnnnnnnnnnnnnnnnnnnnnnnnnnnnnnnnnnnnnnnnnnnnnnnnnnnnnnnnnnnnnnnnnnnnnnnnnnnnnnnnnnnnnnnnnnnnnnnnnnnnnnnnnnnnnnnnnnnnnnnnnnnnnnnnnnnnnnnnnnnnnnnnnnnnnnnnnnnnnnnnnnnnnnnnnnnnnnnnnnnnnnnnnnnnnnnnnnnnnnnnnnnnnnnnnnnnnnnnnnnnnnnnnnnnnnnnnnnnnnnnnnnnnnnnnnnnnnnnnnnnnnnnnnnnnnnnnnn

SEQ ID NO: 5582 - DNA, 570 bp, Homo sapiens
  misc_feature (485)..(485): "n" may be a, t, c, g, other or unknown
  misc_feature (500)..(500): "n" may be a, t, c, g, other or unknown
  misc_feature (540)..(540): "n" may be a, t, c, g, other or unknown
  misc_feature (567)..(567): "n" may be a, t, c, g, other or unknown
gctattacattttattttatttttacttctcaaatgttaaggaaacctattttaaatataaagatataaatatagggaaattacataatgataaaagggtcaattcaccaagaagataaacactgaaatataatatgcaactaacaaagatccaaaataaatgaagcaaaaattgatagaactaaaagagatatggaaaaatccacagtcataactgggagactcaataagtccattctcaatgactgataaacaaatagatggaaatcaaaaaggatatatcaaacctggataacgttatcaactggtttaatataatggacatttacaaaaaacactctacccaagaacaacagaatacatattctttccaagtgcccacagaacatatacccagatagatcatattctgggtcataaaataaactaacaatttttaataaaaccacataaagcatgttctctggctataccaaaattaaacnaggaattaaataatngaaaactcccccaggctaaccaacatgggtgaaaaccccnctttcttaccattccaaaaattagctnggc

SEQ ID NO: 5583 - DNA, 569 bp, Homo sapiens
  misc_feature (58)..(58): "n" may be a, t, c, g, other or unknown
  misc_feature (428)..(428): "n" may be a, t, c, g, other or unknown
  misc_feature (494)..(494): "n" may be a, t, c, g, other or unknown
  misc_feature (497)..(497): "n" may be a, t, c, g, other or unknown
  misc_feature (516)..(516): "n" may be a, t, c, g, other or unknown
  misc_feature (558)..(558): "n" may be a, t, c, g, other or unknown
  misc_feature (560)..(561): "n" may be a, t, c, g, other or unknown
  misc_feature (566)..(566): "n" may be a, t, c, g, other or unknown
agacagagtctcgctggagtgcagtggtgcaatctcggctcaccacaacctccgcctnccaggttcaagtgattctcctgcctcagcctcccgagtagctgggattacaggcatacaccaccacgcccggctaatttttgtatttttagtagagacagggtttcaccatgttggccaggctggtctcgagctctgacctcaggtgatctgcctgccttggcctcccaaactgctgggattacaggtatgagccactgtgccctgccttgactcatttttgagaaagggtctagcaaacaccagtctcagtaaccatcaggcactggcgggtcttttaatgtgaagtttgctgaaagtgtggcctttggaagggctggaggctccttcccaggcagcagcgtcccttcactgaacctcttcttccacangctcttctgagaatttccttccaagcctgaaaggctcttttggggcattggggtaagtgatacttnatnacccttggccttttgaccnggtccattccccaaaacctgtgattggggtgaggtatttatntnnaattntgc

SEQ ID NO: 5584 - DNA, 551 bp, Homo sapiens
  misc_feature (460)..(460): "n" may be a, t, c, g, other or unknown
  misc_feature (465)..(465): "n" may be a, t, c, g, other or unknown
  misc_feature (519)..(519): "n" may be a, t, c, g, other or unknown
  misc_feature (521)..(521): "n" may be a, t, c, g, other or unknown
  misc_feature (523)..(523): "n" may be a, t, c, g, other or unknown
  misc_feature (538)..(538): "n" may be a, t, c, g, other or unknown
  misc_feature (546)..(546): "n" may be a, t, c, g, other or unknown
aaatatatattccactttattagttagaaaaaatcatttaagccacatggtggccacaatgtccataacttgagcaggctttggcatcccaccacccccttcagaccaatacacactatgttggaggaacgactttaaaatgtaaaatgagaaatgggcactgaacactccatcctcactcccaacagcccacccacacaacctcttcaactgctatccaaacatggaggagctcttgtggaagagaggctcaacaccaaataattgagcataagacattcaagactaaaggaaccccagacagatgtttaggaagtagggttgaaaatatcaccatctcccaacagctgaagttgggacatctaagagatgtcagagccatactgctgaggaaagcacagcatacaccagaccccggggtaagggcgagatcaacctatcttcatagccataagcaatncactnacacctgggcattaaacaggcttttccttttcttttttttttttgagatggagncntngccttgtgggcccangctgggtncagca

SEQ ID NO: 5585 - DNA, 562 bp, Homo sapiens
  misc_feature (466)..(466): "n" may be a, t, c, g, other or unknown
  misc_feature (491)..(491): "n" may be a, t, c, g, other or unknown
  misc_feature (508)..(508): "n" may be a, t, c, g, other or unknown
  misc_feature (517)..(517): "n" may be a, t, c, g, other or unknown
  misc_feature (523)..(523): "n" may be a, t, c, g, other or unknown
  misc_feature (527)..(527): "n" may be a, t, c, g, other or unknown
  misc_feature (543)..(543): "n" may be a, t, c, g, other or unknown
aattatactttaagttctagggtaccgtgtgcacaacgtgcaggtttgttacatatgtatacatgtgccatattggcatgctgcacccattaactcgtcatttacattaggtatatctcctaatgctttccctcccccgcccccacaacaggccccggtgtgtgatattccccctcctgtgcccaagtgttctcattgttcaattcctatgagtgagaacatgcagtgtttggttttttgttcttgtgatagtttgctgagaatgatggtttccagcttcatccatgtccctacaaaggacatgaactcatcctttgttatggctgcatagtagtccatggtgtatatgtgccacattttcttaatccaatctatcattgatggacatttgggttggttccaagtctttgctattgggaataggtgctgcaataagtctatggtgtgcatgtgtctttatagcacnatgatttataaaccttttggggtanatacccagtaatggggntgagtgggntcaaangggnatttctaggtctaaancccttcagggaattgcccc

SEQ ID NO: 5586 - DNA, 562 bp, Homo sapiens
  misc_feature (454)..(454): "n" may be a, t, c, g, other or unknown
  misc_feature (475)..(475): "n" may be a, t, c, g, other or unknown
  misc_feature (558)..(558): "n" may be a, t, c, g, other or unknown
  misc_feature (560)..(560): "n" may be a, t, c, g, other or unknown
agtagagatgaggttttgtcatgttgcccaggctggtctcagactcctgtggtcaagcaatcctcctgcttcagtctcccaaagggctgggattacaggcaggagccactgcgctcggccaaagacagggtaacataaactttaccctaaatccactgtgcatgcagaaaggggttgactgacgaatccttgtttttctgagactcgacatgcagacagtttgatgctagaggagctccctttcctaggctttgtcatatttctttcccattcactgactgaccttccttgttttcagccctctatttgcactggtaccctttaactcagtagttctccgctatggtattagttgtcaggagtgtccatacttaagtaccttaagttcatgagtcattttttaagcaaacaaaaaagagtagttatagcacttactttcttttgagcatgaatngagaagaaaaggacagaagtntagcaaagaaattaaaaatctcttagtattaagaggtctaaaaaaatctagattttagcaagggagaatggagtatatggtantntc

SEQ ID NO: 5587 - DNA, 359 bp, Homo sapiens
  misc_feature (17)..(17): "n" may be a, t, c, g, other or unknown
  misc_feature (38)..(38): "n" may be a, t, c, g, other or unknown
  misc_feature (56)..(56): "n" may be a, t, c, g, other or unknown
  misc_feature (171)..(171): "n" may be a, t, c, g, other or unknown
  misc_feature (184)..(184): "n" may be a, t, c, g, other or unknown
  misc_feature (322)..(322): "n" may be a, t, c, g, other or unknown
  misc_feature (328)..(328): "n" may be a, t, c, g, other or unknown
  misc_feature (340)..(340): "n" may be a, t, c, g, other or unknown
  misc_feature (354)..(354): "n" may be a, t, c, g, other or unknown
  misc_feature (356)..(356): "n" may be a, t, c, g, other or unknown
  misc_feature (358)..(359): "n" may be a, t, c, g, other or unknown
gcgccatccaggtttgngtttattcgatacaggcccanaacccagccctccttcanagaagtggccgagctgggggaacagaataaataaaggccgccgaggtgtgatggggactggacgggccggtctggggcgaggcaagggtgcccaggaggcattgaccccaacctnagctgtccacggntggccccactcccagcaggctccgggggcagtgtgagcgcccacaaggagcagggctcggactcctgccacctccaagtcctttcttttccttcctgccctccctctccttcctaaggcaggtccagagaccaagctntccctntggccggggaanccgggaggggaggnantnn

SEQ ID NO: 5588 - DNA, 414 bp, Homo sapiens
  misc_feature (197)..(197): "n" may be a, t, c, g, other or unknown
  misc_feature (232)..(232): "n" may be a, t, c, g, other or unknown
  misc_feature (369)..(369): "n" may be a, t, c, g, other or unknown
  misc_feature (404)..(404): "n" may be a, t, c, g, other or unknown
  misc_feature (410)..(414): "n" may be a, t, c, g, other or unknown
gagacagtcttgctctgtcactcaggctggagtgcagtggcacaattgtaggtcactgcagcctctgcctcccgggttcatgccattctccaacctcagcctcctgagtagctgggattacaggcacccaccaccatgcctgcctaatttttggatttttagtagagatggggtttcgccatgttggccaggctggnctcgaattcctgacctcaggggatccgcccacctnggcctcccaaagggctgggattacaggtgtgagccactgggcccggccaaaggttacctttattgatatttaccttattgaaaattcaaggatttttaacttaaaaatatttatatttacaaatattataaatattnacaaatccaaatactgatatttacaaaaactattnctattnnnnn

SEQ ID NO: 5589 - DNA, 538 bp, Homo sapiens
  misc_feature (440)..(440): "n" may be a, t, c, g, other or unknown
  misc_feature (513)..(513): "n" may be a, t, c, g, other or unknown
  misc_feature (517)..(517): "n" may be a, t, c, g, other or unknown
  misc_feature (525)..(526): "n" may be a, t, c, g, other or unknown
  misc_feature (529)..(529): "n" may be a, t, c, g, other or unknown
  misc_feature (533)..(533): "n" may be a, t, c, g, other or unknown
ggtagtttaaaggtttttgaaaatgttgatatacacaagctgtacttggagctggataacagacataggagctggatgacagacatacttttattcttttatttttgagatggagtttcactgtcacccaggctggagtgcaatggagcgatcttggctcactgcaacctccacctcccaggctcaagcaattctcctgcctcagcctcctgagtagccgggaccacaagcgcctggcaccacgcccagctaatttttgtagctttagtaaagacggggtttcaccatgttggccaggctggtctcaaactcctcacctcaggtgatccacctgcctcggcttcccaaagtactgggattacaggcgtgagccactgcgcccggccttaacataggattttcatcctagaatgacttttcccaaaaagattcaatcttangcctcttgctgtaggcaagttccatgggactgcacaaaagaaggcagggaacagtccccatgggaaaatgganttcnttaaaaannggntttnaggcc

SEQ ID NO: 5590 - DNA, 580 bp, Homo sapiens
  misc_feature (431)..(431): "n" may be a, t, c, g, other or unknown
  misc_feature (433)..(433): "n" may be a, t, c, g, other or unknown
  misc_feature (449)..(449): "n" may be a, t, c, g, other or unknown
  misc_feature (488)..(488): "n" may be a, t, c, g, other or unknown
  misc_feature (506)..(506): "n" may be a, t, c, g, other or unknown
  misc_feature (526)..(526): "n" may be a, t, c, g, other or unknown
  misc_feature (557)..(558): "n" may be a, t, c, g, other or unknown
gggtattatattattttatttcagttaatgagcaaatttatcagagctgcttgacacatgatcaatttaatataattctatgttcaaaaattgtatttctgtattttgccacaaacaattataaaatgaaaataaagatatgatttgcaatgatacaaaaaagtaaacatttaggagtaactagtgaaacaagtttataatttttaaacagaaaactacaaaacaattttgacaaaatttaaagaaaaacctaaataaatggagagatatattatgttttgtagtttcaatatgctttcagttctcaccaatttgagctatatattcaatgcaatcccaatcaaaagtctagcataattttatagaaactgacaatctgattttaaatatgagaataaatgcaaagggccaaaatagccagggcaaagttnanggaagacaaagttggnaaactcaccgttactttacctcaaggattataccaaagntataaaagttgcaagcanaggtcccactggcaatgganccccggaaagggatggcccttttaaaataanngatgttatttcaactggatatt

SEQ ID NO: 5591 - DNA, 565 bp, Homo sapiens
  misc_feature (393)..(393): "n" may be a, t, c, g, other or unknown
  misc_feature (395)..(395): "n" may be a, t, c, g, other or unknown
  misc_feature (400)..(400): "n" may be a, t, c, g, other or unknown
  misc_feature (447)..(447): "n" may be a, t, c, g, other or unknown
  misc_feature (466)..(466): "n" may be a, t, c, g, other or unknown
  misc_feature (507)..(507): "n" may be a, t, c, g, other or unknown
  misc_feature (538)..(538): "n" may be a, t, c, g, other or unknown
  misc_feature (540)..(540): "n" may be a, t, c, g, other or unknown
  misc_feature (553)..(553): "n" may be a, t, c, g, other or unknown
aatggttaaaatccagattttttttattaatgataaacttcacccgtcactgtacattatgcattgagatagtaactaatgatagtatgaagtcatcacaattagcaacaggttttcaaataatatttatttcaccctcaagcttggtttgaaatttctgtccttacgtatgcttcataatgtacctaatcattgttcgtgggttcatgcatatgcttataaatgtgcatatattggggtgcatacaaaaaaacattttatagacaggaatgtgctgaaaaaatgtaatgaattagacagtagaaagaaccaactatgtgctccaagccacacaaatgcctaagaatttggcgtttgtttgcggccatagtttgagtgcttctcaaatgtacngngcatncagatcacctggggatcttgttaaaatgcaaattctgaatcaataancaggaaggtgggccctganatcggcccaacttccagaagataaaaagctgctggttccangccacacttccgagggccaagaccttaaccntnctgggatggtaangggcatgtgcac

SEQ ID NO: 5592 - DNA, 561 bp, Homo sapiens
  misc_feature (489)..(489): "n" may be a, t, c, g, other or unknown
  misc_feature (508)..(508): "n" may be a, t, c, g, other or unknown
  misc_feature (515)..(515): "n" may be a, t, c, g, other or unknown
  misc_feature (527)..(527): "n" may be a, t, c, g, other or unknown
  misc_feature (540)..(540): "n" may be a, t, c, g, other or unknown
  misc_feature (551)..(551): "n" may be a, t, c, g, other or unknown
  misc_feature (554)..(554): "n" may be a, t, c, g, other or unknown
gctattcaattgtttgaattccttatatattctgattattcactcctggtcagatggataatttgtgaatattttctcccattctgttggttgttaccttgtcatttgtttcctgtgctgtgcagagcaattttagattgatatatgcccatttgtccatttttgctttcattaccagtgcttctgaagttttgttcataaaatctttgcccaaaccaatgtcctgactcatttcccctatattttcttctggtagtattatagtttggatcttacatttaagtctttaatccattttgagttgatttttatatggtgaaagatagaggcctagttttattttctgcatatgaatatccagttttcccagcaccatttattgaagagggtgtactttccccaagtgtgttcttggcacttttgtcaaaagtcagttagggctaatgtggatttggttatgggtctgcattttggtcaactggcctgggnggctggtttcataccagtnccatgcnggtttgggtacnatagctttggagnatggtttgaanccnggtaggg

SEQ ID NO: 5593 - DNA, 557 bp, Homo sapiens
  misc_feature (411)..(411): "n" may be a, t, c, g, other or unknown
  misc_feature (423)..(423): "n" may be a, t, c, g, other or unknown
  misc_feature (429)..(429): "n" may be a, t, c, g, other or unknown
  misc_feature (462)..(462): "n" may be a, t, c, g, other or unknown
  misc_feature (478)..(478): "n" may be a, t, c, g, other or unknown
  misc_feature (481)..(481): "n" may be a, t, c, g, other or unknown
  misc_feature (517)..(517): "n" may be a, t, c, g, other or unknown
  misc_feature (550)..(550): "n" may be a, t, c, g, other or unknown
aggtaaaaagatgtatttcaaagtgggatcagtgaatcttcaactaaataaataaatgtacagccccccaagatgcagaatttcccatccctagcttaacagtcacggttcactttgttttacgtgcgtttcgcagatgagtggtgctctcatcagcagacacaagacttctttggcctctgcttttttttcctttcttctaataaggagactacactctagataaacaaaacagacaggcgaatgtaatccagggttttggtggtttttctgagtctagaaggactaaaaattagccttgataggcagaaagagcatcccaacctgtctgtcaaaaactctggccatttctaggacacctttgccgaactgaaacaggaaacaacaaaaattttacatgcttataaatgntttctccccctncgaggnaaatctttcataaagatggactcattacctcantttttacacttgcatntgncccttttcaaaaagtaccggactactcttcatgatnttaacccagccccctaaggggcgttttccattntggcctt

SEQ ID NO: 5594 - DNA, 566 bp, Homo sapiens
  misc_feature (485)..(485): "n" may be a, t, c, g, other or unknown
  misc_feature (500)..(500): "n" may be a, t, c, g, other or unknown
attaaagcatatatgttgcatataaaatacagtacagaaccaggagttgcactatactgattagtgcttaacagaagaaatgattaaatttgttcctcccagaagtatatacacagttcatttccacagcattttcctatatagccagcaagttattttcttcagttattcacaccttgatcaaacctgaattataaacttagcacttacaaatatgaaaattcattcacaaggaaaaacagtatttccatttcaccaataaaaattttgaaagttaacagtctattctaggaaaccaagtttagctgaaaacttcagggatgaagatcatctgttgtagcagcattcaaatatataaacagtaaaaataagacttaaaactgctgcctacagtgtcatgttttggatttagttcatccaattgatttttagtacaaaactagaaataccctcttcttcatacatctatagttatcaatatattntcttcttttcaatgngaaataatacttcaggatgatctatttccccaatggtggccggtcaagctggcatataaaataaag

SEQ ID NO: 5595 - DNA, 493 bp, Homo sapiens
  misc_feature (482)..(487): "n" may be a, t, c, g, other or unknown
  misc_feature (490)..(490): "n" may be a, t, c, g, other or unknown
aatttcaaactatttttatttaacatttggtattgttaaacaggtatagtattcaggacatacaccttctaccacaatttctttaattagggtactttatattttatcaaaaatgtgcatattaatagattgtagtttagcctttgtcaaaagacacgcaagtatttagtatttacattaaaaggattgcctcagaagaaacattgaattcataagccctcttaaaaagtcaaaaatatgcataaagaagactagtattgatattttctgatattttagatatgattaatattttggacctccattggtttccacactatcatgcaaatttccaacttgctttaacacaacagttctatcagctgtattagagggaatacacattttaattgctctttttgaaaatatcaccaggcagttcagaatgtctcatttattgagaatattgtgacaatcaaagaccttaatttaaaaaaaaaaannnnnnaanccc

SEQ ID NO: 5596 - DNA, 564 bp, Homo sapiens
  misc_feature (260)..(260): "n" may be a, t, c, g, other or unknown
  misc_feature (394)..(394): "n" may be a, t, c, g, other or unknown
  misc_feature (516)..(516): "n" may be a, t, c, g, other or unknown
  misc_feature (527)..(528): "n" may be a, t, c, g, other or unknown
  misc_feature (539)..(539): "n" may be a, t, c, g, other or unknown
  misc_feature (552)..(552): "n" may be a, t, c, g, other or unknown
  misc_feature (559)..(559): "n" may be a, t, c, g, other or unknown
  misc_feature (561)..(561): "n" may be a, t, c, g, other or unknown
gctggttttagcttcacaagttggccttttttttaaaattatttattttattattattatactttaagttttagggtacatgtgcagaatgtgcaggttagtgacatatgtatacctgtgccatgctggtgtgctgcacccattaactcgtcatttagcattaggtatatctcctaatgctatccctcccccatctcccccccccacaacagtccccagagtgtgatgttccccttcctgtgtccatgtgttctcattgntcaattcccacttacgagtgagaacatgcggtgtttggttttttgccttgcgatagtttactgagaatgatgattccaatttcatccatgtcctacaaaggacatgaactcatccttggtaatggctgcatagnattccatgggggatatgtgcccaatttcttaatccagtctatcattggtggacatgtgggttggttccaagtcttttgctattgggaatagtgccccaataaacatacatgggcatggggcntttatagccanntggatttaaangccctttggggantttcccnanaaa

SEQ ID NO: 5597 - DNA, 556 bp, Homo sapiens
  misc_feature (513)..(513): "n" may be a, t, c, g, other or unknown
  misc_feature (528)..(528): "n" may be a, t, c, g, other or unknown
  misc_feature (556)..(556): "n" may be a, t, c, g, other or unknown
acatagacaatccagtgtatttatacttaatccataaaggcatgatgttcaaaacacatttgtatattatgaagccatctggcatcaaattttccaatttatagacaactttgtatttacataacaaattattaaatcaaccatttttccggtttataaaaggtcactgaggtcacacacagtgtgtataaatgcagataaggctggtaatacatatttacagtagatacaaattaatctttcatatttgaagataatgctttttatatattttttctatatcagactccccactgttagcaggatttcccatgctcgagttgtttattgctttttggctcactgatttaatattcacttctgggttgtttacacatatgaattactaatgttcttatctctttggctaatgcaaatgtgatagagtgaatgaaagaaaaagatgaactaattaaatattcagttctggctgggtggataatttttggtcatgtccccaaatgaatcaatgcncactcatttgatatnctccttgaaaagcttgagcttgcattan

SEQ ID NO: 5598 - DNA, 570 bp, Homo sapiens
  misc_feature (438)..(438): "n" may be a, t, c, g, other or unknown
  misc_feature (526)..(526): "n" may be a, t, c, g, other or unknown
  misc_feature (533)..(533): "n" may be a, t, c, g, other or unknown
  misc_feature (546)..(546): "n" may be a, t, c, g, other or unknown
  misc_feature (554)..(554): "n" may be a, t, c, g, other or unknown
  misc_feature (565)..(565): "n" may be a, t, c, g, other or unknown
  misc_feature (569)..(569): "n" may be a, t, c, g, other or unknown
cctatgctgtttgttttctgccatgagctttagcaatctgtttatgttgtgagtgtgtgtgtatttgtgtgtgtttccctctccagcctggctgaattatccccaagtgactcttaatcctcaaccataattcccagtgattgcactgacatgataacgggggagcccattttcctcccacccctcctcactccctccccccttgttgctaagctcagccaaggatgctctagggagctgttcatttaaaagaggaagttcacagcagggtcaccaggcttttaaacagagagagaggttgcccagggtaagaagagagctcaaagtcacaaaccctttcctttgtcctgtgaccccagcatgtggggacatcagtcccaagtcgtcactctttctgaggccactgacatccccacaagcatacctggctggcactgngactagcaaaaggcttggactgggaatcagaaaggcaacacctaccctgactagctgtttcatggtgggaaaagtgacctgcccactntggcctnaatttcccaatcncaaaaatnggcttggacanattng

SEQ ID NO: 5599 - DNA, 549 bp, Homo sapiens
  misc_feature (106)..(106): "n" may be a, t, c, g, other or unknown
  misc_feature (382)..(382): "n" may be a, t, c, g, other or unknown
  misc_feature (478)..(478): "n" may be a, t, c, g, other or unknown
  misc_feature (506)..(506): "n" may be a, t, c, g, other or unknown
  misc_feature (512)..(512): "n" may be a, t, c, g, other or unknown
cagcttcgggtgaatcactttaatgctgttaacggcaagtctgtaaaaggttcaggacaaagttcttttttctttcttttttaattataaaactaacagctgttanaatctttttttctttttttccttttttcttttcccagctacaaaatactctggggagatgcattataatttaaaatatataatattgcacaaacaaccaaaaggttaattaaactaaagaaataattacaaagagaaaaaccccatcccgtcaaaaaaaagattcagcattctctccatcccaccccctcactgaaggtttgaagtggaagcctgatgagagtttcaagttcacccccaggatagcccttccagaagcagaagggctgaggcgganaagctaggcttaccagagttgtaagtactcggctttgatcaccgctctgtaccgctggtagctgttttgggtcctaaactacaggggagttgaggngggtagctgggttggacaaaggtttctngcaggnacacaccaaagggcttaaaaacccccttcttttttgg

SEQ ID NO: 5600 - DNA, 225 bp, Homo sapiens
  misc_feature (219)..(225): "n" may be a, t, c, g, other or unknown
aaatctgctttggaagtgtttaggacttaaacatttcaatgaatattcaaataacaatgctgtactgcctaatatttacattatgttagtacatgcaaatgggtgttctaagtgagctacttggaactgtacaatttcttaagcatatctgaatgcaaaaggaagaataacgttattagaagaataattctcagaggtggtgctgggtgggctgtgggnnnnnnn

SEQ ID NO: 5601 - DNA, 557 bp, Homo sapiens
  misc_feature (532)..(532): "n" may be a, t, c, g, other or unknown
  misc_feature (551)..(551): "n" may be a, t, c, g, other or unknown
  misc_feature (557)..(557): "n" may be a, t, c, g, other or unknown
gacaatgggaaggaaagtaatttaatatgcaacataactcaatccatgaaataaatatttatttatgtaatacaatttgctaaacaccaccattattaaggagagcactaggaaaaactaccaaacacagcatgtgaaacagttgggcacggtggtaaagggcacagactctggagccacagctggctaatacactgcaatattttatgtttagcaaattatagctggtctgtgtataaccagaagagcggtatctgggggatcaggatatctaaattctagacttacagcctggccctgaatctaactatcaatgttgccttggaaaaactgctcaaacttttgatgtctaaagtttcagacttgtaaacttgagagggttgaggtccaaggtcccttaaatgtaaactttaaaatgcttttttgggaatctttcaaatcttcaagctcttcaaagtgcaacccggactttctccttactatacagtctgaacaactttgagaatcactggattatcttaagttatatagnaatcctgacctaaatttanttttcn

SEQ ID NO: 5602 - DNA, 531 bp, Homo sapiens
  misc_feature (189)..(189): "n" may be a, t, c, g, other or unknown
  misc_feature (355)..(355): "n" may be a, t, c, g, other or unknown
  misc_feature (452)..(452): "n" may be a, t, c, g, other or unknown
  misc_feature (477)..(477): "n" may be a, t, c, g, other or unknown
  misc_feature (492)..(492): "n" may be a, t, c, g, other or unknown
  misc_feature (505)..(505): "n" may be a, t, c, g, other or unknown
  misc_feature (510)..(510): "n" may be a, t, c, g, other or unknown
  misc_feature (529)..(530): "n" may be a, t, c, g, other or unknown
aagatttttcccaagctattaaacatgtacctttcagtatgttctacaacaatatagttctcaaatcaaggtcaggacattaagtcctactttcctttcttccatgagaagagcttaattctttagtcttttcaattagctatagataacagttctgaaatgtgtccatgtgtgcacacttcccactgncttaccacttgtctgcttggtgtgtcttgcagattatcaggctacagtgatttcttgtattttattttgaccctgtgttctgctaccaacttcctaggtttgtcatgtactagactcagtgacatggccaggttcaaaaactgtgttttttttttttttttaaganttttcccaagctattaaacatgtacctttcagtatgttctacaacaatatagggctcaaatcaagggcagggcattaaggcctactttcctttcttncatgagaagagcctaaatctttagnctttcaaatagcttngatacaagtctgnaatgnggccctggggggggaaagnng

SEQ ID NO: 5603 - DNA, 535 bp, Homo sapiens
  misc_feature (466)..(466): "n" may be a, t, c, g, other or unknown
  misc_feature (475)..(475): "n" may be a, t, c, g, other or unknown
  misc_feature (480)..(480): "n" may be a, t, c, g, other or unknown
  misc_feature (505)..(505): "n" may be a, t, c, g, other or unknown
  misc_feature (508)..(508): "n" may be a, t, c, g, other or unknown
  misc_feature (512)..(512): "n" may be a, t, c, g, other or unknown
  misc_feature (521)..(521): "n" may be a, t, c, g, other or unknown
gctttttttcttttgagacagtctggctctgtcacccaagctggagtgcagtggcacaatcgcggctcactgcaacctctgcctcccaggttcaagcaattatcctgcctcagcctccccagcagctgggacaacaggcggctaccaccacgcctggctaatttttttttttttttttttttttttttgagacggagtttggctcctgtcacccaggctggagtgcaatggcatgatctcggctcactgaaacctccgcctcccgggttcaaacaattcttctgccttagcctcccgagtagttaggattacacgcatgcatcaccacaccaggctaattttgtatttttagtggagacagggtttcaccaggttggttgggctggtctcaaattactggccttaggtgatcagcctgccttggtctcccaaagtactgggattacaggcgtgagcccccatgcancctggcctnagggnttcttttaacccttaaaaacttcanttnaagnattaaaagnttccccaattaaaa

SEQ ID NO: 5604 - DNA, 516 bp, Homo sapiens
  misc_feature (430)..(430): "n" may be a, t, c, g, other or unknown
  misc_feature (444)..(444): "n" may be a, t, c, g, other or unknown
  misc_feature (478)..(478): "n" may be a, t, c, g, other or unknown
  misc_feature (494)..(494): "n" may be a, t, c, g, other or unknown
  misc_feature (496)..(496): "n" may be a, t, c, g, other or unknown
  misc_feature (512)..(512): "n" may be a, t, c, g, other or unknown
  misc_feature (514)..(514): "n" may be a, t, c, g, other or unknown
ctgtaagatgctttatttcattgaccaacaacatggggtctgaaaacccagcgggaggggtctttttatcacagagccagtcccaggcgagctgatgcatctctgctcctctgcccctcaggagctctcatcctccaaccccagctgcccccgatcacatacagcttgttgaggagggttgccatgccgtgccaggcgcgccgcacaggcccgtcagccagtgtgtgccaagtgttgctgcctggatcgtagcagtgtgtctctttcaggtaatcctcccctctgcggccgcaggtgatatacatcttcccctccagcgtcgcgcctgcgtgggcatacacctccctcttgagtggggccacgtatgcccaggagttggtggcagggtcgtagcgctccacagcattcaggtcattgtggtagtcacggnccgccacaacgtanatgtacctgcctacaacacacacggacaaggtcnggcgtgctcctgctgnanggactggatcttggancnac

SEQ ID NO: 5605 - DNA, 552 bp, Homo sapiens
  misc_feature (499)..(499): "n" may be a, t, c, g, other or unknown
  misc_feature (514)..(514): "n" may be a, t, c, g, other or unknown
  misc_feature (536)..(536): "n" may be a, t, c, g, other or unknown
  misc_feature (541)..(541): "n" may be a, t, c, g, other or unknown
acctagaggttataggaagggatgaacagagatgacagacaagacaaaaaaggttatgagagaattcctcattatacatgggtagaattcaccccagaaaccaaagaacttttcataattacaagggagggacagcacagggcacaagatctttgaggtgttagaagacaggctgacagaccaagcttggtgactggcttaataagtctcctaccacttgaaattctgtgttatttatttaaagagaggcagaggaagagttcagaagccagaagatttttggaagagaagttgagcctcttgcattttcctacatcattaatttccttcaccagaagatatagttggaccaaattgcaatagggttcgccaatggactccattatgtagtcgacctgtgctcctcactaggccctgatttcgctatctgataacaaaggcttctgaactcttattcttttcctcactaacaaacctcaataatctacacttagcattnagggcttccattcangggtattggaaaaactagcttncttanccaacgttttt

SEQ ID NO: 5606 - DNA, 546 bp, Homo sapiens
  misc_feature (77)..(77): "n" may be a, t, c, g, other or unknown
  misc_feature (131)..(131): "n" may be a, t, c, g, other or unknown
  misc_feature (450)..(450): "n" may be a, t, c, g, other or unknown
  misc_feature (474)..(474): "n" may be a, t, c, g, other or unknown
  misc_feature (477)..(477): "n" may be a, t, c, g, other or unknown
  misc_feature (505)..(505): "n" may be a, t, c, g, other or unknown
  misc_feature (516)..(516): "n" may be a, t, c, g, other or unknown
  misc_feature (520)..(520): "n" may be a, t, c, g, other or unknown
  misc_feature (546)..(546): "n" may be a, t, c, g, other or unknown
ctttttcaaatgcgatttattgtacataaaataaattaattacagtttaagccaaagcttgagtggctttttaaagngcatctgtggaggggatgtggcaggtagcccctgttcacttgctgtaagatagngttttagtatttcagccacccttaggcacaactcagccaggcctaggaagcaacccaacgtcattgccatgaaccatttacacaagtcacaccaaaatcaactgacacatttttttcctgatggaacagttaaaaaaacaaaaaactatacagtcaaagtctggggttgaagagcgtgaagttcacagctcctccacacacgcccaactgagcatgctcatcctgtgagggggaaccagagccttcctgtaaaccatgcgagcttaccaatgtctggtatacagaatattctggcccataaactcaacctgtttttgangggtagggggattttccatcttgngcntaaagaaaagaaatctgggtttcctcanggtaaaaaggncttntggaaaaaaaaggggtccaaagttcn

SEQ ID NO: 5607 - DNA, 547 bp, Homo sapiens
  misc_feature (479)..(479): "n" may be a, t, c, g, other or unknown
  misc_feature (546)..(546): "n" may be a, t, c, g, other or unknown
cttaaggttcatttaatgccacagacagagaacattccataaaagattaagattaattttatatgcaaaataacttatatctacaggtatagattatcactcaaactgttagaagaaacagatattcattcccaagaatatagttttggaaaagaatgttactaaatgcactatttttggctatatctatgtatagaatttaaagacatgccttgattgctcttatgggggcagtgaatataatttttaaaatataaaaagtatatcaaatttgggcttgtttaacagctagcaatttaacaattatttcccttttgcatacttaaaaggcccttaaaattatctgaatcaaagcaaaaaaaatattcattgctccccaaactttataccatagaactttttaaagactgtttaaactagtaatcattcttcataactattaactaccattgaaccaatccatctattaagacaccagnggatggtggcttttttttttaacccaattaaaagaaaaaattgcttgctcgggctttaaaaagtganc

SEQ ID NO: 5608 - DNA, 510 bp, Homo sapiens
  misc_feature (433)..(433): "n" may be a, t, c, g, other or unknown
  misc_feature (461)..(462): "n" may be a, t, c, g, other or unknown
  misc_feature (484)..(484): "n" may be a, t, c, g, other or unknown
  misc_feature (487)..(487): "n" may be a, t, c, g, other or unknown
  misc_feature (492)..(492): "n" may be a, t, c, g, other or unknown
  misc_feature (501)..(501): "n" may be a, t, c, g, other or unknown
atgtcccagggatggattttactctaaaagtgaatacttaatgtcaatacagagagacatcagttcgtgaagctgaactgtctgattgaacttctatccatttccagcataaatatcaaagtataaactgatcactacttgtttgcaatgggaagaaagatttacagaaaaaaaaaaaaaagcattgatgtatcttcagtggagaatgtttagccagcatgtagtttgtctagtccagcattcaggagcttctgcctgcctggtttcttgggagttcttttcattcttctccagctgggggaggtggctcgcacagcttgtacagccttggtgcagactgtggagtccggtctctgactcccaaattcttcgctgtgttctgaactcttgctccctgcttccgcatcacatctgtagcctgcatgatgtaacnaggtggcaagtccgtggcttctgggccnnaatgatggcttgcttcaacgtnacnctcangggccccgntgcccaccg

SEQ ID NO: 5609 - DNA, 544 bp, Homo sapiens
  misc_feature (52)..(52): "n" may be a, t, c, g, other or unknown
  misc_feature (88)..(88): "n" may be a, t, c, g, other or unknown
  misc_feature (112)..(112): "n" may be a, t, c, g, other or unknown
  misc_feature (133)..(133): "n" may be a, t, c, g, other or unknown
  misc_feature (136)..(136): "n" may be a, t, c, g, other or unknown
  misc_feature (151)..(151): "n" may be a, t, c, g, other or unknown
  misc_feature (188)..(188): "n" may be a, t, c, g, other or unknown
  misc_feature (262)..(262): "n" may be a, t, c, g, other or unknown
  misc_feature (310)..(310): "n" may be a, t, c, g, other or unknown
  misc_feature (322)..(322): "n" may be a, t, c, g, other or unknown
  misc_feature (369)..(369): "n" may be a, t, c, g, other or unknown
  misc_feature (419)..(419): "n" may be a, t, c, g, other or unknown
  misc_feature (465)..(465): "n" may be a, t, c, g, other or unknown
  misc_feature (484)..(484): "n" may be a, t, c, g, other or unknown
  misc_feature (498)..(498): "n" may be a, t, c, g, other or unknown
  misc_feature (517)..(518): "n" may be a, t, c, g, other or unknown
  misc_feature (530)..(530): "n" may be a, t, c, g, other or unknown
  misc_feature (537)..(537): "n" may be a, t, c, g, other or unknown
ctttcacattttaattgaaagacagtgtaatgccattacagtacactaagtntacagcctgatgatttcttaacacgcgtatacctgngtaaccaccacccagatcaagatntagaacatttccaggccccanaanactcccttgtacctntttagtcaatgctgccacccccagaggtaagtacttntttcatcatggattacttgcctgttcttgaacttcatataaatggaatcatacagtatttatcactatacctgngataatgcaatattgttgtgtggatatgtggctaattattatttattnattttttttganacggagttttgctctttttgcccatgctggagtgcaatggcgcaatntcggctcaatgcaacctccaccttccgggttcaagtgattctcctgcctnagcctcccgagtagctgggattacaggcattgcgccaccacccggntaaatttggattttaatanaaaccgggggtttncatgttgggcaaggctggnntttgaacttccnaacttangggggtc

SEQ ID NO: 5610 - DNA, 583 bp, Homo sapiens
  misc_feature (410)..(410): "n" may be a, t, c, g, other or unknown
  misc_feature (472)..(472): "n" may be a, t, c, g, other or unknown
  misc_feature (506)..(506): "n" may be a, t, c, g, other or unknown
  misc_feature (510)..(510): "n" may be a, t, c, g, other or unknown
  misc_feature (551)..(551): "n" may be a, t, c, g, other or unknown
  misc_feature (556)..(556): "n" may be a, t, c, g, other or unknown
  misc_feature (564)..(564): "n" may be a, t, c, g, other or unknown
  misc_feature (582)..(582): "n" may be a, t, c, g, other or unknown
gagcatagaaattttaatccacaaaattccataaaatttcaaacaaactgagaagagcttctctttactttggggtcaaaacccagcaataacaattttgtgctatgctatatctgccaattccggatcagggcagagggaaggtccaatgagatttattaattgcctttccaaatgctgtatgtgtatgtgacaaaaactactctgagaatgaagaaccacagggaaaagtctaggtatggaatgatatgaaaggcaaagccagatattgggagctatttggtaaatcaaggataaagagatattctgtataagaaatacattagccagtgcaacaaaacccaaagaaatggaaagaattggaacacaatgaaaaatggcatgaggaagataaaatggtaagaaatccngaaagtcatccctggagatgctctggcttgtgggtgtagaattggaacttaatgaaacaatncaggaagaacagcagtcacaaggaggtccatgcnctanatcctttcaaacattctggaggaggaaagctctagtctttnaaaanaatgtccnggaagggggaatgggagna

SEQ ID NO: 5611 - DNA, 576 bp, Homo sapiens
  misc_feature (493)..(493): "n" may be a, t, c, g, other or unknown
  misc_feature (504)..(504): "n" may be a, t, c, g, other or unknown
  misc_feature (558)..(558): "n" may be a, t, c, g, other or unknown
  misc_feature (560)..(560): "n" may be a, t, c, g, other or unknown
  misc_feature (574)..(575): "n" may be a, t, c, g, other or unknown
aaaagcaagtggcttcacagtttatgacatcatacaaggtatcaatctccttatactccaaacaaatcatttcattcttaatgaaataggagatgctttcagtctttcacagaccttatctaaggactcacagggaatgcagcctgaaccctagctggtagacaaataatagccttaagtttagacttagctaaaaaatcagactacctcaatcacccccaatgaaagtaaaggccaaaaggaaagcacaatcagacgctgggaaacttagcttggaaatgcatttggaattatactgcagtgtgatggtacccagtcctagtgtgaagtgaggaaaaggagacgagtgagtaaggcacagaggcaacagagaaaaaggcagctttttgaatcctctctagttgaatcctcccagtaccagcttcagtaattggttagaaccagttttattcctaacaaacatagaacaccctaactaaatgtgagtaaggcncggaggcaacngagaaaaaggcagctttttgaatccctctagtggaatcctccagtccaggtttngnaattgggtaaaccnng

SEQ ID NO: 5612 - DNA, 573 bp, Homo sapiens
  misc_feature (71)..(71): "n" may be a, t, c, g, other or unknown
  misc_feature (108)..(108): "n" may be a, t, c, g, other or unknown
  misc_feature (145)..(145): "n" may be a, t, c, g, other or unknown
  misc_feature (335)..(335): "n" may be a, t, c, g, other or unknown
  misc_feature (389)..(389): "n" may be a, t, c, g, other or unknown
  misc_feature (462)..(462): "n" may be a, t, c, g, other or unknown
  misc_feature (496)..(496): "n" may be a, t, c, g, other or unknown
  misc_feature (509)..(509): "n" may be a, t, c, g, other or unknown
  misc_feature (528)..(528): "n" may be a, t, c, g, other or unknown
  misc_feature (541)..(541): "n" may be a, t, c, g, other or unknown
  misc_feature (547)..(547): "n" may be a, t, c, g, other or unknown
  misc_feature (563)..(563): "n" may be a, t, c, g, other or unknown
aggattttactttagttttaattgacgttttgctcaaaagcaaagaactgaacatttcaatggttcaatgntacaagattacaaacaaaatccttacacagttacagnatcctacttcgggtacttcacattaaatgcaggttgntaaaatcagtgctgtgcttgaacacaagataagcatttcaatttaataacaaaattaaatctagcaccttgaaataaatattgacgacagctttataagtatgaaagtatcatttcaataggaggaaaaaatccagttcaccaacagtggaaactaatagcagcattttcaaagctgagatgaaatttgngtaaacacacactggcccgcacagtggacatgcatttctgttggctgggccctncccacccagggatgaacagagtgcccactgagccttttacattccaaatctggaaagctgcctcaagtttcanaccgtgggctagaaagactcaaatgccgggcaangggaaatcaatgngtttaaacccggatggggncctttttggacanggcaanctagtacattttcagnccactttaaa

SEQ ID NO: 5613 - DNA, 560 bp, Homo sapiens
  misc_feature (451)..(451): "n" may be a, t, c, g, other or unknown
  misc_feature (453)..(453): "n" may be a, t, c, g, other or unknown
  misc_feature (464)..(464): "n" may be a, t, c, g, other or unknown
  misc_feature (468)..(468): "n" may be a, t, c, g, other or unknown
  misc_feature (487)..(487): "n" may be a, t, c, g, other or unknown
  misc_feature (526)..(526): "n" may be a, t, c, g, other or unknown
  misc_feature (529)..(529): "n" may be a, t, c, g, other or unknown
  misc_feature (556)..(556): "n" may be a, t, c, g, other or unknown
  misc_feature (559)..(559): "n" may be a, t, c, g, other or unknown
attaacatttcattttatttcttagatttgggtggattacatcaatttcctaaaaggcgtgtaagtatttgtatagtttttttttacatctacagttggtttagctaaaatataatttttagttctttgagaaatctccatactattttccatagagttgttctttgggtagatatccagtagtgagattgctgggttgaatgagatttggttataatataattgatggcatttcttatccaatctcagggaagctgtaggatcttatgcagaaaatcaaagaataacagctgtccgaagagtttatcaacgaggttgtgttaatccgatgatcaacattgaacagctctggagagacaaggccgtcaaaaggcccaacgaggattcagatgaagatgaagaaaaggggagcccgttgtcccccctgttcatgacatttacagagcacggnancagaagccggnttcngtagggttttaaacgcctntgcagaaaactcctgtccaggattcctttggcctcaagnggnattgttaaaagagacacgctttggttncang

SEQ ID NO: 5614 - DNA, 584 bp, Homo sapiens
  misc_feature (545)..(545): "n" may be a, t, c, g, other or unknown
  misc_feature (558)..(558): "n" may be a, t, c, g, other or unknown
  misc_feature (568)..(568): "n" may be a, t, c, g, other or unknown
  misc_feature (571)..(571): "n" may be a, t, c, g, other or unknown
  misc_feature (577)..(577): "n" may be a, t, c, g, other or unknown
gcaaagaatttacatatatttaatattttataaaatggccagtattttatattgaagattatcgatataaaccgtaacacacaatggcggctccctggcacttcttatttccttatattgataggagactaagaaccagtaaaatgaaggagagaaagacggtttgacaaaacagtgcttactagtagatatgtcagatacacagcagtggaaatgtaagagattaaggtacaaatacaggttgtgcttatagtcgtctaatgagccacacagggattttaaaaattaagatttcaaactccatgaagcagtcaagttagaccagcaaaggaaagattcaagcaatgaagtcacagtatatatccatacttctgtatcttgtaaaccaatctgccttacctcagccaaggccatatgaattaataacttaaatgtgtacagtgcttttaaacttttaaaccccttcacatctatgaactacgtgatcctcacaacaaccctgtgaggtaggcagggcaggagttattattgatccccattttacngatgaggaacccnctggaggganggnaactgnttcccat

SEQ ID NO: 5615 - DNA, 586 bp, Homo sapiens
  misc_feature (202)..(202): "n" may be a, t, c, g, other or unknown
  misc_feature (408)..(408): "n" may be a, t, c, g, other or unknown
  misc_feature (460)..(460): "n" may be a, t, c, g, other or unknown
  misc_feature (484)..(484): "n" may be a, t, c, g, other or unknown
  misc_feature (574)..(574): "n" may be a, t, c, g, other or unknown
atgctctttttttggttctaaaactgatgtggtttcatttggagttctcttcttttcattaaccacatcaccgtctgcttctcttgcttctagtagtgataaactattttgctctttatggataaattcattcatctcttttgtaaccctttctgtttgctgcttttcttcttccatctgtttatcatgtaatagctgctgntctttttcttttctccaaaaagcttcctgtttttgccggattcgacgccgtaattcttcatcatcagtgtcagatgactcagatcctctgtcactcctctcatcttcactgtctcctgatccataaccacccagtccacctgtgtgcataaagctcagtctatcatatgaaaaaaattatactatgcactaaaaacttttcaaggnctgagaaaaaagttcatttcttttttcaatggccttttcccagaagaatacncctaattcggggtggggagaagtntatattcaaacccctaaggagttcacagaacctttaggcaaaggtacttaatatctaatcctttctggactattcatattttctcactgnaaaggaacataa

SEQ ID NO: 5616 - DNA, 551 bp, Homo sapiens
  misc_feature (442)..(442): "n" may be a, t, c, g, other or unknown
  misc_feature (511)..(511): "n" may be a, t, c, g, other or unknown
  misc_feature (519)..(519): "n" may be a, t, c, g, other or unknown
  misc_feature (522)..(522): "n" may be a, t, c, g, other or unknown
  misc_feature (534)..(534): "n" may be a, t, c, g, other or unknown
  misc_feature (542)..(542): "n" may be a, t, c, g, other or unknown
  misc_feature (545)..(545): "n" may be a, t, c, g, other or unknown
  misc_feature (550)..(550): "n" may be a, t, c, g, other or unknown
aaatcttattttataaagttccagggtacatgtgcaggatgtgcaggttacataggtaaatgtgtgccatggtggtttgctgcacctatcaacctgtcacctaggtattaagcccagcatgcaatagctatttttcctaatgctctcccgcgacctccgccctcctctgaaaggccccagtgtgtgttgttcccctctctgtgtccatgtgttctcattattcggctcccacttataagtgagaacatgtggtgttggttttctgttcctgcattagtttgctgaggataatggcttctggcttcatccatgttcctgcaaaggacatgatctcattcctttttatggctgcatagtagtctgtggtgtatacgtaccacattttctttacccagtctatcattgatgggcatttgggttgattccatgtctttgctattgntaataagtgctgcaatgaacataagtgtgcatgaacctttataacagaatgatttatattcctttgggnatataccnagnaatgggaatgcngggccaanggnatttnc

SEQ ID NO: 5617 - DNA, 585 bp, Homo sapiens
  misc_feature (1)..(585): "n" may be a, t, c, g, other or unknown
nnnnnnnnnnnnnnnnnnnnnnnnnnnnnnnnnnnnnnnnnnnnnnnnnnnnnnnnnnnnnnnnnnnnnnnnnnnnnnnnnnnnnnnnnnnnnnnnnnnnnnnnnnnnnnnnnnnnnnnnnnnnnnnnnnnnnnnnnnnnnnnnnnnnnnnnnnnnnnnnnnnnnnnnnnnnnnnnnnnnnnnnnnnnnnnnnnnnnnnnnnnnnnnnnnnnnnnnnnnnnnnnnnnnnnnnnnnnnnnnnnnnnnnnnnnnnnnnnnnnnnnnnnnnnnnnnnnnnnnnnnnnnnnnnnnnnnnnnnnnnnnnnnnnnnnnnnnnnnnnnnnnnnnnnnnnnnnnnnnnnnnnnnnnnnnnnnnnnnnnnnnnnnnnnnnnnnnnnnnnnnnnnnnnnnnnnnnnnnnnnnnnnnnnnnnnnnnnnnnnnnnnnnnnnnnnnnnnnnnnnnnnnnnnnnnnnnnnnnnnnnnnnnnnnnnnnnnnnnnnnnnnnnnnnnnnnnnnnnnnnnnnnnnnnnnnnnnnnnnnnnnnnnnnnnnnnnnnnnnnnnnnnnnnnnnnnnnnnnnnnnnnnnnnnnnnnnnnnnnnnnnnn

SEQ ID NO: 5618 - DNA, 584 bp, Homo sapiens
  misc_feature (436)..(436): "n" may be a, t, c, g, other or unknown
  misc_feature (469)..(469): "n" may be a, t, c, g, other or unknown
  misc_feature (524)..(524): "n" may be a, t, c, g, other or unknown
  misc_feature (551)..(551): "n" may be a, t, c, g, other or unknown
  misc_feature (553)..(553): "n" may be a, t, c, g, other or unknown
  misc_feature (563)..(563): "n" may be a, t, c, g, other or unknown
  misc_feature (565)..(566): "n" may be a, t, c, g, other or unknown
  misc_feature (578)..(578): "n" may be a, t, c, g, other or unknown
gagacagtctctctctgttgcccaggctggagtacagtggcgctatctcggcttactgcaagcttcgcctcccaggttcacgccattctcctgcctcagcctgccgagtagctgggactacaggcgcccgccaccatgccttgctaattttttgtatttttagtagagacaggatttcaccgtgttagccaggatggtcttgatctcctgacctcgtgatccgcccgccttggcctcccaaagtgctgggattacaggcgtgagccaccgcgcctggcctgtttagagtttttataccccctatcttttcctgggctgtgtcctccttttgttcttcccctgggcgggcctttatctatcacatgtgcagtggccctgccagcacttgggagagctgcatgtgcagcgtgtttattgaagtggtgcacatgctcantaggggcaagttctcactggtccagcgctccanaggaagtcatataccagttaaatttcaccatcttgccctttactggacatgcttnaaaccctattgggggattatggcttgncnaattccaggngnnttctggctggtntaaaaa

SEQ ID NO: 5619 - DNA, 580 bp, Homo sapiens
  misc_feature (366)..(366): "n" may be a, t, c, g, other or unknown
  misc_feature (467)..(467): "n" may be a, t, c, g, other or unknown
  misc_feature (482)..(482): "n" may be a, t, c, g, other or unknown
  misc_feature (528)..(528): "n" may be a, t, c, g, other or unknown
  misc_feature (537)..(537): "n" may be a, t, c, g, other or unknown
  misc_feature (552)..(552): "n" may be a, t, c, g, other or unknown
  misc_feature (558)..(558): "n" may be a, t, c, g, other or unknown
aatcttgcctgaatagggcccaagtccacttgtctttataagaccattttagtatcagacgacataatacatgtgcaacactttatatacaaggggtctatccggtgcgcaaaagttcaaacacatgaacatccaacagtttgataatacaagttttatggtacaatacaatgtttctgaataatatacattaacaatgaaagtttcgtgcaaagagtaaaacatgttccctttttgtgccacaaaatcaattctccttgagagactgtacttgcactaactgctgtgttgggtcattgtatgattctgcaagctctgtttggaagaaaaacttctgtgggacattgtgtcagtcatagatcttgncttcttgtccatgggcagagaaaatatgctgctgcaacttgtttgcttgaacaaatactgtaaagcagactggacaccttgaagggcctcccatcccttcnaactggctctatcanggggcactggagtttggcaggagaagtcaaaggtctggctgcaaantttgcattnatgggtcaagccttnattaancatggggatttggaacatgaac

SEQ ID NO: 5620 - DNA, 559 bp, Homo sapiens
  misc_feature (500)..(500): "n" may be a, t, c, g, other or unknown
  misc_feature (518)..(518): "n" may be a, t, c, g, other or unknown
  misc_feature (535)..(535): "n" may be a, t, c, g, other or unknown
  misc_feature (546)..(546): "n" may be a, t, c, g, other or unknown
  misc_feature (555)..(555): "n" may be a, t, c, g, other or unknown
  misc_feature (557)..(558): "n" may be a, t, c, g, other or unknown
gattttggctttattgctgaatttggtaatcttaacattaggagtactatgtagctacagaagatgactagatcatcacaggttatgggaattaatcctggattcatgccattaaacttttgacaatttcagagtatcacttggatttttaaagctttatttcaatcagtatacactgatacatatcctttatttctgctttgcttagagaataaatgcctaaggtaaaagattattatcaaatgttgaatttttcccatgcccttgttgatagttattaaatcatcaataagtttatggattatagttacaaatagcaggcttttacacacctgagtatatgatgtaagcgccatgatttcataaaaataaaaattataaaatgagacaaaatgtttaatttcaaacttatccatgtaggtcttatttttctactgctgataaaactcagaaaaaaattatctttattggaagactaaatgaaagcctaaaaaattaanattgtcccaaaatttagnccttcttatcaaaaacncctttttcctntatcatcangnnc

SEQ ID NO: 5621 - DNA, 571 bp, Homo sapiens
  misc_feature (297)..(297): "n" may be a, t, c, g, other or unknown
  misc_feature (314)..(314): "n" may be a, t, c, g, other or unknown
  misc_feature (471)..(471): "n" may be a, t, c, g, other or unknown
  misc_feature (564)..(564): "n" may be a, t, c, g, other or unknown
  misc_feature (566)..(566): "n" may be a, t, c, g, other or unknown
gcccacgctggagtcgagtggcatgatctcggctcactgcaacgtccacctcctgggttcaagctattctcctgcctcagcctcctaagtaactgggattagaggtccatgccaccacgcccagctgtttttgtatttttagtagatgtggggtttcaccatgttgcccaggctggtcttgaactcctgacctcaagtgatccacctgccttggcctctcaaagggctgggattacaggcatgagccaccatgcccagccatatgtcttaacccagcatctatcatatgatcctcanaatgacagcttccttanattttgtaccctaattgccttctcttgctgcagcctagttttggctccagcaattcagtaaaagtagttctactgaggtccagtatcatacaatccagatagctccttgatggtcttgcttgggtcaaggaaactttgggctctatggtaaaatagnggaattcctttaggaatctctccatcttcatagatattatttttcacaagtgaactgtaggaaagtcccaagtttacaggtagatttctgaananaacat

SEQ ID NO: 5622 - DNA, 581 bp, Homo sapiens
  misc_feature (1)..(581): "n" may be a, t, c, g, other or unknown
nnnnnnnnnnnnnnnnnnnnnnnnnnnnnnnnnnnnnnnnnnnnnnnnnnnnnnnnnnnnnnnnnnnnnnnnnnnnnnnnnnnnnnnnnnnnnnnnnnnnnnnnnnnnnnnnnnnnnnnnnnnnnnnnnnnnnnnnnnnnnnnnnnnnnnnnnnnnnnnnnnnnnnnnnnnnnnnnnnnnnnnnnnnnnnnnnnnnnnnnnnnnnnnnnnnnnnnnnnnnnnnnnnnnnnnnnnnnnnnnnnnnnnnnnnnnnnnnnnnnnnnnnnnnnnnnnnnnnnnnnnnnnnnnnnnnnnnnnnnnnnnnnnnnnnnnnnnnnnnnnnnnnnnnnnnnnnnnnnnnnnnnnnnnnnnnnnnnnnnnnnnnnnnnnnnnnnnnnnnnnnnnnnnnnnnnnnnnnnnnnnnnnnnnnnnnnnnnnnnnnnnnnnnnnnnnnnnnnnnnnnnnnnnnnnnnnnnnnnnnnnnnnnnnnnnnnnnnnnnnnnnnnnnnnnnnnnnnnnnnnnnnnnnnnnnnnnnnnnnnnnnnnnnnnnnnnnnnnnnnnnnnnnnnnnnnnnnnnnnnnnnnnnnnnnnnnnnnnnnnn

SEQ ID NO: 5623 - DNA, 525 bp, Homo sapiens
  misc_feature (519)..(525): "n" may be a, t, c, g, other or unknown
caatttagcagttcacatagtttattcagcaatataacaggagagaacctccattgtaagagacataaggcagatacagggtgcatctctggggtacattcttcatacagactaacaaataacttcaggtttcacaacatgtagcaagtatgatttgttgcacaccaacagccattcattcctcacgttttccttgctaaaagagccctggtcaggcacggtggctatgcctgtaatcccagcactgtcggaggtcagggcaggtggatcatctgaggtcaggagttcaagaccagcctggccaacatggtgaaaccccgtctctactaaaaacacaaaaattagccagacatggtggcgggcacctgtaatccccactactcaggaggccgaggcaggagaattgcttgaacctaggaggtggaggttacagtaagccgagatcgtgccactacactccatcctgggcaagagagcgagactccgtcaaaaaaaaaaaaaaaaaaggcttgggcacannnnnnn

SEQ ID NO: 5624 - DNA, 593 bp, Homo sapiens
  misc_feature (522)..(522): "n" may be a, t, c, g, other or unknown
  misc_feature (531)..(531): "n" may be a, t, c, g, other or unknown
  misc_feature (559)..(559): "n" may be a, t, c, g, other or unknown
  misc_feature (578)..(578): "n" may be a, t, c, g, other or unknown
  misc_feature (587)..(587): "n" may be a, t, c, g, other or unknown
ctctcaacatttcatttttaatttttctaatagtacattctttaaaagaagttaacgacttcaattccaaatataaggattaaataatgcaatgaaaagctgtcattttcagtgaagctattgcctaattaccctggaaaaaagtattcttatgactgaactgatgcaaaaatcccttagaaaagcttcatttgttgcctgtaaagagtcttcttaaggtcacttttacttctagactgcccccttgtttccagtgaaagagttttgcttggtaatggcttgtggttccacagtgttttgtgtatgaaaagcgtagactaagagatactactgaagtcgctcaaattgtagattctgccatgaaaggaagtcccaacactgtaacatttccccttaatcttcagcaagacacatgaaaaaaaaaaaaactcaagtcccaactgaatctttactttggatcatcactttccagcggcattcaaaaggctgctgtgccggtcagaccacagaagctcccttganggcccctgngggcttatgaagaccctgcaggtttgancgtcggcgcccagcccggnccaggggtntggaaa

SEQ ID NO: 5625 - DNA, 591 bp, Homo sapiens
  misc_feature (419)..(419): "n" may be a, t, c, g, other or unknown
  misc_feature (459)..(459): "n" may be a, t, c, g, other or unknown
  misc_feature (506)..(506): "n" may be a, t, c, g, other or unknown
  misc_feature (518)..(518): "n" may be a, t, c, g, other or unknown
aagttttgattttttttttaaccctgaaaagtagacagtaaaacagctcctgggagaatttacaaccaactgcatgagggtctgggaagctgaggggctggagcagggttgggagagtgaacaggaggggattctcccctcagtcactgtagcctcactgtatgatcaagggaggtggggattatttagtcaaaaaggaagaaggtaggaagaacaggaggtggaaggctggggaggtggggacaaacagaaaataaaaggtcattgttgcctgtttgaatccagaaaaaaatgcctggccctatggaggggaaggaagcccctcagaggggaggcagtgggctggagggaggcagccctgggatgaccccatccccagcaccacgggatctgcggggcagaagaaggggcccaggcangcgctggttggaagaacccgcaggggccttccggagcctntgggtcacactggctactggggaccttgtgcccacccttgtgtgttncccgagtaactnccgtagtcgtaagttcccgtaatattggcgggcacttggccctggggtctgatatacctggttccactggtgg

SEQ ID NO: 5626 - DNA, 592 bp, Homo sapiens
  misc_feature (432)..(432): "n" may be a, t, c, g, other or unknown
  misc_feature (444)..(444): "n" may be a, t, c, g, other or unknown
  misc_feature (488)..(488): "n" may be a, t, c, g, other or unknown
  misc_feature (549)..(549): "n" may be a, t, c, g, other or unknown
  misc_feature (556)..(556): "n" may be a, t, c, g, other or unknown
  misc_feature (587)..(587): "n" may be a, t, c, g, other or unknown
aaagcataatacaggagtagatttattacagctactccacattttccagagtgatacaatgaccatagagttaaaaactatcactgttatcgctgtttattttacaatacttggtttagtctacaagtttaaggcaaacatactaatgcatttgcttttcttcagaaatcatacttataaagattacataaaatctgtcccaaaacgtctaagaaatattcagtaattaaaaataagtctgattaagatgctttaccaggatacatgaatgaactaaggtggtatatgcttttaaaaacaaaatttaaaaaattcaaaaaaggcaatctttatcttgtttcaacaatgcattctgaaaaggttaaatttcagaaattatttaaaggtaaataagagtggcagccataaggaatactatttataaaataaacnggagttatagangctactttaaggaagaatggactttgggacttctgagtatgacnagtgccccgatgatggatcactggtattggggaacacagtgcggattcacgggacacagantggcatnggctgggcctgccgcttgttcctggttcttnaaaaa

SEQ ID NO: 5627 - DNA, 575 bp, Homo sapiens
  misc_feature (449)..(449): "n" may be a, t, c, g, other or unknown
  misc_feature (455)..(455): "n" may be a, t, c, g, other or unknown
  misc_feature (544)..(544): "n" may be a, t, c, g, other or unknown
ggacaagagttctttattggtgctattactactgttgtgtactgtctcttgcatcaaaccaggaggtacacaataattgactgtctcatcttcaatcagtgggtttgatcagatttctacattataaaatttcccattaacctatcatctaatggttttcacatccaagaaatactgctgtctagattcactacttcattaagactttcaaacttttattttttaaaagtctatcatttcttttgcacctattagctggaaattttcctaagaattttccctcagttacttggctgcctaaaatacagttcataacaagaagggcaggataaatattatattctctcctttatcaatcttcagagtaagaatctgatgccctagcaaactctgatggtaaccaatgagtttttctggtttccaatattcttttaataggcttttaatcntttggnagatgacaccattatagcccaaacccaaaccccatacttgggaagtactggtgaactgaagcctaagttataatcccatggcccagaanggatactaccatactggaaatttctttgact

SEQ ID NO: 5628 - DNA, 561 bp, Homo sapiens
  misc_feature (429)..(429): "n" may be a, t, c, g, other or unknown
  misc_feature (466)..(466): "n" may be a, t, c, g, other or unknown
  misc_feature (477)..(477): "n" may be a, t, c, g, other or unknown
  misc_feature (504)..(504): "n" may be a, t, c, g, other or unknown
  misc_feature (544)..(544): "n" may be a, t, c, g, other or unknown
  misc_feature (551)..(551): "n" may be a, t, c, g, other or unknown
  misc_feature (555)..(555): "n" may be a, t, c, g, other or unknown
  misc_feature (561)..(561): "n" may be a, t, c, g, other or unknown
gtagttttttagtagagacggggtttcactgtgttagccaggatggtcttgatctcctgaccttgagatctgcccaccttggcctcccaaagtgctgtgattacaggcgtgagccaccatgaccggcctatgaaccacttttgactcagcctgggggactgtcttctgggcacagctggcagtgggttcacctgaccatgtttagcagcagaagcttcaaggcctgttcctaattttgtattttcttaaggaaggtcccttaaaccacagaagcctcaggccccacaaaacctgcatccgcccctggctgcaggacactccagggtctggatgcagccagggccagccacagcctcactagctgaccgcacctttaaaagtacgcgcattggcaagctttgtctgacggcacaccccccaagagacctncttggcctttgcttgggtgatgctgacccacatggangggtctctggnccaacaagtcctggggacattccctgnatgaagaccatatgtctgacatggcacttggccacctttntgggcanttgnccctan

SEQ ID NO: 5629 - DNA, 586 bp, Homo sapiens
  misc_feature (398)..(398): "n" may be a, t, c, g, other or unknown
  misc_feature (419)..(419): "n" may be a, t, c, g, other or unknown
  misc_feature (522)..(522): "n" may be a, t, c, g, other or unknown
  misc_feature (530)..(530): "n" may be a, t, c, g, other or unknown
  misc_feature (538)..(538): "n" may be a, t, c, g, other or unknown
  misc_feature (563)..(563): "n" may be a, t, c, g, other or unknown
  misc_feature (575)..(575): "n" may be a, t, c, g, other or unknown
agtttaaaaacaacaagcatcctttattctccttccagtctcagtgtccagaggctacggttaacaggttttcaaagtgcaaatcatttcattcctcaaaagccagaggggaataaaaactgtacatcatctccaatccatattcatcaggagcgccctggggcttgtcatcctgctggcacggggccaggtttcagggcctggcggaaagaggtctgtaggctttgggacttggtgtctggccccttgagatgagattagttctccaataacctgaatgcctcttggggaggcggcagcacgcaggcgtagaatccctctagacagccagatcgggcgtgggtggggtttaaaccccaggatgttgctaacagccacaatgaaagctggggggtcanaggtaagaacctgctgagcangagtggggatctgcaaaagggactaaagggggtagaataatacaaaaaggccaagccataaggaaccaaatggaaaaatatttctcctggtgtgaaagggcanaagaaaanggaacttnggggtagccatgaatgaaaacttangacaaactttcntagggacatcg

SEQ ID NO: 5630 - DNA, 572 bp, Homo sapiens
  misc_feature (510)..(510): "n" may be a, t, c, g, other or unknown
  misc_feature (513)..(513): "n" may be a, t, c, g, other or unknown
  misc_feature (515)..(515): "n" may be a, t, c, g, other or unknown
  misc_feature (521)..(521): "n" may be a, t, c, g, other or unknown
  misc_feature (549)..(549): "n" may be a, t, c, g, other or unknown
  misc_feature (571)..(571): "n" may be a, t, c, g, other or unknown
gtagagacaaagtcttcccttatccaggctggtaagctggtcaaactcctggctttaagctatcttcccagctcagcctcttaaagtgctgagatttatatctatctgtctgtctgtctatgtatctatctgtctatgtatctatctatctatctatctagtatatattaaagcaaacaaagtcaaatctcaaattcatctaactcagtttcagtggttttcactgtatcttttctaaaataaaatttaaaagaaacattttaatatattcattcaatacatgaaaatacacacttttgtggatcttggctgcttcacatatttgaaatgaggactaatgcgaagtattatcaggttacaatttttttaaggcacttcttaattttgtatattaaatttgtgactatacagcaaattttctttctataatcattgaagaatttttgctaaaggaaatatttttaggtgtctcagatctaaacagaagtgaagttgagaataaaatttcanggngnattatncatatccaaatatgctggcctacattcntatattactttctaaagggctna

SEQ ID NO: 5631 - DNA, 572 bp, Homo sapiens
  misc_feature (404)..(404): "n" may be a, t, c, g, other or unknown
  misc_feature (430)..(430): "n" may be a, t, c, g, other or unknown
  misc_feature (446)..(446): "n" may be a, t, c, g, other or unknown
  misc_feature (475)..(475): "n" may be a, t, c, g, other or unknown
  misc_feature (489)..(489): "n" may be a, t, c, g, other or unknown
  misc_feature (536)..(536): "n" may be a, t, c, g, other or unknown
  misc_feature (542)..(542): "n" may be a, t, c, g, other or unknown
  misc_feature (549)..(549): "n" may be a, t, c, g, other or unknown
gagtgtttgagtttcattcacacaaaacatggacatcatctttgaggctctgtcccagagagacagggccatccctcatgtctgttattgggttgtagataaacaaaagtataaatcaaacaaactgcaaattactctgtctcttttcctaatcaatacagcaacagtcctcagtggtactgcaccactctggaaaaaatgccttcaggttccttcccatcccccaaggcagcagcaaatccttcgtgtcgcctcctactggccaaggcagccaaagatttgaaagtctttggctcgtagatggccagatccgctaggactttcctgttgagctccacctggcacttaactaaattcccaatgagcgctggatacttcagtccatgttcctggctagcagctgnaattcgattaatccagagctgaaatnagaaaacatgaagatncttaaaaatgacttctgggatggtatggnccagcaaaagcctntaatggactaaagaatatttttctaaaagtaaattgccaaaatcagngggctntgatggngccataatttgggctaaacgaaa

SEQ ID NO: 5632 - DNA, 563 bp, Homo sapiens
  misc_feature (166)..(166): "n" may be a, t, c, g, other or unknown
  misc_feature (394)..(394): "n" may be a, t, c, g, other or unknown
  misc_feature (396)..(396): "n" may be a, t, c, g, other or unknown
  misc_feature (416)..(416): "n" may be a, t, c, g, other or unknown
  misc_feature (458)..(459): "n" may be a, t, c, g, other or unknown
  misc_feature (466)..(466): "n" may be a, t, c, g, other or unknown
  misc_feature (502)..(502): "n" may be a, t, c, g, other or unknown
  misc_feature (523)..(523): "n" may be a, t, c, g, other or unknown
  misc_feature (527)..(527): "n" may be a, t, c, g, other or unknown
  misc_feature (547)..(547): "n" may be a, t, c, g, other or unknown
gcaggatgagacacatttattctacatctggtcacagtaaatctcacccagaccacaggcaggatgccacgtggctacaggcagctggcggaaatggagatcatctgttctggtgctcatggccactctgggcagaaagcaaaggtgcctcatggcacctactcanaggcactgaggccacattcccatctccaggcaccagggatgtctctgaagggtgattccatttggagtttccaaaatccaggacttctgagagccaagccctagttccaagtcatcctgagtccaggctctgccagaatcttgagcacctggagctggtggcaaggcagcctgggggctgaaagggcctcagactggaccacagggcaacccaagggccctgggcctnanggtcgacgatcctttttggnggtttttgggtcccacctggggaaccttaatgacaggaagcnnaacaggncagatttcttcacggggaacctggttaaggcttggngccttttggcccgggcctaantttncggatgttgccaggactttngggactcttggcaaaa

SEQ ID NO: 5633 - DNA, 574 bp, Homo sapiens
  misc_feature (446)..(446): "n" may be a, t, c, g, other or unknown
  misc_feature (514)..(514): "n" may be a, t, c, g, other or unknown
  misc_feature (519)..(519): "n" may be a, t, c, g, other or unknown
  misc_feature (526)..(526): "n" may be a, t, c, g, other or unknown
  misc_feature (536)..(536): "n" may be a, t, c, g, other or unknown
  misc_feature (556)..(556): "n" may be a, t, c, g, other or unknown
  misc_feature (572)..(572): "n" may be a, t, c, g, other or unknown
  misc_feature (574)..(574): "n" may be a, t, c, g, other or unknown
aacaaactgaaggtttctagcatccctgcatggagcaaatccattggtgacattttttcaatggtttgtgcacacttcatgtctctgtcatattttggtaatgcttagcaatatttcaaactttatggctgggtgcagtggctcacgcctgtaatcccagcactttgggaggctgaggtgggtggatcatgaggtcaggagatcaagaccatcctggctaacacggtgaaaccccgtctctactaaaaatataaaaaattagccaggcgtcgtggtgggcgcctgtagttccagctactcgtgaggctgaggcaggagaatggcgtgagcccaggaggcagagcttgcagtgagctgagatagtgccactgcactccagcctgggcgacagagcaagactccgtctcaaaaaaaaaatgtatttcaaactttattattttatctgnaatagtgatttggaatcagtaatctttgatggtatcctagtaattggtcctggggcctaaaagccccnccatntaagaangcaaaggaantggtaaaagtgggggggtcngactggtccggcattncn

SEQ ID NO: 5634 - DNA, 582 bp, Homo sapiens
  misc_feature (511)..(511): "n" may be a, t, c, g, other or unknown
  misc_feature (533)..(533): "n" may be a, t, c, g, other or unknown
  misc_feature (580)..(580): "n" may be a, t, c, g, other or unknown
gcatgttcccgtatgctttattggaatgctgtcaggtccgcgccttccacctgagaacagctcaggtgtgggtgtggctattgtggaggccgtgtctggtgaacctggtgaacttggtggtgagcatggtggcagggaggagagcacctcacgtacaaactgcacgagcttcgggcgcatgcatggctggccaagactgagggtcacacagggcagacaagggagacgagtcacacgtggcagcacatcatccagtcctcggggaggtgagggttggcatgtggcgggcaccggtgtgcagggcagccccatcctggggctggagcttccctagacccaggcaccacgcacaggcatcccctgctcagctcctgaacccggcccctcctgcctggccacgtccgctatcgcaccctcctgcatcagggccgagggcccaccctgcgctcctttttcttccagggtgttccaggatggtcaagttccagcacttgagaacaagttaagtgtnggtgtggctattgtggaagccntgtctggtgaacctggtgaacttggtggtgggaaccgtgcttatccngg

SEQ ID NO: 5635 - DNA, 583 bp, Homo sapiens
  misc_feature (486)..(486): "n" may be a, t, c, g, other or unknown
  misc_feature (551)..(551): "n" may be a, t, c, g, other or unknown
  misc_feature (571)..(571): "n" may be a, t, c, g, other or unknown
  misc_feature (583)..(583): "n" may be a, t, c, g, other or unknown
gttagccaatggttttattagtgtttactattattctttgtaaaaggtatgacgtattttctatatgtatcaaatattaaactcctaaaacaaggtgggttagggcaaacatggagtatggccatataattgagaatcatactatagtttttatacagcagtcaagtcactaaaaatggtttatcaggttaggtttaccaggaatcctagatgacacaactgggcatgagaatacgatgaaccaccgtcctctccctgatggcagaggtcattactggcctttcacattcaagccatctcccagctgtgactctgggcttgctgcactgtagtgtaggtagtgctttaaggagatgggagtagttagttaatggttctttactgaattggttctaagataagtgggctaaaattagaagaaaaatctagaaaaaattaggagacatgtttgtggcagagatcattaacttgagggatccctatggncttaacatcagcttttattctcatgccataagttagaaacctattctggaaccttaagcctttantatggagaattttttttgcnttgaaaccaagn

SEQ ID NO: 5636 - DNA, 563 bp, Homo sapiens
  misc_feature (172)..(172): "n" may be a, t, c, g, other or unknown
gagacagcatctcgctctgtcacccaggctggagtgcagtggcgcccaccttggggtctcccaaagtcctgggattacaggcatgagccactgcacctggcctaagattttttttttcttcaaaactggtaatctaaactattatgtgactgaaaattgatttctaggtctntgcacagtccattaactttatacttttagtttccaaatctatatatgccacaaaccccaaacataagcatccacatatttgttctgcatttcctctgtccatactggattagcagaagcattaagtgttagtgtggcaagatggaaggaccctgataacatgcctctgtaaccatatgtaagagttccattttaaaattacagacaacacagaaatacttccgtatgaccctctctgaaatgtgaacttttcaggcatgtgaacaataaaaacaaaatgcagaaaatatttcatgaagctgcactgagcaatgcccttaagactggctttcttgggttccctgtccaatctttagcatcacttttggcagacattaagctaccagttaata

SEQ ID NO: 5637 - DNA, 575 bp, Homo sapiens
  misc_feature (358)..(358): "n" may be a, t, c, g, other or unknown
  misc_feature (496)..(496): "n" may be a, t, c, g, other or unknown
  misc_feature (510)..(510): "n" may be a, t, c, g, other or unknown
  misc_feature (517)..(517): "n" may be a, t, c, g, other or unknown
  misc_feature (528)..(528): "n" may be a, t, c, g, other or unknown
  misc_feature (536)..(536): "n" may be a, t, c, g, other or unknown
  misc_feature (550)..(550): "n" may be a, t, c, g, other or unknown
  misc_feature (562)..(562): "n" may be a, t, c, g, other or unknown
gagacagggtcttgttctgtcacccaggctggagtgcagtggtgattatagatcactgcaaccttgaactcctaggctcaagcgatcctcttgcctcagctttccaagtagttggaactctaggcacacatcaccatttctggctaattttttatttttcatggagacaaggtcttgctatgttgctcaggctggttttgaacttctggcctcaagtgatcctcccacctaggcctccaaaagtgctgggattacaagagtaaaccactgagcctggccctgaaatgcttttttttttttttttttaatgaaaatacaaggcatggagatgtggaaagacaccttgctttattactgntattattagttctatagtataattcatatatcacaaaaatcaccatttttaagcatatatttcagtgtcttttaccatattccaaaagttctgcaaccatcaccactacctaattccagaatattttcataaatgccnaaaagcatgcctgnacctatnggcaggcactnttcaattncccctttttacagncttttgcaaccnctaatttactttt

SEQ ID NO: 5638 - DNA, 585 bp, Homo sapiens
  misc_feature (50)..(50): "n" may be a, t, c, g, other or unknown
  misc_feature (470)..(470): "n" may be a, t, c, g, other or unknown
  misc_feature (474)..(474): "n" may be a, t, c, g, other or unknown
  misc_feature (505)..(505): "n" may be a, t, c, g, other or unknown
  misc_feature (520)..(520): "n" may be a, t, c, g, other or unknown
  misc_feature (529)..(530): "n" may be a, t, c, g, other or unknown
caaaggcaaataaaataagtttattgggatgtaaccccatcataaattgnggagcatccatacaggcaagctataaaatctggaaaatttaaatcaaattaaattctgcttttaaaaaggtgccttaagttaaccaagcattttgataacacattcaaatttaatatataaaaatagatgtatcctggaagatataatgaagaacatgccatgtgtataaattcagaatacgctttttacacaaagaactacaaaaagttacaaagacagccttcaggaaccacacttaggaaaagtgagccgagcagccttcacgcaaagcctccttcaaagaagtctcacaaagactccagaaccagccgagtctgtgaaaaaggaattccaggttttcatcaggttgaaattagttacaaatgaaggagattaactcgggtggtgctgaaaaatctcagccctcagcattcctgggnaaanccgccttccaagagttccggctttaaggganccttggtggcagtanccggcccgnnttattcagcccaacccaaagtgggaaagaaaccactggttaacccgtccttgggg

SEQ ID NO: 5639 - DNA, 561 bp, Homo sapiens
  misc_feature (505)..(505): "n" may be a, t, c, g, other or unknown
  misc_feature (515)..(515): "n" may be a, t, c, g, other or unknown
  misc_feature (542)..(542): "n" may be a, t, c, g, other or unknown
  misc_feature (546)..(546): "n" may be a, t, c, g, other or unknown
  misc_feature (550)..(550): "n" may be a, t, c, g, other or unknown
  misc_feature (553)..(553): "n" may be a, t, c, g, other or unknown
  misc_feature (555)..(555): "n" may be a, t, c, g, other or unknown
cttttcttttctttctttcctctttcctttcctttcctttttttgagatggagtcttggtctgtggcccaggctggagtgcagtggtgccatctcggctcactgcaagctccgcctcctgggttcaagtgattctcctgcctcagcctcctgagtagctgggattacaggtgcgtgccaccagggccggctaattttttgtatttttagtagagaaggggtttcaccgtgttagccaggatggtcttgatctcctgacctcgtgatccgcccaccttggcctcccaaagtgctgggattacaggcgtgagccgctgcacccggccgatgggggacattttcacctgaatattggacagctatgtttggggcagtggtgaagacaaatgcacaccaacaaatgggctctttccaaaaagcatcttaaaaagtgctttaagggtgcatcctgataggtggcataagggagcatgccttttggtgccagaaaaaatttgacagtaagnctgggctttnggtccaacttcaagcacccttcccaancctngggnctngncctacc

SEQ ID NO: 5640 - DNA, 577 bp, Homo sapiens
  misc_feature (524)..(524): "n" may be a, t, c, g, other or unknown
caagagaggcttcttggtagtttcatcacacagtggttttattaggggatgtaaggattacagaaacatcgtattttttaacatatagtattttttgaatatgatttgaattaatatagaaaagtgcattttttccagttttttagggaaaaggagatacttcaccaggaggataaaaaggaacaagaggggaaggggaaataaaaattccagaaagatgaaaaattgttgatgtaagatggaggcacatttttgccaaaattctctagaagacagaattattatggcttcccagtaactgactccgcttgccggcagcgggaggatctggccgggttctgtcttctcctgcaatgacacactgtcctgcactgaaaacttgagccacagcccatgtgcctgggcagtattggtaagtgcagatattcagcaaggaaagaaaagaaaactcctaaaagaaacagcagttgccttaaaccagcggagattaatagaacctatagaattggggtggggagacagcntcaggaaggtaccctgggccttacatttctaatatgataaaggcttgctcagc

SEQ ID NO: 5641 - DNA, 589 bp, Homo sapiens
  misc_feature (435)..(435): "n" may be a, t, c, g, other or unknown
  misc_feature (444)..(444): "n" may be a, t, c, g, other or unknown
  misc_feature (494)..(494): "n" may be a, t, c, g, other or unknown
  misc_feature (561)..(561): "n" may be a, t, c, g, other or unknown
aaaaatcagatggggactttattgtgatggtggcaggtccaccagcagatgcaaatgtggggtgctgagagtggcaacacaggccaccccaaaccaacttcactccctcccctgtcctcagccagtacagaagccaaatgtagccccagccctagactccagcccaggcagagtccaagggaggggtgtcagggtcagaagtcacagggagcccagtgactatcaaggtggctgagagcaaggctagggtagggatggggcagagaaagggcagggggtgcagccccaggtggcccaaagcaacacagaggagcaagggctggcattcaagtcagcaggtccctggggagaacagatggtgcctggagtcccacatggtggtacaggtgggggagcttcttggtggcaggcagcaccccaggaggaatgggactncttgccgangctgacccaacttcaaggctgccaagttctgatgggaatgtcctcttcangacatttccagccccggacgaacaaaagccttgaggaattgggattcttgccttgagctgacccaantttggggcttgcagttctgatggaatgg

SEQ ID NO: 5642 - DNA, 580 bp, Homo sapiens
  misc_feature (514)..(514): "n" may be a, t, c, g, other or unknown
  misc_feature (526)..(526): "n" may be a, t, c, g, other or unknown
  misc_feature (533)..(533): "n" may be a, t, c, g, other or unknown
  misc_feature (545)..(545): "n" may be a, t, c, g, other or unknown
  misc_feature (556)..(556): "n" may be a, t, c, g, other or unknown
aattctgatgttcatatttaatatcatttaacatttatacatattagtcactggagctttacttggagtacatccacacgaaaaaccaattatttattaaattttcctttcttagcaatagcctctaaatttgcaggcccaccccaaactgttcctaaaagatctctttcgttctgtaatgcttcctccaaatatagctctctgcctgaacaaacagattttttcaaagctctaattacttccggtggcccttggatgaattgctttagccattcttgtgcctcttctagagatttagtttcatctgaagactgcaagacctcttcaaccattcctatgtttagagcatttttgaatccagtttaagggccccactcaacactttgagagcttgtctacttccgattatttcaactagcccgggtgggccaccccagcttggtattatgcccatctctttgtggacgaatctgatcttactctctgggagcattaacctggaatcacatgctgnagtaaaatctgntcttcanccaatggccaancttgaaccagngcacacttattaaaggaagctgtt

SEQ ID NO: 5643 - DNA, 576 bp, Homo sapiens
  misc_feature (465)..(465): "n" may be a, t, c, g, other or unknown
  misc_feature (510)..(510): "n" may be a, t, c, g, other or unknown
  misc_feature (522)..(522): "n" may be a, t, c, g, other or unknown
  misc_feature (559)..(559): "n" may be a, t, c, g, other or unknown
gagacggagtctcgctcttgtcacccaggttggagtgcagtggcacaatctcggctcactgcaacctccacctcctgtgtttaaacgattctcctgcttcagcctcctgagtagctggaattacaggccctgccaccacccccccgctaatttttgtctattttttttttttagtagagacggggtttcaccatgttggctagtctggtcttgaactcctgactgacctcagacgaaccacccgcctcagactcccaaagtgtcaggattacaggcgttagccaccatacctggcctgctcccagtttttacaagatgttaattcccaataatctgagagcaatgtgttaatatgaatattaattcttctaaatgaatattcatccttatttcctacttgtataggtggatgaataaagatccaatagtataatagaaagactattagtaagaatgccagaaggncagtctcatgcacctggtgaaataaaccaaccaaccaacctgaantctaaagcttgngtggcaagtaccactgtggggaagtgtagaattaacnctcttttcctaagggtc

SEQ ID NO: 5644 - DNA, 595 bp, Homo sapiens
  misc_feature (517)..(517): "n" may be a, t, c, g, other or unknown
  misc_feature (530)..(530): "n" may be a, t, c, g, other or unknown
  misc_feature (547)..(547): "n" may be a, t, c, g, other or unknown
atatataaaatctttattacaggcagtattggtccatacactaacacaataccaacagtacaggtttaatctttcaaaatcatcatttaaacagcaaaagaccaagaaataaaatttgagtcaattatttttcaaaatattctcaatgcacattatccttaattcccttattatagtgaaacatacaaatacagaaaaataccccatttaacaaatactagtgttaaatggttatttggcttaaaatctgagttaagaaaatcctttttagcaacctacatacagataagtagcaaactttattatattaaacaaattcattctgctaaaacatgtaaagaatttcatccatcatgtattctgatcccagtacaagtgtttattctcttaccgtcacgattcttatatgaaggaccaactcaaagagttgtcctagatataacctcatcctcttccccaacacacttcattccaaagtctggtcaacagatggcaacccgggtagcagtcactttancatctggatgccngtgggttccgtgaaaancgtgggcaaggcctgtggaacaagcccattttcctacctactgggggg

SEQ ID NO: 5645 - DNA, 582 bp, Homo sapiens
  misc_feature (503)..(503): "n" may be a, t, c, g, other or unknown
attttttaaattatactttaagttttagggtacatgtacacaatgtgcaggtttgttacatatgtatacatgtgccatgctggtgtgccgcacccattaactcgtcatttacattaggttatacgaccattctttttcactctgaattgttttcaaatttttcacgtatgtacacctcgtaccccccaaaaccatatcggccttaatagtatgaaatgcatcctatttcctttgtatttcactaagcaaattatttttaaaatactttatttcatttgatcaggacgatctgtgtaaggagacacatttcacaattcccctaacctccatcaggaaaccagccaaagtctggctcacccaaaagcaagcccgatgttgaccaaagctgccacaggctagcagccccacacagttgagaatgaaggtctgcctttccatttctcacagtgacaaacaccatgggcttgcattacacatacttcaggctgatgactgggaatacncatatattaggttcatcaatcgctcacttggttcaaggggggttacccaacagggggcttggagccatcctttacttaa

SEQ ID NO: 5646 - DNA, 579 bp, Homo sapiens
  misc_feature (447)..(447): "n" may be a, t, c, g, other or unknown
  misc_feature (463)..(463): "n" may be a, t, c, g, other or unknown
  misc_feature (489)..(489): "n" may be a, t, c, g, other or unknown
  misc_feature (570)..(570): "n" may be a, t, c, g, other or unknown
gagacaagggctggctctattgcccaggctggagtgcagtggtgccatctcggcttactgcaacctccacctcctgggctcaagcgatcctcctgcctcagcctgagtagctgggactacaggcgcacaccaccatgcctggctaatttttgtattttttgtagagacgggatgtcatcatgttgcccaggctgtctcaaacttgtgagctcaagtgatttgcccttcttggcctcccaaagtgctgggattacagacaggcatcagccaccgtgcctggcccaaaattatggactttaaggaaactgttgggagatatttttctgtggtttcatgataatctggctatactctggtagaatacccacgaattttcacatcaaggcagtaataatacagtttttagaagtgtaaacatcaacaccggactctcaggttaatgtctangtaaaggaccccgcanggtgccttcattccttattacactgngggcatctctttttcttccttactcataatggaatatgagaattaaacccctattggggtttcttctaaaaagaaaggtangggtgggcc

SEQ ID NO: 5647 - DNA, 588 bp, Homo sapiens
  misc_feature (488)..(488): "n" may be a, t, c, g, other or unknown
  misc_feature (502)..(502): "n" may be a, t, c, g, other or unknown
  misc_feature (576)..(576): "n" may be a, t, c, g, other or unknown
agaattcactgtaacacttcattaattaaatgtattgaaggggaggattcccaaggtctgggcaaagttaccggaatccagattccttcttgagctcgaaccaacattacacttttcctggaatcaaaatgggagttaatacaagtgtataaatgacaattaatgcattggacagtttgattgttcatccaaattttgatatatctcactaacagcatgcaaggaggcttaacagaactctgtatggaaacaggttggaggtaggtaaagcagaatgtctggatctacgttgatactgagagagggagatggtagtggggacaacagacagaatagtttctgcttcccatacttgcagtccagacatggcaatagccaatttccaaagttctgggtgttctgggtcagaatggggagtatcatatgaggcctcggaaagggggtaatgcctttatcttccattttaaggaaaagaatgacttaacctncgatgccaaagtantatgatgaattctcggtctcctgataagaaataaaataagtgctgggatacaggcatgagccaccacacccagnccaaatgggtgg

SEQ ID NO: 5648 - DNA, 517 bp, Homo sapiens
  misc_feature (10)..(10): "n" may be a, t, c, g, other or unknown
  misc_feature (63)..(63): "n" may be a, t, c, g, other or unknown
  misc_feature (76)..(76): "n" may be a, t, c, g, other or unknown
  misc_feature (94)..(94): "n" may be a, t, c, g, other or unknown
  misc_feature (109)..(109): "n" may be a, t, c, g, other or unknown
  misc_feature (454)..(454): "n" may be a, t, c, g, other or unknown
  misc_feature (469)..(469): "n" may be a, t, c, g, other or unknown
  misc_feature (485)..(485): "n" may be a, t, c, g, other or unknown
  misc_feature (505)..(505): "n" may be a, t, c, g, other or unknown
  misc_feature (509)..(509): "n" may be a, t, c, g, other or unknown
  misc_feature (511)..(511): "n" may be a, t, c, g, other or unknown
  misc_feature (513)..(513): "n" may be a, t, c, g, other or unknown
agacaaaggnctcactttatcacccagctggagtgcaatggtgcaatcatgacttgctacagnctcgacccccaanggctcaagtgggatcctnccatcttcaagcctncccagtagctggggaccataggcgtgccccaccacacctggctaatttttgtattttttgtagagacagggtttcaccatgttgcccagaccggtcttgaactcctagactcaagcaatcctcctggctcagcctcccaaagtgctgggattagaggtgtgagccacgtgtctggcctgaaatacttagataccagttgataaacagttgtgccttacactacctctccacctccaaatgccaacccctttttgttccagcctctcttccttatgttccaaggatctaagagttaaagtgttaatactctgcatacaaaaggtagtcttgaggaccatgcttcanaactatggctgttgncaccctgcttgctggncccatgccaccatgattggnattnantncttg

SEQ ID NO: 5649 - DNA, 576 bp, Homo sapiens
  misc_feature (474)..(474): "n" may be a, t, c, g, other or unknown
  misc_feature (491)..(491): "n" may be a, t, c, g, other or unknown
  misc_feature (525)..(525): "n" may be a, t, c, g, other or unknown
  misc_feature (545)..(545): "n" may be a, t, c, g, other or unknown
  misc_feature (547)..(547): "n" may be a, t, c, g, other or unknown
  misc_feature (567)..(567): "n" may be a, t, c, g, other or unknown
  misc_feature (570)..(570): "n" may be a, t, c, g, other or unknown
  misc_feature (576)..(576): "n" may be a, t, c, g, other or unknown
ggtcttttatgcaaatatcctgtatagtcacaatttctttgatcatgttgtagatactaatttatttgaggatgacataatactttgcttaattttactgtttttatcaaatatttatttttagaaaattactacttggtcatgataaaaattttaagtaatgcaaaagagaacaaggtaaaaacaaaagccaccatgcttttggccccttccaatcctcagcagtgtccactggtaacatttcttgaatatgcagagattgtctttttcaaagagatgctattaataaattaaggcctctggggttgaaagagtaaaggagacttctgacccttctttagtgcactccgtggaggtcactatcagatctcatctggcctgactggctatcagcaacactaggaataagtgttaggaaaaaaacacctggctccaatgtcaatgaagtttcaattagaaaaataggaacaggangtatgaaataggatggncctggacttaccaaataagccctggatgaagtcnaaatctaagaccccttattngncaaggagggccggtttccanccngggaan

SEQ ID NO: 5650 - DNA, 573 bp, Homo sapiens
  misc_feature (483)..(483): "n" may be a, t, c, g, other or unknown
  misc_feature (492)..(492): "n" may be a, t, c, g, other or unknown
  misc_feature (526)..(526): "n" may be a, t, c, g, other or unknown
  misc_feature (532)..(532): "n" may be a, t, c, g, other or unknown
  misc_feature (539)..(540): "n" may be a, t, c, g, other or unknown
  misc_feature (570)..(570): "n" may be a, t, c, g, other or unknown
atgagacggagtctcgttccgtggcccaggctggagtgcagtggcacgatctcagctcactgcaagctccgcctcccgggttcccgccattctcctgcctcagcctctcgagtagctgggactataggtgcccaccaccatgcctggctaattttttgttgtatttttagtagagacggggtttcactgtgttagccaggatggtcttgatctcctgaccttgtgatccgccacctcggcctcccaaagtgctgggattacaggcgtaagccaccacgcccggccatatctatctcttaaagctacacagaacttcccaaaatttcaaagcagatgatccttccaaataattgtattgaatggacccaaatatccttgttatatcttttaaaatgcactgggcttgccaggaaatccatttatagggtagttttaacaacctgtcttccaagggacaacgtcagttagaaaatgggaagggcnttagacttnttgaaccccctttaaaccggaccttggaactttngggatnccaaggnnccccttaagggccccaacccaggtttttcnttt

SEQ ID NO: 5651 - DNA, 575 bp, Homo sapiens
  misc_feature (56)..(57): "n" may be a, t, c, g, other or unknown
  misc_feature (508)..(508): "n" may be a, t, c, g, other or unknown
  misc_feature (535)..(535): "n" may be a, t, c, g, other or unknown
  misc_feature (538)..(538): "n" may be a, t, c, g, other or unknown
  misc_feature (575)..(575): "n" may be a, t, c, g, other or unknown
gagacgaagtctcgctctgtcgccaggctggagtgcagtggcgtgatcttggctcnntgcagcctccaactccctggttcaagcaattctcctgcctcagcctcccgagtagctgggattacaggcacacgccaccacgcccagctaatttttgtatctttagcagagacggggtttcacaatgttggtcaggatggtctcgatctcctgaccccgtgatctgcccgcctcggcctctcaagtgctgggattacaggcgtgagccacagcgcccggccgaccaatgttctttacatccaccttctgttctagatgctgttcaattagtctgcttttatagttgtctgagagcagagagaaaaagccccacaactaagtgctgagagtcaccaagtaagggggacgtggccacaaggcaggaaacaagaagtccaaaattcaaatcacacaccaacgcgggtctttctgcattcaaggcaataaaaaaaaatttttttttggtaacttnctatattgctggaaccaactgatggancanggcaccttgtgggaccaaacgtttttatgaaccaatn

SEQ ID NO: 5652 - DNA, 570 bp, Homo sapiens
  misc_feature (477)..(477): "n" may be a, t, c, g, other or unknown
  misc_feature (525)..(525): "n" may be a, t, c, g, other or unknown
  misc_feature (546)..(546): "n" may be a, t, c, g, other or unknown
  misc_feature (552)..(552): "n" may be a, t, c, g, other or unknown
  misc_feature (556)..(556): "n" may be a, t, c, g, other or unknown
  misc_feature (566)..(566): "n" may be a, t, c, g, other or unknown
  misc_feature (570)..(570): "n" may be a, t, c, g, other or unknown
gaaatttcaaatgtcctttattaaacctgattgctgactaattagagcctaggcaagtaggaagaaattgcacaactgatatttaactacaggttttttctctggacatattgacatattaaagtatttctcttcttgaaaatattttaaaatacaattgcagtaaaaacaattgcatgtagacattattctccatctgttttttttgtaggagactgtggaagacaggagggagttgggcgtgcacacagaatttaccctaacagctttgttagggaggtggtcccaaatactttatattgggactccgtactcaggtgactttctggttaaaaatattgaagacggatgacaactgggctctttttactttgacaactgagacaaaatgacaaattgtcagtgttcagagatccagaccaacttctcaaaaaaatatgtttacccctgatatcatcattattttagcccaactgngccttttgggggggatcacaactcattactggctttttggtttaaggnttagaatttataggggccttnaaccangggnttagggaaanactn

SEQ ID NO: 5653 - DNA, 569 bp, Homo sapiens
  misc_feature (129)..(129): "n" may be a, t, c, g, other or unknown
  misc_feature (439)..(439): "n" may be a, t, c, g, other or unknown
  misc_feature (467)..(467): "n" may be a, t, c, g, other or unknown
  misc_feature (500)..(500): "n" may be a, t, c, g, other or unknown
  misc_feature (519)..(519): "n" may be a, t, c, g, other or unknown
  misc_feature (544)..(544): "n" may be a, t, c, g, other or unknown
  misc_feature (564)..(564): "n" may be a, t, c, g, other or unknown
caaagctcctcattccacttctttatttcagtttatgtgaatattagagctacgcgacaggtgagatcagaataaggcccgttaacaatgaaactgaagcagaggacttagtcctgatttctgtctctngctttctcttttctctttttttaatatgcaaacaaaaaaatgcaaaaatgaaaatgacaacacaacatcagaaagacatttttttaacttcattcgctacaacagtcacgaactggttgaactctacctgccatccaactttaagaaacgaagacccggcactgtgaaaaagaaacaaaacccaaacaaaacaatgatacaaagcaactgcgaattaatgtaaaaatggagtgcaaatgcgactacagaatgcaaaaaaaaacatcagcgttgcagattccagcaacacttatcaaaataatttctgaantgtttcatatgaaacatagacaaagcantaaaaagaggatatatgttaatcatcttaagcntaccaatgtgagttaagancttaaaaattaaaaaaaaaaaagtncttggaatgaataagggctnccttt

SEQ ID NO: 5654 - DNA, 565 bp, Homo sapiens
  misc_feature (46)..(46): "n" may be a, t, c, g, other or unknown
  misc_feature (56)..(56): "n" may be a, t, c, g, other or unknown
  misc_feature (496)..(496): "n" may be a, t, c, g, other or unknown
  misc_feature (504)..(504): "n" may be a, t, c, g, other or unknown
  misc_feature (545)..(545): "n" may be a, t, c, g, other or unknown
  misc_feature (555)..(556): "n" may be a, t, c, g, other or unknown
atctttgtcttcatcttgctttttcatagatgccagtttttcttgngtcaatctgnctttgttttatttcttctttcttcagttctaggaaagcagaagggattcccgcgatgttttcttgtgcacttagcagcaggggccacagttctcccataaattctcgagcattttttccattcaaaaatccagtcaggttgatttgcatcattttggagtctggattctgcaaaaagacacgacaggaagaaaaacaggttacttcaaaaccaaccaaccaacaaatcaaccaacctaaaactcatttaaattagtattttttaagtctaccataggggcttagacatatatatagtccttactattttacaaatagtcttccctagtagcttctcagcaatataatctctaacagattaccaaattctctctcactctaccaaaagcatcagagcagcctgttaatcctttggggattcgtaagtattttagactctgngctggtantgggccttacattattaactttaaaacctctggaacatccncaaatctagnnttactacag

SEQ ID NO: 5655 - DNA, 580 bp, Homo sapiens
  misc_feature (488)..(488): "n" may be a, t, c, g, other or unknown
  misc_feature (528)..(528): "n" may be a, t, c, g, other or unknown
  misc_feature (571)..(571): "n" may be a, t, c, g, other or unknown
aaagagacagagtcttgctctgtcacccaggctggagtgcaatggcgcgatcttggctcactgcaacctctgcctcccgggttcaagcaattatcctgcctcagcttcctgagtagctgggttacaggcgcctgacaccacgcctggttaatttttgtatttttagtagagatgggatttcaccatcttagccaggctggtcttgaactcctgacctcgtgatccccctaccttggcctcccaaagtgctgggattacaggcgtgagccaccgtgcccagcccagcttaaattctttgaactcacctcccctactgagagagatggctaccttggatttctttctctgaagttgaagttgaataacctatcgttttacctgcttaggacagctgcttgcccaaactttactagcacacatgattgtatggagcttcatgcttccagtgtagaccaagttctcaggccagaaccaggccatcctcttgngatcaagtcttggcaacaagacattctggtcttactgganggaatgctctggggtttcactggttgggcttaaaagggccttnacaaaatct

SEQ ID NO: 5656 - DNA, 571 bp, Homo sapiens
  misc_feature (495)..(495): "n" may be a, t, c, g, other or unknown
  misc_feature (501)..(501): "n" may be a, t, c, g, other or unknown
  misc_feature (533)..(533): "n" may be a, t, c, g, other or unknown
  misc_feature (552)..(552): "n" may be a, t, c, g, other or unknown
  misc_feature (561)..(561): "n" may be a, t, c, g, other or unknown
  misc_feature (566)..(566): "n" may be a, t, c, g, other or unknown
  misc_feature (568)..(568): "n" may be a, t, c, g, other or unknown
aaaaaaggggtcctatgtgggaaatgagtgggacaatgataaaaataaacaaataattaaaattccaaatcaaaacataactcctggccctgagatccccagttaatcctctaagaccacaatctccacattgtgaacttgatgctggtgttcttccatctcagccacaactttctcctcaatcctcagctctgtctccaagatgactgctttgccctcagtatcttcagcttctgggtccggggctggatcaatctcaatgatggtctgcccatcctctgaggtgctttcaacagcctgaattgccgaggttaggccggactccatggccaccaattccacagggctaaccatggtggtcatgttgcccagtgtactcccatcctgcatggcagtagagctcagcagcgccaagctagatgaagggtggatggtcattgtgtctggtgagctgctcttggcagaagagaccactgtggcataacggaaaaactnaagggncaaaaagcatgtgtggacaggccaggatggancctggttaaggtggccctnggaatttgnccctngnaaa

SEQ ID NO: 5657 - DNA, 572 bp, Homo sapiens
  misc_feature (20)..(20): "n" may be a, t, c, g, other or unknown
  misc_feature (456)..(456): "n" may be a, t, c, g, other or unknown
  misc_feature (478)..(478): "n" may be a, t, c, g, other or unknown
  misc_feature (503)..(503): "n" may be a, t, c, g, other or unknown
  misc_feature (547)..(547): "n" may be a, t, c, g, other or unknown
  misc_feature (571)..(571): "n" may be a, t, c, g, other or unknown
aaggcagggtcttactctgnctcccagcccggagtgcagtagtgcaatcttagctcattgcagttttgacctcccaggctcaaataatcctcccgcctcagcctcctaagtagctgagactacagctgtgcgccacgacatctagctaattatttgttttttgtagagatgaggtctcactgtgttgctcaggctgggtaggtgtctaactcctaggctcaagtgatcctcccacctcagcctcccaaagtgctgggattacaggtgtgagtcaccgtgcctggctttgtttaaggcattctttttccgcagcatctgttaccagcagcctgaagccatttctataacaatatcaggaagacacatggacagagaccctaatgtatgaaaaatgcatcaattatttgagattaatgagtcctcataaacagagactgagaggctctaactttcctncgttatgtgaagagtaagaacnagacacttctcctgtcctttggaanggtgttatgcatctaagggattaaattgcaacaatggctttaanacggaggggggaaaacattgggcnt

SEQ ID NO: 5658 - DNA, 577 bp, Homo sapiens
  misc_feature (527)..(527): "n" may be a, t, c, g, other or unknown
  misc_feature (563)..(563): "n" may be a, t, c, g, other or unknown
  misc_feature (574)..(574): "n" may be a, t, c, g, other or unknown
  misc_feature (576)..(576): "n" may be a, t, c, g, other or unknown
gtggcattcattcctctgaataactgtttctttaaaacaaacaaacttgcattttagcttcaagggtacatgtgcaggtttgttatatagataaactcatgtcacgggggtttgctgtacagattatttatttcatcacacaggtactaaggctagtgaccaatagttattttttccgatcctctccctccttccaacctccacccaactctgtttctgaaagaaggaaagaaagaaagaaagaaagaaagaaagaaagaaagaaagaaagaaagaaagaaagaaagaaagaaagggcccagagaggacaaagtatttgtctaaggccatactgttattaagaggtagaaccaagacctacactaactctgcaaatccaatttctgtccacagtgcccttgagatcagaatgatactcactccatttctctaaaagctacaaatgaaactcttcttatgagtaaaaagtactaacccaaattggattattactatagtggtctcgcaaaatttagagggatgttcanagggcaaagattgagaaccctggcttaatcttgtangggtgaatgtncnt

SEQ ID NO: 5659 - DNA, 530 bp, Homo sapiens
  misc_feature (482)..(482): "n" may be a, t, c, g, other or unknown
  misc_feature (503)..(504): "n" may be a, t, c, g, other or unknown
  misc_feature (511)..(511): "n" may be a, t, c, g, other or unknown
  misc_feature (516)..(516): "n" may be a, t, c, g, other or unknown
  misc_feature (518)..(518): "n" may be a, t, c, g, other or unknown
  misc_feature (527)..(527): "n" may be a, t, c, g, other or unknown
gtagggacagggtctcactctgttgccagggctggtcttgaactactgggctcaagcagtcttcctgcctcaacctcccaaagtgctgggattacaggcacatgccactgtacccaacccaggttcatgtttttatagttcattttgatttttcattttccatccctgatctttagagaatttctgttcatgcagctctgtcacccctttgcttgggtcagtctgactctgtcttcaccagttattatcttggaagcttgagacagtttccttatctgaacttgcaggtcgcagacctttgagtttgggttgcttggcagtaggtggcaagttacttaacttggccatgcctgatgctatggtctgaatgtttcccccaaattcatgtgttggagacttaatccccaatgcaacagtattgagaggtggggagtttggctcctttttgccctcctggcttttgccatgtgagggcaccgtgntcttctttttcagaggatgcnncatcttnggggnanttttggganaaa

SEQ ID NO: 5660 - DNA, 573 bp, Homo sapiens
  misc_feature (452)..(452): "n" may be a, t, c, g, other or unknown
  misc_feature (492)..(492): "n" may be a, t, c, g, other or unknown
  misc_feature (520)..(520): "n" may be a, t, c, g, other or unknown
  misc_feature (524)..(524): "n" may be a, t, c, g, other or unknown
  misc_feature (539)..(539): "n" may be a, t, c, g, other or unknown
  misc_feature (559)..(559): "n" may be a, t, c, g, other or unknown
aacaaaatggcccctaaacaaacaccaacaacttcacttggtcttcaaacaaagaaacagtctttttttccaacataggaggaaaagctacttgttgtggatgtacaggtttccaacatggcacccttctaaagggctttcaaggatcatcctaatagcccattttacctatgtactgaccttggaagctaacccctgagtatgatgcaactccactctaatgtaaattaaaatgccatgatcttaaaaatgccataatattgtcagtataatttaatttccagtttagttccatcttcacatttagcagtgtgtgtctgtggccgtctcctggtgccagcatttcagaatgtactatcactggctgagaaaatctcacggtgagaagagtagtgtgtcataagatctgaacaaaaaagctaccaaagtcgatcagtctcagtatgattcanggatatgattttcaattagcaaatggtgccactgaagcanaaagtggctttgttttgctacacccagngctnccaggaatttcctgnggcctcctttcatgggtttntaccctggcaggtt

SEQ ID NO: 5661 - DNA, 575 bp, Homo sapiens
  misc_feature (488)..(488): "n" may be a, t, c, g, other or unknown
  misc_feature (510)..(510): "n" may be a, t, c, g, other or unknown
  misc_feature (529)..(529): "n" may be a, t, c, g, other or unknown
  misc_feature (542)..(542): "n" may be a, t, c, g, other or unknown
  misc_feature (544)..(544): "n" may be a, t, c, g, other or unknown
  misc_feature (564)..(564): "n" may be a, t, c, g, other or unknown
aaaggcatgtcaaaaagacattttacttccccaaagcatggccccaagaagccattattataatagagtatgaatttctgctgcaggttattagcctataatactaacaataaagtcctgcttaggacataaaggcttacactgggacatgaagtagtaagacacaatccactgactattttaaatttgctgtacacctaaaccatcttctccattataccaatctctgtgtgtgtgtgtgtgtgtgtgtgtgtgtatacacacgtcctctttcagtagaacataaactctgaagatgaggtaaaatacaatacagctgctgctgctgatgagctgtctgagtttctgcagacaatctgcaaaaaaatggaagttctcaaggcccagttgctggtgtctcttttgaggccccaaaacttggttgatttatcttattggcactctgcatgaaatcaagagtaggctcaaaggcaagccttatctcctgngaacacaattcctacaggtctnaactcaatatttaaatttngttgggacctggntncaaattggaacttcttaaangattttaaaag

SEQ ID NO: 5662 - DNA, 483 bp, Homo sapiens
  misc_feature (50)..(50): "n" may be a, t, c, g, other or unknown
  misc_feature (249)..(249): "n" may be a, t, c, g, other or unknown
  misc_feature (282)..(282): "n" may be a, t, c, g, other or unknown
  misc_feature (314)..(314): "n" may be a, t, c, g, other or unknown
  misc_feature (352)..(352): "n" may be a, t, c, g, other or unknown
  misc_feature (364)..(364): "n" may be a, t, c, g, other or unknown
  misc_feature (385)..(385): "n" may be a, t, c, g, other or unknown
  misc_feature (401)..(401): "n" may be a, t, c, g, other or unknown
  misc_feature (409)..(409): "n" may be a, t, c, g, other or unknown
  misc_feature (460)..(460): "n" may be a, t, c, g, other or unknown
  misc_feature (464)..(464): "n" may be a, t, c, g, other or unknown
  misc_feature (467)..(467): "n" may be a, t, c, g, other or unknown
  misc_feature (476)..(476): "n" may be a, t, c, g, other or unknown
aaatagagacagggtctcactgtgttggccacgttggtcttgaactctgncttgtttgtttgttttgtttttgttttttgagatggggtctcactctgttacccaagctgcagtgcagtggcgtgtcctcagctgggctgcaacctctgcctcccgggttcaagcgactgtcccatccagcctcccgagtacctgggactacaggtgcaggccaccacacccggctaatttttgttatttttggaaganatggggtttcgccatattgcccaggctggtctnaaactcctgacctcaagtgatcctcccacctnggcctcccaaagtgcttagaccacaggcccaagccatnatgctggcccanagtagctttcaataaactctntttgcactgtactttncgactcgncttgaattccttcctgtatgagatccaagaactcttttgggatctgatcangaanttntttcccagnatataag

SEQ ID NO: 5663 - DNA, 586 bp, Homo sapiens
  misc_feature (490)..(490): "n" may be a, t, c, g, other or unknown
  misc_feature (495)..(495): "n" may be a, t, c, g, other or unknown
  misc_feature (509)..(509): "n" may be a, t, c, g, other or unknown
  misc_feature (518)..(518): "n" may be a, t, c, g, other or unknown
  misc_feature (533)..(533): "n" may be a, t, c, g, other or unknown
  misc_feature (585)..(585): "n" may be a, t, c, g, other or unknown
agacttttatttttattttacttgtttggacagaaaagaaaattcatcagctttcattagagtctccttaagtgttggaaacacattaaactcaggaatagtggaccttgtagaaaagcatcacaaattaaaaatatatttctccatgtggtaaaagtgctttcaatcccattaaagggcacagcaagggtgtttggaaacacgatctgaaatttggcctgcaatccgtggcatcgattccaaccacagggcgggggagtcaccatgatctagagcacaggagccacgtggggcccggagcatgcggacagcaacactcgcaataactgagtgaggacgaggcccatagcctgagtagaatagattctgtatttgtaaaaaatgaggtggttacatcaactgggttgaagggggactgggtaatcccagaaattccttgtttctggtctgtggggatggtcagatctgcccaccactcttggcacccgangcttncctggagacgcatnaacctgggntgggaaagtgcccanatcttgctgggggaacacaaccttcgttgccatgccggcacccagcctttcnt

SEQ ID NO: 5664 - DNA, 587 bp, Homo sapiens
  misc_feature (518)..(518): "n" may be a, t, c, g, other or unknown
  misc_feature (565)..(565): "n" may be a, t, c, g, other or unknown
  misc_feature (568)..(568): "n" may be a, t, c, g, other or unknown
gtttactatgcttttatttatactatttgcacagtgagcatatttacaaatgtgttccattacaagacatcagacacaagggaaagacagaacaaatctgtaatcttcttccactcacactttactggttattccaaactttcaaagaacagcctctcagtggtactttctatccatcacacaacatgacacaaagacttcatttaataaggttagcacagctgttaatatcaaatgccaacgacagaaaaaaataacataaacttttcctcaagtatatatttaaacatattgtgattcttagtcaacagtgttataaaatgaatacaagataacaatatctatagcaaacactactttgcagtttaacaattagcactggtcacaaataccaaatacagtgccctccccaccctccacaaccttttgaattcaggaccctgcctatctactccatggagcagatctttggattctcttttccactcctaagggtttgcctaggatctctctatggngcagaataccccctagcacccgaattggggaataggcttaaccttgnatnatcatctgaatcccagcat

SEQ ID NO: 5665 - DNA, 572 bp, Homo sapiens
  misc_feature (199)..(199): "n" may be a, t, c, g, other or unknown
  misc_feature (445)..(445): "n" may be a, t, c, g, other or unknown
  misc_feature (465)..(465): "n" may be a, t, c, g, other or unknown
  misc_feature (498)..(498): "n" may be a, t, c, g, other or unknown
  misc_feature (504)..(504): "n" may be a, t, c, g, other or unknown
  misc_feature (508)..(508): "n" may be a, t, c, g, other or unknown
  misc_feature (544)..(544): "n" may be a, t, c, g, other or unknown
  misc_feature (551)..(551): "n" may be a, t, c, g, other or unknown
  misc_feature (557)..(557): "n" may be a, t, c, g, other or unknown
  misc_feature (571)..(571): "n" may be a, t, c, g, other or unknown
gagatggaatttctttcttgtcgcccaggctagagtgcaatggcgtgatcttggatcactgcaacctctgcctcccgagtagctgggattacaggtgcccgccaccacgcctggctaatttttgtattttaagtagagacggggtttcaccatgttggccaggctggtcttgaattcctgacctcaagtgatccactgngctcggccagaattatgtagaatttctaattgaacaaaaggaatatctgtgagaaagaatccaagctgtctgcaattgctattatattacatataataacaactgcaacagggggattccagctgtatgtgttcaggttaactgtgtcaagacattccaacacatattcattcattctaacgtatgacaaaaacgctagcagatcaagtatgtatgcctatggagggaccctgggatacatagcantgctgagcatccttaaaaangtttttctaactggagccattggtctttggggncaacangttntgacatcccttggggcaccttccccttgactttttnaaaaggncccaanctacttttaaaganc

SEQ ID NO: 5666 - DNA, 586 bp, Homo sapiens
  misc_feature (495)..(495): "n" may be a, t, c, g, other or unknown
  misc_feature (539)..(539): "n" may be a, t, c, g, other or unknown
  misc_feature (543)..(543): "n" may be a, t, c, g, other or unknown
  misc_feature (550)..(550): "n" may be a, t, c, g, other or unknown
  misc_feature (567)..(567): "n" may be a, t, c, g, other or unknown
agtaaaatgcctactaatgccaaattcatcctccattatatctttcaatagcttgtatttaataagcttatgtgatgattccttcaggcttatggggaaaaaaaatgtctgcaaattaagttacatgcttcgccctccgccccctgccccaatcaaaaatgatacaaccaagttttggtctctctgtcagatgccaagagaattcttggcaagttttggttcaaatgcagctttcctcaacatccaatcatttctccctgctctgacacctgtcccctctttctcagcttggagtttttgtttcagaattgtcttatccctatgatacatccatttgtacttctatatcccactttaggtaattaggttttagagcccacaggaatcacaattcacatgctgttgctaagttctgtgccattaagccaaaattgctatctaccaaagtatttaagtccttatgaagagtattccaagggtttcatgcaatgtganggtccattgcaaatattttgaactgagtttggacaaagagtttnaagngggaacncagattttccccaaggngggaaaggaagggcagggt

SEQ ID NO: 5667 - DNA, 530 bp, Homo sapiens
  misc_feature (228)..(228): "n" may be a, t, c, g, other or unknown
  misc_feature (269)..(269): "n" may be a, t, c, g, other or unknown
  misc_feature (403)..(403): "n" may be a, t, c, g, other or unknown
  misc_feature (437)..(437): "n" may be a, t, c, g, other or unknown
  misc_feature (444)..(444): "n" may be a, t, c, g, other or unknown
  misc_feature (480)..(480): "n" may be a, t, c, g, other or unknown
  misc_feature (494)..(494): "n" may be a, t, c, g, other or unknown
  misc_feature (507)..(507): "n" may be a, t, c, g, other or unknown
  misc_feature (517)..(518): "n" may be a, t, c, g, other or unknown
catctttaaattaatgtctttactaaagggttagaatgatttcagaaggaaattacaattttgaagggaaaggaaaagacattgaaattacaggtttcagaagaagagcttcctctgactccagctttggctctcctgccttgggatccccaacccacccccaagcacccttgtatgcattcctcaggaagagggatgttgttctcagtgttttcctcttccatccgngcctcaaactaggcagcttccaatggtgccctgggcttcanaaggtggccactgagctgacctctaggcttgcaggctgaatttctcgtcagcacttcaggatcatgatctctaacactcatcttctctctgcacactcagggttggggtgcagccccagctgaggtcccagggncagtgggtggatgtgggggcaagggagctggaanaacactngagagacagcaggtaaattgagacatggctttattnagcagcccttttanagggttaagggtnccatttttcnnttcacaaaccct

SEQ ID NO: 5668 - DNA, 470 bp, Homo sapiens
  misc_feature (113)..(113): "n" may be a, t, c, g, other or unknown
  misc_feature (117)..(117): "n" may be a, t, c, g, other or unknown
  misc_feature (122)..(122): "n" may be a, t, c, g, other or unknown
  misc_feature (135)..(135): "n" may be a, t, c, g, other or unknown
  misc_feature (223)..(223): "n" may be a, t, c, g, other or unknown
  misc_feature (291)..(291): "n" may be a, t, c, g, other or unknown
  misc_feature (343)..(343): "n" may be a, t, c, g, other or unknown
  misc_feature (442)..(442): "n" may be a, t, c, g, other or unknown
  misc_feature (448)..(449): "n" may be a, t, c, g, other or unknown
  misc_feature (454)..(455): "n" may be a, t, c, g, other or unknown
  misc_feature (467)..(468): "n" may be a, t, c, g, other or unknown
aaagaaaaacaacagaagagaaggctgatcccaagctacagggtttttttgtttgtttgtttgtttgtttgttttggagacagtctcgctctgtctcccaggctggagtgcantggngcggncatagctcactgngggctcagactcaagctcaagcaatcttcttatcttgcctttctaattgctgggattataagcatgagccactgcacctggcctgtgngacgtaattctgatgtcaactccctgatgttacatcaaatgccacaggttaaggccaccagcccccgntaggctgccctcgcttcagatgcagctgcaagcttgggtgtccacagaccgnatgtacttttcaccaactggctgcaaatttggaggttcccaccacgtcctcaggtttgataattcaccatacaacccacagaactctgaaaagcatganctttcnntttcnntatttgagacannag

SEQ ID NO: 5669 - DNA, 586 bp, Homo sapiens
  misc_feature (90)..(90): "n" may be a, t, c, g, other or unknown
  misc_feature (112)..(112): "n" may be a, t, c, g, other or unknown
  misc_feature (342)..(342): "n" may be a, t, c, g, other or unknown
  misc_feature (527)..(527): "n" may be a, t, c, g, other or unknown
  misc_feature (538)..(538): "n" may be a, t, c, g, other or unknown
  misc_feature (562)..(562): "n" may be a, t, c, g, other or unknown
  misc_feature (566)..(566): "n" may be a, t, c, g, other or unknown
  misc_feature (569)..(569): "n" may be a, t, c, g, other or unknown
  misc_feature (584)..(584): "n" may be a, t, c, g, other or unknown
gagtaatgatatggtttagatctgtatccccacccaaatctcatgtttaattgtaatccccaatgtgggaggtggggcctggtgcaaggngactggaccacgcaggtagttnctcatgaatgatttagcactgtccccctactgctgtctcgtgatagagttctcatgagatttggttgcataaaaagtgtgtagcacctcccctctctcttttcctcttgctctagccctgtgaagatacctgctctggctttgccttttgccatgagtaaaagctccctgagacctccccagtcatacttcctgtacagcccatggaaccatgagccaattaaacctttnttctttataagttacccagtctcaggcatttctttatagcagtgtgagattgaaccgatacaagacaacaataacaaaaagtagataaatatgaaggcccgagaaatggcaacttcttacgaagggaaagctgttatcctcaagcaagtcaagttgagggactatcctgggagctatttttccgngccttggtttncacttataccgggaagtatgcccntggnggnttaaagttggtttantt

SEQ ID NO: 5670 - DNA, 572 bp, Homo sapiens
  misc_feature (181)..(181): "n" may be a, t, c, g, other or unknown
  misc_feature (440)..(440): "n" may be a, t, c, g, other or unknown
  misc_feature (459)..(459): "n" may be a, t, c, g, other or unknown
  misc_feature (497)..(497): "n" may be a, t, c, g, other or unknown
  misc_feature (522)..(522): "n" may be a, t, c, g, other or unknown
  misc_feature (530)..(530): "n" may be a, t, c, g, other or unknown
  misc_feature (552)..(552): "n" may be a, t, c, g, other or unknown
  misc_feature (564)..(564): "n" may be a, t, c, g, other or unknown
  misc_feature (571)..(571): "n" may be a, t, c, g, other or unknown
ggcttgtgcttatagaggacttcatcagcacacttcacttgaaatgcacctggctgcaggtaaccatgttagtaaagaatatcctttcttccaggctaccgcttagtgttaattccgaaaaatcaggtttgtgaaaattcagatggcctatgggtgagctgtcactcagttgccaaactgncttaatcttcttttgaccactatatatttccactctccatttctgtggcttctcactttgatataagttctttacagcagttggtctgactggcagctgaaaaatgtgttgctcatcaagaggattttgtttgtaatactttatgcagatctgtgttaaagaaaagaggagttcatgttgagatttaatgaaaggcatgcaactgactaatatttctagaatatgggggagtttttggacacgataaacctgttcttgnatatctactgatggagcantgaagtattccaaatgattcaaagatcaaggtcctggnctatgaaaaacctggttaaaccttncttaagtnggccaaaccatttccaaagccnttgaccggaatngcccccng

SEQ ID NO: 5671 - DNA, 492 bp, Homo sapiens
  misc_feature (316)..(316): "n" may be a, t, c, g, other or unknown
  misc_feature (419)..(419): "n" may be a, t, c, g, other or unknown
  misc_feature (432)..(432): "n" may be a, t, c, g, other or unknown
  misc_feature (437)..(437): "n" may be a, t, c, g, other or unknown
  misc_feature (441)..(441): "n" may be a, t, c, g, other or unknown
  misc_feature (451)..(451): "n" may be a, t, c, g, other or unknown
  misc_feature (472)..(472): "n" may be a, t, c, g, other or unknown
  misc_feature (474)..(474): "n" may be a, t, c, g, other or unknown
gagacagggtctcactttattgcctagactggagtgcagtggcatgatctcggcccactgcaacctctgcttcccaggttcaagcaatgctcctgcctcagcctcccaagtagctgagaccacaggcacatgccactacacctggctaatttttgtagagatggggtttcaccatgttgcccaggctggtcttgaactcctgagctcaagtgacccactcacctcggcctcccaaagtgctgggattataagcgtgaaccaccatgcctggccaagtaatccattttttttttttttttttttttgagatggagtntcgctctgtcacccaggctggagcgcaatggcggcatttcggctcactgcaagctccgcttccgggttcacgccattctcctgcctcagcctcccaagtatgntgggactacaggngcccngcantacgcccggntaatttttggatttttaggananacggggtttcaccgttta

SEQ ID NO: 5672 - DNA, 604 bp, Homo sapiens
  misc_feature (586)..(586): "n" may be a, t, c, g, other or unknown
  misc_feature (597)..(597): "n" may be a, t, c, g, other or unknown
  misc_feature (602)..(602): "n" may be a, t, c, g, other or unknown
  misc_feature (604)..(604): "n" may be a, t, c, g, other or unknown
ggttaattaccccaatgttttattaaccatctatagacccatgagggacagcaaatttgattaggcttctgtattcaaatccattttcatgctgctgattcatacctgaggctgggaagaaaaaaaggtttaattggacttacagttccacatggctggggaggcctcagaattatggcgggaggcaaaaggcacttattacatggcggtggcaagagaaaatgaggaagcagcaaaagcagaaactcctgataaacccatcagagcttgtgagacttattcactatcacgagaatagcacggaaaagactggctgccatgattcaattacctccccctgggtctctcccacaatacatgtgaattctgggagatataattcgagttgagatttgggtgaggacacacccaaaccatatcacacccctgcgccctccgaatttcatgtcctcccatttcaaaaccaatcggccttcccaacagtcttccaaagtcttactcatttcagcattaacttaaaaggtccacagacccaaggtttatctgagacaaggcaggctttttcacctaatgggcctggaaatcnaaagccagctngttcntn

SEQ ID NO: 5673 - DNA, 614 bp, Homo sapiens
  misc_feature (546)..(546): "n" may be a, t, c, g, other or unknown
  misc_feature (561)..(561): "n" may be a, t, c, g, other or unknown
  misc_feature (565)..(565): "n" may be a, t, c, g, other or unknown
  misc_feature (575)..(575): "n" may be a, t, c, g, other or unknown
  misc_feature (584)..(584): "n" may be a, t, c, g, other or unknown
  misc_feature (606)..(606): "n" may be a, t, c, g, other or unknown
  misc_feature (608)..(608): "n" may be a, t, c, g, other or unknown
aaaaaagtatgagtgtacagtggagtgttccagaggttacatggtgtgctaaccacaacagtctgacgtagatctgagaatcttctattaaaccaggcattaaaaagatttgcaaaaatgcaagatgtcactcttatcatctatgttaacatgtaatggatttattttttgtttttggaaaaaaaaaccaagagaaaagaaaataaagtcatctttagtttccttaaattcaaagtctgagcctgaaaatggaagtatcaaagctgatggttatacgtcagtgagaaaaaaatttaaaccaagctgggtgggtctttacatgagataaactatctacaggaaagaatgaccactaacttctgcataataaatgagagtggatcttttaattctgagatggcaatgtactttacaaggaccatttacagactacatcaaacctttttctagataaaaaacgtacttcagtaacttgcctgaattgagagagccaaaccagtccggagaggaaaacttaaaatgtttccacattatcaagcccccttnagaagtcctgggggncctnggcccctccntttgaccanaggtccggttggcacagtccancnggtttt

SEQ ID NO: 5674 - DNA, 601 bp, Homo sapiens
  misc_feature (530)..(530): "n" may be a, t, c, g, other or unknown
  misc_feature (599)..(599): "n" may be a, t, c, g, other or unknown
cgaggtggagtttcactcttcttgcccaggctagagtgcaatggtgcaatcctggctcactgcaacctccacctcctgggttcaagtgactctcctgccttagcctcccaagtagctgggattacaggcccgtgccacaatgcctggctaatttttgtatttttagtagagatggggttttgccacgttgtccaggctagtctcgaactcctgaactcaggtgatccgcctgcctcagcctcccaaaatgctgagattacaggcgtaagccaccgtgtctgacccattttattattatttatctgcatattcaaggaaaaaaatataaattttagattcctctggctcataataggctttcttgaagagaaaaatgacgtgcaagaaataactggagccattaaaatatattttatttttccttatttgtagttattaacagaaaaaatgctctaataggtacctaatggaagttgcagatgtgattatcaagttgaaatgaatatttactcaaacctgtaaagggcttngcttttctggcaatatttaatgaaggatgccattagcattttaacttacattctttcattaaggtccangg

SEQ ID NO: 5675 - DNA, 533 bp, Homo sapiens
  misc_feature (283)..(283): "n" may be a, t, c, g, other or unknown
  misc_feature (473)..(473): "n" may be a, t, c, g, other or unknown
  misc_feature (508)..(508): "n" may be a, t, c, g, other or unknown
  misc_feature (529)..(533): "n" may be a, t, c, g, other or unknown
aaccaaaaacaacactaaactttaatggcatactgtagatctgccaaaatgaggcaaatgcagaacataatgacggtatcacaaaaatacatttttaaatggtcaatttagaaagggtacttttgtataaaggttcagtaaatcatttgacaagtatttttaaacagtaaattttgtaaagtgtgaagtctatggaaatgtcaacacaaggcacattaggttctgaatgaccacaaaagtttaaaattagctaaaaagggaaaataaataggttttaaagtgnaaatgcagtaagttctgtatgttcactatttactttcttagttttcattccttctactgtaatgttatgataatgtgagatctacatcagaattggtaggaaaaacagcttctctcttctgtcacctcaacaaaagatactttaaatctgtactgtctaatacagtagccactaggtacatgtagctatngagtacttgaaatatggctagtgacatatgataanacttgactatactgggtgaannnnn

SEQ ID NO: 5676 - DNA, 608 bp, Homo sapiens
  misc_feature (534)..(535): "n" may be a, t, c, g, other or unknown
  misc_feature (549)..(549): "n" may be a, t, c, g, other or unknown
  misc_feature (564)..(564): "n" may be a, t, c, g, other or unknown
  misc_feature (582)..(582): "n" may be a, t, c, g, other or unknown
  misc_feature (594)..(594): "n" may be a, t, c, g, other or unknown
  misc_feature (597)..(597): "n" may be a, t, c, g, other or unknown
aacagtttcattgaaatagaattcacataccatacaattcacccatttaaagtgtacaattcagtggtttttagtatattcacagatatgtgcaatcatcactacagtcaattttagagcattttcattacctcggaaagaaactctgtaccctttagctattcccctgcccacccatgctcccaccctcagctttaaacagccagtaatctactttctgtctgcatagatttccatattccattcatttgaatgcaatcatataacatatggtcttttgtgactagcttccttcacttaacataatgatttcaggatccattcatgttgcagcatgtatcagtacttcattcttttatataccataatataccattatatggataccatattttacttttgcatgtgtcagttgatggacatttgggttgtttccaccttttggtgattctgaataatgcttctgtaaacaaatgtgtacaagtttctgtgtggacatatggtttcatttctcttggggatatacctaagtannagaattggttgggncataaaagtaacctngatggttaatcacttggnggacctggccanatngttttccaaag

SEQ ID NO: 5677 - DNA, 610 bp, Homo sapiens
  misc_feature (490)..(490): "n" may be a, t, c, g, other or unknown
  misc_feature (561)..(561): "n" may be a, t, c, g, other or unknown
  misc_feature (609)..(609): "n" may be a, t, c, g, other or unknown
acctttaagtgaggacaatggcacttaataaataggactgttgtgaaaattaaatgagtagatacatataaagcagtcagaacagagcctggcacacaataagtacaatgtatgtgttaactagttgcaatagtggaactggaagactagtagtaggtagcatatcaagttgtataaaaccttgagccaaatatgggaatctcataataaaccttcatagagttatcattcttagcctctataatacactcatggctaatgtaatgcacagaaaatcaagctaaacaaactcaataatttcacagcaagtaggtatatctattttacttctgggatagagtgaatggttgaatcagcataactccacagtttttaattgaagaattttaccattaatggccactggaacaggacactgactatacttttcagctaatgggatgggctccagagaccacactggatgttgcacaaacaactggatgtgtgntttgggcatcattaaaataaaagttaccatggtaaatacggcagaaaatcttgcattggaaggagctttgncagcatttgcagcttggacattttatggcagcagaccagttggtaacng

SEQ ID NO: 5678 - DNA, 602 bp, Homo sapiens
  misc_feature (476)..(476): "n" may be a, t, c, g, other or unknown
  misc_feature (494)..(494): "n" may be a, t, c, g, other or unknown
  misc_feature (551)..(551): "n" may be a, t, c, g, other or unknown
  misc_feature (561)..(561): "n" may be a, t, c, g, other or unknown
  misc_feature (572)..(572): "n" may be a, t, c, g, other or unknown
agacggagtcatgctctgtcacccaggctggagtgcagtggtgcattgcaacctccgcctcctgggttcaagcgattctcctgcctcagcctcccgagtacctgggactacaggtgcgtgccaccatgcccggctaatttttttatatttttagtagagatggggtttcaccgtgttagtcaggatggtatggatctcctgacctcgtgatccacctgcctcagcctcccaaagtgctgggattacaggcgtgagccatggcacccggcccacagattctgcttttaagtgcagaagtattttaacaatgggagacggaataaacgggtcttacctacttcctttccttcttaaacgatgtactctaaagcagagggtccctttagtgatgaatccagatgctgctgtcatcaccccagataacagaaactggcaacagggagccctgggcagctgcaagtgacacccactcctgncccctcagactcaatggncctaggagctctgcaatacattggcttactataccttcctttcttattggccaatanaagtttcctnattcccaaatnttaaacttttccaacttggacttttattac

SEQ ID NO: 5679 - DNA, 605 bp, Homo sapiens
  misc_feature (519)..(519): "n" may be a, t, c, g, other or unknown
  misc_feature (524)..(524): "n" may be a, t, c, g, other or unknown
  misc_feature (526)..(526): "n" may be a, t, c, g, other or unknown
  misc_feature (561)..(561): "n" may be a, t, c, g, other or unknown
  misc_feature (591)..(591): "n" may be a, t, c, g, other or unknown
atttgagatagagtcttgctctgtcgcccaggctggaatgcagtggcgccatcttggctcactgcaatctccgcctctcaggttcaagtgattttcctgcctcagcctcccgagtagctgggactacaggcatctgccaccaagcccgctaatttttgtataaaatacaaaaattttaagtataaaatacttaaaaagtagagacgggatttcaccatgttggccaggattgtcttgatctcttggcctcgtgatctgcccgcctcagcctcccaaagtgctgggattacaggcatgagccaccgtgctcggccgacctggggctctttcctaagagaaaagtccacaccgaggcagacctgcacagcccccagcacagggaaacggcagcaagtgtgtgtgaaggcaggaatggcgctgggatgccctgccatggaaccgctggctcacagcagactcacgcttgtgggcagtgcttgcgacggacgggactttgacgtggctcaaggcaagttcttntcaantncaagaaggaaaaggactttccggcaaggggccatnaccggacaatggttggcttggatgggatgncctgaggaggcatg

SEQ ID NO: 5680 - DNA, 357 bp, Homo sapiens
  misc_feature (266)..(266): "n" may be a, t, c, g, other or unknown
  misc_feature (299)..(299): "n" may be a, t, c, g, other or unknown
  misc_feature (304)..(304): "n" may be a, t, c, g, other or unknown
  misc_feature (310)..(310): "n" may be a, t, c, g, other or unknown
  misc_feature (341)..(341): "n" may be a, t, c, g, other or unknown
  misc_feature (356)..(357): "n" may be a, t, c, g, other or unknown
ctccagtgccagaaatgatcaatgatgaagtgggggttgggcagctagctggctggagaggtgagccaaaggaacccaggagtggacacctgagggagtggggtctcagaggaactgggcagagctaaatgggctaagtcttaagaggcaggggcaggaaatgtaatggaggctttctactctacaacgtccaatcctgctggggagggcatggagtatttcagagtaggaaagaatgagggagaggatagtcacgataaatcaangtttcattcttttcctcctctttcttagctcgncaaancctacnctttctctccagctggaattatggtggtgantgagggaggtaaacnn

SEQ ID NO: 5681 - DNA, 596 bp, Homo sapiens
  misc_feature (453)..(453): "n" may be a, t, c, g, other or unknown
  misc_feature (551)..(551): "n" may be a, t, c, g, other or unknown
  misc_feature (564)..(564): "n" may be a, t, c, g, other or unknown
  misc_feature (576)..(576): "n" may be a, t, c, g, other or unknown
  misc_feature (596)..(596): "n" may be a, t, c, g, other or unknown
ggacatctcagatgtgactcttgctgccaggctagaatttaggctatgtgataattctcagctgtcctacaatgcctgcttcttgaaagaagtcggcactttctagaatagctaaataacctgggcttattttaaagaactatttgtagctcagattggttttcctatggctaaaataagtgcttcttgtgaaaattaaataaaacagttaattcaaagccttgatatatgttaccactaacaatcatactaaatatattttgaagtacaaagtttgacatgctctagaatgacaacccaaatgtgtcttacaaaacacgttcctaacaaggtatgctttacactaccaatgcagaaactgggtttgttttcctctctaaaaaacaggatgtgtcaaaatgataaatattctaagattaaagtggcaatgctcagattcccaatcttaccagntctgggattcactctggcctcctagaagactgaggggaatatgctggacttacatggccatggaaccttccttcttctagaaacccaagcggtatgcngaatcattatgcncacattcccgcnggaaaaaagggttgaccctn

SEQ ID NO: 5682 - DNA, 598 bp, Homo sapiens
  misc_feature (423)..(423): "n" may be a, t, c, g, other or unknown
  misc_feature (442)..(442): "n" may be a, t, c, g, other or unknown
  misc_feature (458)..(458): "n" may be a, t, c, g, other or unknown
  misc_feature (533)..(533): "n" may be a, t, c, g, other or unknown
  misc_feature (551)..(551): "n" may be a, t, c, g, other or unknown
  misc_feature (572)..(572): "n" may be a, t, c, g, other or unknown
  misc_feature (592)..(592): "n" may be a, t, c, g, other or unknown
agaaaatagcttatgttacaacaaaaaccctataaaaacattcatcccagcaaaagcctccagggctggagggtgaggggaaaagtttcaaagcacgtggatagtccagatctgggatgccctgtcctcatccggctcccatagcaccacgtggtcccggtcgtagccccggcctcccttcacgtccaggatctggccttcgaacatctggctgcagatgtggcccgattcactgatgctccacgtctggcgcggcaggcggctctcggcccacagcaccggggcccttcacgacctccctctgggtaaaggggaggacagggacattttcagagttctgaacaaacttattccttggggacgatggagcagaaagacctcctgggctggggacatccttccttcttgtagtggatggagcangaagttgtccagggactgncacatgctcgcttctnaccatgggcaggacggtggcaacaagggggtccacgggccggccttttttaaggggcagaacaaggggagtgaanccgggccccgggtgaagnggcaccacaggttgttttcanggggaagttaggcccgaaangggcct

SEQ ID NO: 5683 - DNA, 588 bp, Homo sapiens
  misc_feature (406)..(406): "n" may be a, t, c, g, other or unknown
  misc_feature (412)..(412): "n" may be a, t, c, g, other or unknown
  misc_feature (429)..(429): "n" may be a, t, c, g, other or unknown
  misc_feature (469)..(469): "n" may be a, t, c, g, other or unknown
  misc_feature (494)..(494): "n" may be a, t, c, g, other or unknown
  misc_feature (499)..(499): "n" may be a, t, c, g, other or unknown
  misc_feature (505)..(505): "n" may be a, t, c, g, other or unknown
  misc_feature (509)..(509): "n" may be a, t, c, g, other or unknown
  misc_feature (568)..(569): "n" may be a, t, c, g, other or unknown
  misc_feature (585)..(585): "n" may be a, t, c, g, other or unknown
gatgcatgaggataaacattcttggaaggacgcgtgtgttctgtgatatgtcttgattggctgggcggtcaggattgcgtatggttttgtcattgcatgcttttgtcttgtgtgtgactgagtgaaaatatggtgatagtgtgggcaatggtgtctgtgcagagtcccctcataggagggacatcagagcagcccctcctcaccagtggctgccccagcaccctcaggaagctgtttcttgggggaagatgcagaaagaaatgaagtctgggtacatgtgtacttggcaggcaagaggagagattcaacaaccccagagagaccaggacaaaacaggctggtgacaagggacaccctctcacccagctagagagaggccctgggatacgagcaaagaggttgcagngtctanatgatttcaagggctgngtttaccaaatgtttgcctggaaaccagcctgagtgcctntcttgccccaaaagggagatctcantgaanacttgnggtnccaagccagggcctcaagcttaatttaaagccccccctttcttccaccaccagcccaanncaggacctttcttccncca

SEQ ID NO: 5684 - DNA, 585 bp, Homo sapiens
  misc_feature (7)..(7): "n" may be a, t, c, g, other or unknown
  misc_feature (102)..(102): "n" may be a, t, c, g, other or unknown
  misc_feature (158)..(158): "n" may be a, t, c, g, other or unknown
  misc_feature (181)..(181): "n" may be a, t, c, g, other or unknown
  misc_feature (315)..(315): "n" may be a, t, c, g, other or unknown
  misc_feature (359)..(359): "n" may be a, t, c, g, other or unknown
  misc_feature (498)..(498): "n" may be a, t, c, g, other or unknown
  misc_feature (500)..(500): "n" may be a, t, c, g, other or unknown
  misc_feature (508)..(508): "n" may be a, t, c, g, other or unknown
  misc_feature (543)..(543): "n" may be a, t, c, g, other or unknown
gaagttngataacaaagaaatatatataagacaaaaatagacaagagttaacaataaaaacacaactatctgttgacataacatatggaaactttttgtcanaaagctacatcttcttaatctgattgtccaaatcattaaaatatggatgattcagngccattttgccagaaattcgttnggctggatcatagattaacattttctgggagaaaaaagaaaaagagatatttatttaggaaataaaccattttttacaaaaatctccataaaacctcaacttttctacaataaaccaaaactaatactttcagngaatatctattaaatgagcatttccattagtttaacacacaaangtctcctcccctacatttcactcttgaggtctagaataacttactctgtaaatcatagatattctcaataacctctttttgttatcaattacggtaagactcaagcatccagaaatagctttaaactgggacccaaatntnggaagganggctagttaatatattacattgggaataaacgggncccctgggttattacaccattcttggaaaggcattaacttgg

SEQ ID NO: 5685 - DNA, 602 bp, Homo sapiens
  misc_feature (470)..(470): "n" may be a, t, c, g, other or unknown
  misc_feature (494)..(494): "n" may be a, t, c, g, other or unknown
  misc_feature (502)..(502): "n" may be a, t, c, g, other or unknown
  misc_feature (544)..(544): "n" may be a, t, c, g, other or unknown
  misc_feature (555)..(555): "n" may be a, t, c, g, other or unknown
  misc_feature (574)..(574): "n" may be a, t, c, g, other or unknown
  misc_feature (582)..(582): "n" may be a, t, c, g, other or unknown
ctcacttctcttggaattactgtatacctttttatgattccattttatctccttgttggtttattagctctaactctattgcggcccctgtgtgaactttaaggaatattccctttccttctctggcctcagatagttttctcacacatatgcactaaccagtacttagttaaacactagggtaggacctcctggagatagccagagtgttctctctgtgcagctttcttctttctggtaatctgccctgcaaacccaaaccactgtggcctcttcagattccaggtctggctccccagttcagaggacctccagaatatgcctgggctgctcctcctggggctggtatctggaaattgtctccaggcaaccacactactcctcttatttgtttctatcttttgggaatcactgtcctgtgttgcctggtgtccaatgccttccaaacagtttttctttaaatatatttnggtcattttttttttcaattgggncatgtgangggggtaaataaatcgaggcccctttacttaatcttgggccngaagaagaaangaggaagtctcctggggcnttttaacnctcttttgaaacccaacttt

SEQ ID NO: 5686 - DNA, 597 bp, Homo sapiens
  misc_feature (501)..(501): "n" may be a, t, c, g, other or unknown
  misc_feature (552)..(552): "n" may be a, t, c, g, other or unknown
  misc_feature (555)..(555): "n" may be a, t, c, g, other or unknown
  misc_feature (575)..(576): "n" may be a, t, c, g, other or unknown
aaaaattcatattgactttattgactgctgaagttcagtctcattcatcttccagccttctctgatactgtctttctgaggcttttctacggtagacatcatagaaggtctcctggcccacgcgcactttaatcatgatccactccatcgttcctcccaggacaaaaaagaagggcaggaaccggtagatgccaaatcgctgctccttctgaacttggaaacagaatcggctccctatttttaaagctgcactagattcggtaagctccagatacagctgcaaatcaagagccatcaatttgtatgatggtctctcctgagtctaacaggtcccacagcgcatggcaaaagggcagattttacggtgggcagatctaggaagtggagctggaaacgagaatgtgcagctcactctccctgttcgggaacgggatgtgtgtgtatcaagtgacgtccaaggcataggggagccagcgacgggtggcctcgtgtgcagaatanaataaccatttagcatagatctgtttcagggctttttaggggaccattggnganatttacccttgaattaggcnntattttaaaaaaatcattggt

SEQ ID NO: 5687 - DNA, 596 bp, Homo sapiens
  misc_feature (532)..(532): "n" may be a, t, c, g, other or unknown
  misc_feature (542)..(542): "n" may be a, t, c, g, other or unknown
  misc_feature (596)..(596): "n" may be a, t, c, g, other or unknown
gccttttggtatgcctggtaattttttcttggtagctggacatgatgtaccaggtaaaaggaacttttataaatcagcttttagcaatgtagcagttaggtgggggaaaggggaggggagacattctatcatcctatgattaagtctcagtcttttagtaagcatatgcctctggtgtacaaacttctaagtgtttcctcagtattcttctcccctctttggtaggacaggatggctagagttgtctggagtttagtatttcccttctctgatgcagaaggttagagctgacaagagttaggtatttcccttcccttgggtcaggctctaataataccccagcaggttaggatttagctaactaatttctcctgggggcagaccttgttaagaagagcacagtgctctggcatatttcaaaatggttcatttcaccttccccctgccagaacacatagggatttttctgcaatatttacttggagaatctaattgagctcatgtaggtaagctaacaaaaatgggggggttncccatgaagngggtcctcctggaggttaaaactttcaaagtggtcatactgaacctcctataan

SEQ ID NO: 5688 - DNA, 585 bp, Homo sapiens
  misc_feature (123)..(123): "n" may be a, t, c, g, other or unknown
  misc_feature (474)..(474): "n" may be a, t, c, g, other or unknown
  misc_feature (536)..(536): "n" may be a, t, c, g, other or unknown
  misc_feature (538)..(538): "n" may be a, t, c, g, other or unknown
  misc_feature (541)..(541): "n" may be a, t, c, g, other or unknown
  misc_feature (585)..(585): "n" may be a, t, c, g, other or unknown
gttttgttttgttttgcttttttttttttttactttaatagaataaggaaaagaaaagctatttatcattttttttctcttaattttcttctccccattctaagcagctagacaggtctctgngctattttttctttcagtggatgattgcgctttaaaacagaaaacagagcttacttgtacacaacttcccttcctggcttctttcagtcctatgacaatgtcatggagtgaggaatacgctatgtatgtcacaggagaagggagagaagctaatgcttttaagggagataggcaggagcagtagacaaagcaagactagagcggttgtccagagccagttctcccatggaggcaggtggtagtacctctggaagaagtgtggaaagctggcttccaccccagggaatattactagaacatttctggagagaggaataggcagtagaaccactgaactgcaaaggaatctgnggacttggaaaataaagtgaacttctggttttcttaaccaaactttatagcatggattaagncntgngcaagttaacttcgggaaaattaaaatcacttaagagggtaagn

SEQ ID NO: 5689 - DNA, 586 bp, Homo sapiens
  misc_feature (1)..(586): "n" may be a, t, c, g, other or unknown
nnnnnnnnnnnnnnnnnnnnnnnnnnnnnnnnnnnnnnnnnnnnnnnnnnnnnnnnnnnnnnnnnnnnnnnnnnnnnnnnnnnnnnnnnnnnnnnnnnnnnnnnnnnnnnnnnnnnnnnnnnnnnnnnnnnnnnnnnnnnnnnnnnnnnnnnnnnnnnnnnnnnnnnnnnnnnnnnnnnnnnnnnnnnnnnnnnnnnnnnnnnnnnnnnnnnnnnnnnnnnnnnnnnnnnnnnnnnnnnnnnnnnnnnnnnnnnnnnnnnnnnnnnnnnnnnnnnnnnnnnnnnnnnnnnnnnnnnnnnnnnnnnnnnnnnnnnnnnnnnnnnnnnnnnnnnnnnnnnnnnnnnnnnnnnnnnnnnnnnnnnnnnnnnnnnnnnnnnnnnnnnnnnnnnnnnnnnnnnnnnnnnnnnnnnnnnnnnnnnnnnnnnnnnnnnnnnnnnnnnnnnnnnnnnnnnnnnnnnnnnnnnnnnnnnnnnnnnnnnnnnnnnnnnnnnnnnnnnnnnnnnnnnnnnnnnnnnnnnnnnnnnnnnnnnnnnnnnnnnnnnnnnnnnnnnnnnnnnnnnnnnnnnnnnnnnnnnnnnnnnnnnnn

SEQ ID NO: 5690 - DNA, 371 bp, Homo sapiens
  misc_feature (43)..(43): "n" may be a, t, c, g, other or unknown
  misc_feature (99)..(99): "n" may be a, t, c, g, other or unknown
  misc_feature (109)..(109): "n" may be a, t, c, g, other or unknown
  misc_feature (154)..(154): "n" may be a, t, c, g, other or unknown
  misc_feature (167)..(167): "n" may be a, t, c, g, other or unknown
  misc_feature (183)..(183): "n" may be a, t, c, g, other or unknown
  misc_feature (191)..(191): "n" may be a, t, c, g, other or unknown
  misc_feature (228)..(228): "n" may be a, t, c, g, other or unknown
  misc_feature (233)..(233): "n" may be a, t, c, g, other or unknown
  misc_feature (259)..(259): "n" may be a, t, c, g, other or unknown
  misc_feature (301)..(301): "n" may be a, t, c, g, other or unknown
  misc_feature (304)..(304): "n" may be a, t, c, g, other or unknown
  misc_feature (354)..(354): "n" may be a, t, c, g, other or unknown
  misc_feature (358)..(358): "n" may be a, t, c, g, other or unknown
  misc_feature (362)..(362): "n" may be a, t, c, g, other or unknown
  misc_feature (364)..(364): "n" may be a, t, c, g, other or unknown
  misc_feature (370)..(370): "n" may be a, t, c, g, other or unknown
gagacggagtttcgctctgtcgcccaggctggagtgcaggggngcgatctcggctcactgcaagctctgcctcccgggttcacgccattctcctgcctnagcctcccgngtagctgggactacaggcgcgcaccaccatgcccggctaattttngaatttttagtanagacggaggttgcaangagctganatcgggccactgcactccaacctggatcacagagaanactgnctcaaaaaacaaacaaaaaaccaggnatgctgaatagcaagtatgtaggtatccactgaagtactccnaanattttttcaaagatgagcatgattttattatagacaatttaaaaatatgngcangcgngnataaang

SEQ ID NO: 5691 - DNA, 588 bp, Homo sapiens
  misc_feature (535)..(535): "n" may be a, t, c, g, other or unknown
  misc_feature (572)..(572): "n" may be a, t, c, g, other or unknown
  misc_feature (578)..(578): "n" may be a, t, c, g, other or unknown
ataatgccatacagatattttaatgctcacaagttatttttcgacggagatcaacattacattaacttgaatttagtttcattattaaattatgaaacaagatacagataaatcttataagcagagttctgattacttaacacagtgaaattgcaattccaagttacagagacattcacataaagatattcttgagctactaaataatggctaaatactgatgacaataagaattaatactttccacttatgacatttgtcaataacaactctgattaggtaaaaaataattaacatgatggtcatattataattctaaataaatacattattatgtttgccacaggagtaggtgtgtatgcgtgtgtgggtatatgtgcatgtgtgtgtattcagatggtactgaactcaagttggcttttaaaaaggaagagatcaggcatattactgtgcacttatgttatcagagtgatttatgtaatgctatgatgtcaaataaaacctagagtctagtcaattagagtaagccgagtcntgaatctggtgaggctggttgggcatgggaaaagggntacctntaccaaaacc

SEQ ID NO: 5692 - DNA, 585 bp, Homo sapiens
  misc_feature (563)..(563): "n" may be a, t, c, g, other or unknown
  misc_feature (569)..(570): "n" may be a, t, c, g, other or unknown
  misc_feature (573)..(573): "n" may be a, t, c, g, other or unknown
gaatttaaagttacaagcatttaatggtttaatcaagcatgtagtttttaccagtatacaaaatgagacttagtacaaaacggtcttcaactgtcacgtcagttgttcctggagtgttttatggggaaaagcaaacttcaccaaacatagagtaccaacattcaagtgctcttttccacaagtttctgattttcaacttaggagagaagaacagcatttaataactgcatcccttgcatatgggatgtatgacaggctatacctgcaagaaatattcaagcatgttgaatcttcatctgaatgatggttttcctttatgccaaaaggccatgtctaaccttataataaatacagcagcatgagactgtacagtggttctcaaagtgtgaccccgaccagcagtgagagcatcatctgggaacttgttaaaaatgtaaattattaggtcctaccttaaacctcctaaatcacaagcttgctttaacaagcaacctgcactttaaaacaaactctctaggtgatctggtgcatgctaaagtttgagcttcttataataaaattgnaacttnnccncaactgggtaat

SEQ ID NO: 5693 - DNA, 590 bp, Homo sapiens
  misc_feature (526)..(526): "n" may be a, t, c, g, other or unknown
  misc_feature (577)..(577): "n" may be a, t, c, g, other or unknown
gttgggatttcagatagagtttggtttataaaaagcaaacagggccaacgtccacaccaaattcttgatcaggaccaccaatgtcatagggtgcaatatctacaataggtagtctcacagccttgcgtgttcgatattcaaagactgttttgctccattccccagtgtgtttctgtaaaaaaggacaaaatgtacatgatcatgacattacaattacttagacaactctgacttaacaagttaaagaaaacctttttactctaaagaagcattcatcgtgccatgttattattcatgtatatgagacctgctctacttcaaagctgtaatcttcttagttgataaacaatattcttaaacaaatgccttgtaaggattcttagtaaatgcagcagggcaattgctatagaccagtgcatcctcaggaggcctggttccggccattgctaacaggtttataaatggtttattaaaaagaggataggtctctcacaatgaaattcgctaatattagaagtgagttttncctttggtccaaataaccataaccaaatggagagaattggaaggttacccnttaaaattttaaa

SEQ ID NO: 5694 - DNA, 584 bp, Homo sapiens
  misc_feature (452)..(452): "n" may be a, t, c, g, other or unknown
  misc_feature (458)..(458): "n" may be a, t, c, g, other or unknown
  misc_feature (514)..(514): "n" may be a, t, c, g, other or unknown
  misc_feature (532)..(532): "n" may be a, t, c, g, other or unknown
  misc_feature (552)..(552): "n" may be a, t, c, g, other or unknown
  misc_feature (556)..(556): "n" may be a, t, c, g, other or unknown
  misc_feature (564)..(564): "n" may be a, t, c, g, other or unknown
  misc_feature (581)..(581): "n" may be a, t, c, g, other or unknown
  misc_feature (583)..(583): "n" may be a, t, c, g, other or unknown
agtagagatggggttttgccatgttggccaggctggtctcaaactcctgacctcaagtgctccgcctgcctcagcctcccaaagtgctgggattacaggtgtgagctaccacacctggctaatttacgccaacattttacaaccctttcaaagcatttgctattgaaagaaggcattcagtggcaaaattctgacattccagtaaatattactacccaaagaaaagaaaattcttaatttcaagatcaaagtgccaatgcttttcttttctaaataagagtaaagaaaaagaaggcccttattacatctctagcaaataactctatctccaaagacttaggtaagaaattacaattcttcagaaaaatattctggcactgtttaaatatctactagttttctaatccaaaaggttaacactttcaaagagggcactattattcaattaaagntactgnttctcaggaatttgagaagatatatctttttttttttttttttcaatttatagcangaaaaaagctggggttanccccaagaatacggcttacnttcnccaaaagnaaattggggccagaaangna

SEQ ID NO: 5695 - DNA, 578 bp, Homo sapiens
  misc_feature (516)..(516): "n" may be a, t, c, g, other or unknown
acgacttttgcaggagtgttttgaagggagaggttcttgactacaaagggtgcttccaactggggtcactatagttaaaacataccaaggggaatactttcaggcacttgataaaatgatgaatgggcttggaatggaatgaggccagatggtagttatgggaggggggcgccatggagggctggggactggggaaagttttaagtggcgggatcctcaggctcggactgtcactgaaagaacctccctgggaagcgctggaaaatgggaaccgcagtcctcctgcaatgggacagaatttttctcaaatgcattgtctcacctgcatttctttcatagtcaccgatgaatcgtttggtgaggaaccggaccaccagtgctgcacgtcagaaaaaagaacgtcaaagtgttaaccttggaagttagattgttctccaccccaccccctgcctggaaaacagttctcccaaagaaagccatagatggccccaagtgaaattcctaccctgtacttcntgcccttcttttcagacaaaaggaggggctagaaggcatcgggaatatggctttggccactg

SEQ ID NO: 5696 - DNA, 544 bp, Homo sapiens
  misc_feature (478)..(478): "n" may be a, t, c, g, other or unknown
  misc_feature (492)..(492): "n" may be a, t, c, g, other or unknown
  misc_feature (531)..(532): "n" may be a, t, c, g, other or unknown
  misc_feature (536)..(536): "n" may be a, t, c, g, other or unknown
  misc_feature (539)..(539): "n" may be a, t, c, g, other or unknown
  misc_feature (542)..(542): "n" may be a, t, c, g, other or unknown
cttgttacatgtatctccttgtactctgccttttctttttttgttgttttgttttgttttgtttctgagatagtctcgctctgtcacccaggctggagtgcagtggcgcgatctcagctcaccacaacctccacctcctgggttcaagcaagtctcgtgcctcagcctcctgagtagctgggattacaggcgtgcactaccatgcccggctaatttttttatttttagtagagacagggtttcgccttgttggccaggctggtcttgaactcctgacctcaagtgatccacctgcctcagccccccaaagtgctgggattacaggtgtgaggcaccataacctacctaagttctttttagaataaggtaaggggtagagggtggaagagtggatggatggatggacggcagatgggcggatggacagatgggtggatggaggaatggatggacagacagacaaagggactgaagctgnaccaagcctttcanttcacctaaccgggactgagctcaaacaaaggccaccanngacncanaancc

SEQ ID NO: 5697 - DNA, 566 bp, Homo sapiens
  misc_feature (461)..(461): "n" may be a, t, c, g, other or unknown
  misc_feature (489)..(489): "n" may be a, t, c, g, other or unknown
  misc_feature (524)..(524): "n" may be a, t, c, g, other or unknown
  misc_feature (530)..(530): "n" may be a, t, c, g, other or unknown
  misc_feature (532)..(532): "n" may be a, t, c, g, other or unknown
  misc_feature (547)..(547): "n" may be a, t, c, g, other or unknown
  misc_feature (560)..(560): "n" may be a, t, c, g, other or unknown
  misc_feature (566)..(566): "n" may be a, t, c, g, other or unknown
gtgtgaacaagccttcattgtgcaggcgtgagcccaacaaacaaacaaacaccaggtctgcgctggccgaagacgaagcgtcctccctggaggtgggaacaagtcacctctgaccacacctcctctgacgccatcacctcctcctggccccacccaagggctcgacacaagccccaaggtcggggggagaggggcggggcggaaccgagggcggaggccaaggtgggattccaggaaggccttccgaaggatggaggtgggtcctgtccctccaggtagcttgtgggtgtggacagcaggacttgctggctcagtgtgggcacaaggacactgtgccactggttgagtgagtggtgagggattggaggtggctcccagaggcctccatctgcatggccctggccctgtggctccagcaggctgccctggctgtgggtagcccaggagccacatgcgcttantggggccgcttctggggcaagggctttnacaggaaagcatgagccactgagcccgctgggganggccangncaggccgggagcttngggtgcaattttntcctgn

SEQ ID NO: 5698 - DNA, 499 bp, Homo sapiens
  misc_feature (410)..(410): "n" may be a, t, c, g, other or unknown
  misc_feature (420)..(420): "n" may be a, t, c, g, other or unknown
  misc_feature (433)..(433): "n" may be a, t, c, g, other or unknown
  misc_feature (469)..(469): "n" may be a, t, c, g, other or unknown
  misc_feature (474)..(474): "n" may be a, t, c, g, other or unknown
  misc_feature (483)..(483): "n" may be a, t, c, g, other or unknown
  misc_feature (485)..(485): "n" may be a, t, c, g, other or unknown
aaaaaaagatatatggcattactttggtctccaaaacagttgccagtttgaactttattctgccagcaagtatttggtttggctcagcagggctcaagttgaaaaaatatttgcccattccaaaaagatttaacgagctttgctgcaaatgctggtgccatttggcacatcacagggactgtggcacagcaaagagaactctctcaaccacagattttatttgcccaaggtagccagcactgggagctcagttgattcctcgggtcaagaagctgcaagtcaaatgcgtgaagtttccaagagaaagtgaccaaagcaggcatgagaaaactcttgctgacattgaaaaggaagtcactgggtctgactccaccctgcacaggaatttgatggctaactttcagaactgncaacaacatncttacaccaaccnttagatccaggctctaaaggtgcaggcagcagaccngattnatctccacntntagcacagctattc

SEQ ID NO: 5699 - DNA, 601 bp, Homo sapiens
  misc_feature (190)..(190): "n" may be a, t, c, g, other or unknown
  misc_feature (399)..(399): "n" may be a, t, c, g, other or unknown
  misc_feature (443)..(443): "n" may be a, t, c, g, other or unknown
  misc_feature (447)..(447): "n" may be a, t, c, g, other or unknown
  misc_feature (460)..(460): "n" may be a, t, c, g, other or unknown
  misc_feature (470)..(470): "n" may be a, t, c, g, other or unknown
  misc_feature (488)..(488): "n" may be a, t, c, g, other or unknown
  misc_feature (511)..(511): "n" may be a, t, c, g, other or unknown
  misc_feature (522)..(522): "n" may be a, t, c, g, other or unknown
  misc_feature (553)..(553): "n" may be a, t, c, g, other or unknown
  misc_feature (571)..(571): "n" may be a, t, c, g, other or unknown
ggataaggctgtgctttattacatgcataattacaaatctgatttctctaatttattctctgaagtagcaccttaacactggctcatctgtctaaaatcaagaacaaagcctagaagaaacacaaaagcaaacttgagacaccctccttatcgctactgcactatgaaatatgaccaaacctttcattgncattaaataccagaaatagtaacattttctgttttgcaaactttagtggggaaggacaactaataagacaggtattggaccagaaatgtacagataagaactttgatttctacacaatatacagggtagtcaagccaaatagtctcatatgaaggaatcagtgacatggaaaggacaaaatatgtggttactgagccattactatgatncacataccccagaaaggattttttctttttcattaaaatgctanaggnggactattcccanggggaaactnttgcgctggcttgattantttaaaggataaaataaaataancccttgggtanccaagtttgggccaaaaaaagaagttcagantttggaaggaccagactntgggtaaaaccgtctaaaatcagggtcccc

SEQ ID NO: 5700 - DNA, 602 bp, Homo sapiens
  misc_feature (427)..(427): "n" may be a, t, c, g, other or unknown
  misc_feature (433)..(433): "n" may be a, t, c, g, other or unknown
  misc_feature (436)..(436): "n" may be a, t, c, g, other or unknown
  misc_feature (448)..(448): "n" may be a, t, c, g, other or unknown
  misc_feature (453)..(453): "n" may be a, t, c, g, other or unknown
  misc_feature (545)..(545): "n" may be a, t, c, g, other or unknown
  misc_feature (547)..(548): "n" may be a, t, c, g, other or unknown
  misc_feature (564)..(564): "n" may be a, t, c, g, other or unknown
  misc_feature (583)..(583): "n" may be a, t, c, g, other or unknown
  misc_feature (591)..(591): "n" may be a, t, c, g, other or unknown
  misc_feature (599)..(599): "n" may be a, t, c, g, other or unknown
gagatggacccttgctctctagcccaggctggagtgcagtggcgcattctcggctcaccacaacctctgccttgtgggttcaagcaattctcctgcctcagcctcacgagtagctgggattacaggcacccgccgccatgcccggctaatttttgcatttttagtagagatgggattttgccatgttggccaggctggtctcaaactcctaacctcaggtgatccacccgcctcggcctcccaaagtcctgggattagaggcgtgagccactgtgcccagccatgaatggattttgatatggacagatgtgtgtcctggaagatgtgctctaatgaggggagtgagccaagcatgaggaggacacgaaagccagaaaacagagattcaaccggaaaggaatggggaattccaaagatgaccccaaanggaagnccnaggcattagctnccaangggcctaagaaagcaactaggcccaaatggaaagaaggttggatacctaaaaaatgggactggaacatcttttacctggtgggactggcccngnnggaaagcaatactganggcttttgggaaagggggnaaggcccnccccaaanaaa

SEQ ID NO: 5701 - DNA, 600 bp, Homo sapiens
  misc_feature (476)..(476): "n" may be a, t, c, g, other or unknown
  misc_feature (511)..(511): "n" may be a, t, c, g, other or unknown
  misc_feature (584)..(584): "n" may be a, t, c, g, other or unknown
  misc_feature (591)..(591): "n" may be a, t, c, g, other or unknown
agagatggtggtctcaccatgttgcccaggctggtctcaaactcctgggatcaagcaatcctcccacctcagcttcccaaattgctgggattataggcataagccaccaaggctggctgtgaacaatattaaacaaaaattatttcctgtggtaacagagattacatcctatgggacagggagacaggcagcagactgataaattaatacaagatctgtctgatggtgataaatattgtgcaggaaaaaaaacgaaggaagaggataagaaacattgaaggactaaaggaacggtcacaaagaagaaaacatttcagaaaagaactgagtaaggaatgaagaagctgagttctgaaagtgtctgcagaaaggcttttcagtagaagtttcagaaagtgtaaaggccctaagataggaaagggtctaattgatgagcactggcctacgaaggatgtgtggccatcagcattagcccntcccaaaatcaaatttaaggagaattagactttantttaaattttgcaaccacaccacaagcatcacaaggttttggaaatgggtaagctgataccaattagtattgnaactatnaatctgctt

SEQ ID NO: 5702 - DNA, 474 bp, Homo sapiens
  misc_feature (8)..(8): "n" may be a, t, c, g, other or unknown
  misc_feature (185)..(185): "n" may be a, t, c, g, other or unknown
  misc_feature (197)..(197): "n" may be a, t, c, g, other or unknown
  misc_feature (372)..(372): "n" may be a, t, c, g, other or unknown
  misc_feature (401)..(401): "n" may be a, t, c, g, other or unknown
  misc_feature (406)..(406): "n" may be a, t, c, g, other or unknown
  misc_feature (426)..(426): "n" may be a, t, c, g, other or unknown
  misc_feature (431)..(431): "n" may be a, t, c, g, other or unknown
  misc_feature (446)..(446): "n" may be a, t, c, g, other or unknown
  misc_feature (453)..(453): "n" may be a, t, c, g, other or unknown
  misc_feature (472)..(472): "n" may be a, t, c, g, other or unknown
gaactgtncaagagttatttatttttccttaatctcaaagctatttttagtaatacaaaaaagccatattaacatttttttccgttagaaaacatgatgtacaaaactttggatgaaaagatacgtcaaatttcatttaatcacttggaggaaaatccaccaactccatcaataccacccaaagngttttaggcagngaataaaatcaaaataatgcatcttaataaattccagctgttaaaagaacaaacttagcaatatataacagtttgctaacaggatttttgactattcactttgggagttatttttaaaaatccacttttttactgagtcttactacataccaggcactgtacttgggccatctanggtaactaagaaaaccgttggttaagatnggaangacccttaaatcagcccttnggttnccaaattcaattttnacctttnaacatcctccaggatcagnaa

SEQ ID NO: 5703 - DNA, 576 bp, Homo sapiens
  misc_feature (434)..(434): "n" may be a, t, c, g, other or unknown
  misc_feature (447)..(447): "n" may be a, t, c, g, other or unknown
  misc_feature (484)..(484): "n" may be a, t, c, g, other or unknown
  misc_feature (500)..(500): "n" may be a, t, c, g, other or unknown
  misc_feature (505)..(505): "n" may be a, t, c, g, other or unknown
  misc_feature (523)..(523): "n" may be a, t, c, g, other or unknown
  misc_feature (531)..(531): "n" may be a, t, c, g, other or unknown
  misc_feature (535)..(535): "n" may be a, t, c, g, other or unknown
  misc_feature (550)..(550): "n" may be a, t, c, g, other or unknown
gagatggagtttcgttcttgtcacccaggctggagtgcagtggtgtgatctcggctcactacaacctccacctcctgggttcaagcgattttcctgcctcagcctccccagtagctgggataacaggctcttgccacagggcccagctaatttctgtatttttagtagagacggggtttcaccatgttggccaggctggtcttgaactcctgacctcaggtgatccacccaccttcacctcccaaagtgctgggattacaggcatgagccactgggcccagcctaaatagtatatatttttaaatatcctttcagaaaaggccgcttatccagaactattctgaagacagtaaagaactgctgaagaggaagaaaaaactggctgtgcaatagcagaacctcctccgaaccaaagcctctggagaagaaccagntgcagtggaggcnttactcacccatgttaaaagcaccggaaccgattaanaatcccaagcttggcnaggantggaacttggaaaagggnccttaggngccnttggaactacccccnttaatttaccggtggaatggaacccg

SEQ ID NO: 5704 - DNA, 584 bp, Homo sapiens
  misc_feature (435)..(435): "n" may be a, t, c, g, other or unknown
  misc_feature (460)..(460): "n" may be a, t, c, g, other or unknown
  misc_feature (479)..(479): "n" may be a, t, c, g, other or unknown
  misc_feature (503)..(503): "n" may be a, t, c, g, other or unknown
  misc_feature (517)..(517): "n" may be a, t, c, g, other or unknown
  misc_feature (520)..(520): "n" may be a, t, c, g, other or unknown
  misc_feature (537)..(537): "n" may be a, t, c, g, other or unknown
  misc_feature (564)..(565): "n" may be a, t, c, g, other or unknown
  misc_feature (582)..(582): "n" may be a, t, c, g, other or unknown
ggtaaagaaaagtgctgttttttatttgttcttgaatgtataggttcttttaaaatcagctatacttccctttaaaatatcctccctcatgccccaaccgcttagaatccaatagccactcctaacaagggcctaggaggaactcatcctacatagccaagaaaggggtacagcttgaggaatgggcatatggctcaggaagcagcaccagctgataagaactttccccaaagcagctctgtttggcttgtgagtctcctttccctgccctggtctggactcccccagctgtgtcccacccctggaattcccctgttccttatgtggcctgatcttgagagttaaaatcataattaacatctttacagctggagagctgagagatcactggtctcaagccattctcccaccacaactttatagatgaggaactgnatcccaaggttccccagctcatatnggaaagagccaaaaatttnggggtcaaactcttcaaatcaganatctttctaagganaancctccttaacctccagnaagccacccatactggcttcaactccnnaacaactggggccagcngg

SEQ ID NO: 5705 - DNA, 598 bp, Homo sapiens
  misc_feature (409)..(409): "n" may be a, t, c, g, other or unknown
  misc_feature (414)..(414): "n" may be a, t, c, g, other or unknown
  misc_feature (424)..(424): "n" may be a, t, c, g, other or unknown
  misc_feature (446)..(446): "n" may be a, t, c, g, other or unknown
  misc_feature (465)..(465): "n" may be a, t, c, g, other or unknown
  misc_feature (506)..(506): "n" may be a, t, c, g, other or unknown
  misc_feature (515)..(515): "n" may be a, t, c, g, other or unknown
  misc_feature (529)..(529): "n" may be a, t, c, g, other or unknown
  misc_feature (540)..(540): "n" may be a, t, c, g, other or unknown
  misc_feature (543)..(543): "n" may be a, t, c, g, other or unknown
  misc_feature (574)..(574): "n" may be a, t, c, g, other or unknown
  misc_feature (578)..(578): "n" may be a, t, c, g, other or unknown
atacacaaaaagatttgtgaacttgaacaaggcaagagatacaatctaaactacaaagagaacaaaagctaacccctaccttggcccccggagtaagagatatcattctgaggaacaccaagtggaagcctctaaaactgcccccctccccagccaaactctatgatcaagatagtaaatgaaaaacaatattgtgggaggggtagtgaggtttataagatataaaaaagtaaaatatatttcatatcttgtaaaccctactatacatattagtgcagggagccaaaggcccatgggacatgacaaactcagcattccgctggaggctatatgatcaaacagcaaactgtttatcatgaatgcaggatgtgggcaaactcacactggcctgccaccattgccacagttnccatnttaccagggnttttccctggacaaggtccttnggacttaactgggactgcntgggaaggatttccccttcttgatccccggttttccctggngggatcccntaaggttaccaggnaggcctttttnaangaacctttttacctttttcaggcctaagggntttnttccgggggggtctgggaag

SEQ ID NO: 5706 - DNA, 462 bp, Homo sapiens
  misc_feature (339)..(339): "n" may be a, t, c, g, other or unknown
  misc_feature (398)..(398): "n" may be a, t, c, g, other or unknown
  misc_feature (410)..(410): "n" may be a, t, c, g, other or unknown
  misc_feature (432)..(432): "n" may be a, t, c, g, other or unknown
  misc_feature (436)..(436): "n" may be a, t, c, g, other or unknown
  misc_feature (438)..(438): "n" may be a, t, c, g, other or unknown
  misc_feature (447)..(447): "n" may be a, t, c, g, other or unknown
  misc_feature (453)..(453): "n" may be a, t, c, g, other or unknown
gttgttgtttatttgttttgagacagagtctcactctattgcccaggctggagtgcaatggcacgatcttggcccactgtaacctccacctgccaggttcaagtgattctcctgcctcagcctcctgagtagctaagggattacaggcgtgagccaccatgtcaagctaatttttttgtatttttagtagagacggggtttcaccatgttggccaggctggtctcgaattcctggcctcaagcgatccacctgccttggcctcctaaagtgctggaattacaggcatgagccaccccgcctggctgagccagctgcttctgactcaaagaaaggagccnacagtaggccaaggaaagaacacaagcccgtgaatggggcccttccacaagaatactgncagaacccttcnggctttccactacattatgctnaaantnggatgggantggtangaaccaaaa

SEQ ID NO: 5707 - DNA, 566 bp, Homo sapiens
  misc_feature (444)..(444): "n" may be a, t, c, g, other or unknown
  misc_feature (471)..(471): "n" may be a, t, c, g, other or unknown
  misc_feature (513)..(513): "n" may be a, t, c, g, other or unknown
  misc_feature (543)..(543): "n" may be a, t, c, g, other or unknown
  misc_feature (552)..(552): "n" may be a, t, c, g, other or unknown
  misc_feature (554)..(554): "n" may be a, t, c, g, other or unknown
aagacgagtctcgctcttgttaacagcccaggctgaagtctggagtgcagtgatgtgatctcggctcactgcaacctccgcctcctgggttccagcgattctcctgcgtcagcctcccgagtagcagggattagaggcttccaccaccacacccagctaatttttgtatttttagtagagatagtgtttctccatgttggccaggctggtctcccactcctgacctcaggtgatccgcccgcctcagccttccaaagtgctgggattacaggcacgaaccaccgcgaccgcacccagccaggatttcttgatacactacaaaaaggggatgtcaacttatgaataaaagggaatggggcttttggtttcagattaggccagacaggttgatgatgtcaggaggtgtccatgaagagttaaatggaattttacatatcttattgnatttaatatgctcacatattctattgnatttaattttcacgacaatcaggtaagaattaggataagtantggatcttcattcacaaatgatacccgaanttcagagangngaaattccttgc

SEQ ID NO: 5708 - DNA, 565 bp, Homo sapiens
  misc_feature (3)..(3): "n" may be a, t, c, g, other or unknown
  misc_feature (295)..(295): "n" may be a, t, c, g, other or unknown
  misc_feature (503)..(503): "n" may be a, t, c, g, other or unknown
  misc_feature (558)..(558): "n" may be a, t, c, g, other or unknown
canggaaagccatgtagttttttaagtaacatattgctggtagtaaaaatgctatgacagacacgacttcaaattttaagaaacaaaatggactgttcatacttcggcttcagctactgcccaaagcagctgtgatatatcttgcaaagaaaagagctaaaatttctgttgataataaagttgtttgtaaactgatgctaaaatatattccaattgtcttatttttagtgctggtatgatttactaacttctgatagttttatatgcattgaataatgtgatattcttaaaatancagatttattcaagaatatttaacatcaaagttgggctttcaaataaatattttacctcggttagtttttgaacaaatgttgcaggcagaagagtggacttgattcctttagataaataaacagcctacttaatttccatgcaaataacaacttaaacattattccatgctcaacagtaatgtgggggaaaggttaaaaaggcaggtnctcatgatggggaacttccttacatatatccttaggcagattctttctttaccgnaaggtct

SEQ ID NO: 5709 - DNA, 558 bp, Homo sapiens
  misc_feature (524)..(524): "n" may be a, t, c, g, other or unknown
  misc_feature (537)..(537): "n" may be a, t, c, g, other or unknown
  misc_feature (556)..(556): "n" may be a, t, c, g, other or unknown
aaaggctagtcaagtgattgacatttcctaaaaacatttcagtcataccttagaaaacacacataacattcaactggcttttttctaccagaatgtctgatgctaatttggaagaatttcacgtatattctatttgccgaatgtacagcacattcttttcacttcagcactgacaatccaaagtgtttcattaaagaaacaggacttttacctttgttcaagttgtttaatggtagcagccatctgattagtcttctcttccaagcgactgtttagttcacttttctgttttactcctaagtctgaactctgcagcttaaaggcaagttcatgcttgagagctctgaggtcatccaactgctgccgaagagataccagggcatcctgcttctcacagacatccttctccagcatcttcatagccaattccatctcctgccttatgctgatctgcatctccagttctttctcaacatccaatcggaattggggctcttcttttaaagcttcttggtttacttaangctggccttttgnagtctatcttgcttgggancc

SEQ ID NO: 5710 - DNA, 559 bp, Homo sapiens
  misc_feature (375)..(375): "n" may be a, t, c, g, other or unknown
  misc_feature (390)..(390): "n" may be a, t, c, g, other or unknown
  misc_feature (410)..(410): "n" may be a, t, c, g, other or unknown
  misc_feature (425)..(425): "n" may be a, t, c, g, other or unknown
  misc_feature (451)..(451): "n" may be a, t, c, g, other or unknown
  misc_feature (456)..(456): "n" may be a, t, c, g, other or unknown
  misc_feature (474)..(474): "n" may be a, t, c, g, other or unknown
  misc_feature (507)..(507): "n" may be a, t, c, g, other or unknown
  misc_feature (519)..(519): "n" may be a, t, c, g, other or unknown
  misc_feature (548)..(549): "n" may be a, t, c, g, other or unknown
  misc_feature (552)..(552): "n" may be a, t, c, g, other or unknown
acttattagtgctttatgttacatgaaattaagtgcaaaaatacttaaataatgctgtgtgccaggcaccactctcaatggtttgactcactgtactctgcacaatcacccattttccagtgaaggaaatggaggcaccaagggtaaagtagccagcacaagtcagacctcatggcggggccaaggcattctggctccaaaatcccgaatcaaaaagcagaaggtcaaaaaattaaaaacaaagaaacatcacacacggaaggaggagaggccaaagattactccgagggattaaaatctgagttttcctccggtttaccttctacaactccttttactgaccacgcctgacacactgacacatgcattccctgncacagtggcttctgnggcccgcctggctgtactgnacagtgcaacttctnaaggcggagctgcgtggacccctggnccttnttgggccatggctctaantaccccatggttccttccaaaggcaatgggcantggcataggtanccacacgtcccattttttaaaaaacctgnnccntggatgc

SEQ ID NO: 5711 - DNA, 555 bp, Homo sapiens
  misc_feature (471)..(471): "n" may be a, t, c, g, other or unknown
  misc_feature (523)..(523): "n" may be a, t, c, g, other or unknown
  misc_feature (530)..(530): "n" may be a, t, c, g, other or unknown
  misc_feature (553)..(553): "n" may be a, t, c, g, other or unknown
atttttttgaaacagagtctcactctgttgcccaggctggagtgcagtgtcgtgatctcagctcactgcagcccctacctcctgggttcaagcaagtctcctgcctcagtttcccgagtagttgggactacaggcctatggccacctcacctggctaatttttgtatttttagtagagacgtgggttcaccatgttggccaggatggtctcgaactcctgacctcatgatccacccgcctctgcctccccaaagtgctaggattacaggcacgagccaccatgtccagccaattagttggttttaaatatatttaagttaatggacaaaatattctaaaagggcacagttaatgacgcctcttcctagtgaatccgtgttctttatgaggtatcttttatagttgtatctttttttttttctgagatggagtctcgctctactgtagcccaggatggaatgcaataagtgngatcttggctcactggaacccctggcttccgggttcaaggaattttctggcntaaaccnccggggaactgagaattcaggcncc

SEQ ID NO: 5712 - DNA, 338 bp, Homo sapiens
  misc_feature (59)..(59): "n" may be a, t, c, g, other or unknown
  misc_feature (158)..(158): "n" may be a, t, c, g, other or unknown
  misc_feature (328)..(328): "n" may be a, t, c, g, other or unknown
  misc_feature (332)..(334): "n" may be a, t, c, g, other or unknown
  misc_feature (336)..(338): "n" may be a, t, c, g, other or unknown
cttacttttttttttttttaatccaggtacccaattttatcagccaagtttggagtaangggttgatgaatgttgatacagtcatggggtttcatttattcattatgtcttccttcttctgtgggaggcagcgctgagatgataaatgctgggctcanatccagcttgggccactcactcccaagattcatacacaaacagaccagcttgatcagggcccagcagggaggtgaggcttaagcctcctcgctggaggaggagccaataagaagactggcagcttggatagtgagtgtgtgtgtgtgtgtgtgtgtgtgtgtgtgtgtgngtgnnngnnn

SEQ ID NO: 5713 - DNA, 555 bp, Homo sapiens
  misc_feature (58)..(58): "n" may be a, t, c, g, other or unknown
  misc_feature (418)..(418): "n" may be a, t, c, g, other or unknown
  misc_feature (487)..(487): "n" may be a, t, c, g, other or unknown
  misc_feature (491)..(491): "n" may be a, t, c, g, other or unknown
  misc_feature (502)..(502): "n" may be a, t, c, g, other or unknown
  misc_feature (510)..(510): "n" may be a, t, c, g, other or unknown
  misc_feature (538)..(538): "n" may be a, t, c, g, other or unknown
  misc_feature (544)..(544): "n" may be a, t, c, g, other or unknown
  misc_feature (555)..(555): "n" may be a, t, c, g, other or unknown
aagaaggtactactgctgtaagaagttaacaagtaataatttcctatttaacatctgntcataatgacatttccgctgcatttttttccatcaagaataccaaaacagtttcctaatatacagtatttgaaagtgtttgccatattggctcttaaaatgatagactaatttttctcattcaataaaagaaaatttctaataacaaaatacatgtaaagttagaattttataatttccacaaaggaagcagcatttattaaccagagtacttgtttgcaattttttatctgtgaaaatattttaaagctcttacaaaacttaaatttttaaaaaatcagctcaaaaattttttccatgttgttgggcataccactgctgtctctgctttcggttttccaactctgtaagaagggcttgnctgtatgcttcatacattttaacaatctgctccaattctttcatgaagagcactttagcattccctggnatgnatccaggcagncagctggnaagagttccacttcaaaatggggcatanttccangggctcggcgn

SEQ ID NO: 5714 - DNA, 553 bp, Homo sapiens
  misc_feature (54)..(54): "n" may be a, t, c, g, other or unknown
  misc_feature (507)..(507): "n" may be a, t, c, g, other or unknown
  misc_feature (512)..(512): "n" may be a, t, c, g, other or unknown
  misc_feature (515)..(515): "n" may be a, t, c, g, other or unknown
  misc_feature (531)..(531): "n" may be a, t, c, g, other or unknown
  misc_feature (552)..(552): "n" may be a, t, c, g, other or unknown
ctggatgcaaccaatcactctgtttcacgtgacttttatcaccatacaatttgnggcatttcctcattttctacattgtagaatcaagagtgtaaataaatgtatatcgatgtcttcaagaatatatcattcctttttcactagaacccattcaaaatataagtcaagaatcttaatatcaacaaatatatcaagcaaactggaaggcagaataactaccataatttagtataagtacccaaagttttataaatcaaaagccctaatgataaccatttttagaattcaatcatcactgtagaatcagagtctgtaattcttttcttgattagagtggtaggacactgtaatactgttcctccatgtttccatgcatacaatgttatgtgttactctacactgtaaatgcagtattcaaattcacttgagccgtgggcctggaagttagagactagcttttaccttattactttcaatgattttatctggggttagctgacaaatctnttcgnggntgaatccaaattcttnagggtctcctcagggggggcnc

SEQ ID NO: 5715 - DNA, 564 bp, Homo sapiens
  misc_feature (526)..(526): "n" may be a, t, c, g, other or unknown
ggtagagatggggtttcaccatgttggccaggctggtcttggactcctgacctcaagtgatccgcctgccgcagcctcccaaagtgccaggattacaggcatgagccaccaggcccagcctacttcttgaattaaaaaacaaaaaacaaacaaaaaacccaggcagataatgaaatcctgcatacactcaagtctgcatgaagcataaggccaaactggaaagtgggcatttgaacaaccctcttcctgctcccttcccctaactaagatgggcttctgggcctatcaaccattctttggtaaagagcagcaattccccataggctctttaacaacagcattggtgtttgaggttgcatctttaaaacatctatttcaggatttggaagcttctggaaccataactttaacccagccttccataacagtctttttactttctattacagaacatgacactgcaataatagcaatgaacccgcttcaagctttttcactttctggcagaaagcttaaaacacttctncaaatatataaagggggctggaaagcttaatttcctgg

SEQ ID NO: 5716 - DNA, 564 bp, Homo sapiens
  misc_feature (1)..(564): "n" may be a, t, c, g, other or unknown
nnnnnnnnnnnnnnnnnnnnnnnnnnnnnnnnnnnnnnnnnnnnnnnnnnnnnnnnnnnnnnnnnnnnnnnnnnnnnnnnnnnnnnnnnnnnnnnnnnnnnnnnnnnnnnnnnnnnnnnnnnnnnnnnnnnnnnnnnnnnnnnnnnnnnnnnnnnnnnnnnnnnnnnnnnnnnnnnnnnnnnnnnnnnnnnnnnnnnnnnnnnnnnnnnnnnnnnnnnnnnnnnnnnnnnnnnnnnnnnnnnnnnnnnnnnnnnnnnnnnnnnnnnnnnnnnnnnnnnnnnnnnnnnnnnnnnnnnnnnnnnnnnnnnnnnnnnnnnnnnnnnnnnnnnnnnnnnnnnnnnnnnnnnnnnnnnnnnnnnnnnnnnnnnnnnnnnnnnnnnnnnnnnnnnnnnnnnnnnnnnnnnnnnnnnnnnnnnnnnnnnnnnnnnnnnnnnnnnnnnnnnnnnnnnnnnnnnnnnnnnnnnnnnnnnnnnnnnnnnnnnnnnnnnnnnnnnnnnnnnnnnnnnnnnnnnnnnnnnnnnnnnnnnnnnnnnnnnnnnnnnnnnnnnnnnnnnnnnnnnnnnn

SEQ ID NO: 5717 - DNA, 525 bp, Homo sapiens
  misc_feature (106)..(106): "n" may be a, t, c, g, other or unknown
  misc_feature (184)..(184): "n" may be a, t, c, g, other or unknown
  misc_feature (238)..(238): "n" may be a, t, c, g, other or unknown
  misc_feature (244)..(244): "n" may be a, t, c, g, other or unknown
  misc_feature (279)..(279): "n" may be a, t, c, g, other or unknown
  misc_feature (444)..(444): "n" may be a, t, c, g, other or unknown
  misc_feature (453)..(453): "n" may be a, t, c, g, other or unknown
  misc_feature (463)..(463): "n" may be a, t, c, g, other or unknown
  misc_feature (488)..(489): "n" may be a, t, c, g, other or unknown
  misc_feature (500)..(500): "n" may be a, t, c, g, other or unknown
  misc_feature (512)..(512): "n" may be a, t, c, g, other or unknown
cactttgggaaattttttaatcaatcagtttcttaggaacaacacccagtgggcatgatgagaccctcaaagtaggaatgcaggaatgataggcaggtgaggtggntgagctatctgggctgggaggccagcctcctggaatcttaggacaaataaaagggggaaaaatccaacctcacacttnttttgaaggtcggatatgtttacagaaacaatttctgttttggaaaataaatgnatggtncaatttggggctgggggaacaatgacaattgtcanctagagagaggctcatgattctgagataaatgttaagtggagctttttaaaatgctgaaacaaaacattaccttggtactgtctccatcatgagatgtatttgacacatttgaccatgtgtaaaacccccagatttacccaatgccatggatccatgtgcccacnccatgaatncaaacctggnggatatgttccaggaaggaccggcnnagagttcatgngctttacttttnggaaagaaaattt

SEQ ID NO: 5718 - DNA, 540 bp, Homo sapiens
  misc_feature (385)..(385): "n" may be a, t, c, g, other or unknown
  misc_feature (432)..(432): "n" may be a, t, c, g, other or unknown
  misc_feature (459)..(459): "n" may be a, t, c, g, other or unknown
  misc_feature (464)..(464): "n" may be a, t, c, g, other or unknown
  misc_feature (476)..(476): "n" may be a, t, c, g, other or unknown
  misc_feature (479)..(479): "n" may be a, t, c, g, other or unknown
  misc_feature (512)..(512): "n" may be a, t, c, g, other or unknown
  misc_feature (536)..(536): "n" may be a, t, c, g, other or unknown
  misc_feature (539)..(539): "n" may be a, t, c, g, other or unknown
aataaagcagaaatgtatttattaggcacccttgttcctcacagaggagcaagatccaggcctgagcgcctgggaagtctcttgaggttgcaggaatctccagagaaacatgctctgacccttctgctctttcaggatggtctcatagcccacgccccgggtggggtacatgtccccctggtagctttgctctgggctggacttggtcacctgggagacctcggggatgacgtagaagaggacgaaggcccaggcattggcggcgagggcgatggccagcgtggggtcatcccaggtgggactgttgtgctgcttgttgcccgtaagtatacatgacgatccacaccacccatatggcaacggaggtggctgggcctgccagggngaagaggagcctggaaaagtccccttgtcccggggccaggtccttangggccttcccaaatccgaacggctttncttgncaccggttgctnaancccaacacgtaaggggtttttaaaggacctganagttctttgccggcttttcgcggngtng

SEQ ID NO: 5719 - DNA, 561 bp, Homo sapiens
  misc_feature (58)..(58): "n" may be a, t, c, g, other or unknown
  misc_feature (413)..(413): "n" may be a, t, c, g, other or unknown
  misc_feature (467)..(467): "n" may be a, t, c, g, other or unknown
  misc_feature (486)..(486): "n" may be a, t, c, g, other or unknown
  misc_feature (512)..(512): "n" may be a, t, c, g, other or unknown
  misc_feature (516)..(516): "n" may be a, t, c, g, other or unknown
  misc_feature (525)..(525): "n" may be a, t, c, g, other or unknown
  misc_feature (532)..(532): "n" may be a, t, c, g, other or unknown
  misc_feature (534)..(534): "n" may be a, t, c, g, other or unknown
aacagaaattactgtaactgttgaattatctgggagatagacacagccctgtccttgnggtctacgaacattgggaaacacaagtaacaatttcaagcataacctctggtataaacaagggaaacaacaaaagttcatgggcactcatcacaaaaagactaataaaatctaagacctagtaattccttatggagtaagaagccagaaataataaaagaactgttttaatggaaagataaattcacgtgtcagaacctagagaagcaacagacaagtctgaacaggaaggcagtaagggtatgaatcattttaatgcgttctaaactgaacttatgggcattaaaaagctattgaagggttttagaagagttcctggttaagaaagaactcttatgagagtaatggggaagaangcttgagagcaaaaaacttttaaggaaggcttttgaggttgagaagacaatagnggtctgggttggacccggngaaactggttaggatcccgactttanggangtagaaccnttaaggngngggaggatgaatgacgagttaagcctg

SEQ ID NO: 5720 - DNA, 406 bp, Homo sapiens
  misc_feature (4)..(4): "n" may be a, t, c, g, other or unknown
  misc_feature (201)..(201): "n" may be a, t, c, g, other or unknown
  misc_feature (256)..(256): "n" may be a, t, c, g, other or unknown
  misc_feature (276)..(276): "n" may be a, t, c, g, other or unknown
  misc_feature (333)..(333): "n" may be a, t, c, g, other or unknown
  misc_feature (347)..(347): "n" may be a, t, c, g, other or unknown
  misc_feature (353)..(353): "n" may be a, t, c, g, other or unknown
  misc_feature (359)..(359): "n" may be a, t, c, g, other or unknown
  misc_feature (391)..(391): "n" may be a, t, c, g, other or unknown
  misc_feature (397)..(397): "n" may be a, t, c, g, other or unknown
  misc_feature (404)..(404): "n" may be a, t, c, g, other or unknown
ctgntaataagaagacagctttattttctcaattagttcacgtatatacatggctgaaatttacttattgctacaattctattcttcttcctttttttttgagatggagtcttgctctgttgcccaggctggggtgcagtggcacgatctcggctcactgcaacctccgccacctggattcaagcaattctcctgcctganactcccgagtagccgggaccacaggcgcatgccaccatgcccggccaatctttgnattttcagtagagacagggnttcaccatgttggccaggctggtctcgaacttctgacctcaagtgatcccgccccgntggcctcccaaagngctggnattacnggcgtgagccactgggcccagccctattcttnattttngacatgnaa

SEQ ID NO: 5721 - DNA, 248 bp, Homo sapiens
  misc_feature (103)..(103): "n" may be a, t, c, g, other or unknown
  misc_feature (219)..(219): "n" may be a, t, c, g, other or unknown
  misc_feature (227)..(228): "n" may be a, t, c, g, other or unknown
  misc_feature (234)..(234): "n" may be a, t, c, g, other or unknown
  misc_feature (243)..(244): "n" may be a, t, c, g, other or unknown
  misc_feature (246)..(246): "n" may be a, t, c, g, other or unknown
gaccaaaaaaggcaactatatttaaagtaaatgtatgtgattcttgtcacaacaaatatttgcattttctcagcggcagctgcggcacctgggtggaagccgngattgaggtgcccgtccatctccagcttcaccccgttcaggtggtctgggggcaggatctcattctcctccctgttggctactcatttccagcgaagtttaatctatttttaatantcgttcanntttcanggaaatggnngngc

SEQ ID NO: 5722 - DNA, 523 bp, Homo sapiens
  misc_feature (425)..(425): "n" may be a, t, c, g, other or unknown
  misc_feature (475)..(475): "n" may be a, t, c, g, other or unknown
  misc_feature (481)..(481): "n" may be a, t, c, g, other or unknown
  misc_feature (501)..(501): "n" may be a, t, c, g, other or unknown
  misc_feature (511)..(511): "n" may be a, t, c, g, other or unknown
  misc_feature (516)..(517): "n" may be a, t, c, g, other or unknown
aatagaatttcattttaataattaaagtttatcgcttccaaaaaacagcactttaattacattcaagttgtattcattttaaataccaacaaacccatcatttacatatagagctagatattacaaaacagatggaaatttaaacaagttttttttttaagtccttccaaatttagaacattgtgaactattaagtacatgcctaaaaaatgtacacattatcagggaaacacaagttgctctaataggaaaagagccataatacacatacagtggaatataattcaaataggttcaatttacaggtatgtcttaaagtcaagaaaaccccaaagctaataactagaactatagggcaaaatcatagctgactttctaaactaatgcaccactatataatgcttttccccagagaaaggtagaanggtctcaagatttatggtggccccatggatttttcacggggtctcaaatntaaaanccagagttttctttttggcnttaaattacnctcanngtttgc

SEQ ID NO: 5723 - DNA, 484 bp, Homo sapiens
  misc_feature (116)..(116): "n" may be a, t, c, g, other or unknown
  misc_feature (223)..(223): "n" may be a, t, c, g, other or unknown
  misc_feature (243)..(243): "n" may be a, t, c, g, other or unknown
  misc_feature (295)..(295): "n" may be a, t, c, g, other or unknown
  misc_feature (346)..(346): "n" may be a, t, c, g, other or unknown
  misc_feature (356)..(356): "n" may be a, t, c, g, other or unknown
  misc_feature (409)..(409): "n" may be a, t, c, g, other or unknown
  misc_feature (413)..(413): "n" may be a, t, c, g, other or unknown
  misc_feature (429)..(429): "n" may be a, t, c, g, other or unknown
  misc_feature (437)..(437): "n" may be a, t, c, g, other or unknown
  misc_feature (451)..(451): "n" may be a, t, c, g, other or unknown
  misc_feature (455)..(455): "n" may be a, t, c, g, other or unknown
  misc_feature (480)..(480): "n" may be a, t, c, g, other or unknown
ccaccatttgggacgtctttattatggatccgtccactcttccaggagcagtagcccttctaggaaaggggtgggaagaaaaccagcctacccttcaagctgacttaggatgcaanggtacagacaccagccttgggggagggttctccatccacactcctaccccaaacgggctttgtgctgctcaatggggattcggggccatcagaagcgatgccgcggntgggggccaaagtgcatggncaggttgtgctccaggggcatgtggatgggaccgaagtcatagttgacccgnacgttgggcagagggggcacgtacggggctgggataggccccatgttgagngggaagttgntgaacacagggccgcacgggaaggcagcggaagggtgggtgccccaaagcatngggngggatctgtgcttgtngcaggttntgggaacgggcctngganggccttcacctttggaactttttcncaag

SEQ ID NO: 5724 - DNA, 566 bp, Homo sapiens
  misc_feature (413)..(413): "n" may be a, t, c, g, other or unknown
  misc_feature (427)..(427): "n" may be a, t, c, g, other or unknown
  misc_feature (434)..(434): "n" may be a, t, c, g, other or unknown
  misc_feature (475)..(475): "n" may be a, t, c, g, other or unknown
  misc_feature (503)..(503): "n" may be a, t, c, g, other or unknown
  misc_feature (522)..(522): "n" may be a, t, c, g, other or unknown
  misc_feature (542)..(542): "n" may be a, t, c, g, other or unknown
  misc_feature (544)..(544): "n" may be a, t, c, g, other or unknown
  misc_feature (558)..(559): "n" may be a, t, c, g, other or unknown
aacttctaaaactcagtcattagtgatcctaccaaaaaagttttaaaataaatgtgtatactttttggacaaatgtgtaaattaggtataaagatgaatgagaatttacagaattgaaaataaataataacagagagaaatgaagaattattctgccaatactatgatttgaattattagcaaggcaaaaaacatactattcagatccctaaaaaccatatgaagcttctttttaaagtgctcaaacgtcttaatggatttgagttttaaaaccagatcttaattttttttggtttattacaaaaattatacacataaattataaaatgatcaaatacaagacagtttttcaatcccacgccactgaagcaagaaccattaacaatttgatggttctttctaggcatttttgnggaatataaaatgnataatgnattatttttaagacatggcttttggaaaaatgctttaatantatatcatgggaaatctttcacctcttngggactgggcagacctttnaagctggagaaaaattttcngngaccaaaaaaaaanngctttat

SEQ ID NO: 5725 - DNA, 573 bp, Homo sapiens
  misc_feature (37)..(37): "n" may be a, t, c, g, other or unknown
  misc_feature (82)..(82): "n" may be a, t, c, g, other or unknown
  misc_feature (515)..(515): "n" may be a, t, c, g, other or unknown
  misc_feature (529)..(529): "n" may be a, t, c, g, other or unknown
  misc_feature (548)..(548): "n" may be a, t, c, g, other or unknown
  misc_feature (557)..(557): "n" may be a, t, c, g, other or unknown
cataaaatgattttaatagaaaagtacaagacatgancaaaaataaataatctttatctcatttctagcccagcaaattgtncactgcatataaaaatggtctaagatgcaattttcctccattccttttttgcttttaaaatactgagacagcattttagttcaatattctaggttcaaactgatacattaaaaaaaaatcataccaacctttaatcattctacatccattttttaaagttagctaacaagatgatgtttcactaaaataaaatatccaatcatcagattaaagtgtaaagtttgtgtgaacagggaaattagatcatttctctaagttttaattcctatgttctgaatgtttcttgaattaaaaattcattcatcatcttactttcaaaccacggcatctctcttttaccattccacagaggaggggaaaaggactagaaaatacctttaaaaaaattaaatattttaaaaggatagcttacaggggccatggaggaatttanaacctggggccttngggcctatttgcattaaanccaggcttnaggttttacctccctt

SEQ ID NO: 5726 - DNA, 530 bp, Homo sapiens
  misc_feature (367)..(367): "n" may be a, t, c, g, other or unknown
  misc_feature (393)..(393): "n" may be a, t, c, g, other or unknown
  misc_feature (402)..(402): "n" may be a, t, c, g, other or unknown
  misc_feature (432)..(432): "n" may be a, t, c, g, other or unknown
  misc_feature (459)..(459): "n" may be a, t, c, g, other or unknown
  misc_feature (492)..(492): "n" may be a, t, c, g, other or unknown
  misc_feature (494)..(494): "n" may be a, t, c, g, other or unknown
  misc_feature (514)..(514): "n" may be a, t, c, g, other or unknown
  misc_feature (521)..(521): "n" may be a, t, c, g, other or unknown
  misc_feature (528)..(528): "n" may be a, t, c, g, other or unknown
gcattgccatgattttattattagtgtccaaaatgggactcccaagtaataaatgatttattccagccacagccaaaaaagactttgcctggctaaaagagtctctctctaagtatgtaatatacaagaaatacaattcaaagagatgttcctataagtacattttttacacggcatatatttaaaaaggaggccccttttaatataaaattccggttatataccaatatggttaattagcatttacactatagtttgaacgtattttaaatagcatgatgtgtatacaatgtctcccgcgcccattggcaaccagggtcgtgggaagcttggtgaggagttaaccaggtcctgtggtttaagcagnggagcacccgggaattcctgcccccnttttggttncacaattgcctccattctttccgcctttcntggttttctccaaaaccacctggatanggggggaaggccctggatttctggaggggggcntntcaatcaaggactgggtttngttttgnccttttnga

SEQ ID NO: 5727 - DNA, 545 bp, Homo sapiens
  misc_feature (342)..(342): "n" may be a, t, c, g, other or unknown
  misc_feature (383)..(383): "n" may be a, t, c, g, other or unknown
  misc_feature (412)..(412): "n" may be a, t, c, g, other or unknown
  misc_feature (463)..(463): "n" may be a, t, c, g, other or unknown
  misc_feature (487)..(487): "n" may be a, t, c, g, other or unknown
  misc_feature (492)..(492): "n" may be a, t, c, g, other or unknown
  misc_feature (500)..(500): "n" may be a, t, c, g, other or unknown
  misc_feature (516)..(516): "n" may be a, t, c, g, other or unknown
  misc_feature (533)..(533): "n" may be a, t, c, g, other or unknown
  misc_feature (543)..(543): "n" may be a, t, c, g, other or unknown
gatttagttacatcattcttttcttctctactttctcttcctgaaaaactcttccttacataaacaaattcatactggagatatatgtcagaaaacattcagcctgagtaaactgaacgctctgtacagaaaacaacgaacaaaacagaacttcaacagtaacactggcgtggcataatataagccacgcaaaatgcttccaaatccattatctcttctgagtttcatcttgtgaggtttgaagggtacactgattgtacttaaaaacctaaggcacagagaaggttaaataacatgcctgagttactaaaaagagaatccagatctagttcaaaatctggncttcttttcactataccaataacatctgactgggaggcagnatgagaagagcaatggagtaagcactaanggtaatttcaggggccttaaaccccctaatatattatggaccactcttcanttgaaaaaaggttggcatttcttnaagcnttaaatcnccattatatatttttnaagggtttcccaggtcntttctacttntt

SEQ ID NO: 5728 - DNA, 513 bp, Homo sapiens
  misc_feature (387)..(387): "n" may be a, t, c, g, other or unknown
  misc_feature (438)..(438): "n" may be a, t, c, g, other or unknown
  misc_feature (454)..(454): "n" may be a, t, c, g, other or unknown
  misc_feature (456)..(456): "n" may be a, t, c, g, other or unknown
  misc_feature (459)..(459): "n" may be a, t, c, g, other or unknown
  misc_feature (463)..(463): "n" may be a, t, c, g, other or unknown
  misc_feature (487)..(487): "n" may be a, t, c, g, other or unknown
  misc_feature (497)..(497): "n" may be a, t, c, g, other or unknown
agtagagacggagttttaccatgttgtccaggctggtctcaaactcctgacctcaggtgatccgcccacctcagcatcccaaagtgtgggattacaggcacgaggcactgtgctggccaactctctttctctctctcttttaatctctttattatggaaattcagaaactatacacaacccagaatagtctatgaactccctaaagactcatcaaccagcttcaacaatgatcatctttctgcccatctcattcctctcctttttttttttttttttttttgagatggagtctcgctttgtcacccaggctggagtgcaatggcacaatctcaagctcactgcaacctctgcctcctgggtacaagcgattctcctgccttagcctnccgagtaagctgggattacaggcgcatgcccccgtgcccagctaatttttngatttttttttagtananacngggnttcaccatgcgggcaaggctggcntggaactccnggcctttgaactggca

SEQ ID NO: 5729 - DNA, 250 bp, Homo sapiens
  misc_feature (8)..(8): "n" may be a, t, c, g, other or unknown
  misc_feature (48)..(48): "n" may be a, t, c, g, other or unknown
  misc_feature (96)..(96): "n" may be a, t, c, g, other or unknown
  misc_feature (104)..(104): "n" may be a, t, c, g, other or unknown
  misc_feature (152)..(152): "n" may be a, t, c, g, other or unknown
  misc_feature (159)..(159): "n" may be a, t, c, g, other or unknown
  misc_feature (164)..(164): "n" may be a, t, c, g, other or unknown
  misc_feature (186)..(186): "n" may be a, t, c, g, other or unknown
  misc_feature (188)..(188): "n" may be a, t, c, g, other or unknown
  misc_feature (206)..(206): "n" may be a, t, c, g, other or unknown
  misc_feature (245)..(245): "n" may be a, t, c, g, other or unknown
cgagcaanaatctgttaacagttttattttttttatgttaaataccangggacaggattgtaaggatgaaaaactcagtcaacaactgcctcacangggataanaaaaattctgccatgatattagcaaaggtaaaggaggaaaaatttacnctgtaanaggcnccatttccccaaggaatacctntnggcatttcctgaatgagngggattagcaatctaaataaatcatatttcaagaggtancagca

SEQ ID NO: 5730 - DNA, 569 bp, Homo sapiens
  misc_feature (503)..(503): "n" may be a, t, c, g, other or unknown
  misc_feature (523)..(523): "n" may be a, t, c, g, other or unknown
  misc_feature (534)..(534): "n" may be a, t, c, g, other or unknown
  misc_feature (558)..(558): "n" may be a, t, c, g, other or unknown
gccagataatctttattttacacatttgcaacacggcaagagaattcaccccgtacatcaccatgatcggatcccccacccattatacgttgtatgtttacataaatactcttcaatgatcattagtgttttaaaaaaaaatactgaaaactccttctgcatcccaatctctaaccaggaaagcaaatgctatttacagacctgcaagccctccctcaaacgaaactatttctggattaaatatgtctgacttcttttgaggtcacacgactaggcaaatgcaatttacgatctgcaaaagctgtttgaagagtcaaagcccccatgtgaacacgatttctggaccctgtaacagtatcttacgtgctccaaaggctgaccttctggaggctcaccgcctcatctggctgcttcctccaaaatccaaaaccttgcctcaaaataaagctgtcctgtgggtgaagttggctggtctggttcattctgaccattctgacttttgnccaaaaagccgtccaactgnagacaccctgntggcagaactccaacaggtccccnaggtacgaggc

SEQ ID NO: 5731 - DNA, 583 bp, Homo sapiens
  misc_feature (407)..(407): "n" may be a, t, c, g, other or unknown
  misc_feature (491)..(491): "n" may be a, t, c, g, other or unknown
  misc_feature (516)..(516): "n" may be a, t, c, g, other or unknown
  misc_feature (521)..(521): "n" may be a, t, c, g, other or unknown
  misc_feature (526)..(526): "n" may be a, t, c, g, other or unknown
  misc_feature (556)..(556): "n" may be a, t, c, g, other or unknown
  misc_feature (569)..(569): "n" may be a, t, c, g, other or unknown
  misc_feature (582)..(582): "n" may be a, t, c, g, other or unknown
cctggacagcatttcattttattatgtaactgtagaaagccttgatcaagataaaaatagggatgacttatcagaaactgaagaattttcttaggaaagcaaagtttactgaaggataccttcattccagccatgatgagcatctgtcttctcaggcaatcatgatgaagctccagggacagtataacccatctctcccactcatccctgagccttggtcctggactgaatgtggttagaggttgtggaaataaaaaaaagaaccaaaataagaacactctccataaaagccaagctcagagactggtcctcttttgcttaggtacaacaggagcaggaaggatcaacattcttgaaagcataccttctattcatttggcttttttgacttggggccgccagtgtanagctgagcactccactgccctttctccactcacaaatgtctgcataggtacacgttccggcactttcaagccttcttccacgtnaacttccctggggcttttcggtggnccatncctgntccttgaaaggtaaaagggtcaaaccttanccaagatcccaanggactccgagatna

SEQ ID NO: 5732 - DNA, 460 bp, Homo sapiens
  misc_feature (307)..(307): "n" may be a, t, c, g, other or unknown
  misc_feature (399)..(399): "n" may be a, t, c, g, other or unknown
  misc_feature (418)..(418): "n" may be a, t, c, g, other or unknown
  misc_feature (425)..(425): "n" may be a, t, c, g, other or unknown
  misc_feature (427)..(427): "n" may be a, t, c, g, other or unknown
  misc_feature (441)..(441): "n" may be a, t, c, g, other or unknown
  misc_feature (443)..(443): "n" may be a, t, c, g, other or unknown
  misc_feature (453)..(453): "n" may be a, t, c, g, other or unknown
aatgttcaaggagcactttaatagtcaacaaattgatgcagttttgtcacaatactttgcataattttatagtaacagtaaaattctgaatcactttatagtaaaagaaaagacacagaggaaaataatttccctgtacaatgaaattttcatacactatatgaagatttcccacatctgtcaagttttggctcagaataaaagatagctaatatatttcactcttttttctggtacttttttttttttttttgagacagtggttcgctctgttgcccaggtcggagtgcaatggcaccatctcggntcactgcaacctctgcctcccaggttcaagcgattctcctgcctcaacctctcaggtagctgggattacaggcgtgcgccaccaaacccagntaattttggatttttagcnaaaccgngnttcaccatgtgggnanggctgggctntaactcc

SEQ ID NO: 5733 - DNA, 564 bp, Homo sapiens
  misc_feature (121)..(121): "n" may be a, t, c, g, other or unknown
  misc_feature (449)..(449): "n" may be a, t, c, g, other or unknown
  misc_feature (494)..(494): "n" may be a, t, c, g, other or unknown
  misc_feature (512)..(512): "n" may be a, t, c, g, other or unknown
  misc_feature (529)..(529): "n" may be a, t, c, g, other or unknown
  misc_feature (540)..(540): "n" may be a, t, c, g, other or unknown
  misc_feature (564)..(564): "n" may be a, t, c, g, other or unknown
aatttttttttttttttttttggcagagtttctgcattcaaattaagtccctcaagggaaggaacgaaaaagagcccagcatttcctaagcttcatctacgtgacagggcatttatttagnggaattacatacaggagggtcttggagattgcctttgcctttcacttgggatgaaaatttcctctgcagcatgcaaaacaggtgagagtgttcctgctgctacagagttcttttgcactaaaagaaaaatcttcctcctctcaaattttgcctaccaactctagcacagtcatctgaggcagcatgaatcaagcccagttttcttcttacagtcacttccttaacagttaaaagaagcatctgtcttcttggacttctctggacctaataccccttataggtcagctatccccagcacaaagagattttcaggaatacctcaacttgntcactcactacatgcctcttacagtctaccaaccatggtacccanaaatggactcagattgcnctaaacatactgcttcncatacctggcnggtaggaatagcctaaaggggtan

SEQ ID NO: 5734 - DNA, 558 bp, Homo sapiens
  misc_feature (416)..(416): "n" may be a, t, c, g, other or unknown
  misc_feature (452)..(452): "n" may be a, t, c, g, other or unknown
  misc_feature (457)..(457): "n" may be a, t, c, g, other or unknown
  misc_feature (468)..(468): "n" may be a, t, c, g, other or unknown
  misc_feature (497)..(497): "n" may be a, t, c, g, other or unknown
  misc_feature (521)..(521): "n" may be a, t, c, g, other or unknown
  misc_feature (531)..(531): "n" may be a, t, c, g, other or unknown
  misc_feature (536)..(536): "n" may be a, t, c, g, other or unknown
gttctagattgttttattcagtaattagctcttaagacccctggaagcctgtgctctacccagacgctaacaacagtctctatccagttgctggttctgggtgacgtgatctccccatcatgatcaacttacttcctgtggcccattagggaagtggtgacctcgggagctatttgcctgttgagtgcacacacctggaaacatactgctctcattttttcatccacatcagtgagaaatgagtggcccgttagcaagatataactatgcaatcatgcaacaaagctgcctaataacatttcatttattacaggactaaaagttcattattgtttgtaaaggatgaattcataacctctgcagagttatagttcatacacagttgatttccatttataaaggcagaaagtccttgntttctctaaatgtcaagctttgactgaaactcccgnttttncagcactggantgtgggccgtatgaaagaaaactttacantagatgggagaaaagggaatagtncttgaaaggnagggnggttttttttttttgacagggc

SEQ ID NO: 5735 - DNA, 564 bp, Homo sapiens
  misc_feature (479)..(479): "n" may be a, t, c, g, other or unknown
  misc_feature (518)..(518): "n" may be a, t, c, g, other or unknown
  misc_feature (521)..(521): "n" may be a, t, c, g, other or unknown
cgactgtaacctgctttattaacacagaaactgcaccacacacatttgaacctcatagccaatgaacagacccagcacttagcaacttctccctcctgcgccccagagaagggagaaaaagagggagcagaggagcaccagctacttcccaaacagcgccacggggaagtcctcgccatcactgttgctgtgctgcagctccccgctctgccccagctctctcccaacatcttccatgagttgctccaggtccaggtcactggaggcttcgtcctcaagggggacacttccagcctcctgggtcaggggttcccggtgtctgggctcttctttcgcagatgaggggcaggcccccttacacgctgataggcccaggttctttggcactgttctaacttcttttccctctgaaaagctggctgccaaggccttgctctggggagctttaaattttttcttaaggctggtttctctccttncttccttttccaactcttcctcttctcctttttctttancangatcctggctggttaaaaccaaaaactggaagcttttttttcc

SEQ ID NO: 5736 - DNA, 571 bp, Homo sapiens
  misc_feature (431)..(431): "n" may be a, t, c, g, other or unknown
  misc_feature (483)..(483): "n" may be a, t, c, g, other or unknown
  misc_feature (500)..(500): "n" may be a, t, c, g, other or unknown
  misc_feature (516)..(516): "n" may be a, t, c, g, other or unknown
  misc_feature (547)..(547): "n" may be a, t, c, g, other or unknown
  misc_feature (553)..(553): "n" may be a, t, c, g, other or unknown
  misc_feature (565)..(565): "n" may be a, t, c, g, other or unknown
acacaaaatactttatcagcagctgttttcatcaaaaaatcaagtcagtttcacagttgaaaaagttacacattaaaatattttacaattcattatatattcaccaggttcccattttctaatgggcttttaatataaagcagaatagaagggaaaatctcaaagttgattactttgacactaagttttacataggacactaagaaccacaaaaagcttaggttctattgtaaaatagcaaccaaattccattcttcttttaaaaatccaattagaaacatcttttttaaaaaaacaaattccacaataagagtaacagatttcaaattaacagtagtctaaaaatcttcaaaataaatggttttgtatagctgagaatatggtagaaagtgaaagcataattttccaacagtcatttcttactacagtgngtttaaaattatttttattacttttagactttttctcaaaataattattcanggaaatattcttaaggngggccaataaaactgnagaggccataggcaggtacccccatattcanggccanggatggcagctnttgatg

SEQ ID NO: 5737 - DNA, 539 bp, Homo sapiens
  misc_feature (281)..(281): "n" may be a, t, c, g, other or unknown
  misc_feature (408)..(408): "n" may be a, t, c, g, other or unknown
  misc_feature (445)..(446): "n" may be a, t, c, g, other or unknown
  misc_feature (451)..(451): "n" may be a, t, c, g, other or unknown
  misc_feature (479)..(479): "n" may be a, t, c, g, other or unknown
  misc_feature (510)..(510): "n" may be a, t, c, g, other or unknown
  misc_feature (517)..(517): "n" may be a, t, c, g, other or unknown
  misc_feature (534)..(534): "n" may be a, t, c, g, other or unknown
gacagagtctcactgtgttgcccaggctggagtgcagtggtgcgatctcagctcacttgcaacctccacctcctgggttcaagcgattctcctgcctcagcctcccaagtagctgggactataggtgtgtgccaccaccaccggctaatttttgtatttttagtagagatgaggttacaccatgttggccaggctggtcttgaactcctgacctcaagtgatccacttgcctcagcctcccaaagtgctgggattacaggcatgaaccactgcacctgganagcccactgcttcttgatgcatgttttgaacttcaaatgtggaccagctgacagaggcttcaaggggacctttagctgattctgctcaaggaccagtttattttgttaacatcaccaaatagcctanagtggggatattacctaattttagaagagtcttatgnnctaanaaaagtagatgcatagggtgatcatgcncagaaagattttcatgctcctctttgctctnctttccnttgaacatccagggggnctaat

SEQ ID NO: 5738 - DNA, 567 bp, Homo sapiens
  misc_feature (529)..(529): "n" may be a, t, c, g, other or unknown
  misc_feature (543)..(543): "n" may be a, t, c, g, other or unknown
  misc_feature (552)..(552): "n" may be a, t, c, g, other or unknown
  misc_feature (560)..(560): "n" may be a, t, c, g, other or unknown
  misc_feature (566)..(566): "n" may be a, t, c, g, other or unknown
caaattaattatttctttaattcccaattggtaaatagtgaatggggcagaggagcaaagattttcttttccttcttcctacgctggataaacaagaacagaaaacagccagttatatgtgaccctctaatcttcactcacacatgcttgccttctcacttatgtcataactgcccaatctgaaacagtacatcacagatgacagatgcaaccagagagttcaggacagctgatatcgagatatccagcaaccggccctcgtgcaaaaggaattccgagcggttttcgtccactctggccatggctagcaaagccttggccgccctgcacatcatgtctacgctaggtggttccaggggcgggggctgcatgtgcatgaggttgtgctggctctgctggtactgggccatcgtgaccccatcctctaggaagcttatcaagtttccaatgcttcctttctgcacagctatggcccttgctgctagtgcgtccccttggcaaggttcgataaaagcgccatgggcatttntcgacagactgggntttggggancccaacgnacctant

SEQ ID NO: 5739 - DNA, 504 bp, Homo sapiens
  misc_feature (432)..(432): "n" may be a, t, c, g, other or unknown
  misc_feature (434)..(435): "n" may be a, t, c, g, other or unknown
  misc_feature (438)..(438): "n" may be a, t, c, g, other or unknown
  misc_feature (440)..(440): "n" may be a, t, c, g, other or unknown
  misc_feature (461)..(461): "n" may be a, t, c, g, other or unknown
  misc_feature (465)..(465): "n" may be a, t, c, g, other or unknown
ggttttaaataaaaacactttattgcacaaatcccacaaaggtctcaggccctgggtccaagcccacagccccaacctgtcccctggctctgggcctggtctttggtgcccaccctggcctcacatgccaacgtcttctgtggagtgtgcaggtgtccatgagcgttcctgtgttgggggaagcctgcctgggccacaagtagtcaggcactgtggcagcctcacgatgaagacaggtggggtggagttgggtccccacctgcccaggctcaggggccacaggggtctacacagtcctttctgctttgaaacacgtggtagatgctggtgggagggaacatggcacccggcaccaaacagggagcccactttggatgggcacaccaactggcagcaatgccgggcgaaccccaccatgcacaaggaacttgnanncancnttacatatgagaacccccacngacncggaaccacgaaaggaccccaaggaccacccttgaatgg

SEQ ID NO: 5740 - DNA, 560 bp, Homo sapiens
  misc_feature (502)..(502): "n" may be a, t, c, g, other or unknown
  misc_feature (525)..(525): "n" may be a, t, c, g, other or unknown
  misc_feature (560)..(560): "n" may be a, t, c, g, other or unknown
gccatggctctcaaaccaaagacagtagctaaagttgacctcctctcaacttaaggcaaaaggctggcatacagcacagaagcagaccaccagcttctttactccacatttccaccactggatggcagatattccccctctagaaatgcattaattttatttactaaacagggcagcagttcacaggtctcaagaccggtcactttgtgatgttttgcagccacacaacaggaggctaataattattttaatagccatactgagactcttcagtttattaagaaaaatgtatttcctcaggcattttaaaatatatatacatttaatatttttggagctgtatttgcattggatcataatagattatgtgcacatgtgcaattataaacataatgtgctaccacaggcttcaacaaagagctgttaaagatacttttttcccttctcattaatattaccttagaaaagaatccccatgcttggtttataaaaatctaccttnacttaaacagacaggttagaacngaacatcctatcttaaaggtggttaaaaaaatctn

SEQ ID NO: 5741 - DNA, 557 bp, Homo sapiens
  misc_feature (182)..(182): "n" may be a, t, c, g, other or unknown
  misc_feature (284)..(284): "n" may be a, t, c, g, other or unknown
  misc_feature (403)..(403): "n" may be a, t, c, g, other or unknown
  misc_feature (418)..(418): "n" may be a, t, c, g, other or unknown
  misc_feature (428)..(428): "n" may be a, t, c, g, other or unknown
  misc_feature (444)..(444): "n" may be a, t, c, g, other or unknown
  misc_feature (450)..(450): "n" may be a, t, c, g, other or unknown
  misc_feature (467)..(467): "n" may be a, t, c, g, other or unknown
  misc_feature (517)..(517): "n" may be a, t, c, g, other or unknown
  misc_feature (523)..(523): "n" may be a, t, c, g, other or unknown
  misc_feature (526)..(526): "n" may be a, t, c, g, other or unknown
  misc_feature (544)..(544): "n" may be a, t, c, g, other or unknown
aaatcttgttttacaatagttacaataggaacccatcccaatccttggggctggccatagcgaaaaacactaaatactggcagaaaggaaaacaactgataaatccagagcccaagattacggatttgaaattaatacactaccactaccacctctctccctgaaacagagaccctctctgngtaaaatgaaagagatgaaaggagcttaaaaagctgcttaaaactgcagaagttcctctgggtactgacctatctggttgggcctaccttttcagggactgngtccatgaccaggtctccatacatgttcatcacctggggagaagatgggaggcagcttgccatggagggtgcggcatgggtacagggctcccccatgcagagggccccagacaccctgntccctgaatcccctntcaggcctgnttctctaccctttctncctggncactgagccaagtctgnccatcaagggcccaaggcattcatggcagcacgtgccgttataagccctnggaagnccntaccatggattgcctggnatccctgggaaaa

SEQ ID NO: 5742 - DNA, 512 bp, Homo sapiens
  misc_feature (38)..(38): "n" may be a, t, c, g, other or unknown
  misc_feature (254)..(254): "n" may be a, t, c, g, other or unknown
  misc_feature (256)..(256): "n" may be a, t, c, g, other or unknown
  misc_feature (264)..(264): "n" may be a, t, c, g, other or unknown
  misc_feature (436)..(436): "n" may be a, t, c, g, other or unknown
  misc_feature (469)..(469): "n" may be a, t, c, g, other or unknown
  misc_feature (481)..(481): "n" may be a, t, c, g, other or unknown
  misc_feature (484)..(484): "n" may be a, t, c, g, other or unknown
  misc_feature (490)..(490): "n" may be a, t, c, g, other or unknown
  misc_feature (503)..(503): "n" may be a, t, c, g, other or unknown
  misc_feature (508)..(508): "n" may be a, t, c, g, other or unknown
agacacttccatttgctcatgatggtattgtaaaatgnttatcaatgctaatgatgcagttctccagagccccattttgttttaagggctgtaagtgaaattgttaagaaataaatttcctatgtaacaatacatcacaaaggaaagcaaacagaacaatagccagggccttctccccggctaatagggatgtcacttgctggggccttggaatccatgaggcctgagcatctgggttctttgctgtgcccaanantgggcatntgggagtccctggcacaagagggagggccaccatcttggagaatgaggagaatgaagatgagattagagccacctgggtcttggtcccagctctgccacttactggcaaatcaggaaggaatgttcctgagggtctgagaaagcatcattctctctgggccttaattctcanggcagaatggggcacttgcattgggaaaaagtnggcaccttaacntgnttgctncaagggtaaaggnttgcnaaac

SEQ ID NO: 5743 - DNA, 551 bp, Homo sapiens
  misc_feature (466)..(466): "n" may be a, t, c, g, other or unknown
  misc_feature (498)..(499): "n" may be a, t, c, g, other or unknown
  misc_feature (502)..(502): "n" may be a, t, c, g, other or unknown
  misc_feature (504)..(504): "n" may be a, t, c, g, other or unknown
  misc_feature (530)..(530): "n" may be a, t, c, g, other or unknown
  misc_feature (542)..(542): "n" may be a, t, c, g, other or unknown
ggagacagagtctcgctctgtcactcaggctggagtgcagtgacgcgattttggctcactgcaacctccgcctcccaggttcaaataattctcgtgcctcagcttcctgagtagctgggattacaggtgtgtgccaccacaaccagctagttttttttaaatatttttagtagacatggggttttgccatgttggccagcctggtctcaaactcctggcctcaggagtgatccgtctgcctctgcctcccaaagtgctggaatcacaggcgtgagctacctcgcctggcctgaattattttatcaggttaaatttcgtgggcgtgctaatggtactgtggttttgtagaatatcttggtttttaggagatacgtgctgaaaggttttagtcatgtgacaggatgactgtgacttacttttaatgattagctgaatcagagaacaagagagagctggatatgtgtgnggctatgtttagacctagagaaagagaaagcnnatntngcccatggtaacgattggtaaatctnaagtcccggggnggatggggg

SEQ ID NO: 5744 - DNA, 549 bp, Homo sapiens
  misc_feature (310)..(310): "n" may be a, t, c, g, other or unknown
  misc_feature (405)..(405): "n" may be a, t, c, g, other or unknown
  misc_feature (472)..(472): "n" may be a, t, c, g, other or unknown
  misc_feature (475)..(475): "n" may be a, t, c, g, other or unknown
  misc_feature (477)..(477): "n" may be a, t, c, g, other or unknown
  misc_feature (483)..(483): "n" may be a, t, c, g, other or unknown
  misc_feature (502)..(502): "n" may be a, t, c, g, other or unknown
  misc_feature (518)..(518): "n" may be a, t, c, g, other or unknown
  misc_feature (529)..(529): "n" may be a, t, c, g, other or unknown
aagagagacaagatcttgctacgttgcccaggctggagtgcactggcattatcatagctcactgcagcctcaaactcctgggttcaagcgatcctcctacctcagccttccaagtaggaagggctacaggcatgcaccaccatgcccagctaattaaaaaaattttttttgtagaggtggagtctcactatgttccccaagctggtctcaaactcctggcctcaagcaatcctcccaccttagcggttgtagacatgagacaccacacgcagcctaaaccttttcttctaaagaacccttaacacaaggncaatatgcaaaacaaaatacagatactacagaataagctggagtagcagagagagacataagataacctcaccttatacaatgcagaacatctgnctttaatcataatttttttttttttttgagccagggctctttctgggttcctggctggagtgccaanggngngacacnggctactgggagccttaanccctgggttaaaagancctctgcttanccccccaggaacttggactt

SEQ ID NO: 5745 - DNA, 499 bp, Homo sapiens
  misc_feature (89)..(89): "n" may be a, t, c, g, other or unknown
  misc_feature (100)..(100): "n" may be a, t, c, g, other or unknown
  misc_feature (228)..(228): "n" may be a, t, c, g, other or unknown
  misc_feature (305)..(305): "n" may be a, t, c, g, other or unknown
  misc_feature (419)..(419): "n" may be a, t, c, g, other or unknown
  misc_feature (422)..(422): "n" may be a, t, c, g, other or unknown
  misc_feature (426)..(426): "n" may be a, t, c, g, other or unknown
  misc_feature (440)..(440): "n" may be a, t, c, g, other or unknown
  misc_feature (476)..(476): "n" may be a, t, c, g, other or unknown
  misc_feature (478)..(478): "n" may be a, t, c, g, other or unknown
  misc_feature (492)..(492): "n" may be a, t, c, g, other or unknown
caggaacagtaatttgactttgtctatattaaaaatcataaatagtcaacaaatacaaaaaatacaaagagtttgcagatatgatcagngcattataggngttttcaaatttctcctatgataaattaaaaatgtaatgttggacattaatttcctaaacccaatgctcagcaattttctcaaattgtttcgcttttcccaagagacttcagaaccattccctggagngaattatttccaatggtgaagagtaatggatggatgggatgacattctcaaaaaaatcttgctcctatttcagaagngtcactccagccccttgaaggtccaggaaacctggctgagtagtgtggtctatggaggtgcatgggcttcagagtcaggccaacgttgatcctgagtcccagccagctgcttantanctgngggatagttatacnaggacacatctagtgatggggctcaagctgaagacngntatctggcgatgcnaaaaacc

SEQ ID NO: 5746 - DNA, 563 bp, Homo sapiens
  misc_feature (459)..(459): "n" may be a, t, c, g, other or unknown
  misc_feature (480)..(480): "n" may be a, t, c, g, other or unknown
  misc_feature (515)..(515): "n" may be a, t, c, g, other or unknown
  misc_feature (533)..(533): "n" may be a, t, c, g, other or unknown
  misc_feature (549)..(550): "n" may be a, t, c, g, other or unknown
  misc_feature (557)..(557): "n" may be a, t, c, g, other or unknown
  misc_feature (562)..(562): "n" may be a, t, c, g, other or unknown
gttcataacaagttgatgtagacgttccttcagtttattatattcacgctcttttctcttcatatcatgattatactgagtagctcgacttgcaatgatattttgtaattttttgcacctcatctttctcattctttagtagctgatgcaaattcctgttcttacattgtaactgtctgtctctttcctgaagcccaatcatttccctcctggaggtttccagttgttccttaagttttgagtagcagctctgtagatggtccatatcacttcccagcttcaaattctgtgtctccacattttcctgagctagaaggttcttccgctgaagcacaagcagctcattcatacaatttagtacagctactatatttaactctctctttgtctctttacctttggattcttcatataatgaaggaaaaccaaaagtagtcaattcctggtaggagaaaatgntttcttaaagttggttacagntgaggagatactggcagaggatacaaactttcagntagataggaagaataagnttaataggactattgnnccacccnggggnc

SEQ ID NO: 5747 - DNA, 550 bp, Homo sapiens
  misc_feature (482)..(482): "n" may be a, t, c, g, other or unknown
  misc_feature (503)..(503): "n" may be a, t, c, g, other or unknown
  misc_feature (521)..(521): "n" may be a, t, c, g, other or unknown
  misc_feature (528)..(528): "n" may be a, t, c, g, other or unknown
  misc_feature (534)..(534): "n" may be a, t, c, g, other or unknown
  misc_feature (545)..(546): "n" may be a, t, c, g, other or unknown
ggaatatttcaatccatgttggttgaatccacggatatggaacccatggatatggagggctgaccgtatagttggaattgcagttaacagtcaatgactgcagaactttctggcatctagttcgtggggtctccgggggcttttcatgtttaacttccaatctgtgaagaattgttgcaggtgatcacctgccttcctaccccacacaccaagcacaggagacccctgattaacaacaaaccaaaagtgcatgctgctttaaggaagtaaggatagaactcaggaatgcagtttcaaaagatcacaggaacttcaagagaatcttcctaccatatttagtgctttctccaattttcggagaatcttcaacagaatggtaggaagtaaggcaaatacatttgattaggcttatgaggagaaattagaggaaagtggttgtagaagtgatttaatcactatcctgcatattaaaagatcagatnggatacctggtcaatggttcnttggttttgaaatggagncttgctnttggancccagttgganngcca

SEQ ID NO: 5748 - DNA, 558 bp, Homo sapiens
  misc_feature (347)..(347): "n" may be a, t, c, g, other or unknown
  misc_feature (428)..(428): "n" may be a, t, c, g, other or unknown
  misc_feature (443)..(443): "n" may be a, t, c, g, other or unknown
  misc_feature (459)..(459): "n" may be a, t, c, g, other or unknown
  misc_feature (461)..(461): "n" may be a, t, c, g, other or unknown
  misc_feature (479)..(479): "n" may be a, t, c, g, other or unknown
  misc_feature (490)..(490): "n" may be a, t, c, g, other or unknown
  misc_feature (522)..(522): "n" may be a, t, c, g, other or unknown
  misc_feature (530)..(530): "n" may be a, t, c, g, other or unknown
  misc_feature (544)..(544): "n" may be a, t, c, g, other or unknown
gaatggcagagggaggtttaatggtgtcaccttgtcttgctaatgagccaacaaaaaaaaaaaaaaaaaaaaaatgcaagtaaaaaaaagtttaatcacacagcactttatacagatatcgtaagcagtaggcattcacatctccacatgtacaatgcactgggaagcacagccccaccagtcactccgggtgtttctcaaacaagataccgactcggttccaaatgccacggtgtgtggtccggctccatcctcccgcagctctgctggctgggcggtcacagcacagcacaggtgtggagcccacttaaggctgacaagacgcatcatgctttggctttttttgnctttttttctaataagagttaatatctttgcttttgagtttttttttcaaccttaaatattcatacatacaccaaaaattncatagcttgcaatgngctcaacagcatcctntnggcctggagcttacattntcaaagcttanaaacttggaaacctttggcctgtttttgggcnctaggaancccccgccggcggnccctttggatgagc

SEQ ID NO: 5749 - DNA, 541 bp, Homo sapiens
  misc_feature (449)..(449): "n" may be a, t, c, g, other or unknown
  misc_feature (454)..(454): "n" may be a, t, c, g, other or unknown
  misc_feature (495)..(495): "n" may be a, t, c, g, other or unknown
  misc_feature (518)..(518): "n" may be a, t, c, g, other or unknown
  misc_feature (520)..(520): "n" may be a, t, c, g, other or unknown
  misc_feature (531)..(531): "n" may be a, t, c, g, other or unknown
  misc_feature (541)..(541): "n" may be a, t, c, g, other or unknown
gcagtggctggtattaagaaagtttttcttatattaagaaagtttttcctttcttaatatttagtgcttccttcaggagctcttgcaaggcaggcctggtgttgacaaaatccctcagcgtttgcttgtatgtaaggattttatttctccttcacttataaaacttagtttggctggatatgaaattccagttagaaaattcttttctctaagaatgttgaatattggcccccactctcttttggcttgtaggttttctgcagagagatctgctgttagtctgatgggcttccctttgtaggtaacctgacctctctctctggctgcccttaacttttttttttttttattgagaaggagtctcgctctgttgcccaggctggagtgcagtggcacatctccgctcactgcaagctccgcctcctgggttcacgccattctcctgcctnacctnccacgtagctgggactacaggcgcccaccaacacgcctggncaatttttggaattttttaatananatggggttcanccgggtaccn

SEQ ID NO: 5750 - DNA, 564 bp, Homo sapiens
  misc_feature (552)..(552): "n" may be a, t, c, g, other or unknown
aaaaattattaaaacatttaatcactgaaaacacaaatccacattaggaaattatcttttaggatacttatacaaaacttaacacaggattattgacttcactgttaagcaatgtgcatattgctactctttctccttcactaatttttctatccttggaattaaagatgtgactgcaagtcttagggcagggccagaacccaacagatttttttgttttgactcagtcaaagctgaaaaggcagcatcacataaataaacagttgaaaagggtaataaaaatttcattgccctttcatggagttctgggtaacttgtctttgcatttatccaaaactgagttacagacactgatttaaatagtgcttgtaatcctaaatctgaagatagctctgttagcttttcttcttcgaagtcggtgagattattattttggtgattcataaaagggtgaattatccacaaatttcctgaacgcaagtcttggtctggtgggaaaacagcctggacccttgggaaaagtccttccagggctcaaaataatcctggganggctggcatatt

SEQ ID NO: 5751 - DNA, 543 bp, Homo sapiens
  misc_feature (437)..(437): "n" may be a, t, c, g, other or unknown
  misc_feature (471)..(471): "n" may be a, t, c, g, other or unknown
  misc_feature (476)..(476): "n" may be a, t, c, g, other or unknown
  misc_feature (481)..(481): "n" may be a, t, c, g, other or unknown
  misc_feature (509)..(509): "n" may be a, t, c, g, other or unknown
  misc_feature (516)..(516): "n" may be a, t, c, g, other or unknown
  misc_feature (539)..(539): "n" may be a, t, c, g, other or unknown
  misc_feature (541)..(541): "n" may be a, t, c, g, other or unknown
gcaaggaaactgcatgggtacaaatttccaattcatacttaacaaggtggggaaacgggtcattcttggcctgctccagaacaaggggcgagtctatgcactcctggagcagcaggcgcagggagggttaaatgtgaggccagaaccaaatctcctgtttccaggagctgaggatttagaagagtctctttggttgatttttacaggagagaagaaggagtgaccagcaagtgagaggaggcctgcaagggtagaggaaggaggatgaataataataatcacaatacttctagtccttttggaaaatatgttctcatccttcaagtcgacgtcaaatgcttcccactttttgaagcttccctgcctcccccactaacctgggtgtgaaggttctttctcagatgtgtctggctactttgtgccaggctccctggtanaagcttgattaatgctattcatttcattcttacncaggnattgntggcatacattaaaaaagatggaactantcccaanagtttaattggctgccaaaagcntnca

SEQ ID NO: 5752 - DNA, 471 bp, Homo sapiens
  misc_feature (381)..(381): "n" may be a, t, c, g, other or unknown
  misc_feature (395)..(395): "n" may be a, t, c, g, other or unknown
  misc_feature (423)..(424): "n" may be a, t, c, g, other or unknown
  misc_feature (433)..(433): "n" may be a, t, c, g, other or unknown
  misc_feature (458)..(458): "n" may be a, t, c, g, other or unknown
  misc_feature (462)..(462): "n" may be a, t, c, g, other or unknown
aagagatagggtcttgctttgtcacccagactggaggacagtggcatgatcacagcttactgcagccttgacctcctgggctcaagggatcctcccacctcagcctccccagtcgctggaactacaggcacacatcaccacacctggttaattttatttatttattcatttttgtggaagggtctcaccatgttgcccaggctatacaaggcttaattttaaaatttaaaatcagccgggcatggagactctaactgtaatcccagcactttgggaggccgaggcaggtggatcacctgaggtcaggagttccggacaagcctggccaacatggtgaaaccctgctctactaaaaatacaaaaaaatgaggcgggcatggngggtatgtgcctgnaatcccagctactcaggagactgaggcnngagaatcgnttgacccaggaagtggaagctgcantganccaagatcg

SEQ ID NO: 5753 - DNA, 575 bp, Homo sapiens
  misc_feature (453)..(453): "n" may be a, t, c, g, other or unknown
  misc_feature (517)..(517): "n" may be a, t, c, g, other or unknown
  misc_feature (521)..(521): "n" may be a, t, c, g, other or unknown
  misc_feature (524)..(524): "n" may be a, t, c, g, other or unknown
  misc_feature (528)..(528): "n" may be a, t, c, g, other or unknown
  misc_feature (534)..(534): "n" may be a, t, c, g, other or unknown
gttactctcttaaagtggcagaaacagaaaagttgtggctctgctggtagactagtttggaaacactgattcggacaacacaatttgtaattcagatagactctttattggccaaatggattccggttttgaagacgattcccaaaacgttctgatatagaactcttctggccttaggcctagtttagagatttgtgggaagacttcaaaggttaccattttcctctgtggatctgtaaaattaaccatgaatacctaggtcagatttcctttttcctacttcactctgtttgggcttcctcagggaagatttcagctacctacctataggagaaatgcgcaatcaattattgatttaaatcaaactctgaaatatcatatgattatgataaagggagtatcagcaggtgaatacattaagccaggcagaccctttttggaatagctttaaanggccagcttcattaggcaccaaaatctttcaacttcaaacttttgcagccttatccttttaaangcanccnttgnaaaggngcttccttaaccagtacttggaaaaaggttggtatatttca

SEQ ID NO: 5754 - DNA, 590 bp, Homo sapiens
  misc_feature (455)..(455): "n" may be a, t, c, g, other or unknown
  misc_feature (475)..(475): "n" may be a, t, c, g, other or unknown
  misc_feature (494)..(494): "n" may be a, t, c, g, other or unknown
  misc_feature (500)..(500): "n" may be a, t, c, g, other or unknown
  misc_feature (510)..(510): "n" may be a, t, c, g, other or unknown
  misc_feature (514)..(514): "n" may be a, t, c, g, other or unknown
  misc_feature (536)..(536): "n" may be a, t, c, g, other or unknown
  misc_feature (580)..(580): "n" may be a, t, c, g, other or unknown
  misc_feature (587)..(587): "n" may be a, t, c, g, other or unknown
gtggaaaaagtagaagtcagacaaggaccaggaactggccaatgtacatgaataaatggaaatttgcttctatctctgtgcttggaagcaagctcaagccaagaggataagcaaaacaagtctaagaggtcaccaggcccctgatgacaagctaaattcagattgacttctatgtgtcagcccacttaggccagtgcatttgctgtatgttgggtggctctgaacacagcagaaaggggactaaatgcagtactgtcttacagtgatctggaaggccttccccacgttccaacctgctgaagctgggaaggcagcagggatagttcataggcttgctggggcacaagcccagtcagaaggtctcctgccccattctctccttggaatatgtcctcactggctgagcatgaaggaagctggttcaaagggcagaataaaccatggggaatgggaanggccaaagggccaaaagttnccaccttttgagtccactnaccttnatctgggggnggcncatatgccaaaacctggcggangccagccaatggcctttttttccttgggcctttaacccttcaanaaaaggnttg

SEQ ID NO: 5755 - DNA, 557 bp, Homo sapiens
  misc_feature (40)..(40): "n" may be a, t, c, g, other or unknown
  misc_feature (85)..(85): "n" may be a, t, c, g, other or unknown
  misc_feature (156)..(156): "n" may be a, t, c, g, other or unknown
  misc_feature (167)..(167): "n" may be a, t, c, g, other or unknown
  misc_feature (220)..(220): "n" may be a, t, c, g, other or unknown
  misc_feature (247)..(247): "n" may be a, t, c, g, other or unknown
  misc_feature (378)..(378): "n" may be a, t, c, g, other or unknown
  misc_feature (392)..(392): "n" may be a, t, c, g, other or unknown
  misc_feature (413)..(413): "n" may be a, t, c, g, other or unknown
  misc_feature (439)..(439): "n" may be a, t, c, g, other or unknown
  misc_feature (445)..(445): "n" may be a, t, c, g, other or unknown
  misc_feature (487)..(487): "n" may be a, t, c, g, other or unknown
  misc_feature (518)..(518): "n" may be a, t, c, g, other or unknown
  misc_feature (554)..(554): "n" may be a, t, c, g, other or unknown
  misc_feature (557)..(557): "n" may be a, t, c, g, other or unknown
gagacaaagtctcgctttgtcgcccaggctggagtgcagnggcatgatctcggctcactgcaacctccgcctcctgggttcaagngattctcctgcctcagcctcccgaggagctgggattacaggcgcctgccaccactccacgctaatttttgnatttttagtanagacaaggtttcaccacgttggccaggctggtcttaaacttctgacctcaggngattcgcccgcctcagcctcccaaagngctgggattaccggcgtgagccaccatgcccggcccttttctccttcttcagtacctgggggtggctggacgagggactgcagaaggactgtggtgctgggaggcacagctctggatggcattgggacagnggttagcactacangtttgggctgcaatggccggntttcgggtggcaaggctttgcctgangagccntcaagggatgggcccatgccgatcttggaaagttccaatganggggctgggaaattccccaggagggttcttnaaggcacagggactttggttaatttcaggacccccnttn

SEQ ID NO: 5756 - DNA, 529 bp, Homo sapiens
  misc_feature (363)..(363): "n" may be a, t, c, g, other or unknown
  misc_feature (409)..(409): "n" may be a, t, c, g, other or unknown
  misc_feature (413)..(413): "n" may be a, t, c, g, other or unknown
  misc_feature (437)..(437): "n" may be a, t, c, g, other or unknown
  misc_feature (463)..(463): "n" may be a, t, c, g, other or unknown
  misc_feature (495)..(496): "n" may be a, t, c, g, other or unknown
  misc_feature (508)..(508): "n" may be a, t, c, g, other or unknown
  misc_feature (527)..(527): "n" may be a, t, c, g, other or unknown
  misc_feature (529)..(529): "n" may be a, t, c, g, other or unknown
actgtggacttgtagtatagtttgaagttggatagtgtgatacctccagctttcttctttttgcttaggattgtcttggcaatgtgaactgtttttttggtttcatatgaattttaaattagtcttttctaattctgtgaagaatgtcgatggtagtttaatgggaatagcattgaatctataaattcctttgggcagtatggccattttcatgatattgattcttcctatccatgagcattggatgtttttccatctgcttgtgtcctctttgatttctataagcagtggtttgtagttctccttgaagaggtctttcacttcctttgttagctgtattcctaagtattttattctctttgnggcaattgtgaatgggagttcattcatgatttgcatttcttcttgnctgntggtggtggtataggaatgcttgngacttctgcacattgactttgatctngagactttgctaacgtgcttatcacttaaganncttttggcctgnaaagaatggggttttcganan

SEQ ID NO: 5757 - DNA, 571 bp, Homo sapiens
  misc_feature (497)..(497): "n" may be a, t, c, g, other or unknown
  misc_feature (511)..(511): "n" may be a, t, c, g, other or unknown
  misc_feature (526)..(526): "n" may be a, t, c, g, other or unknown
gagacaaggtcttgctctgtcacccaggagtgcagtggcacgatcatggatcactgcagccatgacctcctggactccagcaatcctcccatctcagcctcccaggtagctaggactaccggcgtgtaccaccacactcggtattttttttaagagacaggatctcactatgttacccaggctggtctcaaactcctgggctcaagcagtcctcccaccttggcctccccaaaagtgatgagattacagacatgagtcacctgcctggcctgatggtaaagggggttataacctgttggaaaataaattagggttagatcacactaacttcaaaatgcaatcatgatcatacatggtaagttcctcaaaaaattaaaaataaaattaccatattatccagcaattctacttcaggggtatatgcccaaaagaactaaaagcaaggacttgaacagatatgttcaatcacgaacccatgttcatagcagcatttttcncaatagtcaaaggntgaaaccaccccaangctatggaatttgcccggttaaccaaagggggatttttccttggg

SEQ ID NO: 5758 - DNA, 540 bp, Homo sapiens
  misc_feature (315)..(315): "n" may be a, t, c, g, other or unknown
  misc_feature (427)..(427): "n" may be a, t, c, g, other or unknown
  misc_feature (488)..(488): "n" may be a, t, c, g, other or unknown
  misc_feature (501)..(501): "n" may be a, t, c, g, other or unknown
  misc_feature (503)..(503): "n" may be a, t, c, g, other or unknown
  misc_feature (507)..(507): "n" may be a, t, c, g, other or unknown
  misc_feature (513)..(513): "n" may be a, t, c, g, other or unknown
  misc_feature (532)..(532): "n" may be a, t, c, g, other or unknown
  misc_feature (535)..(535): "n" may be a, t, c, g, other or unknown
aatgaagacttctcagttgtattatatttttaaaaatttaaaatgaacttgtatatgtggaaggattgatgatctgtactgactccagatggttatgttctcctgatgacagatggaagtccaggaggcggggccatcccaagtgtatgccagcaagatatggttctactgctggtgacctcatagaagcagagtcatcactggagaaagacatagctctcatcctgatgggcatctcctgcccctgaggcctcagttagctgcacttgccttctgcatctcctggggatttcactccatcagttagcatcttgnttactgccttcccatgtgatggctgtttaagctccagagtcccttactctccttcctgccactatatcatcgatatgggtggcctgggaagggatggcatttattcatgacngggggcaagtgtccagatcccagatctaccgaaaatctttcattctggtggggccccctgnttccatcctgggngncccntccccnaactttatttaacaggcanggncatag

SEQ ID NO: 5759 - DNA, 556 bp, Homo sapiens
  misc_feature (421)..(421): "n" may be a, t, c, g, other or unknown
  misc_feature (469)..(469): "n" may be a, t, c, g, other or unknown
  misc_feature (506)..(506): "n" may be a, t, c, g, other or unknown
  misc_feature (510)..(510): "n" may be a, t, c, g, other or unknown
  misc_feature (526)..(526): "n" may be a, t, c, g, other or unknown
  misc_feature (531)..(531): "n" may be a, t, c, g, other or unknown
  misc_feature (545)..(545): "n" may be a, t, c, g, other or unknown
  misc_feature (549)..(549): "n" may be a, t, c, g, other or unknown
cttaagtgtctttaatactccactcagggcagcccctccctctactgagaggctcttggctctggccccaagagcagctggaaggccctggcctgacttcaccacttgatgtccaggctgtgtgtgccacgctcctggctctggtacgtggtatgcagcacctctcgggccttgggggagttgatcccctccagccactcctggtacagctcctgcacgtgtgcactggactccggacgccgcacagggatgtcagcgtaaatgccttccatctgccgcagcagggccttatccgcatgtccgtctggagtctgggcttggcctctgccatttaagcatcctcagcacaggcgaggacctccacaaagtggaatggggaacttgcccttcttaagctttaaggacatgtctggatgtttcnaaagccataggctgcagcaaagcgtacaccacctttccgtcttttaanggtgaccttttggaaagctttggttttaaggcttggnaagngacctctcaaatcctngttgnaaaagtcttggccnatgnttaaaat

SEQ ID NO: 5760 - DNA, 580 bp, Homo sapiens
  misc_feature (453)..(453): "n" may be a, t, c, g, other or unknown
  misc_feature (483)..(483): "n" may be a, t, c, g, other or unknown
  misc_feature (499)..(499): "n" may be a, t, c, g, other or unknown
  misc_feature (577)..(577): "n" may be a, t, c, g, other or unknown
  misc_feature (580)..(580): "n" may be a, t, c, g, other or unknown
gtagagatggggtttcaccatgttgccccactggtctcaaactcctgggctcaagtgatccacccttctcagcttcccaaagtgctgggactacaggcgtgagccactgtgcctggcctgtatctacagatattaagaaaaactttgggctgcatatttagacataactgcttttttgcaattttgatttcatattctactgctaagatttcttatatgggatttgctgcatttcacagaaatctatctattcaaaaatcacactcatgctgattttgctagttcaaaagcagagatatgaccactataaggaaagcccgtgttcacttgcattggtaatattgaagaaataatacacttcatgggaaataaatacaggatatttacaaaatctttggtaaaacttcctaagaagtattggttggggttggttttccggagaccagaagtctncctttggcacccagctggaatgcaatggcncgactcggttactggnaaccttcgcttccggggttaagccaatcttgggcctaacctcctgagaactgggattccgaagcccgtgcccaccagntan

SEQ ID NO: 5761 - DNA, 521 bp, Homo sapiens
  misc_feature (436)..(436): "n" may be a, t, c, g, other or unknown
  misc_feature (447)..(447): "n" may be a, t, c, g, other or unknown
  misc_feature (476)..(476): "n" may be a, t, c, g, other or unknown
  misc_feature (481)..(481): "n" may be a, t, c, g, other or unknown
  misc_feature (483)..(483): "n" may be a, t, c, g, other or unknown
  misc_feature (502)..(502): "n" may be a, t, c, g, other or unknown
  misc_feature (517)..(517): "n" may be a, t, c, g, other or unknown
cgtaactggtgtaagccaccaggttctccgtgtactgcaagatcgactttacaaactttaggtactgctgatactcatgcgcattcttcccacaaacagcatgaatgttgaccaactccagcgcaatgagtaacagtatcaggctgagcacaggggacagtagtctgatactactccacatacgcaggtagttctgccgctggcgagaccgcagcgtcctttccacccactgcctgtgtctcagctctgaggcaacggtgacctggctggacacacggcggcactgttcgctgatgcttcagagcacaaccagcactcccagcacaatcctggggcagaacagggtgggaacaggtgtgctgcagagctcacggagaagctggggccacgtctcagtaggaagacgatccaagtcctttaacacacaacgattctnaggcatatggngatcagctcatccgcattttttggaatcnaaaantngcagggcatttggttcaanaattattttctaatntgac

SEQ ID NO: 5762 - DNA, 533 bp, Homo sapiens
  misc_feature (244)..(244): "n" may be a, t, c, g, other or unknown
  misc_feature (475)..(475): "n" may be a, t, c, g, other or unknown
  misc_feature (477)..(477): "n" may be a, t, c, g, other or unknown
  misc_feature (482)..(482): "n" may be a, t, c, g, other or unknown
  misc_feature (484)..(484): "n" may be a, t, c, g, other or unknown
  misc_feature (501)..(501): "n" may be a, t, c, g, other or unknown
  misc_feature (506)..(506): "n" may be a, t, c, g, other or unknown
  misc_feature (531)..(531): "n" may be a, t, c, g, other or unknown
ctttttctttttttttttttttgagacagagtcttactctgtcacccaggctggagtgcagtggcacaatctcggctaactgcaaccttccacctcccaggttccagcgattctcctgcctcagcctcctgaatagctgggactacaggcatgcaccaccatgcctggctaagtttttttatttttagtagagatggggtttcactatgttggccaggctggtctcgaactcctgacctcaggngatccacctgccttggcctcccaaagtgctgggattacaggcgtgagccaccatgcccagctagctctgcctccttctaaattagatctggtcagtttaccggtttttattttgggatcgtactagtactcttcaactgaattttaaccttactttgaaatatttatatctggctttaagaatttaaatgaagacattttcacaggactaattctagaaaaaaggctctgngngacantnaaaatctataatataanttaanatttccagaactggcttgaaaattngg

SEQ ID NO: 5763 - DNA, 462 bp, Homo sapiens
  misc_feature (456)..(462): "n" may be a, t, c, g, other or unknown
gagggcggggcaaagggagcatgacggggagagtgaggaggaaagaggaaaggaaggccagggtgggaggaaggatcagctaaatctgagggaagaagaaggaaaggagagggactattgcatagcagatgcaaatgaagggacttggggctagtcaggaagaaagggaaagggaaggaaggcaagagagaggggtgaagggaacctcaggaaggggtgttaaggacaaccggaaaaatcatctagtaataaaactacaaacagaccaaatatatataatattatatatgtataaataacagctggctatttacagggggacacacacacggacacacacacacacggatccaggggagtgggggctgaaagatatggctgataggtggaggaacggctgagggttgggggagaggcccttcttctaggcagggcaaactcctccggggatttaannnnnnn

SEQ ID NO: 5764 - DNA, 513 bp, Homo sapiens
  misc_feature (457)..(457): "n" may be a, t, c, g, other or unknown
  misc_feature (472)..(472): "n" may be a, t, c, g, other or unknown
  misc_feature (483)..(483): "n" may be a, t, c, g, other or unknown
  misc_feature (491)..(491): "n" may be a, t, c, g, other or unknown
  misc_feature (495)..(495): "n" may be a, t, c, g, other or unknown
  misc_feature (500)..(500): "n" may be a, t, c, g, other or unknown
  misc_feature (511)..(511): "n" may be a, t, c, g, other or unknown
gagacagagtctcactctttggcccaggccggactgcagtggcgctatcgcggctcactgcaagctccgcctcccgggttcacgccattctcctgcctcagcctcccgagtagctgggactacaggcgcccaccactgcgcctggctaaattttttttctttctatttttagtagagaaggggtttcaccgtattagccaggatggtctcgatctcccgacctcgtgatccacccaccttggcctcccaaagtgctgggattacaggggtgagccaccgcacctggcctccccttttctttatagcaccttcatacttaacaccatgacatcaaatgacaacgtattcacacagaaagcaggcattttgtttactggtttatttatgtttacttatgcaaccaagagaacctatatggctgtcatgggagccctaccttttagaaagagaacaaccncatcaggacaagttntaaaacacttntggatacnaggngggantaacctttgancc

SEQ ID NO: 5765 - DNA, 543 bp, Homo sapiens
  misc_feature (449)..(449): "n" may be a, t, c, g, other or unknown
  misc_feature (457)..(457): "n" may be a, t, c, g, other or unknown
  misc_feature (469)..(469): "n" may be a, t, c, g, other or unknown
  misc_feature (477)..(477): "n" may be a, t, c, g, other or unknown
  misc_feature (481)..(481): "n" may be a, t, c, g, other or unknown
  misc_feature (495)..(495): "n" may be a, t, c, g, other or unknown
  misc_feature (528)..(528): "n" may be a, t, c, g, other or unknown
ggatattaatcccatggtgcaaggatttcctgcaaagtacctttaatgtgtttaaatcagcagcaagcattaggacatgctattttggccccataagttaggtgtgtagcactacacattagacaccaagtcatcccaaccaatatttatccatatgaacagataaactgaacaaaaacatagttctgataaaacctgcattcacaacctaatgtagtttaaagtaaattttttcacaattgagggctgctatttaggactgttttgttaataataaaaacaggaattatatagaagataaaacaccattttttactgctatataatgtcttgctatataaaacataccctcaacaagtcaaaatatttaaaaccagtgtttcaaataccaaaaatcacagctatgttactggtcaagtaacttcactcaataaatggtaggactggantcttgganggaaaaaactgnagccaagncagnacctttaagttggnctccaaggtttaaaaggacggaccctactttgnaaacggaaaactgcc

SEQ ID NO: 5766 - DNA, 556 bp, Homo sapiens
  misc_feature (468)..(468): "n" may be a, t, c, g, other or unknown
  misc_feature (471)..(471): "n" may be a, t, c, g, other or unknown
  misc_feature (513)..(513): "n" may be a, t, c, g, other or unknown
  misc_feature (518)..(518): "n" may be a, t, c, g, other or unknown
  misc_feature (538)..(539): "n" may be a, t, c, g, other or unknown
ctttttttttgtttgctgcagaatttgcatatgacagctgctatgatcagtgtatttatatatatttaatcctcatctaattaggaggtataagtaaccctattgtacagatgaagaaaaaacatcttgctgaaattacaagttaatgtctcagaaacagaattcaaactcagatttgtctgactccaaaacgtactttgtagtactagggatatactggaaaagcccttcagccttttatatagtcaattgtctgtaaaaaggacacagtccaaacaatgaactgttaacatattttacattattgaatatatacatggagactgtaaagaggtaaaagctctaaaaataatggattcacagaacttgaaaataaagtcaagactgtggtctctctctgaaactgaatagagtaaaacagacgatgaagaaatgagctatttgcagaggtaataacttacccttaanggnaaatttcaaatatcttttttttttttttttttgggaacaaancttgntttggcaacccagctggaanncttgggcccaaccttag

SEQ ID NO: 5767 - DNA, 523 bp, Homo sapiens
  misc_feature (388)..(388): "n" may be a, t, c, g, other or unknown
  misc_feature (498)..(498): "n" may be a, t, c, g, other or unknown
  misc_feature (501)..(502): "n" may be a, t, c, g, other or unknown
  misc_feature (504)..(504): "n" may be a, t, c, g, other or unknown
  misc_feature (509)..(509): "n" may be a, t, c, g, other or unknown
  misc_feature (518)..(519): "n" may be a, t, c, g, other or unknown
gaaaagccagaccttgtgcccttgttttgaacaccgactgggaagatggggcttaggtaacagccaaacctggctgtcagctgtgtgggagccaccaccctctctgggaagagttcctgcttctgtatggcaagcataaatcaagctcagtctgggttatggagaagttgaaaattgttttgttcctcattagtttataattgtatgaaatacgattttaatgaaaacttttcagaattcacgtttgtgtagatatttcagagaaccatttttactttacatcctaaaactgccttttcctatggttttgtcaataaaacactatgatgttggtctgtttccttttatatctcaagtctcaaaactttaaaagacagtagatatttgngggtttctagctaaatgagggccaagattggactttttcaactaaattgaatcatgtagtaatatctgatttcatagctttctgggggaaaaagggaggatttggaatancanncntgcanggcaggacnngtaa

SEQ ID NO: 5768 - DNA, 537 bp, Homo sapiens
  misc_feature (411)..(411): "n" may be a, t, c, g, other or unknown
  misc_feature (449)..(449): "n" may be a, t, c, g, other or unknown
  misc_feature (456)..(456): "n" may be a, t, c, g, other or unknown
  misc_feature (466)..(466): "n" may be a, t, c, g, other or unknown
  misc_feature (473)..(473): "n" may be a, t, c, g, other or unknown
  misc_feature (485)..(485): "n" may be a, t, c, g, other or unknown
  misc_feature (516)..(517): "n" may be a, t, c, g, other or unknown
aagtattttaggtaggtatcaccatttaggttgggtagaagtaattcttaaatcttaagaagcgatcatagatatgtggaagccaatagtcattactagggatcatgattcggaaaaacagcctctcttcaatgatcctgaatgagccctttgaattcctctcctgcaactgatctccccatggggagtggtgagggatgggtggcaggaagggaccctaacccaaagtagttcagagcgggtgagttttaggagcatttcggtaccaaacacagcttcacgattgagaatcatcagtcatccccagctttctatttcatttgctaacctctctaggaacaactggatgttgtaaatgtttctcatctggccttaaaatccatgaaagctggaaaatcacaaggcatctgngcatatactggtggattttaatgagaagcctggggttngagcccngaaataaccngctttanaagccaagtagnaaaggccctggattttgacctggccatgggnntacctatttgaggggggatg

SEQ ID NO: 5769 - DNA, 531 bp, Homo sapiens
  misc_feature (531)..(531): "n" may be a, t, c, g, other or unknown
cttgtcatggctattcaggtttttagttcagctgctgaggcggtgagaagttttcatgtcagacgtacaggtagcattttaccccactttcctctgtccaaagcgacatacaagtaacaggcctgcttcgtgctgccattcagaacaggcataaaaagcaaatcatttactttccggaaacagagtccagctgcacagagcattcgcggttattcccttgttctatcattttctaccacccaacaacattcagcaaaacgagttaataatagttactggtgtttgaggaagggtaaaaaaataaaataaaataaaataaaactaaagaacacacatggcagagatacgatattactgcaaaagcaggtgaatgcgggaacatccttggcttgccaggctttatgtgaagcttgcatttttcttatccttggctttcttggtttgctgggccccaagatgctgggcctgggactgtagtaactgaaccggtggctttcttcttctggaaagtggtcacctccttcttaaggn

SEQ ID NO: 5770 - DNA, 548 bp, Homo sapiens
  misc_feature (323)..(323): "n" may be a, t, c, g, other or unknown
  misc_feature (459)..(459): "n" may be a, t, c, g, other or unknown
  misc_feature (471)..(471): "n" may be a, t, c, g, other or unknown
  misc_feature (477)..(477): "n" may be a, t, c, g, other or unknown
  misc_feature (481)..(481): "n" may be a, t, c, g, other or unknown
  misc_feature (496)..(496): "n" may be a, t, c, g, other or unknown
atgaagatttattttttaagttctaaggaactttagttttcttatttgtagctaattctcttcttaaaatttatttattttttacattagtctctttacatttatttatatatatttttattatactttaagttctagggtacatgtgcacaacgtgtaggtttgttatatatgtatacatgtgccatgttggtgtgctgcacccattaactcgtcatttacattaggtatatctcctaatgctaaccctccccactcccccaaccccacaacaggccccggtgtgtgatattcccccttctgtgtccaagtgttctcattgntcaagtcccacctatgagtgataacatgcaatgtttggttttctgtccttgcgatagtttgctgagaatgatggtttccagcttcatccatgtccctacaaaggcatgaactcatcattttttatggctgcatagnattccatggggnatatgngccncaatttcttaatccnggctatcattggtggacattttggggtgggtcccaggctttgggtattggga

SEQ ID NO: 5771 - DNA, 540 bp, Homo sapiens
  misc_feature (4)..(4): "n" may be a, t, c, g, other or unknown
  misc_feature (22)..(22): "n" may be a, t, c, g, other or unknown
  misc_feature (72)..(72): "n" may be a, t, c, g, other or unknown
  misc_feature (100)..(100): "n" may be a, t, c, g, other or unknown
  misc_feature (118)..(118): "n" may be a, t, c, g, other or unknown
  misc_feature (124)..(124): "n" may be a, t, c, g, other or unknown
  misc_feature (199)..(199): "n" may be a, t, c, g, other or unknown
  misc_feature (252)..(252): "n" may be a, t, c, g, other or unknown
  misc_feature (317)..(317): "n" may be a, t, c, g, other or unknown
  misc_feature (379)..(379): "n" may be a, t, c, g, other or unknown
  misc_feature (424)..(424): "n" may be a, t, c, g, other or unknown
  misc_feature (462)..(463): "n" may be a, t, c, g, other or unknown
  misc_feature (480)..(480): "n" may be a, t, c, g, other or unknown
  misc_feature (505)..(505): "n" may be a, t, c, g, other or unknown
  misc_feature (512)..(512): "n" may be a, t, c, g, other or unknown
  misc_feature (540)..(540): "n" may be a, t, c, g, other or unknown
gagnggcagcgcctttatttgngggggccttcaaggtagggtcgtggggggcagcggggaggaagagccganaaactgtgtgaccggggcctcaggtggngggcattgggggctcctnttgcanatgcccattggcatcaccggtgcagccattggtggcagcgggtaccggtcctttcttgttcaacatagggtaggnggcagccacgggtccaactcgcttgaggctgggccctgggcgctccattttgngttccaggagcatgtggttctgtggcgggagccccacgcaggccctgaggatgttctcgatgcanctgcgctggcggaaaagcgcattgaccaccgggctgccgggcggactagtggcgccttgaanaggaagctgagcagggacagcacggggtggaaaggctgcggcttngggtccatgtcagtgcaaaaacttacgcccttggacannttgggcaaacaacgctnaggtccaacattaatgggtgccggncaacaancgaggtctttaaaccgtgttgggcaaan

SEQ ID NO: 5772 - DNA, 542 bp, Homo sapiens
  misc_feature (1)..(542): "n" may be a, t, c, g, other or unknown
nnnnnnnnnnnnnnnnnnnnnnnnnnnnnnnnnnnnnnnnnnnnnnnnnnnnnnnnnnnnnnnnnnnnnnnnnnnnnnnnnnnnnnnnnnnnnnnnnnnnnnnnnnnnnnnnnnnnnnnnnnnnnnnnnnnnnnnnnnnnnnnnnnnnnnnnnnnnnnnnnnnnnnnnnnnnnnnnnnnnnnnnnnnnnnnnnnnnnnnnnnnnnnnnnnnnnnnnnnnnnnnnnnnnnnnnnnnnnnnnnnnnnnnnnnnnnnnnnnnnnnnnnnnnnnnnnnnnnnnnnnnnnnnnnnnnnnnnnnnnnnnnnnnnnnnnnnnnnnnnnnnnnnnnnnnnnnnnnnnnnnnnnnnnnnnnnnnnnnnnnnnnnnnnnnnnnnnnnnnnnnnnnnnnnnnnnnnnnnnnnnnnnnnnnnnnnnnnnnnnnnnnnnnnnnnnnnnnnnnnnnnnnnnnnnnnnnnnnnnnnnnnnnnnnnnnnnnnnnnnnnnnnnnnnnnnnnnnnnnnnnnnnnnnnnnnnnnnnnnnnnnnnnnnnnnnnnnnnnnnnn

SEQ ID NO: 5773 - DNA, 280 bp, Homo sapiens
  misc_feature (15)..(15): "n" may be a, t, c, g, other or unknown
  misc_feature (271)..(271): "n" may be a, t, c, g, other or unknown
  misc_feature (273)..(273): "n" may be a, t, c, g, other or unknown
  misc_feature (276)..(280): "n" may be a, t, c, g, other or unknown
acatttttataatgngtatttattattcaaatagcttgacagcaaagtgttggaaaacgaagagcaggaattccgcggttcctgcccggcctcgccatccagctgggagaagagcatggtcatttccttcacttagtccacggccactcggcgctcatccccagcacagccctccccaggccgcggcaaagactgttgctgtcctgctgagggatgtgcccccggggattcaatcgagattctgtaagatgtgggggatgtgggtggcggngnggnnnnn

SEQ ID NO: 5774 - DNA, 403 bp, Homo sapiens
  misc_feature (25)..(25): "n" may be a, t, c, g, other or unknown
  misc_feature (29)..(29): "n" may be a, t, c, g, other or unknown
  misc_feature (158)..(158): "n" may be a, t, c, g, other or unknown
  misc_feature (221)..(221): "n" may be a, t, c, g, other or unknown
  misc_feature (233)..(233): "n" may be a, t, c, g, other or unknown
  misc_feature (236)..(236): "n" may be a, t, c, g, other or unknown
  misc_feature (250)..(250): "n" may be a, t, c, g, other or unknown
  misc_feature (358)..(358): "n" may be a, t, c, g, other or unknown
  misc_feature (362)..(362): "n" may be a, t, c, g, other or unknown
  misc_feature (372)..(372): "n" may be a, t, c, g, other or unknown
  misc_feature (394)..(394): "n" may be a, t, c, g, other or unknown
  misc_feature (397)..(397): "n" may be a, t, c, g, other or unknown
  misc_feature (400)..(400): "n" may be a, t, c, g, other or unknown
  misc_feature (403)..(403): "n" may be a, t, c, g, other or unknown
gaacaagacaaagatgaactttatngagngttacaacagctcagagacctccagggggtatttcctctctgtaggcaggttgcccatcaggtattcagttctcagtagagaggaggccctggagaggatggctcctctctgcaactgatcgccctaangtctgcagctctcagaagagaggaggccctggagagggtggctcttctctgcccacaggttgnctctgcagctgncancagggagggtaggncctttctgcaactggctgttccatcatctccaactatcagcagagagggtagctcctctcttaggcttgttgacccataggtctctgccctctgggccctctggcagncctntgccctactntggctgaacccagggtttttanggnccnccn

SEQ ID NO: 5775 - DNA, 549 bp, Homo sapiens; identical to SEQ ID NO: 5573
  misc_feature (1)..(549): "n" may be a, t, c, g, other or unknown

SEQ ID NO: 5776 - DNA, 530 bp, Homo sapiens
  misc_feature (460)..(460): "n" may be a, t, c, g, other or unknown
  misc_feature (464)..(464): "n" may be a, t, c, g, other or unknown
  misc_feature (472)..(472): "n" may be a, t, c, g, other or unknown
  misc_feature (503)..(503): "n" may be a, t, c, g, other or unknown
  misc_feature (510)..(510): "n" may be a, t, c, g, other or unknown
  misc_feature (517)..(517): "n" may be a, t, c, g, other or unknown
  misc_feature (520)..(520): "n" may be a, t, c, g, other or unknown
cttaatattgagtttattagataaagacaagaaaaaatggggcttggggaaattggggcttctggggttttaaggagcatgctgaaagaacgtaagaaacaaaacatgaagggaaatggaaatgttaccctcactcccctcctccctgctgtccagtgtggatgccacctccagcctgcaggacggagccccctcccatcatcacacagtgcacctgggctctgcagccccttgcctccattgcagccgcagcaagaggcctccacttgtccgtcagggacgctccaaggaaggaaaaagccgcccccggacaggggagaccactgtgttctctgtgggcaggtggggcaggtgctccagggaaaggggggctgaggtagggggcccagtgatcaggcacctgatcccaaaagtgggccttggctctttctcctggactgggaacttcggcagaagtcangctncacaatgngccccacaatttgagaaaggcttccctaacnttggccnaaggaanttncccccaaatt

SEQ ID NO: 5777 - DNA, 541 bp, Homo sapiens
  misc_feature (477)..(477): "n" may be a, t, c, g, other or unknown
  misc_feature (481)..(481): "n" may be a, t, c, g, other or unknown
  misc_feature (496)..(496): "n" may be a, t, c, g, other or unknown
  misc_feature (520)..(520): "n" may be a, t, c, g, other or unknown
  misc_feature (524)..(524): "n" may be a, t, c, g, other or unknown
  misc_feature (528)..(528): "n" may be a, t, c, g, other or unknown
gagtgtggaaacaatgggattgagcttttatcttagggaaaacttttacaagaaacagttcactgagagggctccagaaagttattgtagacctggaaactttacaactgttcctcatgtccagcaaaagcaataacatctttcatctttaaagctttaattctttaagcaatctactttaatcacttcaaggcggtgatatcattagatgttacaaaattaaagagctgggctacataatttttggaactctgcaccaaagaagccattcacaatggaaactgtggagtttcggtagatggcactcttttctctgagtgacaactcaaggtccagcatgtgaccgtagatgtagaacaggggctttcctgaggagctgtcctttagcctcaactataatcctggtaaactcacagccaatcatttttaaaaagaagcctgtagataagacatcaatccaggaatctgaagtagttnagangcatttaatcacagnctttccttctttccagaaatggtncagngganttggtttcttttt

SEQ ID NO: 5778 - DNA, 539 bp, Homo sapiens
  misc_feature (475)..(475): "n" may be a, t, c, g, other or unknown
  misc_feature (478)..(478): "n" may be a, t, c, g, other or unknown
  misc_feature (510)..(511): "n" may be a, t, c, g, other or unknown
  misc_feature (516)..(516): "n" may be a, t, c, g, other or unknown
  misc_feature (519)..(519): "n" may be a, t, c, g, other or unknown
cactgcttttcctttattgataggtcagagagcatttcctggcacccccagggtacagccccctgactcctgctacccaagaaggccatcctttcctgaatccaagtcatctgccatgacaagagcaataaaactgtccttgggaagagcttctgacaccagtgatggctgggaggcccatgtgacgtggatgcttgggatgttgtcattgacatccagaaccttgatgagaactttgcaatgggctgggataggattgggacccaggtcccttgcctgaacatccacctcgtaggcagggttcttttcatagtctagaggtcgacgcagaatgacctggcctgtcttggcatcaatactgaaggtgtccagcacctctggaggcatgtgcttactgaggaagaactccacctcccattggggccttggtcaaggtctgtggcggcaattttatgagaagcgtaccaagtgccanatnttcttggatttcaagggccagggaacttttannaaacnccngggttttggcaatggggcca

SEQ ID NO: 5779 - DNA, 493 bp, Homo sapiens
  misc_feature (54)..(54): "n" may be a, t, c, g, other or unknown
  misc_feature (56)..(56): "n" may be a, t, c, g, other or unknown
  misc_feature (70)..(70): "n" may be a, t, c, g, other or unknown
  misc_feature (111)..(111): "n" may be a, t, c, g, other or unknown
  misc_feature (130)..(130): "n" may be a, t, c, g, other or unknown
  misc_feature (160)..(160): "n" may be a, t, c, g, other or unknown
  misc_feature (194)..(194): "n" may be a, t, c, g, other or unknown
  misc_feature (204)..(204): "n" may be a, t, c, g, other or unknown
  misc_feature (264)..(264): "n" may be a, t, c, g, other or unknown
  misc_feature (285)..(285): "n" may be a, t, c, g, other or unknown
  misc_feature (342)..(342): "n" may be a, t, c, g, other or unknown
  misc_feature (373)..(373): "n" may be a, t, c, g, other or unknown
  misc_feature (405)..(405): "n" may be a, t, c, g, other or unknown
  misc_feature (407)..(407): "n" may be a, t, c, g, other or unknown
  misc_feature (453)..(453): "n" may be a, t, c, g, other or unknown
  misc_feature (465)..(465): "n" may be a, t, c, g, other or unknown
  misc_feature (471)..(471): "n" may be a, t, c, g, other or unknown
  misc_feature (475)..(475): "n" may be a, t, c, g, other or unknown
  misc_feature (489)..(489): "n" may be a, t, c, g, other or unknown
ccaagcacatccacccatgggggctttattcagtcacgtccccacgcccacggntnactccaccaggcanacagaggggaggccaccccactgcaaagggtcccagccagngggcaccaacctcaggaanacgtggtccccacctggagcttccctcggntgccctggcccttgagcccgtcctgaggatttgngctttgactntgacagggagcagcaggaagctgccagcccactgcctccatgcgggtccttggagggcanacggtggagcggcgcttcctnagctcccgcggtcaggccccatcagggatggccacagtccagccacaggggcgactntgcccatcagtccccctggggcagcgaccanatcctggctggggcagcaccggacaggccctntntatgggcctaagggcaatgcaagtgggggctttgttgggcccaagncaatggacccanccctangaanccttaattggcaanaagg

SEQ ID NO: 5780 - DNA, 530 bp, Homo sapiens
  misc_feature (467)..(467): "n" may be a, t, c, g, other or unknown
  misc_feature (487)..(487): "n" may be a, t, c, g, other or unknown
  misc_feature (511)..(513): "n" may be a, t, c, g, other or unknown
  misc_feature (524)..(525): "n" may be a, t, c, g, other or unknown
atacttagaaatacttgaaaaatgtggtccctttttgtagtactagtctctacttggggacaagaaaatagaatatgcaactcagaaaggaaagagcccaaagacgagagaacctgcttgttagctcattaacctgtttagtaaagatctgctttaaaatgcctgatgctgtgcagtatcatacaaaacaatcttcagccttcaaagcagctgatgcaccttctcagagatctgtttgtctgattaacagtctgctgccttggtgggccttggtcttggtcactttcggtcatcgatggttttaatgaattctactgctgctgtgaactgcatccaccaataggactcctctccagacagacagctagcataaaagctactgatatactggacagtagacagcaaacagggtggatttgcctttatcaacacaaaccccaacacaggaccaaggcattccggttcangggcagaagtcctcattggncaggcttaaggaggtcataatcgnnnagcccattttnngatgc

SEQ ID NO: 5781 - DNA, 541 bp, Homo sapiens
  misc_feature (89)..(89): "n" may be a, t, c, g, other or unknown
  misc_feature (103)..(103): "n" may be a, t, c, g, other or unknown
  misc_feature (136)..(136): "n" may be a, t, c, g, other or unknown
  misc_feature (143)..(143): "n" may be a, t, c, g, other or unknown
  misc_feature (154)..(154): "n" may be a, t, c, g, other or unknown
  misc_feature (173)..(173): "n" may be a, t, c, g, other or unknown
  misc_feature (203)..(203): "n" may be a, t, c, g, other or unknown
  misc_feature (265)..(265): "n" may be a, t, c, g, other or unknown
  misc_feature (287)..(287): "n" may be a, t, c, g, other or unknown
  misc_feature (423)..(423): "n" may be a, t, c, g, other or unknown
  misc_feature (429)..(429): "n" may be a, t, c, g, other or unknown
  misc_feature (447)..(447): "n" may be a, t, c, g, other or unknown
  misc_feature (470)..(470): "n" may be a, t, c, g, other or unknown
  misc_feature (474)..(474): "n" may be a, t, c, g, other or unknown
  misc_feature (535)..(535): "n" may be a, t, c, g, other or unknown
  misc_feature (539)..(539): "n" may be a, t, c, g, other or unknown
atgttccaaatgtgatgggtttattttattttactatgatgcaaaaccaaagattccactatagcacagagaccagtatattacaaggncatgaaaaaatggngtgggacatgcaggacgtgatgtacaaactggngggtcanatcgtctcctntaacatgacgctacactgncgctgaggaacacatttaataacacttcanaactgaactgaaacgtggcacaaacatgacaacttccaggcatgccttcaagcgtctccctnaggagggattcgcaacccctanacttcagtgtggggaggattacaattctttggaagaataaaaagttcacacttttgaaatttcacagaagaattttaaggccaaaacatagtgggttcatttctcttcactttcagggacaaatctgagctttctnaaaccncattaagctttcaggtcnaatcccaggccaaccttgggacntctngactggaagtttttcccatcggtttaaagctgataaaggcaatttggctcctaggaagaanaaancc

SEQ ID NO: 5782 - DNA, 529 bp, Homo sapiens
  misc_feature (408)..(408): "n" may be a, t, c, g, other or unknown
  misc_feature (463)..(463): "n" may be a, t, c, g, other or unknown
  misc_feature (466)..(466): "n" may be a, t, c, g, other or unknown
  misc_feature (486)..(486): "n" may be a, t, c, g, other or unknown
  misc_feature (491)..(491): "n" may be a, t, c, g, other or unknown
  misc_feature (515)..(515): "n" may be a, t, c, g, other or unknown
  misc_feature (522)..(522): "n" may be a, t, c, g, other or unknown
  misc_feature (527)..(527): "n" may be a, t, c, g, other or unknown
attgtgctgatgggttagagaaagaaatatttaaaaacctcagtccagacgacacccacagccgctccaaaagcctcgcgccctccccccgccccccccccccaaggttgagtcgccactttgccgccaagtttgtgattgtcacgagttcacaagtttggaatcctgggtctgggccgtgcagacgtcgcggcgccgcgggctagcgtcggtaggggtggaacccttgcacgttgtggttctgccctcgtccaaagccgctgccgccggcgagggggccccccgaccctggcacggagggacccccgtaggaaggaggctgctggctggggtctgagaagccctgtccgaagccactcaagtcctgcccgtaacctgcatactgaccataggggaagtctggctgancttgtcgggggcttgcttatgtccggggcacctgaaacggaagccgtgggaaagnccnagggcttgccccggaatggnttgtngaaggaaggaacccccggagggcnaaactgntctgncg

SEQ ID NO: 5783 - DNA, 494 bp, Homo sapiens
  misc_feature (249)..(249): "n" may be a, t, c, g, other or unknown
  misc_feature (443)..(443): "n" may be a, t, c, g, other or unknown
  misc_feature (466)..(466): "n" may be a, t, c, g, other or unknown
  misc_feature (468)..(468): "n" may be a, t, c, g, other or unknown
  misc_feature (470)..(470): "n" may be a, t, c, g, other or unknown
  misc_feature (483)..(483): "n" may be a, t, c, g, other or unknown
  misc_feature (486)..(486): "n" may be a, t, c, g, other or unknown
  misc_feature (491)..(491): "n" may be a, t, c, g, other or unknown
cagtaaaccactttaccaattaatcttttattttttattgcatacatcaatatttaacagaagaaaaataaagaacccctaatgttaaactgaattacatgttatcttctgattcttttcaatgtagacctaaattttcacatgtatcagtaaacacaatttatgttcttattaacatttttgaatctcacttttttgcatacaatttgacatatatcaatattattgaatggctatataacattctgngatagcactagcaatacaccaaaatttacttaaccatttccaatcgttgggcttttttcccccttaaagttatctgagtggaactgctagaaaactttgtacaaatagcttttctttcttttaaatattttcctgggcatatgccactcaaagtgagtatgtcaaaagatcagttataaagccctttttatagncttctacacaggtctcttaaaangntnctaatccccatgntgntggtntta

SEQ ID NO: 5784 - DNA, 485 bp, Homo sapiens
  misc_feature (431)..(431): "n" may be a, t, c, g, other or unknown
  misc_feature (439)..(439): "n" may be a, t, c, g, other or unknown
  misc_feature (445)..(445): "n" may be a, t, c, g, other or unknown
  misc_feature (467)..(467): "n" may be a, t, c, g, other or unknown
  misc_feature (469)..(469): "n" may be a, t, c, g, other or unknown
  misc_feature (472)..(473): "n" may be a, t, c, g, other or unknown
cagtgttctaacaagtactttaatggatagggtttgctgtctaaaacatgaagaggtaactcaacattcctttcagtgccacaggttaagaacttggagaactggctttcctgaggagcttctagctccagaggttgtacatgctcatggcagcaacaacccattgaccacttcttcaaagtagttcactgccaaggagaatcaaaattcaatttggattcccaatactcagcctaccttcaatttcccatcaagcctatattcttagcctttagtttaagtgtgggttatcttaacagctcacttggcctcagttcaaagtgaaatttcctgagtccttgaaagaagtagaaacccaatcaatgagtttttctcttgatctctactttgtgagaaggatacatttctagaaatttcaatacctttcaagngtcagaanggaatntatggaactggtggaaattgcnanggnnggataataaggg

SEQ ID NO: 5785 - DNA, 512 bp, Homo sapiens
  misc_feature (260)..(260): "n" may be a, t, c, g, other or unknown
  misc_feature (289)..(289): "n" may be a, t, c, g, other or unknown
  misc_feature (301)..(301): "n" may be a, t, c, g, other or unknown
  misc_feature (336)..(336): "n" may be a, t, c, g, other or unknown
  misc_feature (381)..(381): "n" may be a, t, c, g, other or unknown
  misc_feature (431)..(431): "n" may be a, t, c, g, other or unknown
  misc_feature (467)..(467): "n" may be a, t, c, g, other or unknown
  misc_feature (472)..(472): "n" may be a, t, c, g, other or unknown
  misc_feature (474)..(474): "n" may be a, t, c, g, other or unknown
  misc_feature (481)..(481): "n" may be a, t, c, g, other or unknown
  misc_feature (506)..(506): "n" may be a, t, c, g, other or unknown
  misc_feature (509)..(509): "n" may be a, t, c, g, other or unknown
cttatcaaaagtttgttttattttcaatacaagataaataccatgcttgttactagtgcagtttaaggccgacaatggccatatatcaaactgccgaacagtcacctaaatgctaaagaaaggaaagacaaagtaaacattaaacacaaaattgcaattacaaacattttaataaaatggaatgagctttttaattgaagctaatatgaagtctaattctcatggacagcaaaaaaaaaaaaaaaaaaaaagtctattanatcaattatcaccttacctttttgcacanaaatcttattgngaagtcaccatagagtcaatagctaaaattttaanactttctttggccttctgatattaaacaaattatttacaaactgngatcagtaattcggggatattgggtaaaatgatcaattttttggtggtgntggtaagggctttccattaaaaattggaaaaccacntttgnanggttgancaggcttgaaactaacttgggtaanatncca

SEQ ID NO: 5786 - DNA, 542 bp, Homo sapiens
  misc_feature (473)..(473): "n" may be a, t, c, g, other or unknown
  misc_feature (491)..(491): "n" may be a, t, c, g, other or unknown
  misc_feature (495)..(495): "n" may be a, t, c, g, other or unknown
  misc_feature (497)..(497): "n" may be a, t, c, g, other or unknown
  misc_feature (501)..(501): "n" may be a, t, c, g, other or unknown
  misc_feature (503)..(503): "n" may be a, t, c, g, other or unknown
  misc_feature (526)..(526): "n" may be a, t, c, g, other or unknown
gtttaaccctagctaaacctcataactccttaatgagaaagacactaataatctacaaataatattttacaaatgaaaaaacccaagcactaaaaagttatgtatcttgccctaggtcacatagcaagtgaaaggtcagaatcttaacactgctattctgaccacttgtaataccttctctaggcttaagataataaacaaattaagcaagggatatgtctttttatttttcccttttttgtttgtttgtttgcttgcttgctttttctttacgtagtattgctgtgctaggcacatgttagtatctcaacgaataatttgtattcagctttctattaagcacagctctctacaacctgcattgttaaacatttatagtcaacaacatgatgttaattatgacgacctgaagacattgcaagataatagagtcacttgaagcatcaaagaaagattaaaatatggtcatctgngccctggactgcgaatantggnangggncnaaagccagggaaactttggccanaaaaggcaggtcccgg

SEQ ID NO: 5787 - DNA, 541 bp, Homo sapiens
  misc_feature (114)..(114): "n" may be a, t, c, g, other or unknown
  misc_feature (224)..(224): "n" may be a, t, c, g, other or unknown
  misc_feature (259)..(259): "n" may be a, t, c, g, other or unknown
  misc_feature (436)..(436): "n" may be a, t, c, g, other or unknown
  misc_feature (479)..(479): "n" may be a, t, c, g, other or unknown
  misc_feature (490)..(490): "n" may be a, t, c, g, other or unknown
  misc_feature (517)..(517): "n" may be a, t, c, g, other or unknown
  misc_feature (524)..(524): "n" may be a, t, c, g, other or unknown
  misc_feature (528)..(528): "n" may be a, t, c, g, other or unknown
cactgatgacaatttattataatctgttagtagcacacagacaaatattagttaaaccagaaccatgtctacacagaagtgggcaatgacatgtgccattctatggcacacggngtgcacttaatcatcatgttttagcattttgatcttctgcttatggcgctcaatttctttctgcagacgctcaatctccttcttatgatgaacgatttcttcttcatggngttttttcaaagctgccagttgttctctactctgngctctacaaggacacggtggctcagggtttaatttcaatccttcaccccaaagagatctcaaagcataacctgtaatgtctaagcaaggaataggagttccaattccatgggagtctagctggtcatcctcttctactcctcaactagtgaaagaataccccatcttaaattgaggnggagccatcttaagaagaccaaagagcttattgctttcaaatnccctttaaaanggaaactccgaaagaatgggcccaggncctaatncctntgaggggaacacc

SEQ ID NO: 5788 - DNA, 475 bp, Homo sapiens
  misc_feature (436)..(436): "n" may be a, t, c, g, other or unknown
  misc_feature (438)..(438): "n" may be a, t, c, g, other or unknown
  misc_feature (455)..(455): "n" may be a, t, c, g, other or unknown
  misc_feature (463)..(464): "n" may be a, t, c, g, other or unknown
  misc_feature (474)..(475): "n" may be a, t, c, g, other or unknown
gagacagtctcgcactgtcacccaggctggagtgcagtggtgtgatctccgcgcactgcaacctctgcctcccgggttcaagcaattctccttcctcagcctcccgagtagaggcacccacgaccacacccagttaactttttgtatttttagtagagatggggtttcactatgttggccaggctggtcttgaactcctgacctcgtgatccacccgcctcggcctctcaaagtgctgggattacaggcgtgagccaccacacccagccaataaggctcctctctttacctaaagattgaataacccacacaccactgacaaccttccttctcatacagtgaggtaggtcaggaaagaggaaatataggtaccaactagtaacgaataggggaccttattaataggtagtaaaagcttaaactagattaaaagaangntcttttatattaaatanccaatttnnattttaaggnn

SEQ ID NO: 5789 - DNA, 431 bp, Homo sapiens
  misc_feature (30)..(30): "n" may be a, t, c, g, other or unknown
  misc_feature (74)..(75): "n" may be a, t, c, g, other or unknown
  misc_feature (411)..(411): "n" may be a, t, c, g, other or unknown
  misc_feature (413)..(413): "n" may be a, t, c, g, other or unknown
  misc_feature (415)..(415): "n" may be a, t, c, g, other or unknown
  misc_feature (422)..(422): "n" may be a, t, c, g, other or unknown
  misc_feature (424)..(425): "n" may be a, t, c, g, other or unknown
  misc_feature (428)..(428): "n" may be a, t, c, g, other or unknown
gcgtgtcggtctgcttttattacctcccanactgagcccccgacctggcccagcctggcccgtccccaatccanngggctggccaggccacctgcaccagggaggacagctgctggcagggactaataaacccttccacctggccatggtggtggtgttctctatggaccgaggccctgaaacgcgggcagggaggggcagagaacacactagcttgggggtgggcaccagcctcagacccctcagcagctttgggccctcggccgactttcccaggcagtgcaggctagcccagtccaggagtgtgcagcctggcttgggtcgagctctgtcacatctggataagcaactgggggctgagagtcccagggcagcctggcccagcaggtcaaggcgccacagggggccatnangnccagctngnncangcc

SEQ ID NO: 5790 - DNA, 557 bp, Homo sapiens
  misc_feature (519)..(519): "n" may be a, t, c, g, other or unknown
  misc_feature (530)..(530): "n" may be a, t, c, g, other or unknown
  misc_feature (533)..(533): "n" may be a, t, c, g, other or unknown
  misc_feature (536)..(536): "n" may be a, t, c, g, other or unknown
  misc_feature (557)..(557): "n" may be a, t, c, g, other or unknown
gagatagagtgtcactgtcgcccaggctggagtgcagcagatgcgaaactgaaaatacctctgattggttgctttgtgcaaccaatcagatgttgcataggagcgtaactttgtaacttcacttcagcctctgattggttgcagaaagcaggccgccacttcatttacaccgggtgaacaccaagtggccaatgggaaacctctaaggggcatttggactctgtagattctatatcctggaccttgagctgctgctccacccattcccacactgtggagtgtactttcattttcaataaatatctgtttttgctctttcattgcttcattctttccttgctttgctgtgcattttatctaattctttgttcaaaacaccaagaacctggacaacttgcagtcaagaccaagaccgtctactgataacacaggtcagatacttcacagcctgctactgagggatgctgtggagcttccagggcccaggatccttggtggatccacaacttttcaaggggncctcagcactntgngancccacgtggcagccttcttcn

SEQ ID NO: 5791 - DNA, 553 bp, Homo sapiens
  misc_feature (43)..(43): "n" may be a, t, c, g, other or unknown
  misc_feature (514)..(514): "n" may be a, t, c, g, other or unknown
  misc_feature (539)..(539): "n" may be a, t, c, g, other or unknown
  misc_feature (552)..(552): "n" may be a, t, c, g, other or unknown
cctgagacagggtctcactctgccacccaggctagaatgcagnggcttgatctcggcttactgcaacctctgcctctcgggttcaagcgattgtcctgcctcagcctcctgaggagctggaattacaggtgcatgccaccatgcccagctaaattttgtatttttagtagaggcagggtttcattacattgtaaaggctgggttcgaactccttaccttaggtgatccacccgccttagccttcccaaagtgatgagattacagatgtgagccacggtgcccagccacagttctggatcacattttttgtcacaaaaaaaggtattcataataataaaatcacctgaaatttatttggacactttactacttttacaaagtactcagcagcagttagacagagctggctttccttgcctcctgctcggtggctgtatcattccaggcaagtcactttgtcttgcattgcctccaatttcctctcattttaaggactagcaatttatacatcgantaagttgaggggattgattagatcncatacctaacctnc

SEQ ID NO: 5792 - DNA, 556 bp, Homo sapiens
  misc_feature (552)..(553): "n" may be a, t, c, g, other or unknown
cggactcactgccagtcagaaggtctgctccaatgttgtttaatgaatttacacgaaccgcaagggaagatgtttgtagcaagcatttttaattcttggtatcaaagcgtttttcatggatgggtagtctataagatttgcaaaggttggaatgatgtttagacagagctcctggatctgaatggaaggagcttctagtgctctgtaaaccatgggtagaacactgttctttatctcatcaggaggggttttggttagtagcaaatccattttttgtaggaaaattaacaaaatctggattggctcctgctgcttaaacacagggccaagttcaggaagaattaatttgacatattcttctttggtgcattcctcagcaataagtagaacattgggcaaaacaaaaggtaccatgtcagggtttacaaattctgaagtcaaacaaggcaaaattctctgcacaatgacacgcttgggcagttttggtagaacctttggcagcctttgaaaaactggggatttctgaagattatctctttggaaaaagggatnnaaa

SEQ ID NO: 5793 - DNA, 560 bp, Homo sapiens
gcaggcaatccatcagcatctatcaaatagttaaatgtatatgtcctttgacccaatcatttcccttcctggtgactaccctcagaaacacttgtccatatatgtaaatatctgagaacaagtgtgtttaaggctatatcgttatattatttataatccagaaataacaaaaatgtccaaccagagggaactgattattgtacagtcatttcacagaaaaatccctccatgcagacattaaaaagaatgcagttgttctttgcataatgatttctaaaacaagcaagggttagaaccataaacaaaagcagggaaattttgaaaccataagcttttgtaaagcccttctgtaaagcagaataataccacactcatgcctgtggccagtactgtggctggaacatcatgggcgcacaataaatatgtgttgagtgggtgaaagcacttgcatcttactgtggcaaacaggccaacaaaatgcagatcattagcaatggtttggagaactagagcaaaaacatacattccattaatttggctttcattcccccgaaagggct

SEQ ID NO: 5794 - DNA, 554 bp, Homo sapiens
gcttttagctttttatttttgtattaacaggagtcttattacacataggtctgataaaactggtttatgatcttcagtctgtttccagtgctgcataactagataacgtatgaaggaaaaacgacgacgaacaaaaaattaattgcttggaagacttagttgaatctatccatgaaaacagaatcaattaaacatgtatgtgttacttagactaaatataaataacccatataaatggtagctcaaacatctcaagtgtttcagagaatgttagaatctattgtttgaagtgtctattgtactctatgcaagttctgtttccaaacattagtattagttggtgatatttccccttcatagggaaggtaaaaaaggtttgtagaggtggcaaacaatatttggtttaaactagcaggagacaaaggaattccaagaaaggcaaaaatcctttcagtaagttttctgaggaaaatgcacaatatcttcaaacttgccagctggtagctagtaggcagcaaatctggatttattctcaaggctgctgctggatttgc

SEQ ID NO: 5795 - DNA, 553 bp, Homo sapiens
  misc_feature (532)..(532): "n" may be a, t, c, g, other or unknown
  misc_feature (536)..(536): "n" may be a, t, c, g, other or unknown
ccttgagacagattattgctctgtcgcccaggctggagtgcagtggtgtgatctcagctcactgcaacctcaacttcctgggttcaagtaattcttatgcctcagcctcgcgagtagtagctgggattacaggcaagcaccaccacgcctggctaatttttgtatttttgtagagatggggtttcaccatgttgcccaggttggtcttgaactcctgacctcaagtgacccacccgccttgacctctcaaagtgctgggattacaggcatgagccaccatgcccggcttttacatgattgtattttaatatacagtgggtaaaagtttgtgctaaaatgtatcatttatggctccaatttggtattattgaagggagatgtcccttcaatatgggagatgttcccttttactcctgactgatttgtttggttggggccttataatgtcatagaaaatgtgcattttgagtggttaaaaaaaaaaacagcctatagtttttactctcaaagacttgggttaatataaggaacngtantatacccgggttaaaac

SEQ ID NO: 5796 - DNA, 560 bp, Homo sapiens
  misc_feature (491)..(491): "n" may be a, t, c, g, other or unknown
ggaaaagatgagaaacgaggctttatttgctccaacagatattaaaagtatgagaaccacaaccatgaaaacaacagaagctgatgtgagaaacaacactaaaattaaacagtgcagacacaggtccagcgacaatgattttagcactcatacaggtggcatttcggtcagtgcatgatgattcagtgggcgaagcatttcagatccttgtctcatatcacacctcgaaatacattcctggtcaattaaacactgaaacgtactcagagaaaaagagatgaaagtgtaaacaatctttgtgtgagaaaggactttccaagcatgacctcaaaggctagagcataagagtcttcgttttaaaatgtgcaggcatttctgatttaaaaatgtaaactatagcaggttacatcaaaaaggaaaaaaatacagttaaatggcaaatgatgcatgaggaataatgatttacagtgaatatgttacaggtttgctgngcttaatatgtaccaatatcttacaagccaaccaaatattttcaaaactaaatgccttcttagataaga

SEQ ID NO: 5797 - DNA, 550 bp, Homo sapiens
  misc_feature (540)..(540): "n" may be a, t, c, g, other or unknown
gtagagacacagtctcgctatgttgcccaggctggtcatgaactccggccttaaagctctcacctcggtctcccaaagcattgggattacaggtgtaagccactgtgcccagctaggacaaaacttttgactttgtcaagccttaatttcctcttctataaaatggagttaagaagggctccttcctcacagattgtactgagtatttcatgagatgatatgtgtatgtcaggctgtgtctctccagggatggctgcatcaatattttgctactattcacatactctttttacagtatgatggacattcctctcactgacagatggggcacaggtcaattccccttgaatctagggaccttgtgactatttgaccagtagaatgtgcaggaagtgatgccatgtgacttttgagactaggtcatctaaacgatacagctgccacctgactctcactctctatactcgccttggaatccagtcaccatgttgtgaggaagctcaatctaaccgaacagatgtgggaacagcccacatgganaggaactgag

SEQ ID NO: 5798 - DNA, 498 bp, Homo sapiens
  misc_feature (430)..(430): "n" may be a, t, c, g, other or unknown
  misc_feature (469)..(469): "n" may be a, t, c, g, other or unknown
  misc_feature (472)..(472): "n" may be a, t, c, g, other or unknown
  misc_feature (484)..(484): "n" may be a, t, c, g, other or unknown
  misc_feature (486)..(486): "n" may be a, t, c, g, other or unknown
  misc_feature (492)..(492): "n" may be a, t, c, g, other or unknown
  misc_feature (495)..(495): "n" may be a, t, c, g, other or unknown
agatggagtctcactcttgttgcccaggctggagtgcagtggcatgatctcgactcactgcaacctccggctcccgggttcaagcgattctcctgcctcagcctcctgagtagctgggattacaggtgcatgccaccatgcccagctaattttttgtatttttagtagagacggggtttcaccatgttggtcaggctggtcttgaactcctgacctcgtcatccacctgcctcggcctcccaaagtgctgggattacaggcgtgagccaccgcgcccagctcagggcttttattttgtcacgttgaaaaaacaatgagttggtaggagaagcctcggatccaaggacaaagacaatatcaccaaatagctccaaaattacaatgaggatcagaagcctggaaggatggggtggaggtgagtggggatcanaatggaaacatctttcctctctctagcggccagtttggnganggcaagggactngngccatnctncct

SEQ ID NO: 5799 - DNA, 328 bp, Homo sapiens
  misc_feature (23)..(23): "n" may be a, t, c, g, other or unknown
  misc_feature (80)..(80): "n" may be a, t, c, g, other or unknown
  misc_feature (92)..(92): "n" may be a, t, c, g, other or unknown
  misc_feature (114)..(114): "n" may be a, t, c, g, other or unknown
  misc_feature (135)..(135): "n" may be a, t, c, g, other or unknown
  misc_feature (157)..(157): "n" may be a, t, c, g, other or unknown
  misc_feature (206)..(206): "n" may be a, t, c, g, other or unknown
  misc_feature (211)..(211): "n" may be a, t, c, g, other or unknown
  misc_feature (213)..(213): "n" may be a, t, c, g, other or unknown
  misc_feature (247)..(247): "n" may be a, t, c, g, other or unknown
  misc_feature (281)..(281): "n" may be a, t, c, g, other or unknown
  misc_feature (297)..(297): "n" may be a, t, c, g, other or unknown
  misc_feature (307)..(307): "n" may be a, t, c, g, other or unknown
  misc_feature (317)..(317): "n" may be a, t, c, g, other or unknown
gcacttataatgcttttattaancaggaactctctggtgttgagtaaaatgtgagcagataatgatggctttttcacagnctttatattggnataattaatctcaagtataaangctttcctagcaataaagggngagcattaagttttgccatatngttcacacatgtaggcgttttctccagtatgaattatcttacctacaangaagngngacaaccatttaaaggctttatctcactcttcanatttctaggatttctcaccagtataattactttnatggttagaaaagttngaggcgttgncaaaagtagncacatctttct

SEQ ID NO: 5800 - DNA, 563 bp, Homo sapiens
  misc_feature (479)..(479): "n" may be a, t, c, g, other or unknown
  misc_feature (514)..(514): "n" may be a, t, c, g, other or unknown
  misc_feature (546)..(546): "n" may be a, t, c, g, other or unknown
  misc_feature (563)..(563): "n" may be a, t, c, g, other or unknown
agacttttgactttattcagaaagtacatttatacatttgttccaaatgtgctaacatggataatttgcgtaacagaaaactcacattaaaattttaaggaaaaaaagagattaaacacaaggtttattcttaagtccaattcatattattactggcccacatgtagtcagagttcagcgtaattgaaccagatgtttttcctctttgcaaaaaactgcatattttaatactgaagttaaagataaaaaactatgtttatgcatgtttcttttagtagataagtaccataaccttgtccatgaaaaagaaaattatcatttacatggaaacagcagcccttttcaaaataattaatgagcctaatttatttggcaacccaagttgctgactttggtatttgatgctctgataataggatcctacaagggaatatgtttttaccaattatatgtgaaacaacaggaacctatttaaatgnctcattttccttttaaatgcaaagtttataactgnggatgtgaaatcaaattaaaggcagttgtgancttaagttatccccccn

SEQ ID NO: 5801 - DNA, 554 bp, Homo sapiens
  misc_feature (1)..(554): "n" may be a, t, c, g, other or unknown
nnnnnnnnnnnnnnnnnnnnnnnnnnnnnnnnnnnnnnnnnnnnnnnnnnnnnnnnnnnnnnnnnnnnnnnnnnnnnnnnnnnnnnnnnnnnnnnnnnnnnnnnnnnnnnnnnnnnnnnnnnnnnnnnnnnnnnnnnnnnnnnnnnnnnnnnnnnnnnnnnnnnnnnnnnnnnnnnnnnnnnnnnnnnnnnnnnnnnnnnnnnnnnnnnnnnnnnnnnnnnnnnnnnnnnnnnnnnnnnnnnnnnnnnnnnnnnnnnnnnnnnnnnnnnnnnnnnnnnnnnnnnnnnnnnnnnnnnnnnnnnnnnnnnnnnnnnnnnnnnnnnnnnnnnnnnnnnnnnnnnnnnnnnnnnnnnnnnnnnnnnnnnnnnnnnnnnnnnnnnnnnnnnnnnnnnnnnnnnnnnnnnnnnnnnnnnnnnnnnnnnnnnnnnnnnnnnnnnnnnnnnnnnnnnnnnnnnnnnnnnnnnnnnnnnnnnnnnnnnnnnnnnnnnnnnnnnnnnnnnnnnnnnnnnnnnnnnnnnnnnnnnnnnnnnnnnnnnnnnnnnnnnnnnnnnnnn

SEQ ID NO: 5802 - DNA, 548 bp, Homo sapiens
  misc_feature (459)..(459): "n" may be a, t, c, g, other or unknown
  misc_feature (518)..(518): "n" may be a, t, c, g, other or unknown
  misc_feature (542)..(542): "n" may be a, t, c, g, other or unknown
  misc_feature (548)..(548): "n" may be a, t, c, g, other or unknown
cagttcaagaaatttatattcaaaaattttcttaagaatacacatgattttacaagatcattcatcatagcaccaagcctaatattccttaatagaaaacagtcaaataacaaatactccagttaattcccacaggtataaattattcaaatagccatttatatcttaatttacagtaatcaataaataagacggcacattcatatattgtttataaagatctttttttttacaaagctacagctatgtatatcctaaatagacaaaaataatccttgtactacaaaataacatttcattttcctcaatagttttcttagagctctcagtaaaaactttcagacatagtcaattaagccctgcacaatagggaaacattcaatctgctcaatagaccagactcccccaaaataaaacaatgatcaccacccactacaatatggtctgaacaatctcctntccaagtttagttaagtctgtcctgaggatgtacagtaggggaacgaccatttttccgngttcacaatttggctttggcgganagaatn

SEQ ID NO: 5803 - DNA, 566 bp, Homo sapiens
  misc_feature (507)..(507): "n" may be a, t, c, g, other or unknown
  misc_feature (544)..(544): "n" may be a, t, c, g, other or unknown
  misc_feature (547)..(547): "n" may be a, t, c, g, other or unknown
  misc_feature (552)..(552): "n" may be a, t, c, g, other or unknown
  misc_feature (555)..(555): "n" may be a, t, c, g, other or unknown
gtctatccagggggcctttaatagctgagaagtgctgctctttcagatgggggtgccaagcaggccggtgaccccaacctccaccccctgcccctgagaagagactgggctgggccagagaccaatccacgggggaaaggccaccagcacccatcaggcttcccactggcaccctgaaaacctgcccaggctgggccgccagcgtcgtccacaggccttggccagcgggggccctcagggaagcaacccagctcgcatctggaaggccaggcagtcccctcgggtggcttgctgcggaagaaagcacacaggaggaggggtacatcacaaacagagctgggggcggatggcaggcagaggggccacacccaccttgttgatctctctgtgtcgttctttggttacgatttcctctaggacctcgccatctcccttaataagcctggtgcgccccgtctcagggtccaccaccttgcggatgatgctctgccgggcattccactcctncttgggcatgggcttcatgggctggattcgggacttntgntcatncgnctggactgggc

SEQ ID NO: 5804 - DNA, 563 bp, Homo sapiens
  misc_feature (452)..(452): "n" may be a, t, c, g, other or unknown
  misc_feature (511)..(511): "n" may be a, t, c, g, other or unknown
  misc_feature (534)..(534): "n" may be a, t, c, g, other or unknown
  misc_feature (556)..(556): "n" may be a, t, c, g, other or unknown
  misc_feature (563)..(563): "n" may be a, t, c, g, other or unknown
gagacgaagtgtcgctcttgttgcccaggctagagtgcaatggcacgatctcagctcaccgcaacctccgcctcccaggttcaagcaattctcctgcctcagcctcccaagtagctgggattacaggcatgtgccaccatgcccgactaattttttatattttttagtagagacagggtttctccatgttggtcagactggtctcaaactcccgatctcaggtgatccacacgcctcggcctcccaaagtgctgggattacaggcatgagccactgcacccggccgtcaatttgcctttctttatggtgctgggtgggactaagtcacagcagagtcacctaacagcctggatgcacaggactgaggaaggtaagtcaaagagtgcagggcctttctctaccttctcagcaacaaagagaagagacacattcttctctcagagtcctgctgngcttctgctaatacatgcagccttggggacttatcgacagcacaaagccagcatttctnctttctcagagaaacattaaggnacctggactggcgatagggttnctggatn

SEQ ID NO: 5805 - DNA, 446 bp, Homo sapiens
  misc_feature (409)..(409): "n" may be a, t, c, g, other or unknown
  misc_feature (420)..(420): "n" may be a, t, c, g, other or unknown
  misc_feature (424)..(424): "n" may be a, t, c, g, other or unknown
  misc_feature (427)..(427): "n" may be a, t, c, g, other or unknown
  misc_feature (438)..(438): "n" may be a, t, c, g, other or unknown
  misc_feature (441)..(441): "n" may be a, t, c, g, other or unknown
  misc_feature (445)..(445): "n" may be a, t, c, g, other or unknown
cccagaatgaattctcgtgtttacttccagatttaatgactttgactttagtagtcatctgaactatttattttactttgccagtaatatttagaccttatatatctttcattatgccatcttatcttctaatgtcaagtgaacagttgctaaactgtcttctgcatttatcacattaaaaatgtctttcttggaaaatcttcttgatatgaataaagtatcttttagagccatcatttaaagcaggtttctctccaacacgagtctgctgaggtggtgtgagctgtgaactctggctgaaggctttcccatacacactgcaatgacatggtttctgaccagtgtgagttacctgatgttgaataagggttgactttccactgaaggcgtttccacattcttgacattnatagggctttncccnagnatgcattatcngancttna

SEQ ID NO: 5806 - DNA, 561 bp, Homo sapiens
  misc_feature (432)..(432): "n" may be a, t, c, g, other or unknown
  misc_feature (512)..(512): "n" may be a, t, c, g, other or unknown
  misc_feature (519)..(519): "n" may be a, t, c, g, other or unknown
  misc_feature (531)..(531): "n" may be a, t, c, g, other or unknown
  misc_feature (543)..(543): "n" may be a, t, c, g, other or unknown
  misc_feature (545)..(545): "n" may be a, t, c, g, other or unknown
  misc_feature (550)..(550): "n" may be a, t, c, g, other or unknown
  misc_feature (559)..(559): "n" may be a, t, c, g, other or unknown
catttataaaagggtatttatttcttattcatgtcaagtccaataagaattctactgccctactttttgtaatttacaaccatctgtaatacctagtttccaagaacaatgcaacagaaacagaagtgaaggaggagggcacaacagcttttaaccatctcagtctggaagtggttccaaaaatgtctcttccttttacaatctattgtccagtagtcacatgggctcaatctaattgcaaagagaagccccaaaatataagaggacatgtggatatttggagaacttaaattgtctctgtcacagaaaaaaaggaggttccaaatagagaacaacagaatgaaaacaacttaggggcatgggctggaaaagcttccccaaagcagtgacatttacgctaagatctaaagggagaaagaactcagcccttgnatgtttgaaaggtaaccaatatagtgaagaggtaagaggctaacacattattcaaggtataaaatatgcattcctaacgnggcctgnataccatagatnctatttagcttngnaaacntttatgggngc

SEQ ID NO: 5807 - DNA, 559 bp, Homo sapiens
  misc_feature (1)..(559): "n" may be a, t, c, g, other or unknown
nnnnnnnnnnnnnnnnnnnnnnnnnnnnnnnnnnnnnnnnnnnnnnnnnnnnnnnnnnnnnnnnnnnnnnnnnnnnnnnnnnnnnnnnnnnnnnnnnnnnnnnnnnnnnnnnnnnnnnnnnnnnnnnnnnnnnnnnnnnnnnnnnnnnnnnnnnnnnnnnnnnnnnnnnnnnnnnnnnnnnnnnnnnnnnnnnnnnnnnnnnnnnnnnnnnnnnnnnnnnnnnnnnnnnnnnnnnnnnnnnnnnnnnnnnnnnnnnnnnnnnnnnnnnnnnnnnnnnnnnnnnnnnnnnnnnnnnnnnnnnnnnnnnnnnnnnnnnnnnnnnnnnnnnnnnnnnnnnnnnnnnnnnnnnnnnnnnnnnnnnnnnnnnnnnnnnnnnnnnnnnnnnnnnnnnnnnnnnnnnnnnnnnnnnnnnnnnnnnnnnnnnnnnnnnnnnnnnnnnnnnnnnnnnnnnnnnnnnnnnnnnnnnnnnnnnnnnnnnnnnnnnnnnnnnnnnnnnnnnnnnnnnnnnnnnnnnnnnnnnnnnnnnnnnnnnnnnnnnnnnnnnnnnnnnnnnnnnnnn

SEQ ID NO: 5808 - DNA, 533 bp, Homo sapiens
  misc_feature (473)..(473): "n" may be a, t, c, g, other or unknown
  misc_feature (491)..(491): "n" may be a, t, c, g, other or unknown
  misc_feature (497)..(497): "n" may be a, t, c, g, other or unknown
  misc_feature (509)..(509): "n" may be a, t, c, g, other or unknown
  misc_feature (517)..(517): "n" may be a, t, c, g, other or unknown
  misc_feature (521)..(521): "n" may be a, t, c, g, other or unknown
  misc_feature (529)..(529): "n" may be a, t, c, g, other or unknown
gccaaactaccttgttttattggattttgagtaaaaacatgaaccatgtcaaagtttccaggcagactcctaaaaagcattagcagatctggacccaggcaggccagggacagggaggtccctctatcaggttttgaggcgggttgagcgccgaggtagtgggggctgggagggtcgagccgtcaccttgctgggtgttttgtcctgggtgttgggctgggagggtgggcggccgctggaggtgaacagggctgtcaaagcgttccgggcgttgattgcgcaccggcggctcacaggtcgggtggtggggctggggttcttggccgccttgtatttctgcaggttctcaaagtggcccagggacttgcagtgggagagctgtgcccctgagttgctgtgatagaacttgtgggcaaatgcggctgtgaatgtcctggggctgcacctgtggctggacctgtttaacggctctngcttcctgctgcaacttnacctgncttgggcccctnggaatggncccnggggctgncctt

SEQ ID NO: 5809 - DNA, 563 bp, Homo sapiens
  misc_feature (465)..(465): "n" may be a, t, c, g, other or unknown
  misc_feature (491)..(491): "n" may be a, t, c, g, other or unknown
  misc_feature (511)..(511): "n" may be a, t, c, g, other or unknown
  misc_feature (515)..(515): "n" may be a, t, c, g, other or unknown
  misc_feature (523)..(523): "n" may be a, t, c, g, other or unknown
  misc_feature (530)..(530): "n" may be a, t, c, g, other or unknown
  misc_feature (556)..(556): "n" may be a, t, c, g, other or unknown
aggcaaaactattttcattttactatgattggcaaattatgatgtatttgattgataaatctcagatttatcagattgattctagttcgtcttcatgtggcagaatatgtgttgtcaggagtgatttggtaattcagaaaagcagctgaagaagcatggaaacttccctacaagtatatggccacagctggctaaggttggagacagtattctatccttgggcctcagactcacatatgtatgtacatacacatattattcacccatatttccttccttctcccctcccccatctgtaaactgatatctaaactttacaaattacagttacaagaaaagttttgttccatttgaaatacaaaaaagatcaggagaagcaatctgctttttaattttacttatgcaggtaagttttttaaggatacagtcaatttggtttggcactttggaactaagaggggatcnggtcataaaaaaatctaccaactctnagcgaaactgaaatgaggtngacngaaagggntcccatncataaagggtttaaaaattaccaagnccaattt

SEQ ID NO: 5810 - DNA, 318 bp, Homo sapiens
  misc_feature (38)..(38): "n" may be a, t, c, g, other or unknown
  misc_feature (62)..(62): "n" may be a, t, c, g, other or unknown
  misc_feature (64)..(64): "n" may be a, t, c, g, other or unknown
  misc_feature (67)..(67): "n" may be a, t, c, g, other or unknown
  misc_feature (141)..(141): "n" may be a, t, c, g, other or unknown
  misc_feature (205)..(205): "n" may be a, t, c, g, other or unknown
  misc_feature (211)..(211): "n" may be a, t, c, g, other or unknown
  misc_feature (221)..(221): "n" may be a, t, c, g, other or unknown
  misc_feature (224)..(224): "n" may be a, t, c, g, other or unknown
  misc_feature (289)..(289): "n" may be a, t, c, g, other or unknown
  misc_feature (297)..(297): "n" may be a, t, c, g, other or unknown
  misc_feature (303)..(303): "n" may be a, t, c, g, other or unknown
  misc_feature (314)..(314): "n" may be a, t, c, g, other or unknown
  misc_feature (317)..(317): "n" may be a, t, c, g, other or unknown
caatcatgacatctttattataccatagatgaatattngttaaataaaaataggtacagcangngtncaataagaccagtagttctccttcagaactctacccatttttcagaggaaggaaacacttttccagaatacaangctcaagaaatgtaagccagatcccgcttgtatgaggtatcttaagtagtcagactctcaaaancagaangcagaataanggngccaagagctggggcaggcagggggaaggggaaaagaggagttgttcggtgggtatagaacttcngaattcangatganaaagttccggnggnc

SEQ ID NO: 5811 - DNA, 571 bp, Homo sapiens
  misc_feature (137)..(137): "n" may be a, t, c, g, other or unknown
  misc_feature (493)..(493): "n" may be a, t, c, g, other or unknown
  misc_feature (514)..(514): "n" may be a, t, c, g, other or unknown
  misc_feature (520)..(520): "n" may be a, t, c, g, other or unknown
  misc_feature (530)..(530): "n" may be a, t, c, g, other or unknown
  misc_feature (536)..(536): "n" may be a, t, c, g, other or unknown
  misc_feature (548)..(548): "n" may be a, t, c, g, other or unknown
  misc_feature (558)..(558): "n" may be a, t, c, g, other or unknown
cattgaagggttttactgctaatcactctggggaaaacagaggcaggttgggggagggataacaagtaacaaacatgggggagtgtgaaggtccctgggtcatggctccctgagggtttccctttcatttctaaggngggacctcagatctcttctccagaccaaggaggccccttccattgagaaggtcactcctcccaccccagagatctagaagcaaagttggggcacaacaggtgggaactagcaggaaactgcagtgcactcctacctaagcagttcacagacaatttggagaaccttcagacagtgacacccatctcataagtacttcctcaaaggccagggggactgctgccttaataacatgagcatgttctgagcctaccctatttctctttcaccccaagaaagtaaagccaagactgggtcttctgactttccaacacgagaaatttggcctggaaagaaggcaaggggttttatttcagangtccttcctcaggactttctngagaanctgactttanaggctnttccaaaacccnttttcaaagnggggatggaaggg

SEQ ID NO: 5812 - DNA, 553 bp, Homo sapiens
  misc_feature (9)..(9): "n" may be a, t, c, g, other or unknown
  misc_feature (506)..(506): "n" may be a, t, c, g, other or unknown
  misc_feature (523)..(523): "n" may be a, t, c, g, other or unknown
  misc_feature (533)..(533): "n" may be a, t, c, g, other or unknown
  misc_feature (546)..(547): "n" may be a, t, c, g, other or unknown
  misc_feature (552)..(552): "n" may be a, t, c, g, other or unknown
gcaattcanaaatgttttaatgtatttagaagcataaataccaaacctgtgctccaaagttaacaagtatgtctctaaactctagatctgatttttacagccacacttgagacaatgacgtaaacttaaactttacttttaatggcttaaactagcactaaaatgtttaatgtctcacttaggagatttcaaataaagtttttacatcgctcatgtttactaactcgacaatctgagctgtcctgttttcccaggtgttaaatatcatttaactgggaaatgaaagcaataaaaaaattctcaaacatgaactaccattactttcctataaacatcttaacattatagaaaatttccaattatgtcaaaatcagaaggtgaaacccttagctttccatgttacacctgacttagtactactcaagtatgggaaaaaggtcctggagaataatggttccaatacttttcattggcatcttaattggcatcatgtagaagtggaaaantgtagaggataagagcncaaggcttgnaattctccggacnnatggng

SEQ ID NO: 5813 - DNA, 563 bp, Homo sapiens
  misc_feature (488)..(488): "n" may be a, t, c, g, other or unknown
  misc_feature (524)..(524): "n" may be a, t, c, g, other or unknown
  misc_feature (530)..(530): "n" may be a, t, c, g, other or unknown
gtagagatgaggtcttgctgtattgcccaggctgctcttgagctcctggcttcaagccatcctcctgtcttggtttcccaaagtgctgggactataggtgtgactcaccatgcctggcctacatccagtttaatttatactacactgtgggtttagtcctcaaacatgtttttgttttacatataaaaatttgaggtaaaagaacatttttacattggtcaataatggtacatttaaacaatggacgactatatccattaaaatcgtgttgtggaagaatattcagtgacatggaaagactgactcaagggcaagtgaaacgtgtcaagagtctgttaggtactagacactgtaaactgggtcttggctgtgttacttgcttacatcctccatcatgtgatcttttagataacaaaatcgagatcatagggataatggggtgggctgattgaaagaacagaacttgggccacacttctagatgcctgngacttttctgcatctattcagatattaaggaattgnttatgnaaaccatgggggttgaatgctaaaggaccctcc

SEQ ID NO: 5814 - DNA, 555 bp, Homo sapiens
  misc_feature (510)..(510): "n" may be a, t, c, g, other or unknown
  misc_feature (522)..(522): "n" may be a, t, c, g, other or unknown
  misc_feature (546)..(546): "n" may be a, t, c, g, other or unknown
gagacagagtcttgctctctgtcctgggctggagtgcagtggtgcagtctgctcactgcaacctccgcctcccgaagattcaagcaattcttgggcctcagtctcctgaatagctgaagttacaggtgtgcgccaccatgtctggcaaatttttgtatttttagtacagatggggttttgccatgttggccaggcaggtcttgaactcctggccttgtgatctgcctgcctcggcctaccaaagtgttgggattataggcttgagccactgcgccaggccaatcttaacattttaattgttgttttgattctcttggttgtattacactaaaaacgtatttatgtgtaaaaatttaaaagcagcctgcataactcacccaactatttgataaatatcttcagattttccttggtgtaacctcagtatccaagcacctgggtttgcttttaattgaaaataccccttttaagatgagaaaaaaataatcattgggtaatatgactaaaaanccattgaaatgntcatgaatacccgaggggactaangaaaggttt

SEQ ID NO: 5815 - DNA, 577 bp, Homo sapiens
  misc_feature (1)..(577): "n" may be a, t, c, g, other or unknown
nnnnnnnnnnnnnnnnnnnnnnnnnnnnnnnnnnnnnnnnnnnnnnnnnnnnnnnnnnnnnnnnnnnnnnnnnnnnnnnnnnnnnnnnnnnnnnnnnnnnnnnnnnnnnnnnnnnnnnnnnnnnnnnnnnnnnnnnnnnnnnnnnnnnnnnnnnnnnnnnnnnnnnnnnnnnnnnnnnnnnnnnnnnnnnnnnnnnnnnnnnnnnnnnnnnnnnnnnnnnnnnnnnnnnnnnnnnnnnnnnnnnnnnnnnnnnnnnnnnnnnnnnnnnnnnnnnnnnnnnnnnnnnnnnnnnnnnnnnnnnnnnnnnnnnnnnnnnnnnnnnnnnnnnnnnnnnnnnnnnnnnnnnnnnnnnnnnnnnnnnnnnnnnnnnnnnnnnnnnnnnnnnnnnnnnnnnnnnnnnnnnnnnnnnnnnnnnnnnnnnnnnnnnnnnnnnnnnnnnnnnnnnnnnnnnnnnnnnnnnnnnnnnnnnnnnnnnnnnnnnnnnnnnnnnnnnnnnnnnnnnnnnnnnnnnnnnnnnnnnnnnnnnnnnnnnnnnnnnnnnnnnnnnnnnnnnnnnnnnnnnnnnnnnnnnnnnnnn

SEQ ID NO: 5816 - DNA, 538 bp, Homo sapiens
  misc_feature (470)..(470): "n" may be a, t, c, g, other or unknown
  misc_feature (500)..(500): "n" may be a, t, c, g, other or unknown
  misc_feature (513)..(514): "n" may be a, t, c, g, other or unknown
  misc_feature (523)..(523): "n" may be a, t, c, g, other or unknown
  misc_feature (536)..(536): "n" may be a, t, c, g, other or unknown
  misc_feature (538)..(538): "n" may be a, t, c, g, other or unknown
gagacggagttttgctgttccccaggctggagtgcagtggtgctatctcggctcactgcaagctccgccccccggggttcacgccattctcctgcctcagcctcccaagtagctgagactacaggtgcctgccaccttgcccggctaattttttgtattttagtagagacgaggtttcaccatgttagccaggatggtctcaatctcctgacctcgtgatccacccgccttggcctcccaaagtgctgggattacagatgtgagccaccacgcccggtcggcagttctttatagcagcatgagaatggactaatatagtacattgagtggagtgctgctataaagagacccaaaaatgtagaagcaactttggaactgggtaacaagcagaggttgaaagtttggagggctcagaagaagacaggaaggtgtgggaaaggtttggaactttctaagagacttggtgaaangggtttggcccaaaatgctaataggggatntggccaatgaaannccaggctgnatttggttttcanan

SEQ ID NO: 5817 - DNA, 561 bp, Homo sapiens
  misc_feature (475)..(475): "n" may be a, t, c, g, other or unknown
  misc_feature (489)..(489): "n" may be a, t, c, g, other or unknown
  misc_feature (534)..(535): "n" may be a, t, c, g, other or unknown
  misc_feature (559)..(559): "n" may be a, t, c, g, other or unknown
cctttcaaacactgtggcttacttgtttactcaactaagaaagaaaaagcaaccttattatagagattagcaagagatgaagaaaattatagggaggctgccctggcccaaaggtctgctaatggcttctgcagggaggatgaggatggtgctaggttaactgcttgtctccactacagaccagagaacgtccatgcgatgcctcttatcagtgaggtagatgatcatcctcttgccagaggtatcgagtgccagcccacagcacagcagagcaaaaaagtttaaagtaggtcaagttcaaaattatatcaaggagataagagatgggaggcaaaggctccagaagaggaacagaggcggaaggaagagaagctccaaggtgacgcccactctaggacaagatgatggggagcttgcttctgtcctgtcagacatacctcctgccaccacgagcagctgaatgaggggtgggaanggaagaaaagcccngagtgaatttttggaagaagaagtggaaggccaggaatcccttanntcctgggaaccttttgggggtttngg

SEQ ID NO: 5818 - DNA, 564 bp, Homo sapiens
  misc_feature (467)..(467): "n" may be a, t, c, g, other or unknown
  misc_feature (519)..(519): "n" may be a, t, c, g, other or unknown
  misc_feature (531)..(531): "n" may be a, t, c, g, other or unknown
  misc_feature (535)..(535): "n" may be a, t, c, g, other or unknown
  misc_feature (550)..(550): "n" may be a, t, c, g, other or unknown
  misc_feature (560)..(560): "n" may be a, t, c, g, other or unknown
acatagaatacaattcaacattacattgattcctttaggcttcgggttagatcaaattctcccaaacagaatagccatggggagcatgagacaatctagtgagcctaaaacacggaagctggttctgtcctttgacccactgacgtgaaaagagtcattgcaggtgatgctttgttgcagaaatgtggagtctgacctgggctgcatttccagatcaggtgcatccgtacctcagccttccatggggtaacaggcattggcaaaaaatgtcctgcctcagtgtgaccctggaacctttccagcccacactcatgtggaggatcccagtggggatgacgatgtttggggatatttcctcatattctctttgctgagaaactagcttgagtgggcagggaatggaggcaggtactgctagagtctgcaaagtgagtccagaacctggacttctagagttggggggtatncctaaacttcctttcactaagacattcatgatagccagtattccaaaggggnccttcttataanactnggcccaggcttcaanttctggggangagg

SEQ ID NO: 5819 - DNA, 564 bp, Homo sapiens
  misc_feature (427)..(427): "n" may be a, t, c, g, other or unknown
  misc_feature (485)..(485): "n" may be a, t, c, g, other or unknown
  misc_feature (505)..(505): "n" may be a, t, c, g, other or unknown
  misc_feature (519)..(519): "n" may be a, t, c, g, other or unknown
  misc_feature (529)..(529): "n" may be a, t, c, g, other or unknown
  misc_feature (534)..(534): "n" may be a, t, c, g, other or unknown
  misc_feature (557)..(557): "n" may be a, t, c, g, other or unknown
  misc_feature (562)..(562): "n" may be a, t, c, g, other or unknown
aaaagttagaactaatttatttaatcacagatatttagtatactcaataatgcactaacaatttctttaaaaaaacactaatactgtacagtatttctgtgttttagtttttcccacagctgttgaaaatttcagccttgatttgaaacatgacctgcatgacaggctataagttgtcaatagttctttttctttggaaaagtacagttgtggcatttactcactttagcagatagctaaaagggaaaaataaggaaaaatatacactggacctgcagttaagtttttgacaatgccaaggatcaaaaacagatgaaacaacatttgctgaagatgaaaaggtattgcattggtcttaatagatgttgccatctctgggtgaggatgctgactgagcctgttctgtgtcttcatcacctctatttgnttcttcttctacgacagaccttcaagagacaagatccatgtagtaagccacactaagnccttttgcccttcttaatcntctggaggctcttncctggggacntttgnccaaaatacttaggttaccaatntttanct

SEQ ID NO: 5820 - DNA, 325 bp, Homo sapiens
  misc_feature (3)..(3): "n" may be a, t, c, g, other or unknown
  misc_feature (41)..(41): "n" may be a, t, c, g, other or unknown
  misc_feature (49)..(49): "n" may be a, t, c, g, other or unknown
  misc_feature (61)..(61): "n" may be a, t, c, g, other or unknown
  misc_feature (70)..(70): "n" may be a, t, c, g, other or unknown
  misc_feature (87)..(87): "n" may be a, t, c, g, other or unknown
  misc_feature (95)..(95): "n" may be a, t, c, g, other or unknown
  misc_feature (152)..(152): "n" may be a, t, c, g, other or unknown
  misc_feature (159)..(159): "n" may be a, t, c, g, other or unknown
  misc_feature (202)..(202): "n" may be a, t, c, g, other or unknown
  misc_feature (234)..(234): "n" may be a, t, c, g, other or unknown
  misc_feature (237)..(237): "n" may be a, t, c, g, other or unknown
  misc_feature (265)..(265): "n" may be a, t, c, g, other or unknown
  misc_feature (267)..(267): "n" may be a, t, c, g, other or unknown
  misc_feature (310)..(310): "n" may be a, t, c, g, other or unknown
  misc_feature (321)..(321): "n" may be a, t, c, g, other or unknown
  misc_feature (323)..(323): "n" may be a, t, c, g, other or unknown
acncggggagagatttaatttacatagcagccacttggggnccagtcanagctggggcagngggggaatntataaccccagagggtnccccccanacccccacccccgggagaccagtcctcaccaacccttggatgggctcccaaggttgngcaaaanatgctccagtcaaaaggatagagacatttgggaataaggctgnccccaagttgggggaagtccacggcctggagnggnggcctacatgggggcccaggggtctgananaccagtccatgtcctgggcgagtcctcagcctgggggccctanaggaagccttngngg

SEQ ID NO: 5821 - DNA, 557 bp, Homo sapiens
  misc_feature (488)..(488): "n" may be a, t, c, g, other or unknown
  misc_feature (492)..(492): "n" may be a, t, c, g, other or unknown
  misc_feature (500)..(500): "n" may be a, t, c, g, other or unknown
  misc_feature (512)..(512): "n" may be a, t, c, g, other or unknown
  misc_feature (528)..(528): "n" may be a, t, c, g, other or unknown
  misc_feature (547)..(548): "n" may be a, t, c, g, other or unknown
aaaacataatacatttttatttctttaaaaacgtatgacaaaatttcttctgccatcggccatgctcagatttatacattataaaatgatttaattccctaaagtacaaaaaagaatggctgaatctccaaagagttgataaagactgaagatgtttataaggcatgcttatgtatactatttcaagccatctacaggacttgagacaggaatgtttagtgtttgcaaagccacagtcactgagccagactttgtggtgatccagagatcctttcatttcacagaactgtccttgacggcttctcccaataaagatttacaaccttatctcttggctgtggcagtatgagagggtcttctttcagtacatatactaaagcttcattggagtagccacgcttaggaagtaccaagtaaatgacaacataaggccaaatgcaggcagcaggtatttttcaataatgaattacaggggcttcaagaattcnacangagaaagngattttcacagngcttgaaaagcttganaatgggattattgccaaanngaaaagggt

SEQ ID NO: 5822 - DNA, 557 bp, Homo sapiens
  misc_feature (326)..(326): "n" may be a, t, c, g, other or unknown
  misc_feature (438)..(438): "n" may be a, t, c, g, other or unknown
  misc_feature (521)..(521): "n" may be a, t, c, g, other or unknown
  misc_feature (536)..(536): "n" may be a, t, c, g, other or unknown
  misc_feature (540)..(540): "n" may be a, t, c, g, other or unknown
  misc_feature (550)..(550): "n" may be a, t, c, g, other or unknown
  misc_feature (553)..(553): "n" may be a, t, c, g, other or unknown
  misc_feature (555)..(556): "n" may be a, t, c, g, other or unknown
gatgcaacattgcttttattgggggttaggaacatatgacaaagtcacataaaatgtcaacaaagtcacactttgtgcttggctgctctttaaaaaaaaaaaaaaccctgtttatttatgaactcactcaatgagaactatgtgagatgtggccaacaattatcatgcttaaaacaggacggccagagccatgaggagattgaagtctgacaatgctagctagctaagtggaaatttaccattgtcaaatatcagatacttccacacatttagatgtttgtccataagtagacccagcttagctgactcctttgagaaagaattgngtctcaaacccctgttattcagctggccatattattaatcattactaaatgccagccacatgcaaaggggatggaaaagaagaatgagatttgctcagttttagctttctgnggctgaagtatttttgagtcagttacatggatacatgaggattatagtagggaaatgactggatatttttaaaaacctaagtnctatgggaacaggcntggnttaaccattnggncnna

SEQ ID NO: 5823 - DNA, 536 bp, Homo sapiens
  misc_feature (424)..(424): "n" may be a, t, c, g, other or unknown
  misc_feature (493)..(493): "n" may be a, t, c, g, other or unknown
  misc_feature (497)..(497): "n" may be a, t, c, g, other or unknown
  misc_feature (509)..(509): "n" may be a, t, c, g, other or unknown
  misc_feature (535)..(536): "n" may be a, t, c, g, other or unknown
gttaaaaaacatgtttattttacaatatgtacaatcaggaacatattttaaaaccattatcattaaaataaatgaagatcataaatcacaatttagtttgttcttagtgtatatactcacattaaaatataaagaacatataccaaaaagagccaaaagtgtgcattttgctaaaacctggtatatacatattccattggaaaaaagcaatcaaaaatgacttaaaccaaaactaagttcctgtgatgtgtagtaaccattatattgtttgtatgaggtagtaactaaattattttggccatgtattaatactctaagtcaaaagaaatatgaaaaggatcataaaataaggccaacaaaagtaaaaattccaagagaaatttgaaccacttcactctatgggaatggtacagttcttcagtgngatcatatgaaatggttagtgaggactctttaataatgctaattaattctttgggcaactgggaattcntggnccccaattggcnggatttctatcatgggacccgttttnn

SEQ ID NO: 5824 - DNA, 507 bp, Homo sapiens
  misc_feature (448)..(448): "n" may be a, t, c, g, other or unknown
  misc_feature (463)..(463): "n" may be a, t, c, g, other or unknown
  misc_feature (485)..(485): "n" may be a, t, c, g, other or unknown
  misc_feature (494)..(494): "n" may be a, t, c, g, other or unknown
  misc_feature (500)..(501): "n" may be a, t, c, g, other or unknown
  misc_feature (505)..(505): "n" may be a, t, c, g, other or unknown
gtagagacagggtctcaaacccctgggttcaagtgatcctcctgcctcagcctcccaatgtgctgagattataggcgtgagccaccgtgcctggcctgcaaactttataaacagaattctggctaaagcctccagtataaatgggcaaagtagatgtcttaatttattttatgctgctataacagaatatctgagactcggtaatttatgaagaaaataaacgtatttcttatagttctggctgagaagtacaagaccatgaggtctgcatctgataagggacttcattttacatcatcccaggtcagagggcagaagagcaagagacggtgcacactcctttataactaacccactcccaaataaagacagtaatccattcacaggggcagacccgtcatgacccgaatcacctaataggccccaacttccgacactattgcaccanggattaaggtttctnacacccaactttggagaacccntttcaaccncattanngggncg

SEQ ID NO: 5825 - DNA, 529 bp, Homo sapiens
  misc_feature (433)..(433): "n" may be a, t, c, g, other or unknown
  misc_feature (441)..(441): "n" may be a, t, c, g, other or unknown
  misc_feature (454)..(454): "n" may be a, t, c, g, other or unknown
  misc_feature (483)..(483): "n" may be a, t, c, g, other or unknown
  misc_feature (521)..(521): "n" may be a, t, c, g, other or unknown
  misc_feature (525)..(525): "n" may be a, t, c, g, other or unknown
gagatgaagtttccctctgtcaccaggctggagtgcagtggtgcgatctcggcttactgcaacctctgcctccctggttcaagcgactctcctgcctcagcctcccgagtagctgggactacagatgtgtgccaccacgcccagctaatttttgtagttttagtagagacggggtttcgccatgttggctaggatggtctcaatcttttgacctcgtgatccacccgcctcggcctcccaaagtgctggcattacaagcgtgagccactgtgcccagccagctctttatagtttaagaggaaggataaaccttaagagatcacaacactatatttgtgtcagggatccacaagactgcctccatgtttggagatttgctagaaggactcatgggatcagcttagggttgtaatgggctaagatttattactgnaacatagnatggatatatagnagaaagatctcaatggcaaaagacactgnccgagtctggaaaaattcctggacccggtttcttatgnggcngggc

SEQ ID NO: 5826 - DNA, 530 bp, Homo sapiens
  misc_feature (475)..(475): "n" may be a, t, c, g, other or unknown
  misc_feature (513)..(513): "n" may be a, t, c, g, other or unknown
  misc_feature (516)..(516): "n" may be a, t, c, g, other or unknown
  misc_feature (521)..(521): "n" may be a, t, c, g, other or unknown
  misc_feature (529)..(530): "n" may be a, t, c, g, other or unknown
aaccctgtggcacttaccacctatcctactatatatttaatatgcttatttcctactgactgcctgtctccccttatcaaggccaaggtcctcaaggtcagggatttggatctcatttgttcactgatgtatccaaagtgcctagaaaggtgcctgatacatagcaggcctcagtacgtctttgtaaagtatcggaatgaatgtatcatcaatcaaaacataatagtttccatttattggatgtcgtctatgtgccagggcactgcgatgaaaattttacaggcctgatcttactattcctcacaaaaatctcccaagaaaagagcctttattatgactatcttatgaaaaaagacactgtagtcctgcagggccaattaagatgaccaagaccacccaggtacagagtgggagaactgagcctcagactagttctgctcaatgggaacatgaccagatcctgctggaagaaccnagggtcgcttctggcaaataacgccgcaacccttttgngtnattcncttttccnn

SEQ ID NO: 5827 - DNA, 524 bp, Homo sapiens
  misc_feature (452)..(452): "n" may be a, t, c, g, other or unknown
  misc_feature (507)..(507): "n" may be a, t, c, g, other or unknown
  misc_feature (513)..(514): "n" may be a, t, c, g, other or unknown
  misc_feature (524)..(524): "n" may be a, t, c, g, other or unknown
ggctattgtatactaacatgatagaatgttttgatgaaaaacaggacccagtagaattaagcaaagaagaaaaatgtactgaaatttttacaaatcagtattaaaatattttggtagtttgtttcaatacttaatctttaaatctttctaattgtgtttatccacacagatcagatttatcacagatctttattttttccattatattagattttgcttctgttgaataaaataaacttatgatgaaaagtcttataaaaaaacatgtcttttgttacctttgcaaaatcaagactccgaatccagtctaatctgtctcctcccaagcaaaaaatcttggggaaaaagctgaaatgctattacctgaaaatttatgtaagattgtacatttactttccaaccagtctgaaggctgaggagtttgcaaggaaagcaagaaaaagttaaaatgnctaaaccaaagcctgactgggttcaaaactaggtgcttaaataccaagggcccantgggcnnttaaaaacan

SEQ ID NO: 5828 - DNA, 512 bp, Homo sapiens
  misc_feature (449)..(449): "n" may be a, t, c, g, other or unknown
  misc_feature (461)..(461): "n" may be a, t, c, g, other or unknown
  misc_feature (470)..(470): "n" may be a, t, c, g, other or unknown
  misc_feature (493)..(493): "n" may be a, t, c, g, other or unknown
  misc_feature (498)..(498): "n" may be a, t, c, g, other or unknown
  misc_feature (508)..(508): "n" may be a, t, c, g, other or unknown
  misc_feature (511)..(511): "n" may be a, t, c, g, other or unknown
gacaactgacttgtcatctttattaatttttacaaatgcatgtctcctaatatgaaaaggttgattttcactttattgtgtgctttgcacatttacagcagcaacaggaagagcttctactgaatagattttagtcttcaaaaatgtgactgcatcttccatctctagtttgtccatctcccagttattgaccaagatcacatgaaaacccattgcattcaaatgccgcattttcatagcaaggaatcctctggggtggcttgaacccaaacaataagcagatctggaaacacatagcacagctactctttgaatatctgtagcagaagttgtatcacatcagaaagtggtagcacttgattcctgttagtgtccattctgatttcaaaatcaatatgataattgtgtggcaagtgcacatcctttgagaagtgtccttcaccttccanaaggctggtcancacctttgncacctttgcatttggatgggacnattgnaagttccgcnggna

SEQ ID NO: 5829 - DNA, 531 bp, Homo sapiens
  misc_feature (426)..(426): "n" may be a, t, c, g, other or unknown
  misc_feature (448)..(448): "n" may be a, t, c, g, other or unknown
  misc_feature (471)..(471): "n" may be a, t, c, g, other or unknown
  misc_feature (481)..(481): "n" may be a, t, c, g, other or unknown
  misc_feature (494)..(494): "n" may be a, t, c, g, other or unknown
  misc_feature (507)..(507): "n" may be a, t, c, g, other or unknown
ataagcagtttttaatccataaatacaacaggcatttggtattttggccatcagaaaacaaaagttgtagtatcagtaaaggtctgagatggttcacttttgtagattcaattcagtgtatttaaggttaacaaaggctgacattgaaatgtttaaagataggcaaaaattcacattaaaaaaaaccctatatttctatttagagtaacagtaggcagtatgattccaaaagttaaaaattatttcacaacctgtagcttcagcttggcaaacagcttagattccaaaactgattcatctctattaaaatgtaagcacttaaaaaaagagcatgtctgtgtatatagacatatattttaaaggaatcagataatctttgaagcagccttagtgtttcctttaaatttgtctggaaatgaccattgnattagcttcacagaaaggactngcccagcttctttggtctaaggntaacatgggngatcatttggctnaagcttaaaaggncccaccagatgttaaccggggggg

SEQ ID NO: 5830 - DNA, 529 bp, Homo sapiens
  misc_feature (455)..(455): "n" may be a, t, c, g, other or unknown
  misc_feature (472)..(472): "n" may be a, t, c, g, other or unknown
  misc_feature (487)..(487): "n" may be a, t, c, g, other or unknown
  misc_feature (519)..(519): "n" may be a, t, c, g, other or unknown
  misc_feature (523)..(523): "n" may be a, t, c, g, other or unknown
  misc_feature (525)..(525): "n" may be a, t, c, g, other or unknown
aggaatatttacaccacagaaatcagcaaacactacaaatcagaacttttaccccaaagaactagtttttaaaacattcaccaacacatcatcagcttcagtttccacctctctcaaacaggactaataacaccaaccctgcaaatatgttgtaaggacttcaaataatatcagtaaaacacctagcaaaattctagtcacataaaaggcacttagtatgtggtatatagcaaaaagttatggtactataaatgaaatctggctatatgaaagtagagcataaataataagtaatgcagtcattcatgtataagtataataaagcaattgaactttagtagaggtgccgggtcctttaggatttttaaatgaaaagaattaatacagaattccatatacttttcctcaattaatgagaacaatcttctttttgcatcttctcctattttccaggnttctttttaattatganctcttggggtcaaanttggcaagcacttctacctattccattaaacnaacngnttgg

SEQ ID NO: 5831 - DNA, 501 bp, Homo sapiens
  misc_feature (434)..(434): "n" may be a, t, c, g, other or unknown
  misc_feature (460)..(460): "n" may be a, t, c, g, other or unknown
  misc_feature (463)..(463): "n" may be a, t, c, g, other or unknown
  misc_feature (467)..(467): "n" may be a, t, c, g, other or unknown
  misc_feature (471)..(471): "n" may be a, t, c, g, other or unknown
  misc_feature (486)..(486): "n" may be a, t, c, g, other or unknown
  misc_feature (498)..(498): "n" may be a, t, c, g, other or unknown
cctttttagagactctgttgcccagactagggtgcagtgatgcgatcatggctcactgcagcctcgaactcctgggctatatgcgatcctgccacctcagcctcccaagctgagactatagacccacaccatcacgcctggctaattctttttttctaatacatggggttttcttacattgtcctggccgatctgcaactcctgggctcaagcaatccttccgaaagtcctgggactacaggtgtgagccaccacgctcagcctttttttccttattactgtactagggacatttgtggcttttccacaatgagacttagtagagaaatgacagcttccctcggccctatcctgaaatacactaactagctcttctctgccagggctaccgttttctccctaacctttgcagatgtatgtatccatataaatgnttctatttcaacaaactgtagaaagnatncagnctgnacaggttcccttatnaaggtattaccnggg

SEQ ID NO: 5832 - DNA, 516 bp, Homo sapiens
  misc_feature (429)..(429): "n" may be a, t, c, g, other or unknown
  misc_feature (477)..(477): "n" may be a, t, c, g, other or unknown
  misc_feature (486)..(486): "n" may be a, t, c, g, other or unknown
  misc_feature (489)..(489): "n" may be a, t, c, g, other or unknown
  misc_feature (500)..(500): "n" may be a, t, c, g, other or unknown
  misc_feature (507)..(507): "n" may be a, t, c, g, other or unknown
  misc_feature (516)..(516): "n" may be a, t, c, g, other or unknown
aacttaggtgctcttttgcgctatatactttaattcatgcaaaagtgatagaggactggacttgaggctctacagaggcctttctgagaaagctgtgtagctccttactctggcgaagaacaagggggtgtacatcttgtcaatctcaaaagcactgactgcagtctcaccagttgatttgtaagtaatgtgacaagaatgatgtatccagatgagtttgttgaacctctggtgaccactggaacatagctgtagccccacatgaaaactctgatctgcttcttgtacagggacacgacgaaaatatctgtatttatagtcaagtggtttttcttcttttttcttagttattacagcaaatactttggtctgattgtctgtgtcttgtgacaagcgatagtgacccagtagaattgcatcagtcctggnattcctagttcttaaacgtggaacaatggactgaggctctttaagggntgcaacatnatnacatgggcctngggaagnaacttttgn

SEQ ID NO: 5833 - DNA, 521 bp, Homo sapiens
  misc_feature (446)..(446): "n" may be a, t, c, g, other or unknown
  misc_feature (475)..(475): "n" may be a, t, c, g, other or unknown
  misc_feature (488)..(488): "n" may be a, t, c, g, other or unknown
  misc_feature (504)..(504): "n" may be a, t, c, g, other or unknown
  misc_feature (515)..(515): "n" may be a, t, c, g, other or unknown
  misc_feature (519)..(519): "n" may be a, t, c, g, other or unknown
  misc_feature (521)..(521): "n" may be a, t, c, g, other or unknown
gaggctaagattacatacatttccatgtatacatagaaacttgttgtattagtcagcttgggctgagttgtgttgcaataatatcccccaaatcttcagggcttacaacaataacggcttctctctggcttgtgttcatgccctttgaagatcagctgcagccctgctccatgttctctttatgatgaaatggaccaaatccagaaacatggctaataagcctgatgtcaatggagcaggaagaataccttctcacagggagggccaccaggcaggccctctccagttgctagtgcattttgtctgttggcctcaaagcttggctcaaattgtcaggccaatggaaagactgaatgctttgcctccaggcaaaattgtggcctgcagagggtggaccctgcattgcatctcaacgagaacggaaagctcactcagcatgctgcagnctttcatactgattttgacataaaacatnaggcgggaattcncttttggctttgcagnaaattgggggnggancn

SEQ ID NO: 5834 - DNA, 499 bp, Homo sapiens
  misc_feature (473)..(473): "n" may be a, t, c, g, other or unknown
  misc_feature (475)..(475): "n" may be a, t, c, g, other or unknown
  misc_feature (495)..(499): "n" may be a, t, c, g, other or unknown
ctgagacaagagtttcactcttgttgcccaagctggagtgcaatggtgcaatctcggctcactgcaacctccaactcccgggttcaagcgattctctcacgtcagcctcccgagtagctgggattacaggcacctgccaccatgcccagctaatttttgtattttcagtagagacggggtttcaccatgttggccagtctggtcttgaagccctgacctcaggtgatccgcctgcctcagcctcccaaattgctgggattacaggcgtgagccaatgtgcccagccagttgcatattcttgacccaaacacagacagttcccccaagttcaaaaccacaacgagtagcccacacgaaggcatactctgagggttgtttcactgttacagcagtacatatttcgaagagacaacagattccatttcagatgcttctcaagaaagaaaaagtctttgacagaatctctactccangnctctctctctcttttttttnnnnn

SEQ ID NO: 5835 - DNA, 531 bp, Homo sapiens
  misc_feature (218)..(218): "n" may be a, t, c, g, other or unknown
  misc_feature (245)..(245): "n" may be a, t, c, g, other or unknown
  misc_feature (272)..(272): "n" may be a, t, c, g, other or unknown
  misc_feature (410)..(410): "n" may be a, t, c, g, other or unknown
  misc_feature (451)..(451): "n" may be a, t, c, g, other or unknown
  misc_feature (480)..(480): "n" may be a, t, c, g, other or unknown
  misc_feature (485)..(485): "n" may be a, t, c, g, other or unknown
  misc_feature (489)..(489): "n" may be a, t, c, g, other or unknown
  misc_feature (512)..(512): "n" may be a, t, c, g, other or unknown
  misc_feature (524)..(524): "n" may be a, t, c, g, other or unknown
  misc_feature (529)..(529): "n" may be a, t, c, g, other or unknown
gagacggagtctcgctctgtcgcccaggctgaagtgcagtggtgcaatctcagctcactgcaacctccacctcctgggttcaagcggttctcctacctcagcctcccgagtagctgggattacaggcgtgccaccacacccagctaatttttgtatttttagtagagacggggtttcaccatgttggccaggctggtctccaattcctgaccttaggngatccacctgcgctggcctcccaaagngctgggattacaggcatgagccaccgngcccaacctatttttctttatgtcttctgtagctcatgaaactatttggactttctctccctacaattaataggattttacttctatttcattttctaggcataaaaatgctattgattttggtgaatctaccagatngcaaggaattttagaactttttttttttccttttttcgganatagggggcttactctgttggccaagctngaacncaangggggtaaacttaagttactggnaccttcaatttnccagntt

SEQ ID NO: 5836 - DNA, 552 bp, Homo sapiens
  misc_feature (227)..(227): "n" may be a, t, c, g, other or unknown
  misc_feature (481)..(481): "n" may be a, t, c, g, other or unknown
  misc_feature (532)..(532): "n" may be a, t, c, g, other or unknown
gagacagagccttggtgtgtcgcccaggcgacaaaagtgctaggattacaggcatgagctaccgtgcctggcctgtctatatttttaaaaagcatttgtcttaccttcaacccgtgattccaagtgcttatccaactctgaatcttttttcaccgcttcatctgagaccttgggagcatttgaaaagcaaactagtacaatactcatgttatctcgacttcccttgngtaaacaagtgtccactacccaattgcacacattttccaggtcatcagatacctcaagcctagatttaacatattcacagagctcctcattactcataacatcccagatcccatcacaagccaagatgataaattcatcctcttctgctcttaaaatttcataaacctcaggctctggagaaacaagttgttctgttgggcccttgccatcaacacacttgtaatcatagtcccccagagcacgaggatactgntaatggaccattaacacggtggatcaatacgctgcttcctggattttgggntcgctccttttccctgggat

SEQ ID NO: 5837 - DNA, 525 bp, Homo sapiens
  misc_feature (3)..(3): "n" may be a, t, c, g, other or unknown
  misc_feature (20)..(20): "n" may be a, t, c, g, other or unknown
  misc_feature (54)..(54): "n" may be a, t, c, g, other or unknown
  misc_feature (187)..(187): "n" may be a, t, c, g, other or unknown
  misc_feature (196)..(196): "n" may be a, t, c, g, other or unknown
  misc_feature (248)..(248): "n" may be a, t, c, g, other or unknown
  misc_feature (309)..(309): "n" may be a, t, c, g, other or unknown
  misc_feature (383)..(383): "n" may be a, t, c, g, other or unknown
  misc_feature (440)..(440): "n" may be a, t, c, g, other or unknown
  misc_feature (461)..(461): "n" may be a, t, c, g, other or unknown
  misc_feature (463)..(463): "n" may be a, t, c, g, other or unknown
  misc_feature (472)..(472): "n" may be a, t, c, g, other or unknown
  misc_feature (478)..(478): "n" may be a, t, c, g, other or unknown
  misc_feature (488)..(488): "n" may be a, t, c, g, other or unknown
  misc_feature (506)..(506): "n" may be a, t, c, g, other or unknown
canatggagtctcaccctgnggcccaggctggagtgcagtggcgcaatctcggntcactgcaagctccacctcccaggttcatgccattctcctgcctcagcctccctagtagctgggactacaggcacccaccaccacgcccagctaattttttttgtatttttagtagagacggggtttcactgngttagccanaatggtcttgatctcctgacctcatgatccacctgcctcggcctcccaaagngctgggattacaggcatgagccactgcgcctggccaagttcattattctttagtatcttgngtctacatctgagtatatttggttttcattcccctgggaggataaagtaaactggaaaagcatgaactccccanggaaatgtttctgtctccaggtattttcctactctaattcaagtccttccataaggncctgaccccagcacaagtcangnactaatagnaccttncaaatgaatnccccagtttgaattcaangggaaaatcaaatcccttt

SEQ ID NO: 5838 - DNA, 185 bp, Homo sapiens
  misc_feature (100)..(100): "n" may be a, t, c, g, other or unknown
  misc_feature (128)..(128): "n" may be a, t, c, g, other or unknown
  misc_feature (139)..(139): "n" may be a, t, c, g, other or unknown
  misc_feature (141)..(141): "n" may be a, t, c, g, other or unknown
  misc_feature (163)..(163): "n" may be a, t, c, g, other or unknown
  misc_feature (166)..(166): "n" may be a, t, c, g, other or unknown
  misc_feature (174)..(174): "n" may be a, t, c, g, other or unknown
gttgtttttggtgtttttaattgtttttgttaatgtaaaaacagaaccatcacagccgctcagctctataacccatccagcccaagactgttctagtggngaaaccaagagtagacaggaaggggacncgagggatggngncgcttcagctgaaccctaaganccnctttctcnccttcctccgg

SEQ ID NO: 5839 - DNA, 480 bp, Homo sapiens
  misc_feature (401)..(401): "n" may be a, t, c, g, other or unknown
  misc_feature (420)..(420): "n" may be a, t, c, g, other or unknown
  misc_feature (432)..(432): "n" may be a, t, c, g, other or unknown
  misc_feature (445)..(445): "n" may be a, t, c, g, other or unknown
  misc_feature (451)..(452): "n" may be a, t, c, g, other or unknown
  misc_feature (465)..(465): "n" may be a, t, c, g, other or unknown
ggtatttacttgggaaaaaaagatgctacaaaaaagagacatgaattaagaaaatatttcgcatgtaagacaagtgcagataaaaatgaaaaatgtgccgggtggtgatctgacagttcctgggatatcagtaacactgaaaatgcctagaaaacaaccttttcccagtgttgggggaagggttctattcctgtagagtccaaaaacaatttttccacattttgaaaacatctggttgtattttggcaaactatggtagctatcagctttgaatccatatgtatttaattttgctggaggctggataattaaaaccaatataactgaaaataaaacaacaaaaagcttttttcaccctctaagagcatagaaatctacacctgggttatctggattccagntgatatgggaccagccagnatactccagaantactcaccaatanttttgnntctaatttccacnttatctcatttattg

SEQ ID NO: 5840 - DNA, 553 bp, Homo sapiens
  misc_feature (440)..(440): "n" may be a, t, c, g, other or unknown
  misc_feature (489)..(489): "n" may be a, t, c, g, other or unknown
  misc_feature (492)..(492): "n" may be a, t, c, g, other or unknown
  misc_feature (536)..(536): "n" may be a, t, c, g, other or unknown
  misc_feature (547)..(547): "n" may be a, t, c, g, other or unknown
  misc_feature (550)..(552): "n" may be a, t, c, g, other or unknown
gattgatcattaaggaagttagaggaataaaaacacagtaaaaggtttaaaacattaaggaacatttttcaggtataaattttataaatacaaaacaaattcacaaattactctcaatactaaataaatatctagttaataaacttggacttaatacctgcagccagcactggtacagcacttcaaggttataagattggattcattcatgtgtagtgttgaaagaatgtactcaaacaattaattaagacataaacaccttttctaaactgtgctatagcggaagactcatccatgtagataactctcccttaataccaccactttaaaaaaaaatcatcaataacaaaataaatcgtgggtgaaaaaatattttccaagatctctggacacatgaatgatctcaaaaatgtacaaaaacctctgtaaaccagtactgnatccaatacatctatcaaacttattagatactggaacaaaactggagcnaanggatatctttcctacattctcccgagggcttaatattaaaattngggaatatagngcnnnc

SEQ ID NO: 5841 - DNA, 541 bp, Homo sapiens
  misc_feature (460)..(460): "n" may be a, t, c, g, other or unknown
  misc_feature (471)..(471): "n" may be a, t, c, g, other or unknown
  misc_feature (495)..(495): "n" may be a, t, c, g, other or unknown
  misc_feature (502)..(502): "n" may be a, t, c, g, other or unknown
  misc_feature (520)..(520): "n" may be a, t, c, g, other or unknown
ggactgagaccatcaaaagggaagaattaggagggttcctttggtttgctcaggtcccggcctgaaaaacatggctctgacatccaagatgcctgctgctctgtccctgacttcagtctgaaccccaccctgcccaccccaaggccacgcagatggttactgtgggaacaatcccagccttctatctccccggggcctccctccctgctctgcttccctcccctgagcacttgaaacatcgccagctttgctaccttcagtcccgccaccacggggctctttcaaggctgtgggatcggcagaagagtaaccaccaccgcatcccagaaacactgcccaggaaaaactgctccatctgctcctctgccccagggccagcaggaggggaaggaaggggctggaggtctctgcagggaagccttggggttcctcctgatattgggactgctgcctggccagnttctactctgntgcaagaatctggacaggcaagantactttntcccccaagggttttttntaacggttgagcttactggtt

SEQ ID NO: 5842 - DNA, 542 bp, Homo sapiens
  misc_feature (482)..(482): "n" may be a, t, c, g, other or unknown
  misc_feature (519)..(519): "n" may be a, t, c, g, other or unknown
  misc_feature (521)..(521): "n" may be a, t, c, g, other or unknown
atttttttgagatggagttttgcttgttgcccaggctggagtgcaatggcgtgatctcggctcactgcaatctctgcctcctgggttcaagcaattctcctgccttagcctcccgagtagctgggattacaggcatgcgccaccacacctggctaattttatatttttagtagagacagggtttctccatgttcgtcaggttggtctcgaactcccaacctcaggtgatacgtatgccttgacctcccaaagtgggagggttgcttgaggctaggagtttgagatcagcctggggaacatagtgagaccctgtgtatttaaaaaaaaaaaaaaaaaatagctgggcatggtgggtgtgtgtctgtaatcctggctacttgggaggctgagacaggaggatgatctcttgagcccaggaagttcacaactgcagtgaggatatgaatcgtaccattggattggaccatttgcctgggggacanaagtgggaacccttggggcttcggaaaaaaggttacntntaatggaattaattgggaatt

SEQ ID NO: 5843 - DNA, 476 bp, Homo sapiens
  misc_feature (252)..(252): "n" may be a, t, c, g, other or unknown
  misc_feature (356)..(356): "n" may be a, t, c, g, other or unknown
  misc_feature (385)..(385): "n" may be a, t, c, g, other or unknown
  misc_feature (424)..(424): "n" may be a, t, c, g, other or unknown
  misc_feature (427)..(427): "n" may be a, t, c, g, other or unknown
  misc_feature (436)..(436): "n" may be a, t, c, g, other or unknown
  misc_feature (443)..(443): "n" may be a, t, c, g, other or unknown
  misc_feature (464)..(464): "n" may be a, t, c, g, other or unknown
  misc_feature (469)..(469): "n" may be a, t, c, g, other or unknown
aaacacaggtcaccatacactaattttcaagtccgtatcagaaggaatatctgttaaaaacaaaaacaaaaaccatgattcaacagaaaatgtgacagattccttaggtgcaactttagaaacctaagtttcaaaggagaaaaacagtagttactccaggaattttaactcactaaccacagttttatcatggctctgtaagacagaaaaatggaacaaaatgtatatagctgttggcgatacgagccttgnggctcaaattgcataccaaacatgggatggagtaaggctgatggctagaggtaatcacctctaagagaaatgaactgggaaatgatttataatctaccctacanggatatactgctaggttccatttagagtngtccagctttccctatgggaaggcccaatgggaggtccntantgcaacatnacagggncttccttattcctttttttcngaagnattaagg

SEQ ID NO: 5844 - DNA, 548 bp, Homo sapiens
  misc_feature (441)..(441): "n" may be a, t, c, g, other or unknown
  misc_feature (450)..(450): "n" may be a, t, c, g, other or unknown
  misc_feature (502)..(502): "n" may be a, t, c, g, other or unknown
  misc_feature (509)..(509): "n" may be a, t, c, g, other or unknown
  misc_feature (547)..(547): "n" may be a, t, c, g, other or unknown
gttcattttttaaagagattaagctataagcaaacacacatacaacatttcatcattcaattcaggttgcgttttaagaaagtcttccgtgctggtaccctgttttgttcaatttttttctgcataaactaaattggtatctgaaaggcttcatagaaaatagaaactttcaacttttttttcctacaaagaaaaacaaatagtatccaaaatattaagcattaattgtttgccaattttttcttaaatattttacaaacataggaaggtggttttcataatgttcataacaaagaattgcatttctgctcttagcactgactacgtcaatgacatcttttgtccttgtcccaagagggtcagtttgtgtagccaccatcagagctataggaggacgtgggaccaagtaaagatgctggctccttgcagacccaagggtgnccatcatgntcatgtgggggcaccactacacccccaaagagcttctaagtgctttcttcantaatggnccatcagagtaagtaggtttgggctataagaaagccant

SEQ ID NO: 5845 - DNA, 543 bp, Homo sapiens
  misc_feature (412)..(412): "n" may be a, t, c, g, other or unknown
  misc_feature (415)..(415): "n" may be a, t, c, g, other or unknown
  misc_feature (480)..(480): "n" may be a, t, c, g, other or unknown
  misc_feature (488)..(488): "n" may be a, t, c, g, other or unknown
  misc_feature (505)..(505): "n" may be a, t, c, g, other or unknown
  misc_feature (513)..(513): "n" may be a, t, c, g, other or unknown
  misc_feature (517)..(517): "n" may be a, t, c, g, other or unknown
  misc_feature (537)..(537): "n" may be a, t, c, g, other or unknown
  misc_feature (543)..(543): "n" may be a, t, c, g, other or unknown
ctgcagacaagtaaaccttttattttaaaccacaaatagtcagcaggtggccacaactatccatgtttcattaaaatcacataaaacctaggtacaaaagcaccactgattattgctctagaaaaactgcatgaaaaattcaaatatgcacagtaaaaacaccacagtatgcacaggactaaattttaaagcaagtgcatggaatgctgaatcaatcttacacacagcttccaatatttaactgatatttattttacttgaggatgatgtaaatttccaaaaagcatgactatgagacgataaaatgtccatccttatatattttcgtatgccaactagtagagtcctaaaaaattagcatttacaaaatacttggtaaaaatagcttttaaaagttgtcccaagagatacntanaatcaaccccaatttttcatggacaattcattctccctcggtatctacagattcagttttcttgngccttccntttccaggtttcctggnttttcctncttnttcccttttagcacctttgntaaatn

SEQ ID NO: 5846 - DNA, 541 bp, Homo sapiens
  misc_feature (288)..(288): "n" may be a, t, c, g, other or unknown
  misc_feature (448)..(448): "n" may be a, t, c, g, other or unknown
  misc_feature (463)..(463): "n" may be a, t, c, g, other or unknown
  misc_feature (489)..(489): "n" may be a, t, c, g, other or unknown
  misc_feature (510)..(510): "n" may be a, t, c, g, other or unknown
  misc_feature (541)..(541): "n" may be a, t, c, g, other or unknown
cttgaaatggagtttcactcttgttgcacaggctggagtgcaatggtgcaatctcagctcactgcaacctccacctcctaggttcaagacattctcctgcctcagccttccaagtagctgggattacaggcatgcaccaccactcccagcaaattttgtatttttcatagagacaaggtttcaccatgttgtctaggctggtctcaaactcctgacctcaggtgatccacatgcctcggcctcccaaagtgctgggattacaggcgtgagccaccgtgcccggcctanactgtgcatattctcttgaagtgtgtgtataataaacaaattaacaaaaaaaaaagaactgctttaaaatgtatatttaaaataaaatagttttaactcaatcccattttctgtgatatagttagccatactggttaatttctcaaatcaggttgactgntttttctcaaattgnatgagtccctttgaaaattttggggncacttttggaagggggtgcanaaagggcaaaaaggcctcggggccttgggcn

SEQ ID NO: 5847 - DNA, 551 bp, Homo sapiens
  misc_feature (289)..(289): "n" may be a, t, c, g, other or unknown
  misc_feature (427)..(427): "n" may be a, t, c, g, other or unknown
  misc_feature (449)..(449): "n" may be a, t, c, g, other or unknown
  misc_feature (477)..(477): "n" may be a, t, c, g, other or unknown
  misc_feature (521)..(521): "n" may be a, t, c, g, other or unknown
aagacggagcctcgctcttttgcccaggcgggagtacagtggcgcgatctcggctcactgcaagctccgcctcccgggttcaggccattcccctgcctcagcctccctagtagctgggactacaggtgcccgccaccgcacccggctaattttttgtatttttagtagagacagggtttcaccgtgttagccaggatggtctcgatctcctgacctcgtgatctgcccgcctcggcctcccaaagtgctgggattacaggcgtgagccaccgcgcccggcctttttggnttttttttttgagacagagtttcattctcattgtccaggctggaagtgcaatggtgcaatctcagctcaccacaatctccacctcccaggtttcaagtgatcctcttgcctcagcctcccgagtagctgggattactnggcatgcaacaccacgcccagntgatttttggatttttaggtagaaaacnggggttctctatattgggcaactgggcttaaatctcctgacctnaggggaactgcctggctttggccttccaaa

SEQ ID NO: 5848 - DNA, 535 bp, Homo sapiens
  misc_feature (100)..(100): "n" may be a, t, c, g, other or unknown
  misc_feature (252)..(252): "n" may be a, t, c, g, other or unknown
  misc_feature (442)..(442): "n" may be a, t, c, g, other or unknown
  misc_feature (449)..(449): "n" may be a, t, c, g, other or unknown
  misc_feature (478)..(478): "n" may be a, t, c, g, other or unknown
  misc_feature (489)..(489): "n" may be a, t, c, g, other or unknown
  misc_feature (515)..(515): "n" may be a, t, c, g, other or unknown
ccctcagtcttttagactctcagctgcacaacttgattgccttacaaatgacctgcttcaaggatgtggaaattcctaatttcttctgggaaccttctgngacaccttcaccaggaacatcaacatgtatttccctgctgccgtatttggttttcttcccatctcggggacccttttctcttactgtaaaattgtttcctccattctgagggtttcatcatcaggtgggaagtataaaccttcaccacctgngggtctcacctgtcagttgtttgctgattttatggaacaggcgttggagggtacctcggttcagatgtgtcatcttccccgagaaagcgtgcagtggcctcagtgatgtacacggtggtcacccccatgctgaaccccttcatctacagcctgagaaacagggatatgaaaagtgtcctgcggcggccgnacagcancgcaagctaatctcaaaaacttcttaacnggtccattccntttggaggatgggttaaaaaaggccncaggggcaaatagaatggtt

SEQ ID NO: 5849 - DNA, 130 bp, Homo sapiens
  misc_feature (95)..(98): "n" may be a, t, c, g, other or unknown
  misc_feature (104)..(104): "n" may be a, t, c, g, other or unknown
  misc_feature (109)..(109): "n" may be a, t, c, g, other or unknown
  misc_feature (113)..(113): "n" may be a, t, c, g, other or unknown
ccagacttcaatcaacattttaattaccaagtctatatttagcaagacaatgtgggagagataaagaggaaggaaggggtaggtggggaggggcnnnnaacggngctgncccnttttctgcattggctgc

SEQ ID NO: 5850 - DNA, 547 bp, Homo sapiens
  misc_feature (454)..(454): "n" may be a, t, c, g, other or unknown
  misc_feature (489)..(489): "n" may be a, t, c, g, other or unknown
  misc_feature (512)..(512): "n" may be a, t, c, g, other or unknown
  misc_feature (541)..(541): "n" may be a, t, c, g, other or unknown
  misc_feature (546)..(546): "n" may be a, t, c, g, other or unknown
actgtttgtagaaaaggggtctcattctcttttccaggctagtattctgctttttaacatgaaaagaaggaatgaagttgtgcagcctgctttgtgtaatgaataaacttccttgatgcaatagagctcaggaagttcctacaggtcaaatcctttctcttccctttgcctatgtattttatgtattttcattatttctccaatagaattactactgttttttctttggaagaaaaattagaaatgataataatgggagacatgcactgaggcagtgaaacaaaattttttctaacttgaacttatctagaaagtaagttttgctcactagttaacaaggtatttttatgccaaatgggcagctcagaaaatggaaaactctggagggaaggaacttcagagcccaaatgaaagtcattgactctagcatactaaatgggggatgttatgttgnaaagcctttttcagctaacacaccattaatcatgnggaagcttcgggactgggatggntggcttctggctggatcatagtcaaaaanccgant

SEQ ID NO: 5851 - DNA, 543 bp, Homo sapiens
  misc_feature (478)..(478): "n" may be a, t, c, g, other or unknown
  misc_feature (487)..(487): "n" may be a, t, c, g, other or unknown
  misc_feature (504)..(504): "n" may be a, t, c, g, other or unknown
  misc_feature (521)..(521): "n" may be a, t, c, g, other or unknown
  misc_feature (530)..(532): "n" may be a, t, c, g, other or unknown
gagtcttaccctgtcactcaggctggagcatagcaactctgtcatgcttcactgcagcctcaaactcctgggctcagacagtcttcccacctcaggctcctcagtacctaggactacagatgtatatcactatgcctagctaatttttgattttttgtagagatagggtctccctatgttgagtaggctggtcttgagctcttggcctcaagcaatcctcccaccttggcttcccaaagcattggaattacaggaatgaatgagtctctgtacctggtctcttcatgtatttttaagatctgataataagtgcttacacttttagcactgtcttggtgaattttatcattatataatgtccctaattatccttggcaattttggttgtcctaactctactttgatgaatataaaaatggctttttaatttatttttttgagacaagagcctactctggtgcccaggttggaaaagcantggtgggancttggcttaatggcttncaaggtcaagccaattntccggcctnnncttcgggggaa

SEQ ID NO: 5852 - DNA, 545 bp, Homo sapiens
  misc_feature (511)..(511): "n" may be a, t, c, g, other or unknown
aaggttgacaccccatttattggagaagaccccagcacccgccccctgaggtcttaagggctttggtgtatccttggtcacgagcgctgggccaggaagcagagttcctgagagccaagtctagtggttgagagaggaccctggctgggcctggggagcaggaagccatctgtccagctgggcagcccccatgggtccctggtgcagccccggccatgtgtccagcgccccatactccatgaggggggtctgcaccccatcacacgctggttctgcaggtctgcacccctgtgaggctgcccctggggggcatgggttctgttgggctcttgctcccagcatggatgacccagcgatagcagtcaagtgatgcgcttgttgggtgcatgggggccacagcgggtgcaagtacacgatgcccagtgcaagcaggaccaccaaaaagacacacgttggcacccaggaagtgcaccagcaagcacccggtcattcctttgggctgtgcttcggnaagaacaagctttcccaggggtttttggggcttg

SEQ ID NO: 5853 - DNA, 542 bp, Homo sapiens
  misc_feature (476)..(476): "n" may be a, t, c, g, other or unknown
  misc_feature (509)..(509): "n" may be a, t, c, g, other or unknown
  misc_feature (536)..(536): "n" may be a, t, c, g, other or unknown
acaaaaacaaataaggatttttatttgcagtactttccactcttcctttaaaaacttgccatttgcttatcagttcctctggggctgacccactcaaacaagacaaaggataaagaacaaaagatagtcctccgaggttacaggcttggaagggcagagaggagctacgaaccttggaagaaaaacaaggtgctcaggaatttatcgcctaacatttcacttccccacccaccccttagtgctcccactttggcagtgatctctctttggctttaaagagaaagggggaaatgtgccttgttttgcaggtgtgcaacaacacagctctggcatctcaagcagcaggggagaactctaagacagaagaatttcttcatgaaaatcacgggtatgttatcacatactgtctccatggcccatacaaggactccttaagggtctttctaacataccaacatatcccccaccaactcagnagagaggtttccttccactggaatagaaaaccnttggctcattattacaggcttaaaaancccccc

SEQ ID NO: 5854 - DNA, 539 bp, Homo sapiens
  misc_feature (66)..(66): "n" may be a, t, c, g, other or unknown
  misc_feature (245)..(245): "n" may be a, t, c, g, other or unknown
  misc_feature (463)..(463): "n" may be a, t, c, g, other or unknown
  misc_feature (470)..(470): "n" may be a, t, c, g, other or unknown
  misc_feature (495)..(495): "n" may be a, t, c, g, other or unknown
  misc_feature (534)..(534): "n" may be a, t, c, g, other or unknown
ccatctgcactcttttatttgttgcaatactgtttataacagctaagatttggaaacaccctaagngttcatcaacagatgaatgaagaaaatgtggttcacatacaaaatggagtactcttcagccataaaagagaatgagatcctgtcacttgcgacagcatggatggaactggaggtcactatgttaagtgaaataggccaggcatagaaagacaaacattgccatgttctcatttatttgngggatctaaaaatcaaaacaacggaactcatggatatagagtagaaggatggttagtaaaggctgaaaaaagtagtagacagctgagataatggtggggcagaggtggggataggttaatgggtcaaaaaaagtagaaagaatgagtaaaacttactatatgatagcccaataggggggctatagtcaataaaaacttaactgcatattttaaaatcngaggggnatcagggttggtttggaacccccanggataatgttgaggggatgggtaccccatttttcatggnggggc

SEQ ID NO: 5855 - DNA, 548 bp, Homo sapiens
  misc_feature (170)..(170): "n" may be a, t, c, g, other or unknown
  misc_feature (191)..(191): "n" may be a, t, c, g, other or unknown
  misc_feature (223)..(223): "n" may be a, t, c, g, other or unknown
  misc_feature (239)..(239): "n" may be a, t, c, g, other or unknown
  misc_feature (325)..(325): "n" may be a, t, c, g, other or unknown
  misc_feature (370)..(370): "n" may be a, t, c, g, other or unknown
  misc_feature (391)..(391): "n" may be a, t, c, g, other or unknown
  misc_feature (411)..(411): "n" may be a, t, c, g, other or unknown
  misc_feature (451)..(451): "n" may be a, t, c, g, other or unknown
  misc_feature (480)..(480): "n" may be a, t, c, g, other or unknown
  misc_feature (500)..(500): "n" may be a, t, c, g, other or unknown
  misc_feature (503)..(503): "n" may be a, t, c, g, other or unknown
  misc_feature (528)..(529): "n" may be a, t, c, g, other or unknown
gagacagtctcattctgtcacccaggctggaatgcagtggcattatcttggcttggcaacctgcaacctcctcttcccaggttcaagtgatcctcctgcctcagcctcccaagtagctgggattacaagcgtgcaccaccacgaccagctaatttttgtatttttagtanagacatgttggccagcctggnctcgaactcctgacctcaagtgatctgcccgncttggcctcccaaagngctgggattataggtgtaagccactgcacctggcctgagacatccagatttcttctgatctaaataaccttaaagtgttaacaagnacaactaagtaggcttgggacagaaaaatgaagttagccaattgnacttaaaatgtgacaattcanagaatcacagggctacctgnttcacactagtttctatctgctagccaaggtgcacattangggtaaaaaggataacaacttcttagcantaagtggaacaataataaanggnatttcaatcccattaccaaaaatgnngatttggttcaaaaaattc

SEQ ID NO: 5856 - DNA, 428 bp, Homo sapiens
  misc_feature (177)..(177): "n" may be a, t, c, g, other or unknown
  misc_feature (180)..(180): "n" may be a, t, c, g, other or unknown
  misc_feature (217)..(217): "n" may be a, t, c, g, other or unknown
  misc_feature (222)..(222): "n" may be a, t, c, g, other or unknown
  misc_feature (267)..(267): "n" may be a, t, c, g, other or unknown
  misc_feature (278)..(278): "n" may be a, t, c, g, other or unknown
  misc_feature (283)..(283): "n" may be a, t, c, g, other or unknown
  misc_feature (295)..(295): "n" may be a, t, c, g, other or unknown
  misc_feature (323)..(323): "n" may be a, t, c, g, other or unknown
  misc_feature (332)..(332): "n" may be a, t, c, g, other or unknown
  misc_feature (377)..(377): "n" may be a, t, c, g, other or unknown
  misc_feature (398)..(398): "n" may be a, t, c, g, other or unknown
  misc_feature (414)..(414): "n" may be a, t, c, g, other or unknown
  misc_feature (416)..(416): "n" may be a, t, c, g, other or unknown
  misc_feature (418)..(418): "n" may be a, t, c, g, other or unknown
  misc_feature (425)..(425): "n" may be a, t, c, g, other or unknown
ggtaaagatggggtctcgctatgttgctcaggctggtctcaaacccctggcctcaggcaatcctcctgcctcagcctccccaagtgctgggattacaggtgtgagccaccacactcagccgggcccgtctgggttaaaggtacttgctttttttttttttttttttttttttttcgnganatggagtctcattctggggcccaggctggagtgcagnggcgngatcttggctcacggcaacctccgcctcctgggttcaagcaattntcctgcctaancctcntgagtagctggnattacaggcacctgccaccacgcccggntaatttttngtatttttagtagagatggggtttcaccatgttggccaggctggnctcgaactcctgacgtcaagngatccacccaccttantntnccaaagngca

SEQ ID NO: 5857 - DNA, 321 bp, Homo sapiens
  misc_feature (9)..(9): "n" may be a, t, c, g, other or unknown
  misc_feature (26)..(26): "n" may be a, t, c, g, other or unknown
  misc_feature (36)..(36): "n" may be a, t, c, g, other or unknown
  misc_feature (50)..(50): "n" may be a, t, c, g, other or unknown
  misc_feature (76)..(76): "n" may be a, t, c, g, other or unknown
  misc_feature (94)..(94): "n" may be a, t, c, g, other or unknown
  misc_feature (107)..(107): "n" may be a, t, c, g, other or unknown
  misc_feature (125)..(125): "n" may be a, t, c, g, other or unknown
  misc_feature (146)..(146): "n" may be a, t, c, g, other or unknown
  misc_feature (148)..(148): "n" may be a, t, c, g, other or unknown
  misc_feature (173)..(173): "n" may be a, t, c, g, other or unknown
  misc_feature (180)..(180): "n" may be a, t, c, g, other or unknown
  misc_feature (201)..(201): "n" may be a, t, c, g, other or unknown
  misc_feature (230)..(230): "n" may be a, t, c, g, other or unknown
  misc_feature (238)..(238): "n" may be a, t, c, g, other or unknown
  misc_feature (258)..(258): "n" may be a, t, c, g, other or unknown
  misc_feature (277)..(277): "n" may be a, t, c, g, other or unknown
  misc_feature (289)..(289): "n" may be a, t, c, g, other or unknown
  misc_feature (313)..(313): "n" may be a, t, c, g, other or unknown
  misc_feature (316)..(316): "n" may be a, t, c, g, other or unknown
ccatcaaangtaatttatttaaatancaattcaatngcatgttaagtaanccagttgtagcaatataaattttganaaaatctggcaaattaancctgtatctaaangcagcatattctgggatnctacggaatgaaaaataaaangngttgactttcaagtcaggatgattnatttgcncttaaaaatataatttctaanatgacatctgttttcaaaaacatcctaanggtaaaancaggctacaggaattgttgncatcatgttgaaattttanattttatattancattagcttaaaaatcatagacantancatta

SEQ ID NO: 5858 - DNA, 477 bp, Homo sapiens
  misc_feature (116)..(116): "n" may be a, t, c, g, other or unknown
  misc_feature (165)..(165): "n" may be a, t, c, g, other or unknown
  misc_feature (167)..(167): "n" may be a, t, c, g, other or unknown
  misc_feature (290)..(290): "n" may be a, t, c, g, other or unknown
  misc_feature (349)..(349): "n" may be a, t, c, g, other or unknown
  misc_feature (353)..(353): "n" may be a, t, c, g, other or unknown
  misc_feature (380)..(380): "n" may be a, t, c, g, other or unknown
  misc_feature (418)..(418): "n" may be a, t, c, g, other or unknown
  misc_feature (436)..(436): "n" may be a, t, c, g, other or unknown
  misc_feature (443)..(443): "n" may be a, t, c, g, other or unknown
  misc_feature (445)..(445): "n" may be a, t, c, g, other or unknown
  misc_feature (474)..(475): "n" may be a, t, c, g, other or unknown
gagacagagttttgctcttgttatccaggctaaagtgcaatggcacaatctcagctcactgtaatctctgcttcccgggttcaagcgattatcctgcctcagcctccgagtgaggngggattacaggcgtgtgccaccacacccagctaattttatgtttttagnanaaacggggtttcacagtgttggtcactctggtcttgaactcctgacctcaagtaatccacctgcctcggcctcccagagtgctgggattatagcgcaagtcactgcaccaggccaaaattagnttttatgcatgcctaaagatgtttatgctgtagacttttttttttttttttgacaaagngttngctctgttgcccaggctggagtgcacnggtgtgatctcagcttactgcaacctcaagcttccccngtagctgggattacaggngcgcacnancacaaccgggttaactttttggattttannca

SEQ ID NO: 5859 - DNA, 572 bp, Homo sapiens
  misc_feature (365)..(365): "n" may be a, t, c, g, other or unknown
  misc_feature (408)..(408): "n" may be a, t, c, g, other or unknown
  misc_feature (429)..(429): "n" may be a, t, c, g, other or unknown
  misc_feature (480)..(480): "n" may be a, t, c, g, other or unknown
  misc_feature (519)..(519): "n" may be a, t, c, g, other or unknown
  misc_feature (522)..(522): "n" may be a, t, c, g, other or unknown
  misc_feature (553)..(553): "n" may be a, t, c, g, other or unknown
catgttggataaggcaggctctatgaagtatttttttaataggtcttcataagacattacaagctattgaattcccatcaagaaaacctatttctatttaattgtgctaagtgctaaggttttactctttaggttttccattttttttccacttgtgcattgttcctatgcaggcccctctggatatgtgttgtgaagtcatatttgtccgtgcaaagatgctggcatatgctgcactggaaaggtccactgtcaccatggcaactcatatgcaaagcatacatcacttcatccagaaagacaatgccacagtgcacacattttgttgaaagttcatcttgagtacttctatcaactttctctgnttttactacattcaagggaccttcattttttacatttggtggngccttcgttttctccttggangcccgttgcaagttggccaggtctggaatgcttggatcgccaaatctaaangaatgcattggctgaacccaccagctgaaaaatgaggangcnaattggaaggtgggataaggcccatagtttngcaaggatttggaaggcca

SEQ ID NO: 5860 - DNA, 535 bp, Homo sapiens
  misc_feature (40)..(40): "n" may be a, t, c, g, other or unknown
  misc_feature (94)..(94): "n" may be a, t, c, g, other or unknown
  misc_feature (127)..(127): "n" may be a, t, c, g, other or unknown
  misc_feature (167)..(167): "n" may be a, t, c, g, other or unknown
  misc_feature (169)..(169): "n" may be a, t, c, g, other or unknown
  misc_feature (232)..(232): "n" may be a, t, c, g, other or unknown
  misc_feature (247)..(247): "n" may be a, t, c, g, other or unknown
  misc_feature (425)..(425): "n" may be a, t, c, g, other or unknown
  misc_feature (455)..(455): "n" may be a, t, c, g, other or unknown
  misc_feature (475)..(475): "n" may be a, t, c, g, other or unknown
  misc_feature (482)..(482): "n" may be a, t, c, g, other or unknown
  misc_feature (495)..(495): "n" may be a, t, c, g, other or unknown
  misc_feature (512)..(512): "n" may be a, t, c, g, other or unknown
gagacagagacttgctctgttgcctaggctggagtacagnggcgcgatcttgactgattgcagcctccgcctcccgggttcaagcgattcttgngcctcagccgccccagtagctgggattacaggngcacatcaccatacctggctcatttttggatttttagtananacggggtttcatcatgttggccaggctggtctggaactcctgacctcaagtgatccgcccatntcggcctcccaaagngctgggattacaggcgtgagccactgcacctggcccaaattaactacttctactttgatgaatgtcttcccactaaatatcattttattatacctagtaatattagccaaataacagtgtttaatacaactaatttatcagaacaaattacaactattcataataaaccctacatatnaaaatgatttttaaaagctcaatattaacnccaattgaaagaaacctaanactgcanaatttggccactntttcaatttcctttccnggttgggttatggaccccaaatt

SEQ ID NO: 5861 - DNA, 478 bp, Homo sapiens
  misc_feature (442)..(442): "n" may be a, t, c, g, other or unknown
  misc_feature (454)..(454): "n" may be a, t, c, g, other or unknown
  misc_feature (466)..(466): "n" may be a, t, c, g, other or unknown
  misc_feature (468)..(468): "n" may be a, t, c, g, other or unknown
  misc_feature (474)..(474): "n" may be a, t, c, g, other or unknown
  misc_feature (476)..(477): "n" may be a, t, c, g, other or unknown
ggtatttttagtagagatgaggtttcaccgtgttagccaggatggtctcgatctcttgacctcgtgatctgcccgtctcggcctcccaaagtgctgggactacaggcgtgagccaccgcacccggccaagactaaagtaggctttaaacccgtaacaggtatgtgctccaagtccttctttcctgacttttcggaaaaaaatttaaatgcctcattacatagtggcatttaaaaactaaaatgggccaggtgtggtagctcacagctataatcctggctactcaggagggtgaggtaggagcattgcttgaggcaggaaattcaagaccagtctgggcaacacagtaagatcccacctcccctgaaaaaatttaaaaataaatcagctgggcctggtggcatgtgtctacagtcccagctacttgggaggctaaggtaggangattacttgagncttaaaagtttnangcttgnanng

SEQ ID NO: 5862 - DNA, 561 bp, Homo sapiens
  misc_feature (501)..(501): "n" may be a, t, c, g, other or unknown
  misc_feature (506)..(506): "n" may be a, t, c, g, other or unknown
  misc_feature (531)..(531): "n" may be a, t, c, g, other or unknown
  misc_feature (551)..(551): "n" may be a, t, c, g, other or unknown
  misc_feature (560)..(561): "n" may be a, t, c, g, other or unknown
gagacagggtctcatcctgttgcccaggctggagttcagtggcgcgatatagctcactgtaaccacaaacacctgggctcaaacactcctcccaccttagtctcctgagtacctggagctacaagcatgtaccaccatgcctggctaaatttttcatccttatttttgaagaggcggggtctagctatgttgcttgggctggtcttaaactcctggccacatgtgatcctctcacctcagcctcccaaagcactggaattacaggctgagccaccgcgcctggctaatcatgttttttaaaagccttccaggttgaagttaaaggcaaaaaaaatttctagatgaataagagcccattactaagcatcagctatgcacaaagcatcctaagagacaaaaaaaaaaaatgaagtgacagtccctggagaattcataattggagatgggaagacagatggtcctaaaaataccgaggagttgagaagttaacagctttaaagnctcanatgacttgcctggcaggcactttanttgggcccaaggttccttcntaaacctgnn

SEQ ID NO: 5863 - DNA, 568 bp, Homo sapiens
  misc_feature (427)..(427): "n" may be a, t, c, g, other or unknown
  misc_feature (507)..(507): "n" may be a, t, c, g, other or unknown
  misc_feature (532)..(532): "n" may be a, t, c, g, other or unknown
  misc_feature (545)..(545): "n" may be a, t, c, g, other or unknown
  misc_feature (567)..(567): "n" may be a, t, c, g, other or unknown
ggccatgtaaatgtcttctttagagaagtgtccattcatatcctttgcctatgttttgataaggttgtttttttttttcttgtaaatatgtttaagttccttttaaattctggatattagacctttgtcagatgggtagattgcaaaaattttcttccactctgtaggttgcctgttcactctgatgattatttcttttgctgtgaagaagctctttaatttaattaaatcccacttgtcaattttggcttttgttgcaattgcttttggtgttttcatcatgaagtctttgcccatccctatgtcctgaatggtattgcctaggttttcttccaggatttttatggttttcagttttacatttaagtctttaatccatcttgagttaattttcatataaggtgtaaggaaggggtccagtttcagntttctgcatatggctagccaagttttcccagcaccatttactggaataggagaacctttcccatttcttggttttggcanggttggccaaagatcaaatgggtgnaaaccatggtggnttaattctgagggcccggtctng

SEQ ID NO: 5864 - DNA, 566 bp, Homo sapiens
  misc_feature (454)..(454): "n" may be a, t, c, g, other or unknown
  misc_feature (539)..(539): "n" may be a, t, c, g, other or unknown
atggggtttttttttggagttatttcctcagtggagcacaaattgcccccacagtctgatccaattaaattaaggaccatttgaatttttgaggctagtctgtgatatctgttatgactccaggagggcacgttttacctgcattgtcctctggctctcccttgtaaactaactggcctatggtttagcttgctgttctcattaaggtgcaagcctcctcttaattaagaaacaccctggcttctaggccacacctccatggaatttaggctctgcaacacatagctagctagtagcaataagaaatgctgatggcctgtgcctcccaaggagataccatgttcctcaactgggagctggagagagaggaatccctgtgttcttgaatgaacttcaggtagaaggtgaatttttatcacactgaactggaagggggaaggagggaagctgtggntcaaatgtcacccgattcttactcttcttaccaaggtttaatagatttcttgaataaatggtccttcatttggctaaggccctangccattttccaaaggttttaaaatagg

SEQ ID NO: 5865 - DNA, 557 bp, Homo sapiens
  misc_feature (521)..(521): "n" may be a, t, c, g, other or unknown
  misc_feature (532)..(533): "n" may be a, t, c, g, other or unknown
  misc_feature (557)..(557): "n" may be a, t, c, g, other or unknown
acccaaagtgtcctttattctttatcatcctatttgagttttattgtttttacacagctgggaaatgcttaaggtacaaattaataaattttaaactcagtatggaaaatacatttaataaattaaagcaaaaaccaaagaagatctgaggagatccaagagatcaagacaatctgtaaccagagtctgaagtatccaaggagctactctttttgaggcatattctcctcagcttccagttatcatttgataaacacatcagcaaaaggttcagtgttttaaacaaatgtagactttattttgtactgtacaaagtgctaatgtcagtagatccattaaaatatagaatatttaagaaagatcattaataaaagtaatggtcattcaatttaatggtacagtttacagcggtttactgctagtggtttaagtcagcatgagcagtatcaaaggacttatgtagctaggttctaaactttacagaaaacccagtccattccagggctatagccatataagcntattcatattnnaatagtttccatatgtacaggaan

SEQ ID NO: 5866 - DNA, 414 bp, Homo sapiens
  misc_feature (18)..(18): "n" may be a, t, c, g, other or unknown
  misc_feature (306)..(306): "n" may be a, t, c, g, other or unknown
  misc_feature (371)..(371): "n" may be a, t, c, g, other or unknown
  misc_feature (386)..(386): "n" may be a, t, c, g, other or unknown
  misc_feature (392)..(392): "n" may be a, t, c, g, other or unknown
  misc_feature (400)..(401): "n" may be a, t, c, g, other or unknown
  misc_feature (410)..(410): "n" may be a, t, c, g, other or unknown
  misc_feature (413)..(413): "n" may be a, t, c, g, other or unknown
caaattgcattttacagnaaaaatgcagaccactttggatagctatggctcgatacttctgggtgccctcctcctaagacatcctcttcttacattccactgaacagaaaaccatcccttctactggcatgaacttctgcccaaggaggcatttgctgcagcaagagcacagaaggcactgtgtggatgcatgccagctgaaattgttataggtcacgcgctgcacttctgggtcgatggcattgtggcatccttgacacaccacagcgtgattcttcacatagcagggcttgcacacgggcttgncattgaccatcacgtatatctccccagctagaaggctatcacagtcaaagcagcagaagtgtttnaggtgccaattctgnttttcngcctgggnnatcctcatngcng

SEQ ID NO: 5867 - DNA, 572 bp, Homo sapiens
  misc_feature (477)..(477): "n" may be a, t, c, g, other or unknown
  misc_feature (490)..(490): "n" may be a, t, c, g, other or unknown
  misc_feature (509)..(509): "n" may be a, t, c, g, other or unknown
  misc_feature (536)..(536): "n" may be a, t, c, g, other or unknown
  misc_feature (553)..(553): "n" may be a, t, c, g, other or unknown
gagatgaagtctcgctctgttggagtgcaatggcgtgatctcagctcactgcaacctccgcctcccgggttcaagcaattctcttgcctcagcctcctgagtagctgggattacaggcatgtgccaccacgcccggctaatttttgtatttttagtagagatagggtttctccatgttggtaagactggtctcaaactcctgacctcgttatctgcctgccttggcctcccaaagtgctgggattacaggcgtgagccaccgtgctgagcctatcttttgctctttaaaattttattctcctgtgacccactggtacaggatacagtaacgtataacacagcaagagacatctaacccactcaagaatcatgagattttcctgacagtatttatacaagaggcctaaattgaaaatgtcattaatttaaaaagaacatgttagccaggcaagtggctcatgcctgtaatctcaacangcatggaaggccnaagccggaaggacccaaanggcaggaaatcgagaaccttctggctnacataagggaaaccatntttcttaaaaaaaaaaaaa

SEQ ID NO: 5868 - DNA, 562 bp, Homo sapiens
  misc_feature (504)..(504): "n" may be a, t, c, g, other or unknown
  misc_feature (517)..(517): "n" may be a, t, c, g, other or unknown
  misc_feature (549)..(550): "n" may be a, t, c, g, other or unknown
  misc_feature (562)..(562): "n" may be a, t, c, g, other or unknown
gagagcacaactccaaatcatcttttattaatataaaaagggcatatttagcaaaagacacacagataaaagagtcactatggctcaggacacaaggcagggaggtgccaggcctgtgcccctgctgggggagaaggaggctcgggacaaagtgggagaagtgctgggaagggctgagcggtaggggccacaaaagttccggtgggcaacactgtcggcaggtcatgggtggagcttacaaaatttatataaattctagaagaactaaaactaattttctatcagtctacattgtgtgtaaggagggaaaagaaaacatattgataaagtttgcttcatactctaaaatagccagtgatatttcaacatgccaaataagcaactgttgcttcctttttgaacccttatagccaacagttagtgttccaagtaagagtggataaagtcccccaaaatcaagttctagtaagaagacatttctttcaattaaacttaccccctttntacaggaaatcancttaacaagggaatcctggctttaactattanntggcccatttan

SEQ ID NO: 5869 - DNA, 548 bp, Homo sapiens
  misc_feature (463)..(463): "n" may be a, t, c, g, other or unknown
  misc_feature (512)..(512): "n" may be a, t, c, g, other or unknown
  misc_feature (529)..(529): "n" may be a, t, c, g, other or unknown
  misc_feature (534)..(534): "n" may be a, t, c, g, other or unknown
  misc_feature (542)..(542): "n" may be a, t, c, g, other or unknown
gagacagggtcatgcactgtcaccttggctggagtacagtgatacggtcacggctcactgcagcctcctggactcaggtgatctttccacctcagcctcccaagtagctgggactacaggtacacaccacaatgcccagttagtttttatttatttatttattttgtagagatgaagtatcatcatgttgcccaggctggtattgaactcctttgctcaagcaatccccctgcctcagcctcccaaagtattgagattacaggtatgagccactacacccagccccaatgttatcctttaagtataataagattataacatttcagaaatcaacatgtgttagtacaatattttataacattcaaagatggaaactaaagtaaatttcctacacctacctttatttaaattaataggaaaatcaatgtggtggcataatcctttcaaaggtagaaacttatgnttttaactagctgatccaagacttgcatttgctttctgatggttaaagnaactacctttactttancaagnccatttantaattt

SEQ ID NO: 5870 - DNA, 423 bp, Homo sapiens
  misc_feature (101)..(101): "n" may be a, t, c, g, other or unknown
  misc_feature (348)..(348): "n" may be a, t, c, g, other or unknown
  misc_feature (366)..(366): "n" may be a, t, c, g, other or unknown
  misc_feature (388)..(388): "n" may be a, t, c, g, other or unknown
  misc_feature (392)..(393): "n" may be a, t, c, g, other or unknown
  misc_feature (404)..(405): "n" may be a, t, c, g, other or unknown
gctgacctggctatcttaagtagttagaagctatattataatagggccacactatggtagcttaaaattatagaatagggagattaaaaatatcttacagngtttattctaaatctgatagtattttacaaggtgtgtgtgtgtgtgcgtgtgcacgcatgtgtgtgttggagacaggggcagctgatattcatggcaacatgtagtatgtgccagtatcttgaacaatgatatataatgctaagactcaaatggtttcggtttttaatacttttgttttaagctcaggggtacaaatgcaggtttgttacataggtaaagttatgtcatgggggtttttgtacagantatttcatcacctaggcnttaagcctagtacctattaggnattnntcctgattctnnccctcttcctaccctcct

SEQ ID NO: 5871 - DNA, 566 bp, Homo sapiens
  misc_feature (511)..(511): "n" may be a, t, c, g, other or unknown
  misc_feature (540)..(540): "n" may be a, t, c, g, other or unknown
  misc_feature (544)..(544): "n" may be a, t, c, g, other or unknown
  misc_feature (563)..(563): "n" may be a, t, c, g, other or unknown
gaaaaaatttccaaatgcatcaggaatcttacagtaccaactcatcatttttcataacacagatttatgtcttcaattggagctatttagaaattggcccatagccacctgtaccctaaattttctctgggctacttggaagtatttagagaaatgtgagatggtagttgatgaaaacagagttcttcatcccaacagtaacagctagataactgactgcttggccaaacatttgactcaatccagggaatggaagatgccattcaaagccagattccagtttgtgttaaggattatatttctgtcatcacatttccttgacagtcccgccaactaaaaatcccccagcaaaagcccagtgattaaattctcctggagcatatttttccagcttatggaaacaatctgctgcagtgtctcctgtaatatccaaaggatagttccatttctgaggctgatatatggaagtagattactcacaacccaatccatcttccaccaacaatttgantttgaaatgactatggaaaggactggggnaatnaaaatcccatccctggaanggg

SEQ ID NO: 5872 - DNA, 563 bp, Homo sapiens
  misc_feature (294)..(294): "n" may be a, t, c, g, other or unknown
  misc_feature (492)..(492): "n" may be a, t, c, g, other or unknown
  misc_feature (507)..(507): "n" may be a, t, c, g, other or unknown
  misc_feature (550)..(550): "n" may be a, t, c, g, other or unknown
gagatgtagtttcgctcgttgcccaggctggagtgcaatggcacaatcttggctcaccgcaacttccgcctcctgagttcaaatgattctcctgttgaaacggtccagcccaggaaacttgtgcaagcagaaggaggatgatagtggccttcatgatttatctcatgtattttcacaaccagggaaccttttaatccgggaatttgccacaggagccctcaaagctgagatgtaattacactaaatattcagcccaagtaaaagagtttgcaggtgtggaaaggaggagggggnaggtgctgctctgtgactaggttgaaaacctcctgcttctactccatagcacagttaaatgattcattctccaaggcatggaatagttcttgctttataaaaatagtactgcgattaaaaaaaaagcacttctgccaaaggaaccatgttccaacaccggaaacaaggtgttctgcttaaacagaataagatcaccanccccatccatccttncttcctggtcccctccaactttgagttgggcattccaccatgncccgggggggagg

SEQ ID NO: 5873 - DNA, 483 bp, Homo sapiens
  misc_feature (440)..(440): "n" may be a, t, c, g, other or unknown
  misc_feature (462)..(462): "n" may be a, t, c, g, other or unknown
  misc_feature (468)..(468): "n" may be a, t, c, g, other or unknown
  misc_feature (471)..(472): "n" may be a, t, c, g, other or unknown
  misc_feature (479)..(479): "n" may be a, t, c, g, other or unknown
  misc_feature (481)..(481): "n" may be a, t, c, g, other or unknown
caaataaatatcctttattaaagaaaaagaggaatattgttaaaagcaccaaaactgtaggttgttacattgcatgtacaacaagagaaaggtgattgcaatacttggtgtccaagtacttaactctgaagtcatgagtgtaaaaaacatgaaatacaaagcaatacaattacaatgcagaaaagctgcactaaagagcaaaaggcaacagtcaaaacgattactggagatttcatggtattgctataaatgcttgcttagtttttcctctgtacttttaatactttaggatgttaattgaacatatttaagtattgtaaatttgcaagagttggcatttacaatacactgtgcacactgtccatttaatgtaatggtactaaagccatccttacaagccaagcaaagcacaatgtgctagtgttttgcttctacctttnataatattgcacaaagctagtnaatggnganngagtttncnat

SEQ ID NO: 5874 - DNA, 584 bp, Homo sapiens
  misc_feature (445)..(445): "n" may be a, t, c, g, other or unknown
  misc_feature (471)..(471): "n" may be a, t, c, g, other or unknown
  misc_feature (514)..(514): "n" may be a, t, c, g, other or unknown
  misc_feature (526)..(526): "n" may be a, t, c, g, other or unknown
  misc_feature (528)..(528): "n" may be a, t, c, g, other or unknown
  misc_feature (572)..(572): "n" may be a, t, c, g, other or unknown
  misc_feature (577)..(577): "n" may be a, t, c, g, other or unknown
  misc_feature (579)..(579): "n" may be a, t, c, g, other or unknown
  misc_feature (584)..(584): "n" may be a, t, c, g, other or unknown
aactcagagttaactagaaaaatcccttttattaaaatacattgtaaatattgctcattaatttcctgtacttgaaacattttttctgaacccctaagcaccacttaggatagatgaagcaaacctgatgtgttttattcttctctattacctgagtatgaatgtgacatttaactccttgaacttcttgctcctctgaagacatgaggtgctatcactggatttctctaagtaagaatagcagaagtcgttttaaaaaaatactgcagatagtttttctttccaaattttatgaaaataggtataggaaagaaaatctgaatgtccttggtgtcagtatccatctgctccatgcatccaggcagggcttctttccattcccaaagaggggggcagtctgcctaacagggccattgctacccaactgtgggagcccagctcttanactgagggaaggtctgaacaattggnggttcgtggtgaaaatatcaccctatcataaaaccaaaatgcngatgagacccancnttcatacctttataaacccttctaccttaacttacctcggaccntttgnanctctn

SEQ ID NO: 5875 - DNA, 668 bp, Homo sapiens
  misc_feature (520)..(520): "n" may be a, t, c, g, other or unknown
  misc_feature (553)..(553): "n" may be a, t, c, g, other or unknown
  misc_feature (592)..(592): "n" may be a, t, c, g, other or unknown
  misc_feature (595)..(595): "n" may be a, t, c, g, other or unknown
  misc_feature (610)..(610): "n" may be a, t, c, g, other or unknown
  misc_feature (634)..(634): "n" may be a, t, c, g, other or unknown
  misc_feature (650)..(650): "n" may be a, t, c, g, other or unknown
  misc_feature (668)..(668): "n" may be a, t, c, g, other or unknown
agaggtattcaaaaaatttattgaaagcactgtactaggagctgagaacacgatgatgagcacaacacagttcttccctttggaaacatagataagtggagggaatgtcatcacaaatgtaaaacttcactatgagatgagttccgtgataggattttcttagggaaacctgagaaagagttgagactaaaggtatgtgtcatatttttcacaaggcaaaactgggggaatgacatatacagaggcttgggctagaaaaaagataccgttagtccacttacttttgagacagttttggctgctttccctcttcagtgccctgttttagaactgagtccttactgaggcttgtaagatggctattatgggaggtgagagtgttacaaaatgaggctgaagaggtaggtaaagaagccagaccacttcaggctccctctggctttattaaagcaagataaatccatggtggaaaatcagatttgcaagaaaaggtagttgaactaggttgcttaattggtgnctagacaagagaccagcttggactaagtaaaantagtgaaataagatcggttataggtggatgacagagccnacntagacgtggtaatanagggaggggccctaactggtaggngtcagcttgccactgntgagcataatgccctagn

SEQ ID NO: 5876 - DNA, 646 bp, Homo sapiens
  misc_feature (453)..(453): "n" may be a, t, c, g, other or unknown
  misc_feature (471)..(471): "n" may be a, t, c, g, other or unknown
  misc_feature (502)..(502): "n" may be a, t, c, g, other or unknown
  misc_feature (564)..(564): "n" may be a, t, c, g, other or unknown
  misc_feature (587)..(587): "n" may be a, t, c, g, other or unknown
  misc_feature (619)..(620): "n" may be a, t, c, g, other or unknown
  misc_feature (625)..(625): "n" may be a, t, c, g, other or unknown
  misc_feature (630)..(630): "n" may be a, t, c, g, other or unknown
  misc_feature (639)..(639): "n" may be a, t, c, g, other or unknown
aggaaaacatgttctttaataaacataagagatagtcaagtctaaataaaataataatgataataataacagattctacaccacagttgtatacacttccagtgaagctttatgcattccattctgagctcctaataccaggtaaacacgaatcataggtggaaatatgccatgtttagcactagaagtaacatcacagtttattagcaaaataaagcagaaaatgatcaaaatgatcaggtaaataaatattacaacatataatgtactggtgatgaagctgcaataaagtaatataagtgatgtttacaattttttttttttttttttttttttttttactgggaaggctagttgtaaacataaacattctcactgaactactggccccccaaaacctaacctatctcacaatcaataatcatcttttgctataaaatcataaaaacttgnactctggggctcttttgnctgggacagcttttctactttctgacatctnttgaagtctttcttctcaaacttcaagctcaggctttatctcctgccaaaacctttcctgangctttcaggttctgttaaaaccnggttctttctttttttttttttgaaacggagnntcctntgtgnccagctggngggcagg

SEQ ID NO: 5877 - DNA, 644 bp, Homo sapiens
  misc_feature (498)..(498): "n" may be a, t, c, g, other or unknown
  misc_feature (520)..(520): "n" may be a, t, c, g, other or unknown
  misc_feature (539)..(540): "n" may be a, t, c, g, other or unknown
  misc_feature (613)..(613): "n" may be a, t, c, g, other or unknown
agagcctaagggcctgtattttaatgagaaaaaaaaaatttccaacatagttcgggtagctttgaatggtctagtcaaaaaatacttttggtatataaaaagcctgtacgtacaattcacacctcagtgaagcgccctccttgccttgaggctgggcctgggacaaaggtggcctcacagccagcccaggcagggagatcggcagagaggggtggcccctgaccccagctcctctgccccagctgctgctccttggtggcggcccctcctgacaccaggcgtctgccatccttcaggcaccaaacagccccgtctacctggccctggtctgccctcacaccagtccacccccagccccaaccccaaccaccctccgctgcacggcctccagcacctgactccattcagggaactgaatttgagcttgcaggggtgagaaccacactgagcagcatgacaggctgtgagatcggaggagaagagtatatgctgaggctntcccagttgtcacttggcttangggtcctggtgcccgtggnnccgcagtccagccacagtgctggcctgacaaatcagccttaggtgactggaacaggaagcggaaccccaaggnggccaacaaaacggttctggaggatacccct

SEQ ID NO: 5878 - DNA, 613 bp, Homo sapiens
  misc_feature (133)..(133): "n" may be a, t, c, g, other or unknown
  misc_feature (173)..(173): "n" may be a, t, c, g, other or unknown
  misc_feature (180)..(180): "n" may be a, t, c, g, other or unknown
  misc_feature (302)..(302): "n" may be a, t, c, g, other or unknown
  misc_feature (451)..(451): "n" may be a, t, c, g, other or unknown
  misc_feature (485)..(485): "n" may be a, t, c, g, other or unknown
  misc_feature (515)..(515): "n" may be a, t, c, g, other or unknown
  misc_feature (537)..(537): "n" may be a, t, c, g, other or unknown
  misc_feature (561)..(561): "n" may be a, t, c, g, other or unknown
  misc_feature (566)..(566): "n" may be a, t, c, g, other or unknown
  misc_feature (582)..(582): "n" may be a, t, c, g, other or unknown
  misc_feature (589)..(589): "n" may be a, t, c, g, other or unknown
  misc_feature (603)..(603): "n" may be a, t, c, g, other or unknown
ctgaacgaattggttaatttatttggtaaataaaacaaccatttctaatatgacactgaaatggcaaaatgatagtcacatcacactagggagaaaattttaataagcagacaaaacaaaatgataacattgnccattttttcaaagcactgacatacaaaagtgaaaagatncaacagngcacattttcagggtacctatgtttactgaagtctaaaaactcctccacctttaaaagtcagcattatttcttgatggaagaaaaatacacagtaactttttgatgtaatactaatattatngggttttctttgcaaattcctttagttcaagtattactaaagaaacataaacatatggacattacaaattcagctaaaaaactaggtagtgctgactatcctgtttaatggtaatatatgtattaggtatttaaatttgattattatancacaaaataattttaacatggaattctataaagnatgtattttgtcactctacagtgcctgctnttccatgggttttttttaagangttcatcaatttacccaatttggncatanctgtaccaccggaatngggcctntaacccaaaatttncgtaaaggct

SEQ ID NO: 5879 - DNA, 596 bp, Homo sapiens
  misc_feature (518)..(518): "n" may be a, t, c, g, other or unknown
  misc_feature (556)..(556): "n" may be a, t, c, g, other or unknown
  misc_feature (564)..(564): "n" may be a, t, c, g, other or unknown
  misc_feature (566)..(566): "n" may be a, t, c, g, other or unknown
  misc_feature (578)..(578): "n" may be a, t, c, g, other or unknown
  misc_feature (593)..(593): "n" may be a, t, c, g, other or unknown
  misc_feature (596)..(596): "n" may be a, t, c, g, other or unknown
aactttttaattcattttcattttaaattgctcatgctaatgaacacagtagtatggctttacagatttcctagacacaatcctcaatttggctcagacttgaatatacgtcatccaagagaactttttcgttccttcttaaggtgtttaaaaaataaatggctataaagtatggggagaaaacatttaagaataaggtcagagcacacattcagatacactttggactcagatgtactcttagagaactgtagagataaaatgctaattatagtacatgtaaacatctgttcaaattgataaagagtgaacataaaataataggatgatattattgtaacagtcgtctccagacaggaactggtcttgctcttgcagtcacaaagctaaattcaggcaatgatgatctctctctgctggaaaaagagaagactattaaaaaaaactttgaaaatagcaaataaatctaaacttgaatcacatcataaatggcctccacttttctaaccattaaaaangctattggagaaagaatcaaaatcaaagtgcaggaaantacccaangntttggctaaaangatttaccaaacctnttn

SEQ ID NO: 5880 - DNA, 653 bp, Homo sapiens
  misc_feature (1)..(653): "n" may be a, t, c, g, other or unknown
nnnnnnnnnnnnnnnnnnnnnnnnnnnnnnnnnnnnnnnnnnnnnnnnnnnnnnnnnnnnnnnnnnnnnnnnnnnnnnnnnnnnnnnnnnnnnnnnnnnnnnnnnnnnnnnnnnnnnnnnnnnnnnnnnnnnnnnnnnnnnnnnnnnnnnnnnnnnnnnnnnnnnnnnnnnnnnnnnnnnnnnnnnnnnnnnnnnnnnnnnnnnnnnnnnnnnnnnnnnnnnnnnnnnnnnnnnnnnnnnnnnnnnnnnnnnnnnnnnnnnnnnnnnnnnnnnnnnnnnnnnnnnnnnnnnnnnnnnnnnnnnnnnnnnnnnnnnnnnnnnnnnnnnnnnnnnnnnnnnnnnnnnnnnnnnnnnnnnnnnnnnnnnnnnnnnnnnnnnnnnnnnnnnnnnnnnnnnnnnnnnnnnnnnnnnnnnnnnnnnnnnnnnnnnnnnnnnnnnnnnnnnnnnnnnnnnnnnnnnnnnnnnnnnnnnnnnnnnnnnnnnnnnnnnnnnnnnnnnnnnnnnnnnnnnnnnnnnnnnnnnnnnnnnnnnnnnnnnnnnnnnnnnnnnnnnnnnnnnnnnnnnnnnnnnnnnnnnnnnnnnnnnnnnnnnnnnnnnnnnnnnnnnnnnnnnnnnnnnnnnnnnnnnnnnnnnnnnnnnnnnnnnnnnnnnnn

SEQ ID NO: 5881 - DNA, 645 bp, Homo sapiens
  misc_feature (517)..(517): "n" may be a, t, c, g, other or unknown
  misc_feature (581)..(581): "n" may be a, t, c, g, other or unknown
  misc_feature (602)..(602): "n" may be a, t, c, g, other or unknown
  misc_feature (625)..(625): "n" may be a, t, c, g, other or unknown
  misc_feature (630)..(630): "n" may be a, t, c, g, other or unknown
  misc_feature (634)..(634): "n" may be a, t, c, g, other or unknown
aatagacatggtctcaatacgttgcccaggctggtctctaactcctagcttcaatcaatcctcctgacttgtcttccctaagtgctgggattacaggtgtgagccactgtgcctggtctcacttttccaattctaaagaatgtgttgtgtaagccttcccctcaacaacttagtgaaaggtgaaaaaaaggtttggaaataaaagcatctgatgtttgaaaaagtactttgtgaagtaaatgcactaagagttatctgtgtattactgcaaacaggtgaacatagtaaaaacaaatgaacttactgcaagtagctcaacatagtaaaaacaatagaaatgtttggctttacccatcagccaaataaaaaaatctccttgtaaggttaaaaggatcgaaatgtaggaagaccgtgaatattcaccaaaacccttcatcttttcaatttcttcatctgtttctgggctgctcattttggatgctttaacttggttactactaccagtatctgctttaanatagtttggcttgggtatctaacaacccgagactcttgaattggcatctgcatctaagtctaanggtttatgcttaatgatttgnggggactaactggactacttcangaatncagngggtctaccat

SEQ ID NO: 5882 - DNA, 540 bp, Homo sapiens
  misc_feature (406)..(406): "n" may be a, t, c, g, other or unknown
  misc_feature (435)..(435): "n" may be a, t, c, g, other or unknown
  misc_feature (462)..(462): "n" may be a, t, c, g, other or unknown
  misc_feature (464)..(464): "n" may be a, t, c, g, other or unknown
  misc_feature (486)..(486): "n" may be a, t, c, g, other or unknown
  misc_feature (502)..(502): "n" may be a, t, c, g, other or unknown
  misc_feature (507)..(507): "n" may be a, t, c, g, other or unknown
  misc_feature (526)..(526): "n" may be a, t, c, g, other or unknown
  misc_feature (535)..(535): "n" may be a, t, c, g, other or unknown
aagtattgaatagagagaatcactcactacccaataaatcccagggtgggtaagatatttcccattttcagatgagggtactaagggtcagaaggatggaggcccagcccaatgctactgacacagctaggattcagtattgggtagagaatctctatccagtacttaagggttgtcaaaaaaaacagcatatgaaaaagaatgcctgctggagaaggaagacaacacaacagaaagcagagatgggagagagttcaattcttgaactcctggcctgaagtgatcctcccacctcagcctgagagttgaattctgatgacattgtttgaacccctagatccagctttacctgaagctaaatgcgctactaaacttctcagtttaaaaagcctataaatcctgctgnttgagtcaatttcttatttgcaactatgntctattcaattcaaagccttagggctnancccagttaaactgcttctacanttctggtggatctttngactnatgaaacctaatctttcgntttaccacngtcca

SEQ ID NO: 5883 - DNA, 479 bp, Homo sapiens
  misc_feature (390)..(390): "n" may be a, t, c, g, other or unknown
  misc_feature (429)..(429): "n" may be a, t, c, g, other or unknown
  misc_feature (442)..(442): "n" may be a, t, c, g, other or unknown
  misc_feature (458)..(458): "n" may be a, t, c, g, other or unknown
  misc_feature (462)..(462): "n" may be a, t, c, g, other or unknown
  misc_feature (465)..(466): "n" may be a, t, c, g, other or unknown
gctgtgaaaatactctgtttattaaagaccaggcggagggaggtaaggttgtgggttctgtatgggaaactgagtcccagccccagggaaggagaaggaggacggaccagctggcagcccgcgagaggtcacaggtcagtggccggaccccagtcatagccgtcttcatcggaggactccgcatcatggactcgcgtaaactttttcttcagggcttcccgttcataggttcgcatgctgtcctgtcgccactgtccctgggggtggcggctgtccacctgggccccctgatgagccgagattctcccacgatccctcgggctctgggactcatctgcctgcacgggctccgaggaccggccagggctggacccgggggctcatcatcanatccgtgtagggccccccttgccgctgtgtacccttgcnatccgtgtacccnccgccttgccgccggnttgnaannccttgtaaccccg

SEQ ID NO: 5884 - DNA, 429 bp, Homo sapiens
  misc_feature (318)..(318): "n" may be a, t, c, g, other or unknown
  misc_feature (354)..(354): "n" may be a, t, c, g, other or unknown
  misc_feature (356)..(356): "n" may be a, t, c, g, other or unknown
  misc_feature (374)..(374): "n" may be a, t, c, g, other or unknown
  misc_feature (377)..(377): "n" may be a, t, c, g, other or unknown
  misc_feature (385)..(385): "n" may be a, t, c, g, other or unknown
  misc_feature (414)..(414): "n" may be a, t, c, g, other or unknown
  misc_feature (421)..(421): "n" may be a, t, c, g, other or unknown
actaaaacagaaagactttcaggaaaatgtcatttaatgatttcagctatacattacatatacaactctgtagcctagcaacaatcattgctacaccatcattaactttaaatattttgcttggtgagctattctcaaatgtagcacattttaagattttgccatcattatgactgtggaatcattgtttggttttcataggaaacagatctgtcacagtatgaagctttgtttattttaagaaactggtacacaattacatttccacttacaagagaacgccacagatataactaaaggcaggcttcgatggctccncaaaggttgcgtgcgggaccaaccccacacctcctngnttccccgtcgaaccgccntgnccaggttnacatggtttcatttccagagatgctttgnttttcgnaagttagg

SEQ ID NO: 5885 - DNA, 632 bp, Homo sapiens
  misc_feature (465)..(465): "n" may be a, t, c, g, other or unknown
  misc_feature (491)..(491): "n" may be a, t, c, g, other or unknown
  misc_feature (554)..(554): "n" may be a, t, c, g, other or unknown
  misc_feature (572)..(572): "n" may be a, t, c, g, other or unknown
  misc_feature (605)..(605): "n" may be a, t, c, g, other or unknown
  misc_feature (613)..(613): "n" may be a, t, c, g, other or unknown
  misc_feature (626)..(626): "n" may be a, t, c, g, other or unknown
caaccaccaaagctgtaacttttatttgccaatagatattttaataaacaggcttactccatctgtaagaccctgataatgcctcttaggaaatcatagaaaaataaaatacaataattagtaatttgtaccttgtacaaaaatcttattatgttgctcagcaggtagtttgctaaacagcatattctttcagcaaatagatgacatatgttatgcaattcaccacaaacaacccctcatattgagagctgagcattctataacactattaacttgtaagcatgccagcacatgaaaatttacatggaaagttattaatattatagtagatttttgtaagataaaaatagtaccaccttcaaataagtctggactacttcactgctatagtaaagtagataataggtaggattgcagttcaattgttaacacctttttaccttgtttatagctctaccatattgngattataaccagaaaagagaatgtangctgtgtcaggaacctgagtggaaggcatatattgaagctttaaatggtgacagaatactaangagaaaaccttaaacagngctatacttcctatctcatagataaatcttttnccctttgnaagaccaatgggncagagt

SEQ ID NO: 5886 - DNA, 494 bp, Homo sapiens
  misc_feature (155)..(155): "n" may be a, t, c, g, other or unknown
  misc_feature (403)..(404): "n" may be a, t, c, g, other or unknown
  misc_feature (408)..(408): "n" may be a, t, c, g, other or unknown
  misc_feature (443)..(443): "n" may be a, t, c, g, other or unknown
  misc_feature (457)..(457): "n" may be a, t, c, g, other or unknown
  misc_feature (463)..(463): "n" may be a, t, c, g, other or unknown
  misc_feature (483)..(483): "n" may be a, t, c, g, other or unknown
gagatggagttttactcttatagttcaagtctggagtgtgatggcagtgatctcaactcactgcaatctccgcctcccgggttcaagcgattctcctgcctcagcctcccaagttgaattacaggagcccaccgacacgccggctaattttttgnatttttaatagagactgggtgacagagcaagatcctgtctcaagaaaatgataatcaattcaattcaattcaatgcagtccccagatcaccggctctgtgctcagcaaacttcatcacaacgggactgatgtggatcagagtgatgaccacttcacggatgagacacttcactccccgcctgcctcccagatgctaaggagggataatccaagtctcagccttcgacagtccttccttccagacggcnngggntggtttttctctaagtgctttgccattcaagagcnaccaaccccaccanctggcntggactaagagggaaattanttttttggaac

SEQ ID NO: 5887 - DNA, 448 bp, Homo sapiens
  misc_feature (13)..(13): "n" may be a, t, c, g, other or unknown
  misc_feature (20)..(20): "n" may be a, t, c, g, other or unknown
  misc_feature (406)..(406): "n" may be a, t, c, g, other or unknown
  misc_feature (428)..(430): "n" may be a, t, c, g, other or unknown
  misc_feature (438)..(438): "n" may be a, t, c, g, other or unknown
  misc_feature (440)..(441): "n" may be a, t, c, g, other or unknown
atcttgatattgnttattgnttacggttatgacacattatatatatacacacacacacatatgtatatagttacgtacacacacaccaatggcactgattttggtacacatcagaattacttaagagagtttgttaaaaatggagattctggagccccactctgtgagtctggacgataggtcctacatttttaaatgcccctgcctgcccccaaggtgtttttatacagatggtagactcactctgaaaaacactagaacatacattcttaaaatatcaaacattgaattctgggtatgatcattcttttttggtcagggacaagaaaaaaactgtcaaagacaactgagattttgagtccaggtagcccggaggagggaaaagtaatacttacaaaaataaggnctggaatgaaaaagggagaagnnnggataccnannggttttt

SEQ ID NO: 5888 - DNA, 540 bp, Homo sapiens
  misc_feature (402)..(402): "n" may be a, t, c, g, other or unknown
  misc_feature (453)..(453): "n" may be a, t, c, g, other or unknown
  misc_feature (467)..(467): "n" may be a, t, c, g, other or unknown
  misc_feature (493)..(493): "n" may be a, t, c, g, other or unknown
  misc_feature (507)..(507): "n" may be a, t, c, g, other or unknown
  misc_feature (514)..(514): "n" may be a, t, c, g, other or unknown
  misc_feature (523)..(523): "n" may be a, t, c, g, other or unknown
  misc_feature (529)..(529): "n" may be a, t, c, g, other or unknown
aggataattaaaactactttgaattttttatttatcaatctggtttctaatataattttagttaaatgaaagacattcacaaagaatattaggcatacgtacataatttccttctttcattctagtttacatgctgttgcttttagagagtgaaattttgtgttatttcacaggggatggaatcctgtttgactttacagaaagaatatttagcccagcttttcacagcactaacctctgcagtcaccacgctcactgaaaaaatttaaaaaacctgacaaaataaaacttagtaaaatctagaaacttgaattcaatttaataattgctgccctttttttgggaaaattgctcaacagggtggtgaaaagaaaaaatggggggtttcaaattcagtgttgnttggaggcatgagacataaacggccattaaaacgtttactgcgtaagaacnaggtataatggggngaggaaaaggagaaagaaaaaaggtngattgaaaagaacngatttcntccttgaanggaagnaaagctttttg

SEQ ID NO: 5889 - DNA, 570 bp, Homo sapiens
  misc_feature (448)..(448): "n" may be a, t, c, g, other or unknown
  misc_feature (497)..(497): "n" may be a, t, c, g, other or unknown
  misc_feature (542)..(542): "n" may be a, t, c, g, other or unknown
  misc_feature (545)..(545): "n" may be a, t, c, g, other or unknown
  misc_feature (553)..(553): "n" may be a, t, c, g, other or unknown
  misc_feature (557)..(557): "n" may be a, t, c, g, other or unknown
  misc_feature (565)..(565): "n" may be a, t, c, g, other or unknown
  misc_feature (567)..(567): "n" may be a, t, c, g, other or unknown
cataaaggaaaacaaaaaacaaaaaaacaaaaacaaaacaaaaaaaacttaaggtatgtttcctgcaagcaaaatggaggaaaaggtattattgttgttactatgattattaagccacagacacataaaatccacaaaatggattggtggctttggaaatgcaataccgtatcaaaggtgcagactgtttcaaatgttctctacatattgggctgaaacaagaaccaaaccaaacttcaaccccatcagcgacgcaatgctcctgtgaccttggtgaaaacatcgtcgtgaccagctagatccaggaatccttctctagagacacgtggaaacgtcccatcaggtaggtcctcaagtccaaggtggggttgaagggctctggcttgtcccagggcaaagcacgtgcattattggaccaatttctgaatagaattttattaatatgtcnaatcaattccaggcacttgaaatggctttggctggaataacccaacatngcaagaatatggattcacagagcattcagcccaagctgggttcancangcaagggntatnggtccttnangct

SEQ ID NO: 5890 - DNA, 485 bp, Homo sapiens
  misc_feature (1)..(485): "n" may be a, t, c, g, other or unknown
nnnnnnnnnnnnnnnnnnnnnnnnnnnnnnnnnnnnnnnnnnnnnnnnnnnnnnnnnnnnnnnnnnnnnnnnnnnnnnnnnnnnnnnnnnnnnnnnnnnnnnnnnnnnnnnnnnnnnnnnnnnnnnnnnnnnnnnnnnnnnnnnnnnnnnnnnnnnnnnnnnnnnnnnnnnnnnnnnnnnnnnnnnnnnnnnnnnnnnnnnnnnnnnnnnnnnnnnnnnnnnnnnnnnnnnnnnnnnnnnnnnnnnnnnnnnnnnnnnnnnnnnnnnnnnnnnnnnnnnnnnnnnnnnnnnnnnnnnnnnnnnnnnnnnnnnnnnnnnnnnnnnnnnnnnnnnnnnnnnnnnnnnnnnnnnnnnnnnnnnnnnnnnnnnnnnnnnnnnnnnnnnnnnnnnnnnnnnnnnnnnnnnnnnnnnnnnnnnnnnnnnnnnnnnnnnnnnnnnnnnnnnnnnnnnnnnnnnnnnnnnnnnnnnnnnnnnnnnnnnnnnnn

SEQ ID NO: 5891 - DNA, 572 bp, Homo sapiens
  misc_feature (414)..(414): "n" may be a, t, c, g, other or unknown
  misc_feature (493)..(493): "n" may be a, t, c, g, other or unknown
  misc_feature (508)..(508): "n" may be a, t, c, g, other or unknown
  misc_feature (523)..(523): "n" may be a, t, c, g, other or unknown
  misc_feature (533)..(534): "n" may be a, t, c, g, other or unknown
  misc_feature (546)..(547): "n" may be a, t, c, g, other or unknown
gagacagagactcgcccagttgcctagactagagtgcagtggtgcaatcacagctcagtgcaccctcgacctcctgggctcaggtgatcctcccacctctgcctcccaagtagctgggactacaggcatgcaccacgacgcccagctagtttttgtatttttagtagaaacaggattttgtcatgttgcccagtctggtttccaactactgagctcaagccatacgcctccctcagcctcctaaagtgctggggttacaggtgtgagccaccacacccagctcattttaatctgtttaaggattaaaatactcccaacttcaggtatgttataaatgaagaagtccatttttcttctatcccacataactccctcaaaaaaaggaaagtaaaatgaggaaaaagatataagtanaaaagaaaaatgggctttaaggggaatacatagggagccatttatatagctctggttgacaataaggtggggagaaatncctagaagctaattntaggggaaaagatgnaaatgggggnnatggccactggnntgggttggctctgggttccaccaaa

SEQ ID NO: 5892 - DNA, 579 bp, Homo sapiens
  misc_feature (412)..(412): "n" may be a, t, c, g, other or unknown
  misc_feature (505)..(505): "n" may be a, t, c, g, other or unknown
  misc_feature (546)..(546): "n" may be a, t, c, g, other or unknown
  misc_feature (551)..(552): "n" may be a, t, c, g, other or unknown
  misc_feature (554)..(554): "n" may be a, t, c, g, other or unknown
  misc_feature (578)..(579): "n" may be a, t, c, g, other or unknown
cttttttttttgagatgaagtctcgctcttgttgcccaggctggagtgcagtggtgcgaacttggctcactgcaacctccgcctcccgggttcaagcgattctcctgcctcagccttccaagtagctgggattacaggcgcacaccaccacgcccagctaatttctgtatttttagtagagacagggtttcaccatgttggccaggctggtctcgaactcctgatctccggagatctgcccgcctcggcctcccaaagtgctgggattacaggcgtgagccaccacgcttggctggggcagcttttctttaatacacaaactgaggaaatgaccctgcaaatttcagggcttagaaagccttcatacggaatcacagatgaaatgcttcttgggaaattcacatgacacagngccacgtcatacctgctctgcagggcctcatgggggtgatgtacacacagcgcccctccgagctctgcagcagcattccaggatggcaaactntgccaaatagttttccgttgccggggggccccaaaaacacnttggnncnctggggatacagggtaaacctggnn

SEQ ID NO: 5893 - DNA, 595 bp, Homo sapiens
  misc_feature (389)..(389): "n" may be a, t, c, g, other or unknown
  misc_feature (402)..(402): "n" may be a, t, c, g, other or unknown
  misc_feature (485)..(485): "n" may be a, t, c, g, other or unknown
  misc_feature (528)..(528): "n" may be a, t, c, g, other or unknown
  misc_feature (540)..(541): "n" may be a, t, c, g, other or unknown
  misc_feature (573)..(573): "n" may be a, t, c, g, other or unknown
  misc_feature (582)..(583): "n" may be a, t, c, g, other or unknown
  misc_feature (585)..(585): "n" may be a, t, c, g, other or unknown
aagtatgaaaataccatggctttatttttctcttaaaaagatagccgtgcttatgagctaaatggaaaggatgtatgtcattctcatcagtaaacaagatttaactgctttcagatgcaaaccataatgccgaagaagtgacatgaaggggataaaagtctaatgctttcatcttcacagcaatcaaatgcaaagtaaagcaaaaatgaaatggacttaattaatgctgggcattcccacagggaaaacgcaagaggatattataacaatcagtagcagtattgtatacaatttaaaaattccattaggttgagccaccctcactcctctctctggctctctcccatctgaggtatagcaggctggaactaacagaagctagtaagtcnggagccttttgcntttggagtccactgagataagtgagtgggcaaagtcttggaagaccagataatctggctctggtgaggcacctacgtgcacantgtcccattatggaagttgacaacatactcagcattagtcctntgcccagaaatnncgaaaggctcaaaagggtgaaaggtgaaggcnccaaggggnncncctgggggtt

SEQ ID NO: 5894 - DNA, 542 bp, Homo sapiens
  misc_feature (497)..(497): "n" may be a, t, c, g, other or unknown
  misc_feature (506)..(506): "n" may be a, t, c, g, other or unknown
  misc_feature (516)..(516): "n" may be a, t, c, g, other or unknown
  misc_feature (518)..(518): "n" may be a, t, c, g, other or unknown
  misc_feature (527)..(527): "n" may be a, t, c, g, other or unknown
  misc_feature (536)..(537): "n" may be a, t, c, g, other or unknown
aaaatgacggaaatttattctctcacagttctggaagccagaagtcagacatcagcatcactgggtcaaactcaaggtgtcagcaacactgagctttctcaggaggctatagggtagactctgtgtcttgcctcttctgctttctgctgactgctggcattccttggcttgtggccatgccactttagttttcaaggccagcatcttcagttgtttctctgctccgtcgtcatatgacctctgatatggtttgggtccgtgtccccacccaaatctcatctcaaattgtaatccccataatccccacctgtcaagggagggatgaggtggaaggtgattggatcatgggggcggtgtccctcatgctgttttcatgatagtgagtgagttctcacaagctctgatggttttataaggcaagtttttcctctctctctctctctctctctctctctctctctctctcgcctgctgccatgtaaagacatgcctgcttncccttctgncatgaatggnangttcatgangctttccannccatg

SEQ ID NO: 5895 - DNA, 481 bp, Homo sapiens
  misc_feature (143)..(143): "n" may be a, t, c, g, other or unknown
  misc_feature (170)..(170): "n" may be a, t, c, g, other or unknown
  misc_feature (393)..(393): "n" may be a, t, c, g, other or unknown
  misc_feature (426)..(426): "n" may be a, t, c, g, other or unknown
  misc_feature (429)..(429): "n" may be a, t, c, g, other or unknown
  misc_feature (458)..(458): "n" may be a, t, c, g, other or unknown
  misc_feature (471)..(471): "n" may be a, t, c, g, other or unknown
  misc_feature (474)..(474): "n" may be a, t, c, g, other or unknown
  misc_feature (479)..(479): "n" may be a, t, c, g, other or unknown
gtggaaacaaggatcttgcccaggctgttctcaaactcctggcctcaagtgatcctcctgcctcagcttccttaagaaccaacattctttagggattgggggcaaagtttttttaaaggaatataatgtccaagttattttgntataatagtctgatctgtatttccagncttccatctagtattttatattaagatcatgcccccacacacatctactgtatgtttccttaagttctagattcaggaaaactaaattacaaaaaaatcaaaatagtgctctgactctggagggaagggcagagttgactggcaacaagggaactttgaggtaagagtaatgttgtataccttgatcagagagtggaattgtctgtgtatacacttaaaatgnatggggttgcccggcgtggtggctcacgcctgnaancccagcactttgggaggcccatgtggcanatcaccagggcanganatcanga

SEQ ID NO: 5896 - DNA, 468 bp, Homo sapiens
  misc_feature (447)..(447): "n" may be a, t, c, g, other or unknown
  misc_feature (452)..(452): "n" may be a, t, c, g, other or unknown
  misc_feature (457)..(457): "n" may be a, t, c, g, other or unknown
  misc_feature (459)..(459): "n" may be a, t, c, g, other or unknown
  misc_feature (462)..(463): "n" may be a, t, c, g, other or unknown
  misc_feature (468)..(468): "n" may be a, t, c, g, other or unknown
gagatgtagtcttgctctgtcacccaggctggacatggtggtttataccaagttcctgtaaacaggtttaaagtatcaaatgcttacaaatgaatttttaaaatatgaaaattagagaaaatgaaaagttattcctgtaataacttgcctttttcacttgtattttcatatgctttagtcagaaaaggctagtgaagcatccaatgcacaggggatgcatgtaaaggactgtgaaccactattcagaatagtctcctaaacacacaaacattatccatgaacacacagcggtctaaaatccaggttgatttctaatactgtcacttgctgactgggcattctaaggcattttaaatttatacggtttaggttccacaatataattaacctattcaggttaactatattatattctcaataatactttttttttttttcttttgagangaaancttgntntgnncccan

SEQ ID NO: 5897 - DNA, 567 bp, Homo sapiens
  misc_feature (1)..(567): "n" may be a, t, c, g, other or unknown
nnnnnnnnnnnnnnnnnnnnnnnnnnnnnnnnnnnnnnnnnnnnnnnnnnnnnnnnnnnnnnnnnnnnnnnnnnnnnnnnnnnnnnnnnnnnnnnnnnnnnnnnnnnnnnnnnnnnnnnnnnnnnnnnnnnnnnnnnnnnnnnnnnnnnnnnnnnnnnnnnnnnnnnnnnnnnnnnnnnnnnnnnnnnnnnnnnnnnnnnnnnnnnnnnnnnnnnnnnnnnnnnnnnnnnnnnnnnnnnnnnnnnnnnnnnnnnnnnnnnnnnnnnnnnnnnnnnnnnnnnnnnnnnnnnnnnnnnnnnnnnnnnnnnnnnnnnnnnnnnnnnnnnnnnnnnnnnnnnnnnnnnnnnnnnnnnnnnnnnnnnnnnnnnnnnnnnnnnnnnnnnnnnnnnnnnnnnnnnnnnnnnnnnnnnnnnnnnnnnnnnnnnnnnnnnnnnnnnnnnnnnnnnnnnnnnnnnnnnnnnnnnnnnnnnnnnnnnnnnnnnnnnnnnnnnnnnnnnnnnnnnnnnnnnnnnnnnnnnnnnnnnnnnnnnnnnnnnnnnnnnnnnnnnnnnnnnnnnnnnnnnnnnn

SEQ ID NO: 5898 - DNA, 563 bp, Homo sapiens
  misc_feature (524)..(524): "n" may be a, t, c, g, other or unknown
  misc_feature (544)..(544): "n" may be a, t, c, g, other or unknown
gcactatatagatcagagtttttacggcaatttttccaaaaggccagaggagtttttaaattctggtattataatttttttggtctcttccaatttaaataatctgtttctaggcaaaacagtgtgatgaagagtaaaatgtccctgaatgaagaccaccatgtggcccctctgctgtccttatacctcggcagtctgcgatctccaatcataagccaacagcatgatgcctggggctgcggtgcccacagcacgcgggctagaagaagctctcagctttgatttagtgctccctgaaccaaccaaccttctttcaagctgcttttcatgagaaagttcagtccagagcatcagccacagctgctccttctagcccatattgttcaccaggaaaagaaaacctatttagagccaaagaacacacaggtgaagcagaacaccaaattgcttttggcaggaaacaccactggagaagtcaagaaatctaaattatgttgaggccctgaagacaaggacactggagncttacagacggaggacctgnacttaggaaagcacctgtg

SEQ ID NO: 5899 - DNA, 557 bp, Homo sapiens
  misc_feature (454)..(454): "n" may be a, t, c, g, other or unknown
  misc_feature (488)..(488): "n" may be a, t, c, g, other or unknown
  misc_feature (496)..(496): "n" may be a, t, c, g, other or unknown
  misc_feature (519)..(519): "n" may be a, t, c, g, other or unknown
  misc_feature (530)..(530): "n" may be a, t, c, g, other or unknown
  misc_feature (538)..(538): "n" may be a, t, c, g, other or unknown
  misc_feature (550)..(550): "n" may be a, t, c, g, other or unknown
gaaagaaaaactatttatttctttatacacatcttgcttaaacaatcaccaaaaagactttcattttctgtcacccaccctgtccaccagttatgttggccttcaatatgtggcgttagcaacatatataaatctatatcatatatttatacacacaaacacattctaccagcactgtgaagacacagactaggctttactaggcttggggcctctcccatgccacttaaaaatgagcacaggtttgctctatgcaagaatttcaacagagttggtctggccatcagtctgcaatttccccgagataagatagggtgacaaaatgggacagcaactttgaagtgaggtcagtccaatttggatatcatagaagaaaagaaataggatgtgctaggttaagcctgagatggtatctgggaaatcacccattcatgatgtgaactcaaagacacangtgctacagtggcagacccaagcccaacctgctngaccacangggcaagtgtggactgggaatantggtactgggncccccccnaaatgtccggangggacct

SEQ ID NO: 5900 - DNA, 545 bp, Homo sapiens
  misc_feature (498)..(498): "n" may be a, t, c, g, other or unknown
  misc_feature (508)..(508): "n" may be a, t, c, g, other or unknown
  misc_feature (524)..(524): "n" may be a, t, c, g, other or unknown
  misc_feature (529)..(529): "n" may be a, t, c, g, other or unknown
  misc_feature (532)..(532): "n" may be a, t, c, g, other or unknown
  misc_feature (541)..(541): "n" may be a, t, c, g, other or unknown
  misc_feature (543)..(543): "n" may be a, t, c, g, other or unknown
gcttgtaaattgtgctttaatttctgcaatcagatatgatgcagtgagatacaagtataaactttcattgtgcatccagaaaataaaaagcacaagtatacaggtttagctcaacagcttattcccttataaagaaaaaaaaagttttgaattaaagctagtttatcttcagtgtaaaaacttggaggtataaacaaactcaagatattatatacagtaaattaatttacatttccaaacttgcacagtacagcattttaaacaaagtaaatggtctcatttcagctctcactgttaagcataatccacatcccaatctcagataaaaatttcacaatatataaatccattgagaattctgtacacaaatacgagttatagaaatctgatttcaaatataaatacaaaaattgtcatgaccttacacgttacaacagcttatttttctattggaattttaaaaaatcatagaaaaatatgtcaatgcacattcactgntatgaccaanggcatgaaccttgggnctttnaancatcctttnanaa

SEQ ID NO: 5901 - DNA, 167 bp, Homo sapiens
  misc_feature (161)..(167): "n" may be a, t, c, g, other or unknown
aaagttttcagactttatttcacagcgattgacacagaaacatactagagttagtaacacggcacccagccccaccgccgcccgcttcatcgggtcctgctcctaggaggactgggctggggctgggggtggggatgggatgggggtggggaagggacggnnnnnnn

SEQ ID NO: 5902 - DNA, 530 bp, Homo sapiens
  misc_feature (423)..(423): "n" may be a, t, c, g, other or unknown
  misc_feature (482)..(482): "n" may be a, t, c, g, other or unknown
  misc_feature (501)..(501): "n" may be a, t, c, g, other or unknown
  misc_feature (509)..(510): "n" may be a, t, c, g, other or unknown
  misc_feature (516)..(516): "n" may be a, t, c, g, other or unknown
  misc_feature (522)..(522): "n" may be a, t, c, g, other or unknown
  misc_feature (529)..(529): "n" may be a, t, c, g, other or unknown
ctttttagagacggagtcttgctcttttgcccaggccggactgtagtggcgctatcttggctcactgcaaactccgcctcccgggttatgccattctcctgcctcagcctcccgagtagctgggactacaggcgcccgccactgcgcccggctaatttttttgtatttccagtagagacggggtttcaccgtgttagccaagatggtctcgacctcctgacctcgtgatctgcccgcctcggcctcccaatgtgctgggattacaggcatgagccaccccacccagaaatctctttatgtttaagaagaggaaagtgaagaacggaaagggaagaaactgcccatcctcatgggtaactgagaggagggatggggagagagacttccctctttcacttcctatttttttctagctcccagctnttcccactggcctcatctggttcatttggttcaaggtctaatgatgcattttgctgggncttttccaattcttaatcntgtaaggnnggaggnaaaagngtgagtnc

SEQ ID NO: 5903 - DNA, 551 bp, Homo sapiens
  misc_feature (511)..(511): "n" may be a, t, c, g, other or unknown
  misc_feature (523)..(524): "n" may be a, t, c, g, other or unknown
  misc_feature (534)..(535): "n" may be a, t, c, g, other or unknown
  misc_feature (549)..(549): "n" may be a, t, c, g, other or unknown
  misc_feature (551)..(551): "n" may be a, t, c, g, other or unknown
aacagtctttatgggcttaaatgtagtagatatcacctgtgcatcaagcattacacttcattcctttaagatgtgcttcatcctcactcaagctgcttgccaccctccgatttctggtccagtctactcttgttactcttcaccatgtagatgaagtaggcaagggtctctttttcattcacaggtatgttcctgaagtgtcgactcacagtttctgctaactgggccttattgaagcctggtctggtctgcaacttgtagtgtcgtttataacgtcgtagggtgttcacctgcagctggaacagatcaacctcaggaatgtcagtgtcgtgctcgggagaatctccgccatcgtcacttgtcttcctcttccttttatttcggacactctggatgaaatttttgtgaaaatcacagatatataggtgccttacgctcttgccgatgtccagcttgagttcttctgcgagatgctctttggaccctcttgctgaaggaagcgttgccccgnggccggacgcanngcttggccgnnctcgatgaaggaanan

SEQ ID NO: 5904 - DNA, 564 bp, Homo sapiens
  misc_feature (462)..(462): "n" may be a, t, c, g, other or unknown
  misc_feature (473)..(473): "n" may be a, t, c, g, other or unknown
  misc_feature (489)..(489): "n" may be a, t, c, g, other or unknown
  misc_feature (546)..(546): "n" may be a, t, c, g, other or unknown
  misc_feature (549)..(549): "n" may be a, t, c, g, other or unknown
  misc_feature (556)..(557): "n" may be a, t, c, g, other or unknown
ccgagacagagtcttgttctgttgcccagagctggggtgcaatggcgcgatctcggctcactgcaacctccgcctcccgggttcaagcagttctcctgcctcagcctcctgactagctgggattacaggcgctgccaccatgctcggctaatttttttatttttagtagagacggggtttcaccatgttggccaggctggtctcgaactcctgacctcgtgatccacccgtctcagcctcccaaagtgctgggattacaggagtatatgaatgcttttatccacaccactaagaagagaattgaacatgttttgaaaacacaagaggaaaggcagaaacttcattacaaatattctaagcagtttctgactttgtttcaagattggaacacgaacagtgaaggctgaggaaccagaggaacaaaaactagctacaatgtttcgagagcaacaaaagagttgnctataagctanaatgggttaaaagacngagaccctggaaccaattaaactggaatcagcaatttctacggggttggaggacttnaanagaattnnaattctt

SEQ ID NO: 5905 - DNA, 561 bp, Homo sapiens
  misc_feature (409)..(409): "n" may be a, t, c, g, other or unknown
  misc_feature (443)..(443): "n" may be a, t, c, g, other or unknown
  misc_feature (507)..(507): "n" may be a, t, c, g, other or unknown
  misc_feature (530)..(530): "n" may be a, t, c, g, other or unknown
  misc_feature (541)..(541): "n" may be a, t, c, g, other or unknown
  misc_feature (550)..(550): "n" may be a, t, c, g, other or unknown
  misc_feature (555)..(555): "n" may be a, t, c, g, other or unknown
gagatggagtctggctcaatcgcccagactggggtgcagtagggcaatctcggctcactgtaacctccacctcccaggttaaagcaattctccacctcagcctctcgagtagctgggactacaggtatagtctgtatacctgagattacaggcgcccaccatcatgccaggctaatttttgtatttttagtagagacacagtttcaccatgttggccaggctggtctcgaactcccaactttcagtgatccacccatctcggcctccaaaggtgctggggttataggtgtgagccactgcacccggccagctcatttctttttggtgctgattgatttcgtttgtgtcacactggctggctggtagaattcaccagtacaaccatctgggtctgctgtctagaagctgntttaagtttatatgggtatttcaagggaactagnctattttatctaatttatcaaatatgtgagtgagagcttatttatctattctcttactaatccnggatttaatccatgggattagcngaatacccctntttattccnaaatnggcaat

SEQ ID NO: 5906 - DNA, 587 bp, Homo sapiens
  misc_feature (1)..(587): "n" may be a, t, c, g, other or unknown
nnnnnnnnnnnnnnnnnnnnnnnnnnnnnnnnnnnnnnnnnnnnnnnnnnnnnnnnnnnnnnnnnnnnnnnnnnnnnnnnnnnnnnnnnnnnnnnnnnnnnnnnnnnnnnnnnnnnnnnnnnnnnnnnnnnnnnnnnnnnnnnnnnnnnnnnnnnnnnnnnnnnnnnnnnnnnnnnnnnnnnnnnnnnnnnnnnnnnnnnnnnnnnnnnnnnnnnnnnnnnnnnnnnnnnnnnnnnnnnnnnnnnnnnnnnnnnnnnnnnnnnnnnnnnnnnnnnnnnnnnnnnnnnnnnnnnnnnnnnnnnnnnnnnnnnnnnnnnnnnnnnnnnnnnnnnnnnnnnnnnnnnnnnnnnnnnnnnnnnnnnnnnnnnnnnnnnnnnnnnnnnnnnnnnnnnnnnnnnnnnnnnnnnnnnnnnnnnnnnnnnnnnnnnnnnnnnnnnnnnnnnnnnnnnnnnnnnnnnnnnnnnnnnnnnnnnnnnnnnnnnnnnnnnnnnnnnnnnnnnnnnnnnnnnnnnnnnnnnnnnnnnnnnnnnnnnnnnnnnnnnnnnnnnnnnnnnnnnnnnnnnnnnnnnnnnnnnnnnnnnnnnnnn

SEQ ID NO: 5907 - DNA, 565 bp, Homo sapiens
  misc_feature (375)..(375): "n" may be a, t, c, g, other or unknown
  misc_feature (430)..(430): "n" may be a, t, c, g, other or unknown
  misc_feature (459)..(459): "n" may be a, t, c, g, other or unknown
  misc_feature (475)..(475): "n" may be a, t, c, g, other or unknown
  misc_feature (503)..(503): "n" may be a, t, c, g, other or unknown
  misc_feature (547)..(547): "n" may be a, t, c, g, other or unknown
gtttttgttttttctggtctaaatagaaaaagggaaagggaaagtaaattcttagggccagacctcgaaatgccccaagtgtccaattggcagctatagcatttgtgaggaggttcctttgccctcagacgagtagtttcaacatttcagtgaaaacaaaggttgcagaaagctgaaaacccagatcttgaaggttgctgtcatatatgtgtttgtgtttcttatattatttccttttgacttcagttttgcatcccaaatatgtatggggtggcattttaacagtcaatgagtcaaacagtcaaaggaggacaggaggggagccagctggtaggagggagcagcaaccgtgtgtggaccaagcgccatttttgntttatagacgtgtcttgaagggatggtcccagaatatacaaaatatacaatctgncctaataaccaccccgcttgcttgcatangccatttgatggcctnaaggcagctttggagttgaaggcagtgncactacttggaatgccggtagattgagacccttctggatgtgtnaatgtggcatgaccagta

SEQ ID NO: 5908 - DNA, 551 bp, Homo sapiens
  misc_feature (447)..(447): "n" may be a, t, c, g, other or unknown
  misc_feature (475)..(475): "n" may be a, t, c, g, other or unknown
  misc_feature (488)..(488): "n" may be a, t, c, g, other or unknown
  misc_feature (500)..(500): "n" may be a, t, c, g, other or unknown
  misc_feature (502)..(502): "n" may be a, t, c, g, other or unknown
  misc_feature (510)..(510): "n" may be a, t, c, g, other or unknown
  misc_feature (537)..(537): "n" may be a, t, c, g, other or unknown
  misc_feature (548)..(548): "n" may be a, t, c, g, other or unknown
gaggtagggtctcattctgtcgcccaggctagagtgcagtggtgaaatctcagctccacctcccaggttcaagcgattctcatgcaacatccacctcccaggttcgagcgattgtcatgtctcagcctcccaagtagctggaattacaagtgcccaccaccacgcctggctaattttttgtattttcagtagacacagggtttcgctatgttggccaggctggtcttgaactcctggcctcaagtgatccgcccacctcggtctcccaaagtgctgggattacaggcatgagccactgtgcctggccgaacctctgcttttaaccccaatggatttaagtagcatttacaagaggtagtctcaaactgacacgttttactccaggataaccttcccaagtcccttgaggttcccctacactggtgagtaaacaagctgtaccatggngccataaagaaatggctttctacccaangggacttaaattngagagaaaaagntncaaggctnaccaaggatgtggaatatttggacttnttaaataccgntgg

SEQ ID NO: 5909 - DNA, 567 bp, Homo sapiens
  misc_feature (451)..(451): "n" may be a, t, c, g, other or unknown
  misc_feature (548)..(548): "n" may be a, t, c, g, other or unknown
  misc_feature (567)..(567): "n" may be a, t, c, g, other or unknown
gagacagagtcttgctctgtcgcccaggctggagtgcagtggcgtggcatgatctcgggtcactgcaacctctgcctcacgggttcaagcaattctcctgcctcagcctcctgagtagctgagattacaggcacccaccaccacaccaggctaatttttgtattttagtagagacggagtttcaccttgttggtcaggctggtctcgaactcctgacctcaaatgatccacctgccttggccttgcaaagtgctgggattgcaggagtgagccaccgtgcccggcctgcctactcattttcagccaaaaaattaaaacacaccaacaagggaatacagttatttaatatatgggaaaaaggggaagttatatgacagcaatattctataaaggaataaaaacggaagaaaaggaaacatctgaattggttcatttaagcagtctacactgnactaccatttacaaggaaaacgcccaggtgacaaacatattccaagctggggaagtcagactcttgttgaaagggcccagagtctatcagtcctggngaataagcaaaaaactaan

SEQ ID NO: 5910 - DNA, 568 bp, Homo sapiens
  misc_feature (533)..(533): "n" may be a, t, c, g, other or unknown
  misc_feature (546)..(546): "n" may be a, t, c, g, other or unknown
  misc_feature (568)..(568): "n" may be a, t, c, g, other or unknown
cataacaagcattgtactatataatactgctcaggtaaaagactgacttttctaaagcgtaagtctaattgtagtactctcttcttgaacctgttccatggctttgaagtttctagcctgagtaactgatcagtatccatcttgttttatggcatggctactgtaccaggagagatacaagtgagaagtttgtgggctgtgtggaagtgaagatgaccaggcccctcaaaaagaagggaagtggagatgctcccactggaaactatgaaaaaggagaacagaggctgtactggggcaccaggaagggagaatggaggctgagggcagtggcagacaagaaagctcctgcaactccagcttagtcgttgcatgtgagatacactgttatggcgtaggtggaaatcaattcatttacgcaacaaaagcaatagacataccagtaatccttgcccaaataaattccttttcgtagtcaggaatcataccatctggatctacgctaggtcactacctttaaaaataattattaatcncttaatttagatntaatctgaaccaaaagtcggcn

SEQ ID NO: 5911 - DNA, 380 bp, Homo sapiens
  misc_feature (185)..(185): "n" may be a, t, c, g, other or unknown
  misc_feature (362)..(362): "n" may be a, t, c, g, other or unknown
  misc_feature (365)..(365): "n" may be a, t, c, g, other or unknown
  misc_feature (367)..(367): "n" may be a, t, c, g, other or unknown
  misc_feature (373)..(373): "n" may be a, t, c, g, other or unknown
  misc_feature (375)..(375): "n" may be a, t, c, g, other or unknown
  misc_feature (377)..(377): "n" may be a, t, c, g, other or unknown
  misc_feature (379)..(379): "n" may be a, t, c, g, other or unknown
aatttgctgctaaatgaaaagcaggtttggctttattcatgttaccgtaaaaactaaataataaagtattcacaccaagcgtgaatttttttttgccagcaaaagttaaaacatcaaagaaacctctttcaaatactaacaaatttacttacaaacacctatatttattatttcataaataggcncaacaggttccataaaaaaagattaaatacagacacagtatgaagaaacaataagacagagccatatgtaaaagttgtaatttagctgtttccaatctgtttctgcatctaataaaataccaggtaagcatttggcagttttatacataaaaggacttaaaggacatttactaaccnttncncaaaangngntnc

SEQ ID NO: 5912 - DNA, 570 bp, Homo sapiens
  misc_feature (20)..(20): "n" may be a, t, c, g, other or unknown
  misc_feature (401)..(401): "n" may be a, t, c, g, other or unknown
  misc_feature (485)..(485): "n" may be a, t, c, g, other or unknown
  misc_feature (510)..(510): "n" may be a, t, c, g, other or unknown
  misc_feature (544)..(544): "n" may be a, t, c, g, other or unknown
  misc_feature (570)..(570): "n" may be a, t, c, g, other or unknown
agcatgcaattttttattgntttctaaatctatttgtacacttaatatgctagtattaatttcacaaacagtataaagaatgtactccaatgatattacgcggcaacaactcacctgaaaaagaaaacattgtctctgaaataattcctaattatacaattttgcaaataagcactataaatgttaaaatgttaagacttcagtgtataatgtcaataacatcctgcctttttaaaattgctttaggtaattcgtaggttgtaaaaactaatgagaagtaaaaaaaaaaaattatgaaggtattacaacactcccattaaaatgaaaatctatgttacgactttatgctcttcaaataccacaccagactgaagcatcaaccagtatatcaagtgttctgntccttaaaaaatcgctttggttatgggggagtgatagccttgcttattaattttcaaaaatcctgcctaggtatcctttagccngaatcatcttccaattacatgggcntcaaaattaccttttaatcagcaattcattgggnggctaaatggaaataattgcccagan

SEQ ID NO: 5913 - DNA, 564 bp, Homo sapiens
  misc_feature (463)..(463): "n" may be a, t, c, g, other or unknown
  misc_feature (474)..(474): "n" may be a, t, c, g, other or unknown
  misc_feature (495)..(495): "n" may be a, t, c, g, other or unknown
  misc_feature (499)..(499): "n" may be a, t, c, g, other or unknown
  misc_feature (532)..(532): "n" may be a, t, c, g, other or unknown
ctaaaatggtctggtctctctgctgtaagagacgcttaagtgacatcacttcttctttcaattgacttataaggacaaaattgtctgttcccccactatctgctgactgatttatagagctgacagaaatggatgcaactggcaaattaccttactaatggcacacattacatacacctatctccattagatggcttagattccaatttgggctttttctttggagtttcattctgaattgttgcagaggatttatggctctgtttccacagtccctgctcttcttctggacttagattgctgattttgtgatggctactgctgtgacgatggtgatggtgatgatggtggtgatgatgttttggatgatgctggtctttctcagtaagagatgaagaagatgaatttgaatgtgaagatcccaggctcttccttggtctttcgcttctgtaaactcttttgnaccataaagtncagagcccgcataataccttncatnaccttcttcttccttcctccttccaacaaaacncatggtggtgccctggtcacaggtttgagggg

SEQ ID NO: 5914 - DNA, 572 bp, Homo sapiens
  misc_feature (373)..(373): "n" may be a, t, c, g, other or unknown
  misc_feature (416)..(416): "n" may be a, t, c, g, other or unknown
  misc_feature (488)..(488): "n" may be a, t, c, g, other or unknown
  misc_feature (519)..(519): "n" may be a, t, c, g, other or unknown
  misc_feature (534)..(534): "n" may be a, t, c, g, other or unknown
  misc_feature (558)..(559): "n" may be a, t, c, g, other or unknown
  misc_feature (561)..(561): "n" may be a, t, c, g, other or unknown
  misc_feature (563)..(563): "n" may be a, t, c, g, other or unknown
aagacatggtctcactctgtcaccctggctggagtgcagtggtgcaatcatggcttgcagcagcctttacctcctgggctcaagcaatcctccacctcagcctcccagtagctaggactacaagcgtatgacaccaagcccagctaatttttaaattttttgtagagatggggtctcagtatgttgtccaggctggtcttgaacttctggccccaagtgatcctcctgcctcggcctcccaaagggctgtgattacaggcatgagccactgcactcgacctgaaccaggtgttacatggtaaactgtgactggcgctgtctgggtgggctgccctttggctctcctgattcttcagtaaaatcttgcttttgngatcaagtttggcttaactgggctgcactgcaggcaatggaanggctgtcctggggctgacaaaggaagtggtggcagggactagcaagaacgccatgaaaaagggcattttcanagtaagaactaaggctggtacgtccacctgnttttggggaaatggntccaaaagacctggttaaaaaaannancnggtttccat

SEQ ID NO: 5915 - DNA, 582 bp, Homo sapiens
  misc_feature (445)..(445): "n" may be a, t, c, g, other or unknown
  misc_feature (456)..(456): "n" may be a, t, c, g, other or unknown
  misc_feature (465)..(465): "n" may be a, t, c, g, other or unknown
  misc_feature (472)..(472): "n" may be a, t, c, g, other or unknown
  misc_feature (507)..(507): "n" may be a, t, c, g, other or unknown
  misc_feature (548)..(550): "n" may be a, t, c, g, other or unknown
  misc_feature (560)..(560): "n" may be a, t, c, g, other or unknown
  misc_feature (581)..(581): "n" may be a, t, c, g, other or unknown
agcttgaaacaataaatttattcccatagttctggaggccaggaagtccaatatcagttttatcggtatctgtagggccatgctcctgctggaagaggctctggggaagaatctgttctttgcctcctccagcttctggtggctgtcagcattcctttgctgcggctccatcactccaatctctgcctctgtggtcactgtgctttctcctcttctgtgtggtaatatctccctttgcttctatataagcatagatgtagctgcatttagggcactcccagattacccagaataatctctccatctcaagactttaacttaatcatatcttttgctatagaagagaacatttccaggttccagggattgggtataggggatatcttttgggaagcataattaagcctaccacaagttcctaaaagtgttgaaatcatttcttggngccaagtaatnaaagttggnggtttgnggtagaaaacaaacctggaaaagaaacccccgggnaaagtaattttaaaaaaggccgttcaacaaaagaaatggtnnnaaaaaagaanttcataaagggggattccaana

SEQ ID NO: 5916 - DNA, 569 bp, Homo sapiens
  misc_feature (467)..(467): "n" may be a, t, c, g, other or unknown
  misc_feature (491)..(491): "n" may be a, t, c, g, other or unknown
  misc_feature (511)..(511): "n" may be a, t, c, g, other or unknown
  misc_feature (552)..(552): "n" may be a, t, c, g, other or unknown
  misc_feature (565)..(565): "n" may be a, t, c, g, other or unknown
  misc_feature (569)..(569): "n" may be a, t, c, g, other or unknown
gagatggagtctcgctctgtcgcccaggctggagggcagtggcacagtctcggctcactgcaagctccgcctcccgggttcacgccattctcctgcctcagcctcccaggtagctgggactacaggcacccgccaccacacctggctaattttttgtatttttagtagagacggggtttcaccctgttagccaggatggtctccatctcctgaccttgcgatccgcctgcctcggcctcccaaagtgctgggattacaggcttgagccaccgcacccagcctaatttttgtatttttagtggagacggggtttcaccattttggtcgggctggtcttgaactcctgaggcctccatgagtcatctcgctggcccctccataaccagctcagtgtctgtgtgtgccaaacaggcataggagcctgggtcggcccaaagacaatctgcgtcacacactgtaaaccaaanggtccttggggcccaagggctggnaacctggaatcgcttatggnggctgggaatgatactggggattctggactggttctgaaanatggttggcacanggcn

SEQ ID NO: 5917 - DNA, 569 bp, Homo sapiens
  misc_feature (468)..(468): "n" may be a, t, c, g, other or unknown
  misc_feature (508)..(508): "n" may be a, t, c, g, other or unknown
  misc_feature (546)..(546): "n" may be a, t, c, g, other or unknown
  misc_feature (555)..(555): "n" may be a, t, c, g, other or unknown
  misc_feature (559)..(559): "n" may be a, t, c, g, other or unknown
atttgacagtctcactctgtcatccaggctggagtgcagtggtgccatttcggcccactgcaacctctaccttccaggttcaaatgattctcctgcctcagcctcttcagtagctaggattacagtcaagtgccaccacacctagccaatttttgtatttttagtagggacggggtttcaccatgttggccaggctggtctcaaactcctgacctcaggtgatcctcctgccccagcctcccaaagtgctgggattacaggtgtgagccactgcacccagccgaaatctccatactattttctataatggctgcaccagtatgcgtttccatcaacagtgtacaagagttcccctggctgataaaagctggaaacatcttgaatcaacaacctaacatcacaattaaaagaactagagaaccaaaagcaaacaaaccccaaagctggcaagaagacaagaaataaccnagatcagaagtggactgaaggagatcccgaaccgaaaaanccttcaataaatcaatgaatccaggggtggctttttgnaaaaattantaangagctctttt

SEQ ID NO: 5918 - DNA, 561 bp, Homo sapiens
  misc_feature (440)..(440): "n" may be a, t, c, g, other or unknown
  misc_feature (465)..(465): "n" may be a, t, c, g, other or unknown
  misc_feature (471)..(471): "n" may be a, t, c, g, other or unknown
  misc_feature (490)..(490): "n" may be a, t, c, g, other or unknown
  misc_feature (503)..(503): "n" may be a, t, c, g, other or unknown
  misc_feature (520)..(520): "n" may be a, t, c, g, other or unknown
  misc_feature (526)..(526): "n" may be a, t, c, g, other or unknown
  misc_feature (544)..(544): "n" may be a, t, c, g, other or unknown
gagatggagtctcgctctgtgcccaggctggagtgcagtggcgacagagcgagacttcgtctcaaaacaaacaaacaacctcactggtccaggtgagcctcacctcaagcagttgtcacagcttgataattgtgtgtttctgagagggtttctttggaagcctgccacagagagtggctgggggaatggggggaaaatccatctcccattctgagcccagatgtacctcaacacccatgcctgcttccaggtgcccttggggggtccctccccacagagtgcagggttctcacagcagtcagtcttgcagaggacctgggtagacatctggtcaccattgaaggggctggggccaagccaggcaggcagccctgagcctaagtgctactcagaggcaggccccggagcatggctgggggatgtcactgacattccgggtnctgcttggtggggactttctggcangactgnaatgaagttgatcactctnaaggctgggttgnttccttgaggccttggntaaaanccccaaatccggttcaanaaggcccagggaaggga

SEQ ID NO: 5919 - DNA, 557 bp, Homo sapiens
  misc_feature (450)..(450): "n" may be a, t, c, g, other or unknown
  misc_feature (460)..(460): "n" may be a, t, c, g, other or unknown
  misc_feature (501)..(501): "n" may be a, t, c, g, other or unknown
  misc_feature (520)..(520): "n" may be a, t, c, g, other or unknown
  misc_feature (529)..(529): "n" may be a, t, c, g, other or unknown
  misc_feature (541)..(541): "n" may be a, t, c, g, other or unknown
  misc_feature (548)..(548): "n" may be a, t, c, g, other or unknown
  misc_feature (551)..(551): "n" may be a, t, c, g, other or unknown
aatgttatttatttatttatttatttgagatggagtcttgctctgttgcccaggccagagcgcagtggcgcggtctcggctcactgtaacctccacctcctgtgatctcctgacggtgaactcctgactttgtgatccacccgcctcggcctcctaaagtggtgggattacaagggagagccaccgcgcccggtctttttattttgttttttaaatgtttagtagagatgcagtctcgctatgttgtctaggctggtcctgaactcctgagctcaagctatcttcctccctcagccttccaaagtgttgggattacaggggtgagccaccgtgctcagctgctaaagacttttaaatcataaggaaaaggataactgcaggaacatcatcaggaactcagacgcctggcaaaggtaaaccacactgggttcttatgacagaaacccttcntgattccttnaccacccccaaatcttccctttggccagcaacctaagcttnaaaaaaagggactgccttnttactaccntgaagaaaggcnctttganccnggattt

SEQ ID NO: 5920 - DNA, 562 bp, Homo sapiens
  misc_feature (1)..(562): "n" may be a, t, c, g, other or unknown
nnnnnnnnnnnnnnnnnnnnnnnnnnnnnnnnnnnnnnnnnnnnnnnnnnnnnnnnnnnnnnnnnnnnnnnnnnnnnnnnnnnnnnnnnnnnnnnnnnnnnnnnnnnnnnnnnnnnnnnnnnnnnnnnnnnnnnnnnnnnnnnnnnnnnnnnnnnnnnnnnnnnnnnnnnnnnnnnnnnnnnnnnnnnnnnnnnnnnnnnnnnnnnnnnnnnnnnnnnnnnnnnnnnnnnnnnnnnnnnnnnnnnnnnnnnnnnnnnnnnnnnnnnnnnnnnnnnnnnnnnnnnnnnnnnnnnnnnnnnnnnnnnnnnnnnnnnnnnnnnnnnnnnnnnnnnnnnnnnnnnnnnnnnnnnnnnnnnnnnnnnnnnnnnnnnnnnnnnnnnnnnnnnnnnnnnnnnnnnnnnnnnnnnnnnnnnnnnnnnnnnnnnnnnnnnnnnnnnnnnnnnnnnnnnnnnnnnnnnnnnnnnnnnnnnnnnnnnnnnnnnnnnnnnnnnnnnnnnnnnnnnnnnnnnnnnnnnnnnnnnnnnnnnnnnnnnnnnnnnnnnnnnnnnnnnnnnnnnnnnnn

SEQ ID NO: 5921 - DNA, 581 bp, Homo sapiens
  misc_feature (439)..(439): "n" may be a, t, c, g, other or unknown
  misc_feature (493)..(493): "n" may be a, t, c, g, other or unknown
  misc_feature (497)..(497): "n" may be a, t, c, g, other or unknown
  misc_feature (534)..(534): "n" may be a, t, c, g, other or unknown
  misc_feature (562)..(562): "n" may be a, t, c, g, other or unknown
  misc_feature (574)..(574): "n" may be a, t, c, g, other or unknown
acaaattgcttactttatttctttaacaatgaaatagtaataacacaataattcagttgtaacaaagccaccaacagagcaaaacaaaaacaaagctaattaagaagcattgcttcagctcaaattagttatctcctttaaacaggaaaaacgaccattagtctactggttctcaaccctgtctgcacatgagaggaatggagggaaacaggacaggtgtttaaaaaaatagttatatccaagacccacctcagaactattaaatgagaatctctcaagagtgaggcccaggcaaagatttttaaagtgctgtcagtgttgaaaactacaggtctaaagtaataaggaataaaaccatgcctcgaagcaattcaaaaccaagaagctgattatacaataaattttttcctctaatcctgggaaaacaggggggaagcanggccccgatcagtttcattttctttatcctcttcagttggccatagtaagagcntaanccacatcaaatattggaagcttttgcaaacccgcttncccaaatggaaatatcacttcctttccntttagaaagctnttttaaa

SEQ ID NO: 5922 - DNA, 538 bp, Homo sapiens
  misc_feature (177)..(177): "n" may be a, t, c, g, other or unknown
  misc_feature (252)..(252): "n" may be a, t, c, g, other or unknown
  misc_feature (444)..(444): "n" may be a, t, c, g, other or unknown
  misc_feature (508)..(508): "n" may be a, t, c, g, other or unknown
  misc_feature (522)..(522): "n" may be a, t, c, g, other or unknown
  misc_feature (528)..(528): "n" may be a, t, c, g, other or unknown
  misc_feature (533)..(533): "n" may be a, t, c, g, other or unknown
  misc_feature (536)..(537): "n" may be a, t, c, g, other or unknown
ctgggtggtaagatgcctctttattggtgctggagctgttcctgagggagcaggccatgggaccctcatcgggaccctcgccctcagctacttccgcctgcgggggatactctgtcccaagggtatctcttctgtcagcttctgtaacaagcgggcctggtaagcagggggatcctntccagccaaaggctgggggcgtacgtgcaggtagcgctcagtggccgtctccagctcttccacctcatacaaggnggctgggtccagcgagtgggcattgatgaggctcacaagatactctttgtagtgtgcctggcacaggccggcatagccagctggagtttccttgccacaagcttcgtccctgagcccattgggaacctccttctgctctatcactcggcagcccgcttcagggactgcccgggccccaactggaggctctgnattaaacatgacgttatggcctgtaacaacttttgaacccgaaaacaatccaatccccaggtanaaaaggcaatcttnaagggngtggnccnnc

SEQ ID NO: 5923 - DNA, 548 bp, Homo sapiens
  misc_feature (225)..(225): "n" may be a, t, c, g, other or unknown
  misc_feature (372)..(372): "n" may be a, t, c, g, other or unknown
  misc_feature (437)..(437): "n" may be a, t, c, g, other or unknown
  misc_feature (453)..(453): "n" may be a, t, c, g, other or unknown
  misc_feature (462)..(462): "n" may be a, t, c, g, other or unknown
  misc_feature (469)..(469): "n" may be a, t, c, g, other or unknown
  misc_feature (486)..(486): "n" may be a, t, c, g, other or unknown
  misc_feature (532)..(532): "n" may be a, t, c, g, other or unknown
  misc_feature (547)..(547): "n" may be a, t, c, g, other or unknown
gtttgagacagagtttcactcctgttgcccaggctggagtgcaatggcacgatctcggctcacggcagcctccacctcccggattcaagcgattctcctgcctcagcctcctgagtagctgggattacaggtgcctgccaccatgcctggctaatttttgtatttttagtagagacggggtttcaccatgttggccgggctggtctcaaactcccgacctcaggngatccgcccatctcggcctcccaaagtgttgggattgcaggcgtgagccactgtgcccagcccagactcagcttctttgcaaactctaggagggctcgcctctttaagcccagctcagctgtgggctagaatgatcgtttctaatgntcattgcacttatggggtcagaagtaaggaacggtggatgggtgtcaagggcatgccctgctcantggacccggggagaanactcaagancctgaanggagatcggaccttggntaaatttgctaaggcataagttacacgaaccaaaaaggcttcccanggcccttggcacctng

SEQ ID NO: 5924 - DNA, 555 bp, Homo sapiens
  misc_feature (149)..(149): "n" may be a, t, c, g, other or unknown
  misc_feature (336)..(336): "n" may be a, t, c, g, other or unknown
  misc_feature (549)..(549): "n" may be a, t, c, g, other or unknown
gactttgctgatggtttattaccttaaggaaaagacttacacagagaaattgagcaatgaaaacccttcacattgagcaaacacattccacgctacacaaatcatgagaaaaatgagaactgttgtgaaacatgacagattgcccaagngttatttttcctctattggaaaattctaagacgtttcctcatgtgtagtttttcagtcacaaaaatggcagtaggaatatttaaatattaaatcacagtttgaaaatagatacatacatacatatatatacacacacagggatacatagttgacttatgattcccagatatgcagggttatcattgngactgctttggatcaagacaagtttgtaaaaagcagcgacatagttcgacataatagtcaggagctagattacttccctgtaattgctatgcacacacagtacaaggctagcgagattatagacaatcatgtcattcgaatctactatctttggataatctgaatcattttcaaggttaaaatgcgcttttggcagtaaagcgcctttataanggcatg

SEQ ID NO: 5925 - DNA, 567 bp, Homo sapiens
  misc_feature (446)..(446): "n" may be a, t, c, g, other or unknown
  misc_feature (478)..(478): "n" may be a, t, c, g, other or unknown
  misc_feature (501)..(501): "n" may be a, t, c, g, other or unknown
  misc_feature (507)..(507): "n" may be a, t, c, g, other or unknown
  misc_feature (509)..(509): "n" may be a, t, c, g, other or unknown
  misc_feature (518)..(518): "n" may be a, t, c, g, other or unknown
  misc_feature (533)..(533): "n" may be a, t, c, g, other or unknown
  misc_feature (560)..(560): "n" may be a, t, c, g, other or unknown
cctttgagacggagtctggctctgtcacccaggctggagtgcaggggcgtgatcttggctcactgcaatctccgcctcccgggttcatgccattctcctgcctcagcctccagagtagctgggactacaggcgcccgccaccacacccggctaattttttgcacttttagcagagacggggtttcaccgtcgtagccaggatggtctcaatctcctgacctcgtgatccgcccgcctcggcctcccaaagtgctgggattataggcgtgagccactgcacccggccatggcattctttagctacgaaattttgttagtaacctgaaggaagagtgagaggctgaccttaatacccctaaaagattcaggctatggctaagtgatccctgggtcttacaaaggaaactggaggctactgggaaagctcagggatcctgggccatggncttccactctggataaccaattcattctcctnattaccctaaaagttcctggttnacaccnanagaagtcanaaggaagggggcatnggataggggagaagagtaaaattttantcttcag

SEQ ID NO: 5926 - DNA, 551 bp, Homo sapiens
  misc_feature (148)..(148): "n" may be a, t, c, g, other or unknown
  misc_feature (325)..(325): "n" may be a, t, c, g, other or unknown
  misc_feature (403)..(403): "n" may be a, t, c, g, other or unknown
  misc_feature (410)..(410): "n" may be a, t, c, g, other or unknown
  misc_feature (450)..(450): "n" may be a, t, c, g, other or unknown
  misc_feature (471)..(471): "n" may be a, t, c, g, other or unknown
  misc_feature (473)..(473): "n" may be a, t, c, g, other or unknown
  misc_feature (523)..(523): "n" may be a, t, c, g, other or unknown
  misc_feature (525)..(525): "n" may be a, t, c, g, other or unknown
  misc_feature (543)..(544): "n" may be a, t, c, g, other or unknown
  misc_feature (551)..(551): "n" may be a, t, c, g, other or unknown
caatccgttggagacagatcatctcccactttcaaaggcaattcaattgtggtttttgttgttggtttttttgtatttttttgtatttttttttttttttacaagtaagcgtctatgcaggcatcacaaactttggcggatacagtanatatgtatttctttgatgctgaaaggtcagtccctaagacaaaatcaaatgtctcaaagaattaaaagcaaaatgcatgtgtcttcctggcaaaggtttccatttgcaatgtaatctgcatttctacaaatactcaatgtccaaggccactagagggtgaaaaaccagggcagcgtnttccagcaggagtcagggcaaacccagagccaaaactccatcctcagcccaaccttggaggcccaacaactggggctnaaaaagngggcccaggcaacgccaggcccttactggccgccaccctntgtgggctgggtgcttggggncnagggatggcctgccttttctgagccccgggaaaggttgttgccgggctgntnaccttttttgacccagtnnaaacagn

SEQ ID NO: 5927 - DNA, 558 bp, Homo sapiens
  misc_feature (458)..(458): "n" may be a, t, c, g, other or unknown
  misc_feature (482)..(482): "n" may be a, t, c, g, other or unknown
  misc_feature (487)..(487): "n" may be a, t, c, g, other or unknown
  misc_feature (518)..(519): "n" may be a, t, c, g, other or unknown
  misc_feature (558)..(558): "n" may be a, t, c, g, other or unknown
gtctaagaatgttcatagcagctttattcataacagtaaaaaacaagcagaaagagcccagtgtccatcaacagaaagataaaaaaacaaactgtgatatattcatacgaaagaatactcagcaataaaaagaaatgaatcactgacacatgcaacaacatgaataaatctcaaaaacattatgctaagtgaaagaagcattacattttgtataatttcactcatatgaagtttagaacaggtaaatttaacctttgatataaaagaatgagaacagtagttatacctgaggggtggggaggggatagactgggagagggatttaggaaactttctgaagatgattgcaatggtctaaattttggaaagggtttgggttacacaggtgtatatgtctgcaagaactcagtaaatttatcttaagatttgacattttattgcaggtaaatcttaaatcnaaaaatttaaaaactaaataaatnctaanctctagttaataatctgcagttgaagtactnnggggaagtttttcacaactgcaattttttttgaatccan

SEQ ID NO: 5928 - DNA, 563 bp, Homo sapiens
  misc_feature (366)..(366): "n" may be a, t, c, g, other or unknown
  misc_feature (434)..(434): "n" may be a, t, c, g, other or unknown
  misc_feature (469)..(469): "n" may be a, t, c, g, other or unknown
  misc_feature (475)..(475): "n" may be a, t, c, g, other or unknown
  misc_feature (522)..(522): "n" may be a, t, c, g, other or unknown
  misc_feature (530)..(530): "n" may be a, t, c, g, other or unknown
  misc_feature (542)..(542): "n" may be a, t, c, g, other or unknown
  misc_feature (554)..(554): "n" may be a, t, c, g, other or unknown
  misc_feature (563)..(563): "n" may be a, t, c, g, other or unknown
caatgtcaaatgcactttactgggcccctgggcctcccaacactgtcctcaccaaggctggggcaccccattcccagcaccaccagctgcccaggaagcaggacggatagagggaacacatgtggaatggctgttctcctaccccagagggtgccggatgatgttgacagcacggctgcttccctctcccctgcagcttctgtccccacccagcagcttggcctttcccatagcagggaagggggatacctggggcttcaaaccagccacctgctcctgcttaaaatggggcaaggggccatttgcaaaattcttcgaggggcagtggtgaggtagaaggggtggcagcctgctcctgtctggganagggctgggcagacactgggagccgggcagacactgggagcccgggctggctcttgcttcaggcccanaaccctgggccctgctcgctgaggaaactggtggntggaancgccaaggttaaccagcttaagcttgaaggagtacttggtgggcaanaagggtanccagtccaaatnggttttcttaanaaccccaan

SEQ ID NO: 5929 - DNA, 563 bp, Homo sapiens
  misc_feature (506)..(506): "n" may be a, t, c, g, other or unknown
  misc_feature (533)..(533): "n" may be a, t, c, g, other or unknown
  misc_feature (545)..(545): "n" may be a, t, c, g, other or unknown
  misc_feature (549)..(549): "n" may be a, t, c, g, other or unknown
  misc_feature (551)..(551): "n" may be a, t, c, g, other or unknown
  misc_feature (553)..(553): "n" may be a, t, c, g, other or unknown
actttaaaagtgcttctcggtatagaacaaagtaaatattacagttttgttcaacagcagccaagatttaattgtctgtgaaatataaggcttacgacctgagtcgagtccactactgttctgctgatacaaactaggctggcctacgaggtgaccgaacgcacccagcagctgatttacacagaagagccatctccaaagaattaaaagtgggccagggacagccacacgcctgcaggagtccatccaaagggctaggtgctttattctttctgcagcagatttaaagtgactttgtacaaaaagtcaaacaagaataaacagctgtggaaaatgtaacaaatcatgctagcagttgaacagcgagggagaagggaaatccagcaaaccgctaacatgcactgaagaaaagcgagacggaggtagaagagagagggaaggtggacagaaaaggaagcccggtaaggacacgacactggtttccacacgcgaatcacgcactttantattggggatagctcaatgactggtangaacctgaaagnatgncntnaccagttttg

SEQ ID NO: 5930 - DNA, 561 bp, Homo sapiens
  misc_feature (482)..(482): "n" may be a, t, c, g, other or unknown
  misc_feature (537)..(537): "n" may be a, t, c, g, other or unknown
  misc_feature (542)..(542): "n" may be a, t, c, g, other or unknown
gagaatactggaccatcattaaatgtgtactgtgaagagattaatatgtatgaagggctttaccaaagtccactaaataaacactactcaagtacagactgcaaaccaaaatgtatctgtgttacgacattaattgcaaatagcaagtatggtgctaaagtctacaccaatggaattagatgagtgctatgcacttaattttaaaataaaactagttttcagtaaaatggcttcggtatttttgttttaaatacaaacttgtatatttgcagctctagtgaaccatctcatcatgtaattcagacttggaatcatgattttatttactaaaagccatcaagatgtagaatatagccattagtggcataaaacatccgttcattgcgtattccatactgagcattaaagcccacaaaagtatattggacaccactggtgcctttttgagcttaaaatcagttggtagtatgttagcaactacnggatctaattattcacaatcatgccagcatcagaaaatctggaagtttgatgtcnaagtngggccccgaaaatggttaa

SEQ ID NO: 5931 - DNA, 558 bp, Homo sapiens
  misc_feature (497)..(497): "n" may be a, t, c, g, other or unknown
  misc_feature (534)..(534): "n" may be a, t, c, g, other or unknown
  misc_feature (552)..(552): "n" may be a, t, c, g, other or unknown
atggtattaaatataagtcttagcacctttggcatttttgtccaaacagacttcgacatatgaagtggggacataaccctcttcatcttcatttctccgaatgcgggtccagccatcgcctttgtcttcctctatgacatacaatgtttctccttcaactacggaaatcgttccctcattctgaccttcaaatgtgtagagagctttgcacgtccctatggcagggaggggctcctcatcatcaaactcgtcgtcaaaatccgtggccagcaccttcatctcactctcctgactctgctcctctgtgtaactgccatctgggctctcacggtcctgggcgcagttgttgactgtgggtgggttctggctgtcgtacagtccgctctgccggcgcgcctgctcgctgcgtgctgggagcccggccttcaacctcagccagccaggcctcaaattctgggtctctactcgcaagttctctatatttggcttgactctgntaattgggatccaaactgggctggggcttccattganggatctttaggagacatnttcatt

SEQ ID NO: 5932 - DNA, 553 bp, Homo sapiens
  misc_feature (45)..(45): "n" may be a, t, c, g, other or unknown
  misc_feature (137)..(137): "n" may be a, t, c, g, other or unknown
  misc_feature (484)..(484): "n" may be a, t, c, g, other or unknown
  misc_feature (489)..(489): "n" may be a, t, c, g, other or unknown
  misc_feature (502)..(502): "n" may be a, t, c, g, other or unknown
  misc_feature (520)..(520): "n" may be a, t, c, g, other or unknown
  misc_feature (534)..(534): "n" may be a, t, c, g, other or unknown
aagtaagaagatttataatagaaaaaagtggcaaattgttactgngacttgattttctgaaaacatctgcaaattcacactggcattaagaaaacccaagtctcaaaaattctcctttctttctctccagataatgngttttctgtgcaaaaataaatatctgaaaattgcactaatacttattttaacttctatattatgaataatctgcacatgctgctttacagacgatacatatttgtaaacttactcatgcaaaattagtgtgcgcaacagggatattggtaattttcatacttaaaaatgataccttattatcttttaaaaattgccaaactctctgaaatggttaacaaatcttatatggatattcttgtctgccagctaaaaatcaatttatgttgctgaaaacaaaaagttatacaagaaaaagaaacatggtttttggtttgcaagatttttgatttttaaatgagaaaatttntaaanggaaggaaatctnggccccaaaatttaaccntttaatcctaaccnttccggggaaatggatccg

SEQ ID NO: 5933 - DNA, 559 bp, Homo sapiens
  misc_feature (514)..(514): "n" may be a, t, c, g, other or unknown
  misc_feature (520)..(520): "n" may be a, t, c, g, other or unknown
  misc_feature (552)..(552): "n" may be a, t, c, g, other or unknown
aaagggaggttggctcctgcatttccactctttgaccataggaacgcctggctacaaaaggggctgtaattggctgctgcctataggggccccaggtccttcctccaattgcaaggcagcaactccgaagttctaagtcccatggaaagtggcagtggttgggctggactgtggctggaggatcaccgggcctcggttctcaagcaccatctgtctggctgcagctgggcccttcagctgggggccagtgttgctttccagctgcccccaccgggtcagatcatctctggcaaggaagagctgctggcatctcttactgtccttctcgcaggccttcctccaccttgggtgcctcctgacgcctgccccggaagtcttcatcacacgcgtggccctccacatcatccaggaggttggctgttgacgccggcagcccccaacgactgatgcttcaacaaggggtttcctctttgactcctcatttgggcttctttgaaaaggttcggccaagttnaacagnttcctccggtggactttccaaggggtttcaanttgccct

SEQ ID NO: 5934 - DNA, 560 bp, Homo sapiens
  misc_feature (484)..(484): "n" may be a, t, c, g, other or unknown
  misc_feature (519)..(519): "n" may be a, t, c, g, other or unknown
  misc_feature (549)..(549): "n" may be a, t, c, g, other or unknown
  misc_feature (559)..(559): "n" may be a, t, c, g, other or unknown
gctttaagttttaatgtttatttccccaagacagcctagcctgcactctacttggataaattttacaagctagttttctgctgcttctagttttaaactttaaccatgtttctgatgacaaggaatgctgcaaaaatactctagttcaacaaagagttatgatcacaaaataatttttatccattctacagtgtttcagaattaccagttgatttttaaacacaaagtagatatagatgctaatggtggctaatctggtatgtttcttatagcaaactgttgttcatgcaacacttgtgctcaaaggggaaggcacaggatttcctacaatgagccaccttataaagagttctttttgtacaaattaatttatgtcacatttaatttagtgtgcataacctcaaaactgaggtattattccaatttataaaaaccacttgcataacttttatgcaggttttaaaaatccaagtttctcctaaanggctcaaaaatagattggtcatggctggctacatntaagataaaaggatcttaaaccattggacngataggcttnt

SEQ ID NO: 5935 - DNA, 562 bp, Homo sapiens
  misc_feature (521)..(521): "n" may be a, t, c, g, other or unknown
  misc_feature (523)..(523): "n" may be a, t, c, g, other or unknown
gagacggagtctcgctgtgtcccccaggctggagtacaatggcatgatctcggctcactgcaacctctgcctcccaggtttcaagcgattttcctgcctcagcctcccgagtagctgggattacaggcacccaccaccgtgcccagctaatttttgtatctttaatagagatggggtttcaccatcttggccaggctggtcttgaactcctgacctcatgatccacccacctcagtctcccaaagtgctgggattacaggcatgagccaccatgcccggccccaaaactatttctaagagaagtgttgaaagtgaggcttggctccttccgactgcttatagtaaaataacagaagagagaaatgacttaaatatgaaattgttaggtaaaaaaggaagcagaacgtaaagatttagaaaattcttagactatccatattgcaaaacaagatacagtaaagatgtgaccaagcaaccatttgctaatgaaatttggatggatcaagcattttaacagaaancnggtatgatcctttagacaatgggaagaatgacccccaag

SEQ ID NO: 5936 - DNA, 557 bp, Homo sapiens
  misc_feature (20)..(20): "n" may be a, t, c, g, other or unknown
  misc_feature (388)..(388): "n" may be a, t, c, g, other or unknown
  misc_feature (511)..(511): "n" may be a, t, c, g, other or unknown
  misc_feature (513)..(513): "n" may be a, t, c, g, other or unknown
  misc_feature (520)..(520): "n" may be a, t, c, g, other or unknown
  misc_feature (528)..(528): "n" may be a, t, c, g, other or unknown
  misc_feature (537)..(537): "n" may be a, t, c, g, other or unknown
  misc_feature (542)..(542): "n" may be a, t, c, g, other or unknown
  misc_feature (544)..(544): "n" may be a, t, c, g, other or unknown
aggtttatttattttattgnttgtttcactgtttgaatgtttatcttgcgagagtctacagaattgagagaaaatatctgcaggctaattttacataacatgaggcaaagattaagcactaaatataaaaaataaaacttttagcttgcttattaaactaggaagaattttcctgaaacacagcagttaaattggtctacaatgcattaataaatggagaacacggatctcgcctatgaaatattttaaacattgtggacgctaccaaaaagctcattggtatataaaaattttcaagtcacagtcctctaagcagactaaatacaagttagtttttaacctgaattcagaagtgcaaaatctgtaaaaataaaaatatttccattgntctcagcaatctatggattaaccttacaaatccttaaagtcttttcagtaacatgaaccatgatctcttgacaagtccttgcttaagggcaagtaacttttgaagctggacttctcaatctgnanagagaanccagctgnattcacagnattgntncctttggaaaata

SEQ ID NO: 5937 - DNA, 550 bp, Homo sapiens
  misc_feature (481)..(481): "n" may be a, t, c, g, other or unknown
actgtatttatatagtttttactctatcagtcttgctgtagctcttgtttatgactaatttgaactataggaattgatgattacctcattgatgactgggagaattaagtaggtaactcctattaataccaactgaagtctcatattataaaaaagtccctgtgcatcaagacaaaaaacaaaatgttatcaaaccaaaatatctcagaaggacaagaaagggactatggacactatgtccacaggcaacacactatgggccattctctgaggatgacagacactcaaaaggtcaaatataccaatgctattccaaattatttcttggtaagataaaaagatctttaaatgtatttaatacttgtagaaaatcacaataaaacaagttgcaatatgattttttttaaaaaaacacaaaacattgaaatctaatttagtatttagaacctgacattcccccagatgaaaatttatatttggnatttttggatccatggccactacccttccgaaagtatcccggatggggccttatctaatcattgggttt

SEQ ID NO: 5938 - DNA, 558 bp, Homo sapiens
  misc_feature (461)..(461): "n" may be a, t, c, g, other or unknown
  misc_feature (508)..(508): "n" may be a, t, c, g, other or unknown
  misc_feature (511)..(511): "n" may be a, t, c, g, other or unknown
  misc_feature (528)..(528): "n" may be a, t, c, g, other or unknown
  misc_feature (553)..(553): "n" may be a, t, c, g, other or unknown
aaatttcacatgaaaaaatatttattttaattcacatcaaatacatttagaataaatctaaatttttagcatcataatacttacaaacaaacacagataaactttgggtgtataagtctccattctgtcctaaaagcatgtacaaaaagctctcctgcaactattgatcatcacctcgttgccttaaatttctagattttccattttcagttcttctctttttgaagactggggccactccatctgccataactccaagagaagtgactgttttttctttaaataccactttgggttctccgccaccatcagcttctgaagttgatacatactcattttcagtgcttggaagttccaaatctacctcctcatgagactcaacctcttgtttaatttcttgccattctccatatgggtttgatttcttaagagttttcgatttttcttcatttgaacctaangaattcggttctgaatacttttttctttctggggttctgggcacttnctncatcactaattttattntttttccttaaaccttaattttggnttttc

SEQ ID NO: 5939 - DNA, 545 bp, Homo sapiens
  misc_feature (52)..(52): "n" may be a, t, c, g, other or unknown
  misc_feature (60)..(60): "n" may be a, t, c, g, other or unknown
  misc_feature (115)..(115): "n" may be a, t, c, g, other or unknown
  misc_feature (212)..(212): "n" may be a, t, c, g, other or unknown
  misc_feature (398)..(398): "n" may be a, t, c, g, other or unknown
  misc_feature (411)..(411): "n" may be a, t, c, g, other or unknown
  misc_feature (413)..(413): "n" may be a, t, c, g, other or unknown
  misc_feature (443)..(443): "n" may be a, t, c, g, other or unknown
  misc_feature (495)..(495): "n" may be a, t, c, g, other or unknown
  misc_feature (497)..(497): "n" may be a, t, c, g, other or unknown
  misc_feature (536)..(536): "n" may be a, t, c, g, other or unknown
cctggtccaactcagcagctctatttacataacagcgtcgcccacaccccgnggggcctntcacggcttcttggctttcttcacggaagatgagctggaggccgactcccgtcgntttctcgaattgggcgtgaggggtgcgcccaccacatcaatgatggtgtccttggggtcaggaccaagtccgggttcagtcactgccggctcagcanaggccgggcctgggcctgatgctggtgtggcagggccccctagcacaccagcccgggccagtgcctcatgacggtgccgcagcatctgcagctcatactcgcagttggcacaggcctgcttgagctcgtagagcagcaccaggtcgcttcgcagctcattgaacatgtgcaccagctcctccgtangtgtcggctcagntncacaccaagctccagcagcatctgttccanggccttgactttttctgtcccacaaaacttggcaagttcatccgtggctccnancgggacactgaaacttgaattggaaactgagcctgaagnttagaacac

SEQ ID NO: 5940 - DNA, 576 bp, Homo sapiens
  misc_feature (465)..(465): "n" may be a, t, c, g, other or unknown
  misc_feature (495)..(495): "n" may be a, t, c, g, other or unknown
  misc_feature (570)..(570): "n" may be a, t, c, g, other or unknown
  misc_feature (575)..(575): "n" may be a, t, c, g, other or unknown
aaagagtaatctttacatgatgttttaattatcatacagtataaacattatcatttttttcattaagataggaaattatcattgttttcgttaagataggaaatgaaaccaaataaaatttgtgaaaatgtcagtcatctttgggaaggcctcaaatgaacaagggagagtcttgagcttggtatcctttcatcttggaagaattcatagctgggaattggctaaagctttgcagtgggttgaatgatggtttccaatgagatctgtccatgccttagtcttcagaacttgtgaatatgaccttatttggaaaaatggattttacaggtgtaattaagttaggaatcttgagatgatatcatcctggattacccaggtgggctctaaatcacatgaaaaatgttctcataaaaatttcagagagagtgaagcctgcagacaccttcatttcaggcttctagcctncagaactatgagataataaattctggtggnttaagtcccaagatttgggcaatgcatacagcactctagggactaatacagctccttaaagagagttgaagaaanctggng

SEQ ID NO: 5941 - DNA, 396 bp, Homo sapiens
  misc_feature (352)..(352): "n" may be a, t, c, g, other or unknown
  misc_feature (375)..(375): "n" may be a, t, c, g, other or unknown
  misc_feature (380)..(380): "n" may be a, t, c, g, other or unknown
  misc_feature (386)..(386): "n" may be a, t, c, g, other or unknown
  misc_feature (391)..(391): "n" may be a, t, c, g, other or unknown
  misc_feature (393)..(394): "n" may be a, t, c, g, other or unknown
cattggtacaaatgctttattgaaactaaatacataatacacacaaagagatgaagacaatatagaagtccgcatagtcatcataatcccgttccttggccggttgaggcagctcagtggctgagcccagtcaagccaacccgcagcttcactcacgacttcaagatttgatgctaattcttttggatttctacagttattaaataagtgtctgagtggactgtctttgttcctttgtgttttgagggctggctgggtaggagtgggggtggtttgtctgtggcagtgaatttttgccaggagaggaacattaaatgccaaaggtaggtggcagtatttcagtctctgcccnagccgacaggcagagagaccttnacaantaatangaccnannaa

SEQ ID NO: 5942 - DNA, 554 bp, Homo sapiens
  misc_feature (461)..(461): "n" may be a, t, c, g, other or unknown
  misc_feature (472)..(472): "n" may be a, t, c, g, other or unknown
  misc_feature (480)..(480): "n" may be a, t, c, g, other or unknown
  misc_feature (529)..(529): "n" may be a, t, c, g, other or unknown
  misc_feature (538)..(538): "n" may be a, t, c, g, other or unknown
  misc_feature (541)..(541): "n" may be a, t, c, g, other or unknown
  misc_feature (545)..(545): "n" may be a, t, c, g, other or unknown
gtcaaagtcactatttgggccctaacataatcctgctcagagcgacggaaaaaaggcaagccttttcaaacataactctctctacaagccagctattatggcaagggaaaaaagaaagcatctagataaatatctatcaaaattaactttaagagaaatactctctttccttaaaagcccttattttttgagacactagaaaataagttactataaaaagtggtggtctgggggctaaaaacaaaacaaaaaaaatcctcttttctacattttttagttttctggcatatttttgaagattttacagtcccaaatgagtcaaatgcctatttgttttttgaataaacaatggacttgtcatgtgatatatgtttctaaacttaagtattacagaaaacatcactatccatttgtaaaaaactcattctggaaaatacctttcccttgggttggtataaaanaccttccatanagcttttngggaatcttggccttgaaaaaccaccggctttcattaatttcccccttnaaaatcaanggncccnaacttaaac

SEQ ID NO: 5943 - DNA, 567 bp, Homo sapiens
  misc_feature (465)..(465): "n" may be a, t, c, g, other or unknown
  misc_feature (509)..(509): "n" may be a, t, c, g, other or unknown
  misc_feature (518)..(518): "n" may be a, t, c, g, other or unknown
  misc_feature (537)..(537): "n" may be a, t, c, g, other or unknown
  misc_feature (544)..(544): "n" may be a, t, c, g, other or unknown
  misc_feature (561)..(561): "n" may be a, t, c, g, other or unknown
ctggaatgtgaaattggtttagaagccttcatatttgtaactctagcctttgcactttctaaaatggaaatagtgtgtgttgtctttcaatctgtctctcacctgtggtagggcttttgcagggctggaggtagaaggcgcgcccttggagaagggtgtcagcacagagactgctgccttatgctcttggctgaacgaaggcttggtgtagatggcgtttcccgctaacttctcaggcccctgctgtgtgtgaggctgttccagctcccttggggctggactcccgagccttttttcttcggcagcgttctccacagatgcctgggcaccctgttccctcctgatgctctgccttcccacctctttgaagtgccttttctggatgctcattgggcccatgaggactctattcactttttgccggttttggcctacagtttgaatctttgccaggctggttcctgnggtggcaagtttaaatgaacggtggaacattgattcccatctanggttactgntgagaaatatggcaaaggnacttaangcctggtacatactctnggattg

SEQ ID NO: 5944 - DNA, 568 bp, Homo sapiens
  misc_feature (502)..(502): "n" may be a, t, c, g, other or unknown
  misc_feature (544)..(544): "n" may be a, t, c, g, other or unknown
  misc_feature (568)..(568): "n" may be a, t, c, g, other or unknown
atagctgatcaagaatttatctttattctgattatgattcttcaaagagcattagttgtttaaatttaatttaagccatgcttaaatcgaatacatacaaaatatgattacttatattccttttgaccaaagagctgaaaattttgtgttccagttcatcttactcatgttattctgatgcgaaacactctaaatgcaaattgttttgaaagtaaataggccaagtggcctaccctgccctttttatagtataaattctgtgatactgccttcttttcagtatatgctcctctgtgggcctttggcttacacggagaccatcagctacaacgcatggcagtcagcttcagagtcctcgctccagtgtgcatctcgtttctcagccacaagtttgatgaattgagagtgactggcataaagcttcagtttatcattgatgtccacccatttcacttttccagcatcatcttcagcttctagcattaagaatatccattatctnaccggttcgcatgggaggtcacaagttctggctcatacagcnttataagggttcaggacatcaccn

SEQ ID NO: 5945 - DNA, 554 bp, Homo sapiens
  misc_feature (460)..(460): "n" may be a, t, c, g, other or unknown
  misc_feature (487)..(487): "n" may be a, t, c, g, other or unknown
  misc_feature (506)..(506): "n" may be a, t, c, g, other or unknown
  misc_feature (524)..(524): "n" may be a, t, c, g, other or unknown
  misc_feature (528)..(528): "n" may be a, t, c, g, other or unknown
  misc_feature (554)..(554): "n" may be a, t, c, g, other or unknown
gcattttaagttttaattttatcaaaacaaaataatttaaccatataaagaaagaaagttcaacaaacaaccaagaagccaatcatttccctgattgtgaacaaccaattgagtagtaaatcctgaacagttgaccgcatatacaagacattccgtcatcctctagtgctccaagtggcagaggctgatgtttttccctggttcctattcttccagtggtgaagtaatgtgctcaactgttcctatacttcttcagaccaaattatgtatattcctacgtaagtgcaaagcatggatgaaaagaatcatacagggtagaaatccagcacataagattttctaggttctgacccttatatttaatgggttctgaaaaataaggacaataaattgtgcttaaatattgagaaatgtagtgtttcaaaggccaaagtgccttcctacatgaactattctctgnggaagaaactgaggcatcagttgggtnagaccttacctaaaggatntaataaattacactgggnaaantagcactggggaagaaggaatcctgn

SEQ ID NO: 5946 - DNA, 568 bp, Homo sapiens
  misc_feature (412)..(412): "n" may be a, t, c, g, other or unknown
  misc_feature (451)..(451): "n" may be a, t, c, g, other or unknown
  misc_feature (513)..(513): "n" may be a, t, c, g, other or unknown
  misc_feature (554)..(554): "n" may be a, t, c, g, other or unknown
  misc_feature (558)..(558): "n" may be a, t, c, g, other or unknown
  misc_feature (567)..(567): "n" may be a, t, c, g, other or unknown
cccttgtgtccaggtttattttacattctcttccagaggggatgtggggctgggggagagccagcaggcaggcgggcagcacacagcagtctccctggggaatatttgagccaggctagtggtgcctggccccacagtgcggggtgatatgccagggccagggccaggacttggcagcccctgggaagaggaggccttggggccagagctcttgccaggcctagatcgctaagaaggtgctgcgtctgtcccccgccttgctccgcccccccacacccagctggaggccagaaggcaaagagggcagccagcaagctggggtgctgggaggaaccccagcaggcgggggcggcctttggtctctacgaggctaggaactggttctggttagaggaaccccgtgggggcaaanccggaaaacttggtcccttgttagaggaaacgcttggancaggatgggggttggggacttggggtctggtctcaataagggctggaaatggcttccgtttnaaacaaaacttttgattttggggaagtgttcccaatttctnggtncctccggana

SEQ ID NO: 5947 - DNA, 557 bp, Homo sapiens
  misc_feature (375)..(375): "n" may be a, t, c, g, other or unknown
  misc_feature (407)..(407): "n" may be a, t, c, g, other or unknown
  misc_feature (424)..(424): "n" may be a, t, c, g, other or unknown
  misc_feature (426)..(426): "n" may be a, t, c, g, other or unknown
  misc_feature (439)..(439): "n" may be a, t, c, g, other or unknown
  misc_feature (452)..(452): "n" may be a, t, c, g, other or unknown
  misc_feature (474)..(474): "n" may be a, t, c, g, other or unknown
  misc_feature (503)..(503): "n" may be a, t, c, g, other or unknown
  misc_feature (527)..(527): "n" may be a, t, c, g, other or unknown
aagccttcgaacatctaagatcttgtttctagcctaggggctggctgcagaggaggctgtgccaggcacagtgacctcagaagctctttgatgacttcacagctgcagagccaggacctgtgccatcctggaatttcaaggtctgactggctcctgactgccctcagctaggatccagggccccctttcccttcccaactccccaaggcaccctgcctcccacctgccaacaggggtgggggggatgagctggattgcggtgctggtggtaaggccccagcatgtgccattcatccagcccatggtatggaaggcttgctgagaggccctcaggcaccacagctgaggagcagggcttgctcccctggccaccanaggctttctcctgcctgacatccatgaacggnagaacaggccagggcangnggtttccccaaangcagctgcttcantcaggtggacacacttgttaanggctggaaactcaagggttttgaaggggngggaactaaaatcccatccaattnttattcctggccaaaggcaaaacagaaaaa

SEQ ID NO: 5948 - DNA, 554 bp, Homo sapiens
  misc_feature (441)..(441): "n" may be a, t, c, g, other or unknown
  misc_feature (445)..(445): "n" may be a, t, c, g, other or unknown
  misc_feature (455)..(455): "n" may be a, t, c, g, other or unknown
  misc_feature (500)..(500): "n" may be a, t, c, g, other or unknown
  misc_feature (506)..(506): "n" may be a, t, c, g, other or unknown
attgatacatcttagatgtgcatattttgggagtacatatgataattcaacacattcatataatcaaatcagcataattgggatatttgtcaccttaaatattgatcttttcttgatgctatgagcattaggttaatgggtacaaatgtacagttagataaaaagaataagacctggtcttcaatacatcatggtggctatagttaacattaaccattgtacatttcaaaatgctagaagagaataattccaacacgttttttgtttgcttacttttttctgaattctaatagactgatacatcagtccctgctgtagcgaaaataatgacttcctcaaaatgcacttcaagaatgtgacctcaatggatgtaacagaaagaacctgctcttggtgtttgggaaagaaaaggtgttaggcccgccacaattccttctcctnccangtggattcanagtcctggaggacagaatccttgggaacttgagtgaactcctttnaccagnccagccttgactcaaattcagctcatatagctcacaagctccctggcc

SEQ ID NO: 5949 - DNA, 551 bp, Homo sapiens
  misc_feature (351)..(351): "n" may be a, t, c, g, other or unknown
  misc_feature (442)..(442): "n" may be a, t, c, g, other or unknown
  misc_feature (448)..(448): "n" may be a, t, c, g, other or unknown
  misc_feature (458)..(458): "n" may be a, t, c, g, other or unknown
  misc_feature (476)..(476): "n" may be a, t, c, g, other or unknown
  misc_feature (517)..(517): "n" may be a, t, c, g, other or unknown
  misc_feature (519)..(519): "n" may be a, t, c, g, other or unknown
  misc_feature (531)..(531): "n" may be a, t, c, g, other or unknown
gagatggagtcttgctctgtcacccaggctggagtgcagtggcacatgtcggctcactgcaacctccgagtcccaggttcacgccattctcctgcctcatcctcccgagtagctggagctacaggtgcccgccaccactcctggctaattttttgtatttttagtagagacggggtttcaccatgttagtgaggatggtctcgatctcctgacctcgtgatccgccctcctcggcctcccaaagtgctgggattacaggcgtgagccacagcgcccggcctaaaatattttcaaagtaatggcaaaaactgcaattacatttacaccaacctaataacacaaatttattgncttatggttctggaggtcaaaagtcagaaatgggtttcactgggccaatcaagggagggagggaggcatggcccagtcagggagtcggcanggctgngctcccttanggagaatccgttccttgntccggggttccgtccatctttagaacttacagtagaacatntncaatctactggnggtttcagttttacaccaac

SEQ ID NO: 5950 - DNA, 560 bp, Homo sapiens
  misc_feature (532)..(532): "n" may be a, t, c, g, other or unknown
  misc_feature (557)..(557): "n" may be a, t, c, g, other or unknown
  misc_feature (559)..(560): "n" may be a, t, c, g, other or unknown
aagacagagtctcactctgttgcccaggctggagagcagtggtgcgatctcagctcactgcaagcttcgcctcctgggttcacaccattctcctgcctcagcctcccaaggagctgggactacaggggcccgccaccacgcccagctaattttttgtattttttttttctttttagtagagacggggtttcaccatgttagccaggatggtctcgatcttctgacctcgtgatccgtccgcctcagccttccaaagttctgggattacagacgtgagccaccgcgcccggccaaaagatccataaactttgagtcaccagatagagctaacatttaccacagaggcatgtaaagaaaacgattctagcagagtaactataatacaaaagaacaatattccaattatgttcctatgttctatccaggaaggtttaagaggagccttttaaactggaactatattctaagaaggtgggaaaaaagttttcttttggttttcttattaaccgtaccttgaaagccccaaataaangttccttggttaaaagccctggganann

SEQ ID NO: 5951 - DNA, 556 bp, Homo sapiens
  misc_feature (474)..(474): "n" may be a, t, c, g, other or unknown
  misc_feature (494)..(494): "n" may be a, t, c, g, other or unknown
ggcaagtgtagaaatttatttgaaccaacattttcactatgatgaaaattattcttcaacattgatccaagctcccacatttgaaggttagggaaaatattgcactttgcattttctagcactcctcatacacggcaaaaagttttaaaaacattctgctagttttgttttatacaatctcccaaattcatgcacacaatcattccaaaccaatgttaggttatcccaaaaaaagggaaaaactccaaaaaccataaccttaaaattgcactaaagctctgtaaagaaaaaaatataataaatgtcttatacaaatttcagaacatttaagtgcttgccaaaaagagtttattattcctcatcctcattttcattctcttgaccggagccttctgatctgtcaccctccaaccggtcagctcggatatgattaagtgaagccaacatcctcaacatgaaagaagctggaactgnaatggggttctaggttcttncacatgagttcgtttcgagttatacttcattagcaagttttcgggtaaaaatccttgatttt

SEQ ID NO: 5952 - DNA, 551 bp, Homo sapiens
  misc_feature (517)..(518): "n" may be a, t, c, g, other or unknown
  misc_feature (525)..(525): "n" may be a, t, c, g, other or unknown
  misc_feature (544)..(544): "n" may be a, t, c, g, other or unknown
actgggaaggctagttgtaaacataaacattctcactgaactactggccccccaaaacctaacctatctcacaatcaataatcatcttttgactataaaatcataaaaacttgtactctgtggctcttttgtctcgatgatttttcagagaaaaaaattagctgtgttaagtagtttcactgatttatccatcttgaatagctgccagttctggaacttcatacatcctcagaacgtcttcatagagcaaataattatgtaggcttctgggaagtggcagctgactaatataactgtcagaccgtagacgttctgattttagactggaccgaatttccaaacgacaaagatgggtcagggatggaacagtggcaatatgttgctgtagaatccaagcgtttgaggcacgagcagagagcatcctttcaacagctggtgcaagtgtcttccaattagtaactccaaagtgaagataagggggcaatgcttgctgggtcaatccaagaattgcccagtnnaatcagngggtcaaatccgcaacccnaaaatgg

SEQ ID NO: 5953 - DNA, 551 bp, Homo sapiens
  misc_feature (457)..(457): "n" may be a, t, c, g, other or unknown
  misc_feature (509)..(509): "n" may be a, t, c, g, other or unknown
  misc_feature (534)..(534): "n" may be a, t, c, g, other or unknown
  misc_feature (537)..(537): "n" may be a, t, c, g, other or unknown
ctgagacaggctcttgctctctcacccaagctggagtgcagtggcacaatcatacctcgctgtagtcttgagctcctggacacaagtgatactcttgccttcctgcctcagcttgccaagtaactggaactacaggcatgcaccagcaagcctgctaattttaacatttttgtggagacaaatttccaagaacgaatgcaaacacacagagttgacaaaatgataagtagaaattttaacatgtctgaagagacaaaaagaaaggaaaaatgcaggcctaataacacagattgtgattcctttaatatctagaccttaaattggatatacacttcattcctaaatgtgtaataatattctttgtgcttctaaattatttgactaatgtcaacagaaaagcaccagcatatgctaatggatgagttcaatgctgcatttatgggaaaatttcttattncccaaatagctgaaatgaatcctattcactggctggtcttgctatacgctgnaaatttttaaaatgatgttgaatgnaangggaattcccgttg

SEQ ID NO: 5954 - DNA, 566 bp, Homo sapiens
  misc_feature (553)..(553): "n" may be a, t, c, g, other or unknown
aaggtaagaaagtttctgcttttattgaaaatttatatatgactcagtattgtaataaataaacataaccattttcacaaaaaatgacagtgctatgctaaagaagaaaatattaaatgggggatttacttgtagtggcaagacagactttttatcaatacagaataaatattaacagcattcgtgagccaatgttgagacccaacaaaatgtaggaatcaagcatgatgtaagaaataattatccagagaaaaagatggtgtattctcggatgataagactgtctttgtaaactggtgcatatcaattagtcccatcctcacagctcaccttcaaaccacagggcttgtttctggctatgttaaaggaccatcctctgaggaaagcagaggagaggaactccattatccttacagtgaaacgcaaccactgcagaaaaactccactggtaaatagaacacagtttaataagtagattggatatgatctaactataaaatttaggtaccagagtaagtgtacatgtggcaggcccggaaaaaaatcatggcanttttcttatccct

SEQ ID NO: 5955 - DNA, 564 bp, Homo sapiens
  misc_feature (483)..(483): "n" may be a, t, c, g, other or unknown
  misc_feature (500)..(500): "n" may be a, t, c, g, other or unknown
  misc_feature (508)..(508): "n" may be a, t, c, g, other or unknown
  misc_feature (529)..(529): "n" may be a, t, c, g, other or unknown
  misc_feature (550)..(550): "n" may be a, t, c, g, other or unknown
gaacaagagtaacctatattttgggagttggtgtgcaataaggctaaaacaaccaaattataaaacagtatacctgacacagtatgttgaggaaatatgcatctgtttcatagtttttgtacttatgttaatgccttactaagctacacatatgtaaatagtatgttttcttgctaatatattaaatccaatagaatcattaagttctcattctcctttgtgacttgtaactttatcagataatttaatgatgaaagcatatgcccaaacctgcagatcatatgtactgtcatctattacaaccagaattctcctcacatttcatttttcttaaaaggaaattgagaatacctgcaacatcgttaaagagaatgttgtagtgtgaataaaaactagaactcagtggtctatgaagtatgtattattttggcaagtgattttttccttcctaagaataagatgaacatgtccaaatgttcctgngccaacttccagatccngaagtatncaggcttcatttcctcaatgncccaattagaccggtctagtnaaccgaatcaattt

SEQ ID NO: 5956 - DNA, 565 bp, Homo sapiens
  misc_feature (522)..(522): "n" may be a, t, c, g, other or unknown
  misc_feature (555)..(555): "n" may be a, t, c, g, other or unknown
gagctggagtttcactcttattgcccaggctggagtgcaatggcgtgatctctgctcactgcagcctccgcctcccgggttcaagtgattctcctgcctcagcctcctgagtagctgcgattagaggcacccaccaccacgcccggctagtttttttatttttagtagagacgggatttcaccatgttggtcaggctggtctcgaactcctgaccttaggcaatccacccacctcgaactcccaaagtgctgggattacaggcatgagccactgtgcctggcctgctcatttctttttaacaatgaaaaatgttccactctctggatataccacagtttatttttccattcacctactgaaagacatcttggttgctttcaaattttggcaattatgactgaaactcttaaaaatatccatgtgtgggttcgttttttttgtgtgtgtgttaagttttcaactcatttgggtaaataccaaggagtatcattactggatcatatggtaagaagtccttcagntttaagagaaacttctatctggcttccaagganctggaatgaa

SEQ ID NO: 5957 - DNA, 562 bp, Homo sapiens
  misc_feature (172)..(172): "n" may be a, t, c, g, other or unknown
  misc_feature (499)..(499): "n" may be a, t, c, g, other or unknown
  misc_feature (527)..(527): "n" may be a, t, c, g, other or unknown
  misc_feature (562)..(562): "n" may be a, t, c, g, other or unknown
gacataaatttatttttatttcacaatccacaaaacatttcaaattaaagaaatacattaaaagtctccagtttttgctttaatttcacatttcatacactcacaatatttaggaaatagtcattttgactgtcttataactgggataagggtgcagcaacaattctgccanatggttaaatgccccagaggatttctgctcttctcttcctaatttgggagctataaagcagtttttactcccaacacaaattcttgataaaaaccatactctttgctgatttttcatgttagacattaaggatgacatgcaagtaaaaaaaaaaaaaaaaaagtagccctgataccaagttaatattcccttgaaaccttacttggctgctaaatttctttgttgaaaaccaacttataacaaattggttatccggttagcttttttccctttttcttccattttcttcttgctccctctttctcttactttttccttttggcatgnttaattagagaacattttctataaggcnttattaagaataattggccttaaggaatgatggan

SEQ ID NO: 5958 - DNA, 567 bp, Homo sapiens
  misc_feature (528)..(528): "n" may be a, t, c, g, other or unknown
  misc_feature (559)..(559): "n" may be a, t, c, g, other or unknown
ggtaaacccactccatcgtcatacatttctctgcaaatcttgtacacggatgcctcatccttaggaaaataaggtctgatagtataaactttggaggtaggagtcagtggaggtggctgaaaaaaagagatcatttgccccatcaattggcagcaaacgctgtgggaagaaaaaaaaggagatggattagtttggggaaggtatccatttttttaaatgggtgtgcactgcagattaccaacttatattaactggctactgcaggcagacctaaagaagaggggtgtactatgctttactaatagaaatacctctttgctgggggaggggagtgcttctgaatagaaattacccactctgagttacagctttagtggcatattaatggggatttaaatttacagtaaaaacaaaaacaaaaacaaaaacaaacctattccaattatgacaaatctatttttttttaaaacctatcttagatagaccatcttcctacgataagatggcagaacagaatgtcaggaaganaaggttggtctgaaaaagggtatctggccangaaacctt

SEQ ID NO: 5959 - DNA, 546 bp, Homo sapiens
  misc_feature (157)..(157): "n" may be a, t, c, g, other or unknown
  misc_feature (172)..(172): "n" may be a, t, c, g, other or unknown
  misc_feature (223)..(223): "n" may be a, t, c, g, other or unknown
  misc_feature (276)..(276): "n" may be a, t, c, g, other or unknown
  misc_feature (323)..(323): "n" may be a, t, c, g, other or unknown
  misc_feature (359)..(359): "n" may be a, t, c, g, other or unknown
  misc_feature (470)..(470): "n" may be a, t, c, g, other or unknown
  misc_feature (506)..(506): "n" may be a, t, c, g, other or unknown
  misc_feature (529)..(529): "n" may be a, t, c, g, other or unknown
  misc_feature (541)..(541): "n" may be a, t, c, g, other or unknown
gagatagagtcttgctctgttgcccaggctggaatgcagtggcacaatctcagctcactgcaacgtccgcctcctgggttcaagcaattttcctgtctcagcttcccgagtagctgggactacaggcacacactaccatgctcgaccaattttttgngtgtttttggtaganacagggtttcaccatgttggccaggctggttttgaactcctgacctcaggngatccgtccacctcagcctcccaaagtgctggattacaggcatgagccactgngcccagccctttcacagattttttaaactcatttagttgggtttctntaagaagcaacaaaataaatattgcaaaggaactgnatattaatattacaagtatatgcaaatttggagtatccaggtagtagggaaagaggataaatactgaaaataaacaatccaaatgtttttgggataaagatcttggacagnctatgaactcattcttaatctcaagctacttggctnacccattcgtttcttggaaaacnttggatggaacnggaac

SEQ ID NO: 5960 - DNA, 553 bp, Homo sapiens; identical to SEQ ID NO: 5578
  misc_feature (1)..(553): "n" may be a, t, c, g, other or unknown

SEQ ID NO: 5961 - DNA, 556 bp, Homo sapiens
  misc_feature (448)..(448): "n" may be a, t, c, g, other or unknown
  misc_feature (474)..(474): "n" may be a, t, c, g, other or unknown
  misc_feature (516)..(516): "n" may be a, t, c, g, other or unknown
  misc_feature (543)..(543): "n" may be a, t, c, g, other or unknown
  misc_feature (555)..(555): "n" may be a, t, c, g, other or unknown
aggttgaatgaatgatttatatgttccatgtttatgtaagcacttaacttctttaaaaagaaactagttctttcaaaaagagctctgaattctgtctctggttagaaagtgtgaacaattctcagaacttgggacatgatttttcttctctctcacttcttataagcagatgccccttttcagggcattttcaggttgcacaggcagaactaagtgagaaatacggctccagaggccattcagtttgtctgggtccatatgattgtaggagttgggtgtgttagaattggtgaacttgactttaagaaaatctcttactttttcttcaacttcctttaggcctagacttgttccaagtgtctcttcctccaataagacagtcaggactaaggctacatctttgaaggctgcgttttcatggtcacaatatttgtagaagatcaaagtnaacctgcgggaaatgctcaaaacggngaccacactgcattctgggccattcttaaacccattggtcantcttgggctacccctagtttggcaggntcactggcttgng

SEQ ID NO: 5962 - DNA, 557 bp, Homo sapiens
  misc_feature (515)..(515): "n" may be a, t, c, g, other or unknown
  misc_feature (525)..(525): "n" may be a, t, c, g, other or unknown
  misc_feature (533)..(533): "n" may be a, t, c, g, other or unknown
  misc_feature (537)..(537): "n" may be a, t, c, g, other or unknown
  misc_feature (544)..(544): "n" may be a, t, c, g, other or unknown
  misc_feature (547)..(547): "n" may be a, t, c, g, other or unknown
  misc_feature (549)..(549): "n" may be a, t, c, g, other or unknown
gagtcttgctctgttacccaggctggaatgcaatggcacgttcccggctcactgcaacctccacctcccaggttcaagcgattttcatacctcagtcacccgagtagctgggattacaggtgtgcgccatcacacctggcaaatttctgtatttttagcagagacggggtttcaccatgttggccaggctggtctcaaactcctgacctcaggtgacctgctcgcctcagcctcctaaagtgctgggatcacaagcgtaagccactgcgcccggcctaggaggcttctaataaagattctatcactcctaagaaggcctagagacatgatcaggcctagacctgctgatgattaccttggtatggtgtgataatgaagtccacactgaggatgacagagctgagatgaagaaaatctggatctttgcttggctcagttgagtctctcgagtctgctctaccatggggcttcttaagtaaaatatatccttttttggtagaaacagtgtcttgctntgggccaagntgaatgcntggngcaaacnttngntaattgga

SEQ ID NO: 5963 - DNA, 576 bp, Homo sapiens
  misc_feature (489)..(489): "n" may be a, t, c, g, other or unknown
  misc_feature (541)..(541): "n" may be a, t, c, g, other or unknown
  misc_feature (548)..(548): "n" may be a, t, c, g, other or unknown
  misc_feature (569)..(569): "n" may be a, t, c, g, other or unknown
  misc_feature (571)..(571): "n" may be a, t, c, g, other or unknown
gagacggagtcttcctctgttgcccaggctggaatgcagtgacatgatcttggctcactgcaacctccacctcccaggttcaaacgattctcctgcctcagcctcccgagtagctgggactacaggggactacaggtgtgtgccaccatgcccagctaatttttttggtatttttagtggagacgaggtttcaccgtgttggccaggatggtctcgatctcctgacctcgtgatccgcctgcctcagcctcccaaagtgttgggattacaggcatgagctgccgcacccggccaaattcttttaattccttagacacaggttagagggggaacaatgcttaaaattccatggaactaagattttttttttatttttatttttttgagacagagtcttgctttgttgcccaggctggagtgcagtggcacaatctcagctcactgcaacctctgcctcctgggttcaaagcaattctcctgcctcagctnccaagtagctgggactacaggcacccaccacacacttaagtaatttttaacnttagtanaaacggggttcacatgttggncnccctg

SEQ ID NO: 5964 - DNA, 557 bp, Homo sapiens
  misc_feature (444)..(444): "n" may be a, t, c, g, other or unknown
  misc_feature (492)..(492): "n" may be a, t, c, g, other or unknown
  misc_feature (499)..(499): "n" may be a, t, c, g, other or unknown
  misc_feature (523)..(523): "n" may be a, t, c, g, other or unknown
  misc_feature (530)..(530): "n" may be a, t, c, g, other or unknown
  misc_feature (539)..(539): "n" may be a, t, c, g, other or unknown
  misc_feature (545)..(545): "n" may be a, t, c, g, other or unknown
  misc_feature (552)..(552): "n" may be a, t, c, g, other or unknown
agacagaatttcgctcttgttgcccaggctgaagtgcagtggcccagtctcggctcaccgcaacctctacctcccaggttcaagcgattctgctccctcggccttccgagtagctgggattacaggcgtgcgtcaccacgcgtggctaaatttgtatttttagtagacacagggtttcaccatgttggtcaggctggtctcaaactcctgacctcaagtgatccaccctccttgacctatctcagtgctgggattacaggcgtgagccacacctggctgccttttaactgttctgataagcaaactctacagttaaaaccaatttttgtgtgcactaaaaataccaacttcctcatcaaaatctacaaagtaccatgtgaaatgaaatggcatgaagacaacagtaagaaaactgtagctataactcagaaaaagaatagctgngatgcatacatagttggaaaatgcataagacaaatctgaagagaagtngaaaatnaaagaattctcttttttttaaaanggggttnccttttggnggccanactggantgcaa

SEQ ID NO: 5965 - DNA, 576 bp, Homo sapiens
  misc_feature (465)..(465): "n" may be a, t, c, g, other or unknown
  misc_feature (507)..(507): "n" may be a, t, c, g, other or unknown
  misc_feature (516)..(516): "n" may be a, t, c, g, other or unknown
  misc_feature (548)..(548): "n" may be a, t, c, g, other or unknown
  misc_feature (576)..(576): "n" may be a, t, c, g, other or unknown
agatcctgtttatttaaaatgaaaaggattagcatgagggatggtaacattcctttttgatatctgtagcagcaagttttcttatgattcattattcttcttcttacagctttaaatcatctaggaacttcatataaaatttaattccagtttcaactagttgtggagcatttgatccaaaataaaatgaaagtcctctctgaagttgtagaggagactcaagaatcagaacaacctgaagttctttaagctgtcagttgaaggactaggtaaaaaacaaatatcatttagtgtgatcattaatgcacatgagtcattattccatgtggttgctgtcgactggtcaggggcacttcaagccctaatctgtactttgtcctgtctctctacaccctgttctactttttcagcttgttgcctgtaatatgtgaatggaaataaaataatcaagcttgttagaattgngttcataacgacacaaaagacctgagagaatgtaagaacctntagaacatncaaaataagacatatttttggtgggttaaaancttttgggtgggtcatttcttcgggctn

SEQ ID NO: 5966 - DNA, 574 bp, Homo sapiens
  misc_feature (523)..(523): "n" may be a, t, c, g, other or unknown
  misc_feature (549)..(549): "n" may be a, t, c, g, other or unknown
aaattagacaaacctggcagatagcgtgagaaagaaaatatctgaattagcatagccagttttagaaatttctggttggctgtttttacattaagaaatgaaaaaaacaagcaagaattgactttatgcctccctgacatcttgtgcatatgagtttggtttctgaatggattattggagcatttttaaggttgggtgtctcaatcttttaagagtgacgagcatgaggagtggctggcatccacacctgaagcaacactttctgtgatcccacagctttggatgccaaagcagctgctcagcgtgacacgaagaatcagtccagaaagctgccacagaccctctccatgagatttttaaaaaaccacttttgttttctgagtaataaaagaaaccccagtaatattagggacatggatgttagtacagtaattaccacacattgaaaatattgttcagcaggaaaagtaaaactttcaaaaaatttcttaaagatcctatttaataaataattttgattaanggacccttatgcaaacttggaccaantactgaaactccactggtggggaaa

SEQ ID NO: 5967 - DNA, 573 bp, Homo sapiens
  misc_feature (487)..(487): "n" may be a, t, c, g, other or unknown
  misc_feature (501)..(501): "n" may be a, t, c, g, other or unknown
  misc_feature (516)..(516): "n" may be a, t, c, g, other or unknown
  misc_feature (538)..(538): "n" may be a, t, c, g, other or unknown
gagatggaatctcgctgttgcccagggtagagtgcagtggtgcaatcacagttcactgcagcctcgacctccaaggtgcgagcgatcctcccacctcagcctcccaggtagctgggactacaggcatgcaccatgatacctggctaacttttataaaatttttttgtagagatggggtcttgctatattgcccagactggtcctgaattcctgggctcaagcaatcctcccaccttagcctcccagaatgctgaaattacaggtgtgatccactgtgccctgcctcactgaaacttttaaatcataaaattatctgcattctgtatgttccttgagcacatagatacactttttcatcaatggggacacattcctactataaggctgagaaaagagaagggagttcaatacttactgaataaatgtaggcataaacctcactacctgtttcaaaggcctcattatttccttctctaagacaaatccngagcactttgcagncattatagacttctnttaaacaacctggagcctaaanataggggtaaggggtggactttgattgaaaaaaac

SEQ ID NO: 5968 - DNA, 574 bp, Homo sapiens
  misc_feature (469)..(469): "n" may be a, t, c, g, other or unknown
  misc_feature (475)..(475): "n" may be a, t, c, g, other or unknown
  misc_feature (504)..(504): "n" may be a, t, c, g, other or unknown
  misc_feature (529)..(529): "n" may be a, t, c, g, other or unknown
  misc_feature (545)..(545): "n" may be a, t, c, g, other or unknown
atacatgttcatttttatttttctctagctctgttttataaatacatgtgttcaaacaatcttgattaggagcattttaatcacgaagccaacacatgttactgcgtatctgtttaaaatctggtagttgcttaatgggaccaacagcagcaatagctggactcctattataagtgtatttggtacatacttctcgaattgtctcagcattcacagcatcaattcttgcttcaagctcagggatgggaatccttctattatagcataacatttgcctaccaatatcttcacaaattggagttgaaccatcaagctgcaacaacatgtttgttttcagaagatttctggctcgtgcaacctcactttctgtgacacttgtacagagtcgcatccattctttttgaacaacatgtagcatgtctgcaacagtggatgattcacaaaccatatacagtccccataatcctgnatctgngtaggaagtgttgaaagactgaaaagctntggcaaagatggcatgacaagtganctgggccacttgctanaaaatcattcttccccaaaagagcgatcc

SEQ ID NO: 5969 - DNA, 419 bp, Homo sapiens
  misc_feature (10)..(10): "n" may be a, t, c, g, other or unknown
  misc_feature (119)..(119): "n" may be a, t, c, g, other or unknown
  misc_feature (152)..(152): "n" may be a, t, c, g, other or unknown
  misc_feature (155)..(155): "n" may be a, t, c, g, other or unknown
  misc_feature (254)..(254): "n" may be a, t, c, g, other or unknown
  misc_feature (353)..(353): "n" may be a, t, c, g, other or unknown
  misc_feature (369)..(369): "n" may be a, t, c, g, other or unknown
  misc_feature (371)..(372): "n" may be a, t, c, g, other or unknown
  misc_feature (414)..(414): "n" may be a, t, c, g, other or unknown
  misc_feature (416)..(417): "n" may be a, t, c, g, other or unknown
aactttgcanaaagcttcatttttactgggggttggggttaagttaaaaacatttgactatgccatgtaggcgactccaacacttcaggaatacaaagctctgaaaagaggttatgtancaaagctcattttcattcacattgataataggncanacacatttttgaagaaaaaaatggacagagcgtaaaggataacagagtacacattttcattttctatgatgaaaaggaattttaaaaattggctgttgnacataaaaactttttttttaaaccaaacaacctagaattaaatggagtaaaatgtgagaagccccccttttttcctccttcagcagacaaaaccgctgncaatagcttgatatgngnnatcacagactcttttctagggtgcacacacgcatatatgctncnnat

SEQ ID NO: 5970 - DNA, 457 bp, Homo sapiens
  misc_feature (208)..(208): "n" may be a, t, c, g, other or unknown
  misc_feature (289)..(289): "n" may be a, t, c, g, other or unknown
  misc_feature (292)..(292): "n" may be a, t, c, g, other or unknown
  misc_feature (365)..(365): "n" may be a, t, c, g, other or unknown
  misc_feature (375)..(375): "n" may be a, t, c, g, other or unknown
  misc_feature (424)..(424): "n" may be a, t, c, g, other or unknown
  misc_feature (431)..(432): "n" may be a, t, c, g, other or unknown
  misc_feature (440)..(440): "n" may be a, t, c, g, other or unknown
  misc_feature (456)..(456): "n" may be a, t, c, g, other or unknown
ggagacaaggtataactgtgttccccaggctagcctcaaagccctggactcaagcaattctcctgcttcagcctacctaacagttgggatttcaagcatgtggcactgcactcagccccaggaggctttctgaaggaagtgatgacaaaggtagattttgagaataaagaaacaaggtagcgggctggacacggtggctcacgcctgnaatctcagcactctgggaggccgaggcgggtggatcacctgaggtcaggagaccggcctgaccaacaaggtgaaaccccgnctntactaaaaatacaaaaattagccgggtgtggcagcatgcgcctgtaatcccagctactcgggaggctaagacnggagaattgnttgaacccgggaggcagaggttgcagtgagctgagattggcaccactgnactgcannctgggcancaagcgagactgtctna

SEQ ID NO: 5971 - DNA, 424 bp, Homo sapiens
  misc_feature (305)..(305): "n" may be a, t, c, g, other or unknown
  misc_feature (359)..(359): "n" may be a, t, c, g, other or unknown
  misc_feature (376)..(376): "n" may be a, t, c, g, other or unknown
  misc_feature (386)..(386): "n" may be a, t, c, g, other or unknown
  misc_feature (394)..(394): "n" may be a, t, c, g, other or unknown
  misc_feature (402)..(402): "n" may be a, t, c, g, other or unknown
  misc_feature (410)..(410): "n" may be a, t, c, g, other or unknown
  misc_feature (419)..(419): "n" may be a, t, c, g, other or unknown
gtagctcaaagggctttgcaaaattttaatatattaaaacaagaggcatctgctagaaaacattctattgtataaaacccgagttcttaaaaacatgttttctttggcactttcattccctccctcccctttccccagcatattgcaaaaagctctccagtgctaaggcattggcagggtgtgtaaacagcagccagcatatgtggaagaataatacaaagcttttttttttcttctaatatgtctgtgcagcaagcataaataacaggacccattccaaggagtgtgtgtgggttttccccctnccctgtgtcctctgtcaccttggtgatgaggccaccagtgatgtgaagactggnagggaaccctaggtcanaccttggttncctgttgntcttcccnagacccanggttccctnggttt

SEQ ID NO: 5972 - DNA, 574 bp, Homo sapiens
  misc_feature (458)..(458): "n" may be a, t, c, g, other or unknown
  misc_feature (460)..(461): "n" may be a, t, c, g, other or unknown
  misc_feature (476)..(476): "n" may be a, t, c, g, other or unknown
  misc_feature (502)..(502): "n" may be a, t, c, g, other or unknown
  misc_feature (522)..(522): "n" may be a, t, c, g, other or unknown
  misc_feature (548)..(548): "n" may be a, t, c, g, other or unknown
  misc_feature (569)..(569): "n" may be a, t, c, g, other or unknown
ccagtgttttgcagtagaacagggttcctaccatcacctcccttaggtttaaaaaacccaaaacacaagtctgctgtgagtccttcagcatcatgagtgtgagtgatctgagtctggaataccactgtctctgtagcttcggttactactgctttcactgtgattgtttttgtacagattcattccattaggaggaaatatggtgtgtattacaaactcctccttcgagatgggttcattgcttattggtaacatctgaaaagaagtttccctgatttccaggatagagttgtccttcttagtgccagcttctgcatagtcatcctttcttctcctccctttgctatatgcacaagttccttgagaagagcgatccattcctatgaacataccaacacactaaagcaagaagggcaatggtaaccagggccacagccccaccaatgatggcagccaangnnaaatgggggttttgnaaggtcttgctttggctctcaatganggtgggtggaaggttgacanttcaaaggggtgcaagtttaagcttnaatccaaccgggagttcattnaatag

SEQ ID NO: 5973 - DNA, 570 bp, Homo sapiens
  misc_feature (427)..(427): "n" may be a, t, c, g, other or unknown
  misc_feature (520)..(520): "n" may be a, t, c, g, other or unknown
  misc_feature (567)..(567): "n" may be a, t, c, g, other or unknown
gtagagatgggatctcgctatattgcccagactggtctctaattcttggcctcaagtgatcctcccgcctcagcctcccaaagtgctgggattttaggcgtgagccactgcgcctgccttactcctactgtacttaaggcatcataacatccagaccatcatgggccaggctgctctgccttacacttccatttcattcttaacatgtgacacaagatgaaacacaacatacttctgaacctgcacctcagagattgctagagctgagcttgcagattacatggatcattttgtgattgttgaaaaggcctccccttcctctgccttaggtatattctacctttgaaggcagatttcttcaggttaaaatatgatatatccaggagtcccctgttaaaaacccaaatatctctgaaaggcatactgntttaagcttctagaaccagtataaattgatttattcagcaacttttggacttagacctggattctaatcctgactttggcaatttctaactgnaaaactgcaataaaatattaaccttctgacatgaaggaattagtaanaag

SEQ ID NO: 5974 - DNA, 576 bp, Homo sapiens
  misc_feature (482)..(482): "n" may be a, t, c, g, other or unknown
  misc_feature (513)..(513): "n" may be a, t, c, g, other or unknown
gtaatactttaagtaagaaattgtttgaaataagacaataagagtctaaaaataaggagtcggtgggagagcaggagaccagagattattacagaatcaacctgacaataacctagacaaggaataggaggctgttcaccaccaccaagaggtccagtgcattttgctgtccttactgataggccatatttcaccttcttacaacagaaatatcatcagagactttatcaaaaactaggctgaaatccatatatacgacattcatagcattttattgatccaagtccagtatttacatgactgctttgttcattttgaggagtatatgtttataaatacatattaaatatggaattctacactctaagtaataaagaaggtttctagaaagaaaggaatgtctgcaattagttttcctctaagccaggactattgaaaactatgccattttgattctctgctcatttaggaaacagaccaangacggaatattttaaaagtcaataattaaangggcaatcacttatattgccccttttaaatcccagaactggacttttcaagtattaacattag

SEQ ID NO: 5975 - DNA, 573 bp, Homo sapiens
  misc_feature (483)..(483): "n" may be a, t, c, g, other or unknown
  misc_feature (485)..(485): "n" may be a, t, c, g, other or unknown
  misc_feature (497)..(497): "n" may be a, t, c, g, other or unknown
gagatggagtctcgctctgtcacccagtctggagtgcagtggtgcgatctcagctcaccgcaaccttgcctcccgggttcaagcaattctcctgcctcagcctcccgagtagctagcactgtagggatggccactgcgcctggctaacttttgtattttcagtagggaagggtgagtcagcatgttggccaggctgtcttgaactcctgacctcaagtgatccactccccttggtctcccaaagttaagggattacaggcctgagccactgtgcctggcctaaaatttttcatttttcatgtaaattaaagctaataagggccagttttattctctaaccaagaccttttaagttaaattgatctttaactacacacacacacccctgcccaagggtacagttctactttctactagtagtaactctccttttccactttaattttgaggaaaattatttacacagctgacccttgaacacangnttgaaatgtgtngggtccacttacatatatgggatttttttcaataaaaatttttagagattcaaccatttggaaaaacctggcgata

SEQ ID NO: 5976 - DNA, 573 bp, Homo sapiens
  misc_feature (481)..(481): "n" may be a, t, c, g, other or unknown
  misc_feature (516)..(516): "n" may be a, t, c, g, other or unknown
  misc_feature (566)..(566): "n" may be a, t, c, g, other or unknown
  misc_feature (572)..(572): "n" may be a, t, c, g, other or unknown
gagacagagtctcactctatcgcccaggttggagtgcactggcacgatctcggctcactgcaaactccgcctcccgggttcacgccattctcctgccttagcctcccgagtagctgggattacaggcacccaccaccacgcctggctgattttttgtatttttagtagagatggggtttcaccgtgttagccaggatggtcttgatctcctgacctcatgatccgcctgccttggcctcccaaagtgctgggattacaggcgcaagccaccgcgcccggcccattaatgggcattttttttaaggccactgtcctaaatctaaggaatatgaatttttatagatagtcatgatttttttctgcacattcaatgaacagtattaggtacctactgggttgtatactgggcaggattcaaagatagacaattcatatttcccaccctcaattagcttaaaatctaatataaatacccatagtnaacagttaaccaaaatacagcaatcgagcttcaanctgtgaacatgttgcaaatccaaaatcttaaggccaacctccaataaggnggccana

SEQ ID NO: 5977 - DNA, 552 bp, Homo sapiens
  misc_feature (148)..(148): "n" may be a, t, c, g, other or unknown
  misc_feature (150)..(150): "n" may be a, t, c, g, other or unknown
  misc_feature (188)..(188): "n" may be a, t, c, g, other or unknown
  misc_feature (509)..(509): "n" may be a, t, c, g, other or unknown
  misc_feature (530)..(530): "n" may be a, t, c, g, other or unknown
  misc_feature (544)..(544): "n" may be a, t, c, g, other or unknown
  misc_feature (551)..(551): "n" may be a, t, c, g, other or unknown
gcaccaaaatacatacattcatttatttctcattgcagcaacaagataaacaagtataattccatggtcaaggagttacaaatagtagcaagcccagtaaccttgagcatatctataaggcaaataaaacaaatatttctttcatagngngggcatccaactttagataatctggaaaaaaatcactntagcccctgaataccatgatgtgcatgatgtgcaaaatgaaagtatcacccaaaatattttcaaagctaaaaagaaaatatttaaattcaaatactttaaccaaattggaaatgcaaacagtacacttagagtcatccttagccagctgttctccaaacaaaagatcgagaaacaaaaccaagaaccaatgtaaaaaagaaaaggtttatctagaaaactggaagctcatcaaagtccattcttcttctgattctggtctcggtcagcatttttagaagtccacttttgaggagcaaagcctttaagtctagattaaccanccggtatggaaggctaattcnttccacgatgacanggttctng

SEQ ID NO: 5978 - DNA, 562 bp, Homo sapiens
  misc_feature (176)..(176): "n" may be a, t, c, g, other or unknown
  misc_feature (424)..(424): "n" may be a, t, c, g, other or unknown
  misc_feature (435)..(435): "n" may be a, t, c, g, other or unknown
atcagtaaattgccacctttaatccatcctacagtgccctgtgaaagggtcacagaaagacagttatgactgtatgaaaatatgattcttgatacagaatcaaaagttactttcaatttcctttgcttttataaagtccacgataacaatacttaaatgcactttttttttcctgngatataattaaaacccagtgttatttcagttgaacttaaaatagagtccctggtctgaatcagactttaaatcatactgtaaacatatatttggtataatttattgatcatcatccagttgctccaaaagggttcttctgcgcttttccaattccccttcactcagttcgctgccagaagtgtcccaattaccagaatcctttccagtctttttcttaggcgatttgtgttttgattctgatctttgnctaagttctgnctttttcactttcccgatctttttctttttttatccttctctcgctcagcatcggatcttggaaaagcagattaaggcctctcttcttactttcttctaagcctttttgacttttatacttctctaa

SEQ ID NO: 5979 - DNA, 472 bp, Homo sapiens
  misc_feature (32)..(32): "n" may be a, t, c, g, other or unknown
  misc_feature (61)..(61): "n" may be a, t, c, g, other or unknown
  misc_feature (90)..(90): "n" may be a, t, c, g, other or unknown
  misc_feature (197)..(197): "n" may be a, t, c, g, other or unknown
  misc_feature (273)..(273): "n" may be a, t, c, g, other or unknown
  misc_feature (275)..(275): "n" may be a, t, c, g, other or unknown
  misc_feature (376)..(376): "n" may be a, t, c, g, other or unknown
  misc_feature (425)..(425): "n" may be a, t, c, g, other or unknown
  misc_feature (427)..(427): "n" may be a, t, c, g, other or unknown
  misc_feature (449)..(449): "n" may be a, t, c, g, other or unknown
  misc_feature (452)..(452): "n" may be a, t, c, g, other or unknown
  misc_feature (459)..(459): "n" may be a, t, c, g, other or unknown
  misc_feature (466)..(466): "n" may be a, t, c, g, other or unknown
aacgggaaaaatagtttattgaaccgtacttntccattgaagtctttaaacataaaagctntgtaacaaacatcacaatttcacgtcatntgccatataaatagaacctacactgagatgcatgttatcaacaggcatgtccccagggtgaggctccccacccgggacccaacttggtcagttacaaaacggggacnaaggcgggaggaagcccagtgtcaccaggtgggaccgggtgccgggcctgtgggggtgtcctcgcagcccccctananagggggcgtgcggaaatggatcttcttggctgtttccacgtcggacttcgcgaccaggaaccgcatcttcttcccgccatgacggatcaggtccacagctntcaggtagccaaggcccaggaggctgctgccattcaccttcaggatacngncccccagcgacaggcgcccgtnggnccgttgngggcttncccgga

SEQ ID NO: 5980 - DNA, 456 bp, Homo sapiens
  misc_feature (432)..(432): "n" may be a, t, c, g, other or unknown
  misc_feature (451)..(456): "n" may be a, t, c, g, other or unknown
gtaggtggtgctgtattctctggtaataccacattcagtgcacacttagtgggttcaggcactgaccatgtgttccccactcactgtgaagtttcccatcaactttttagctaaaaggtttcatccattgatctttgcctaaatcagttactttgttagcagttgcaaaatagcaactttataattctgtcattcctgccactttgctagaattcctcagaatctaggaatatgcatcaaatttttagcatgcatatttgattttataaagatttgtaatattaatcagaactcctactcatgtcctcaatgatactaagacattagaattaatggtcatccaggagaatggcgtgaacccgggagatggagcttgcagtgagcccgagataagtgcctctggacttcaacctgggcgatagagcgagactncatcttcaaaaaaaaaaannnnnn

SEQ ID NO: 5981 - DNA, 517 bp, Homo sapiens
  misc_feature (445)..(445): "n" may be a, t, c, g, other or unknown
  misc_feature (447)..(447): "n" may be a, t, c, g, other or unknown
  misc_feature (456)..(456): "n" may be a, t, c, g, other or unknown
  misc_feature (458)..(458): "n" may be a, t, c, g, other or unknown
  misc_feature (463)..(463): "n" may be a, t, c, g, other or unknown
  misc_feature (474)..(474): "n" may be a, t, c, g, other or unknown
  misc_feature (495)..(495): "n" may be a, t, c, g, other or unknown
ctaaaaaaaagtaccaggtacaattttttcctgtttttgatttgctttgttttttcaagtttcagcaaatgcttgttcccctcagcccagccccaggagttaggactgaggctgggtcagagtctggagtggggaatggggtagtttggaaccacatgactgagtttgaggggtgcccctcaccccagctgaggtaggtgggtcagagtctggccaggtgagaggaggcaccccagtgcttggccctgactctgccccctggacaccttcttcagtcaggaccccaaaacaaggagacacaggtaggaggagagggacaactggagtctggagccctaggtgaggggtggttaacccctgtgtgtgtgcatacatgcacactcacacacacataccacacaaagacaagcttgtgcacacaccatacgcataacttggcttttananataggtcananggtangggaagtgaanggactggggttaaataaggcnctttggacggggccaaccttgg

SEQ ID NO: 5982 - DNA, 569 bp, Homo sapiens
  misc_feature (563)..(563): "n" may be a, t, c, g, other or unknown
caaggttcacggggtttattagggagtcgggagggagaaaacccaggagtccccaggccatccacattgctccccggcatgtgacgatccagcctggctttctctggtcctttctggacagaggctggccaagcaggcagcagcctcaaggggagtgggtaggagctgggggccttctggcagccctactcagaggatgatctggttggtgaagcttcggctcagctccttgtgtggcagaacaatcgagttcaggatgagcacctcggcagggatccggactcggcagcccaggatggtgatagcaggcagcagcttcccgtccttgaagaggctctcactgtccatgcgggctcggggatcgttggggttagggtcactgggggtaccctccacgcgggcccagcgtcccacggtgcttccccagcccacgatgctatgcagaacacacgtgtgctcctgcaaagtggcttcatggaggacaatcttttccggagccgacaccttaaccacggtaaccccttcccaatgaaactttgggccaacacaaccaagggggcccnttgggg

SEQ ID NO: 5983 - DNA, 566 bp, Homo sapiens
  misc_feature (130)..(130): "n" may be a, t, c, g, other or unknown
  misc_feature (158)..(158): "n" may be a, t, c, g, other or unknown
  misc_feature (171)..(171): "n" may be a, t, c, g, other or unknown
  misc_feature (186)..(186): "n" may be a, t, c, g, other or unknown
  misc_feature (234)..(234): "n" may be a, t, c, g, other or unknown
  misc_feature (374)..(374): "n" may be a, t, c, g, other or unknown
  misc_feature (424)..(424): "n" may be a, t, c, g, other or unknown
  misc_feature (481)..(481): "n" may be a, t, c, g, other or unknown
  misc_feature (524)..(524): "n" may be a, t, c, g, other or unknown
  misc_feature (530)..(530): "n" may be a, t, c, g, other or unknown
  misc_feature (532)..(532): "n" may be a, t, c, g, other or unknown
  misc_feature (545)..(545): "n" may be a, t, c, g, other or unknown
gaggcagagtcttgctctgtcgcccaaactggagtgcaatggcgcgatctcggctcactgcaagctccacctcccgggttcaggccattctcctgcctcagcctcccgagtagctgggactacaggcgtntgccaccacgcctggctaatttttttgnatttttagtaganacggggtttcaccgngttagccaggatggtcttgaaatcctgacctcgtgatccacccacctnggccttccaaagtgctgggattacaggcatgagccacttgcccagccagttttctctttcaacactttacatatttcacccttttctcttcttgcttgcgtgttctgacaagaaggctgtaattcttattcgtttcctgnataagtaagctgggtttttttctatggcttctttcaagaatttggggttngcctttgggtttctacaagttggaatatgatatatgtaaggggtggatttttttttnaagatggatccaattgggggtctctaacttactgaacccgggnttgggncngccttactttggnaaattggggcctttaactttc

SEQ ID NO: 5984 - DNA, 586 bp, Homo sapiens
  misc_feature (569)..(569): "n" may be a, t, c, g, other or unknown
  misc_feature (572)..(572): "n" may be a, t, c, g, other or unknown
gtagaatacttaaacttttaaagaacattaatacacaaaattcaggaagttcccttaaaaggactttatttttttctgaactttcccatgacgaatgtctgactgcaaagttcttttctataacatggatttcttcaacaggaaagattcagtacatgacagtagttttcaaatacagtcttccatcttgtattgtcctttcagcatctgttctgccgccactgcggtcagcctctatctctggggtcagagagtcatttaagaccctgagactatctgttgaagctgcctgttttagcgtctgttctgcttgttcacgccgtttcgtctcaaactcaagtgcttcctgcaattttctctttgccttcttctccttctttagcctcttttgaactatggctctattcttttgttccatagccaactgcttctcaagtgtttccccttagttctctttcccttaaaaaaaaatccatcttcagctcaagttttttccagttggacctggttctcttgactctggcattatctaatggcaacttttaacaagcccctggatggtaagtcanaanaagcttcgatggga

SEQ ID NO: 5985 - DNA, 480 bp, Homo sapiens
  misc_feature (375)..(375): "n" may be a, t, c, g, other or unknown
  misc_feature (446)..(446): "n" may be a, t, c, g, other or unknown
  misc_feature (458)..(458): "n" may be a, t, c, g, other or unknown
  misc_feature (462)..(462): "n" may be a, t, c, g, other or unknown
  misc_feature (465)..(466): "n" may be a, t, c, g, other or unknown
  misc_feature (475)..(475): "n" may be a, t, c, g, other or unknown
  misc_feature (477)..(477): "n" may be a, t, c, g, other or unknown
gactttacaaaaatttttattctgtttacacaggaccttgtctcattcaatccttccaattaccaaaagaagcaggcaagacaaactgttacacccattttatgggttagaatgatttactccaagagagatgcacttgcctaagaccatcagctgtagagctgggctaatcccagtgcatgactcttccatgaattgtgtgttaattatttatttattgagagagggtcttgctctgtcccccaggctgtagtacagtggcatgatcacagctcactgcagcctcaaccacctgggctgaagtgatcctcccacctcagccccacaagtaactgggactacatgcacacaccaccacatctggctaatttttgnattccttttagagaccaggttttgccatgttgcccaagctggctttgaactcctgggctcaagtgatctgntcatcttgggcnttcnaanngctggaatncnggc

SEQ ID NO: 5986 - DNA, 471 bp, Homo sapiens
  misc_feature (83)..(83): "n" may be a, t, c, g, other or unknown
  misc_feature (164)..(164): "n" may be a, t, c, g, other or unknown
  misc_feature (166)..(166): "n" may be a, t, c, g, other or unknown
  misc_feature (259)..(259): "n" may be a, t, c, g, other or unknown
  misc_feature (320)..(320): "n" may be a, t, c, g, other or unknown
  misc_feature (375)..(375): "n" may be a, t, c, g, other or unknown
  misc_feature (427)..(427): "n" may be a, t, c, g, other or unknown
  misc_feature (433)..(433): "n" may be a, t, c, g, other or unknown
  misc_feature (443)..(443): "n" may be a, t, c, g, other or unknown
  misc_feature (446)..(446): "n" may be a, t, c, g, other or unknown
  misc_feature (450)..(450): "n" may be a, t, c, g, other or unknown
  misc_feature (463)..(463): "n" may be a, t, c, g, other or unknown
gaggcagggtcttactttgtcacccaggctggagtagtggcgcgatctcggctcactgcagcctcgaccacccaggttcaagngatccccctacctcaggccctcaagtaccctggactacagacaagtgccaccacgcctggctaatttttgtacttttgtananacggggtctcaccatgttgcccaggctggtctcgaactcctgagctcaagcaatctgcctgcctcagcctcccaaagtcctaggattataggngtgagccaccttacctggccaaaaaaaaaaaaaagccattttttaataagaaaaaaatctntacctccaaaagctggtatgatatattggggaaaaaagttggctctggctcttanacctgcctccatttttttttctttgaagaaattaaatggggttttatgctancaaggncacttttttnaanaagnctaaatctaaaanaatgggat

SEQ ID NO: 5987 - DNA, 576 bp, Homo sapiens
  misc_feature (510)..(510): "n" may be a, t, c, g, other or unknown
  misc_feature (513)..(513): "n" may be a, t, c, g, other or unknown
  misc_feature (528)..(528): "n" may be a, t, c, g, other or unknown
  misc_feature (530)..(530): "n" may be a, t, c, g, other or unknown
  misc_feature (570)..(570): "n" may be a, t, c, g, other or unknown
aaataataataggctttctgccccaactaaaggaattttaggcttctgcaacaagtggaggaggcattttgaagatgggacacaaagaagtcttctttctccagatccagaagtcaggccttgtaagaattcaagccaaaaaaagttcatccatgggaaaaacggttcttctatcatccagcacgtatttgtgccaacagagctgagggacttgagtaattcaagaggctaggggttggggggcagatgtgtccagtggctcccacagccccgccgtcctgaaagtcacgccagttaatgtgcctcggggtggatcagccctcccgacagatgactactaggaaattaatccccagttaataatgtgctttggaccaagtaagtcaagattatttttcctacaattatacaaagatatgcttttccagaagggaacttctggaaaaagaacaaataacactatgcttaaaatattattcacatattagagaagaaaggaaccttaaaatngcngaagaacctggattncntggatcccggggccaacccttggacatggctttgtgtganaacaaa

SEQ ID NO: 5988 - DNA, 582 bp, Homo sapiens
  misc_feature (449)..(449): "n" may be a, t, c, g, other or unknown
  misc_feature (491)..(491): "n" may be a, t, c, g, other or unknown
  misc_feature (499)..(499): "n" may be a, t, c, g, other or unknown
  misc_feature (569)..(569): "n" may be a, t, c, g, other or unknown
acaggaaaatttaatagcttctttttaattcataaaactagatacttacactgccatgtagtcaaaaaatgcaccatcagtgacctcagatataggcttttttaagatttctagatctggaagagacttccagtcaacagaagaccaagaaggaagatccctcaacaaaaagtatctccacagaattggatctcttacagtttcattccaataatgatttgtacttcccaactgacacagatcatgaggtgaaagaaaggacaaaatatatagctgtacatcaatctgaaacagaagaaagcagcaggtaggaaaaaggaatgaagaaaatagtttttgggtgataaaccacataatcaacaaataaataacaaaaggtcaactgactagtatttttaataactaaatctaccattaataattaaatctattattttcctgctatcagncaaaggatcataactggaccattttagttttcgaagttggtnaacaattnaattcttggaaccacctggaacattcctggaaaaaccaaccctggcttggttatttttccagcaaaatcnccagttcctttta

SEQ ID NO: 5989 - DNA, 572 bp, Homo sapiens
  misc_feature (3)..(3): "n" may be a, t, c, g, other or unknown
  misc_feature (33)..(33): "n" may be a, t, c, g, other or unknown
  misc_feature (68)..(68): "n" may be a, t, c, g, other or unknown
  misc_feature (86)..(86): "n" may be a, t, c, g, other or unknown
  misc_feature (137)..(137): "n" may be a, t, c, g, other or unknown
  misc_feature (146)..(146): "n" may be a, t, c, g, other or unknown
  misc_feature (176)..(176): "n" may be a, t, c, g, other or unknown
  misc_feature (223)..(223): "n" may be a, t, c, g, other or unknown
  misc_feature (241)..(241): "n" may be a, t, c, g, other or unknown
  misc_feature (342)..(342): "n" may be a, t, c, g, other or unknown
  misc_feature (359)..(359): "n" may be a, t, c, g, other or unknown
  misc_feature (418)..(418): "n" may be a, t, c, g, other or unknown
  misc_feature (420)..(420): "n" may be a, t, c, g, other or unknown
  misc_feature (428)..(428): "n" may be a, t, c, g, other or unknown
  misc_feature (444)..(444): "n" may be a, t, c, g, other or unknown
  misc_feature (492)..(492): "n" may be a, t, c, g, other or unknown
  misc_feature (519)..(519): "n" may be a, t, c, g, other or unknown
  misc_feature (548)..(548): "n" may be a, t, c, g, other or unknown
  misc_feature (568)..(568): "n" may be a, t, c, g, other or unknown
  misc_feature (572)..(572): "n" may be a, t, c, g, other or unknown
ganatggagttttgctcttgttgcccaggctanagtgcaatggcactattttggctcactgcaacctntgcctcccaggttcaagngattctcatgcctcagcctcccaagtagctgggactacaggcacctgccgntatgcccanataatttttttttctgtattgtaagtaganacagggtttcaccatgttggccatgctggtcttgaactcctgacctntggttatccaccagcctnagcctccaaaagtgctgggattacaggcgtgagccaccacgcctggcccatggccatcctgtcacacctttaactccatctgcttctcctgcttcccctgngctatttcaaatcctanatatcctatcattttatctataaatatttcagtatacagctctaaaggatttaaagatncntaagagtncaatatcattactacnctttaaaaaaatctcaataaattccttaatatcaaacatatgggtagnggtcacaatttcaattttccataaatnggggttttttttacatttgggttaaatanggtcccaactggttgggacnggtn

SEQ ID NO: 5990 - DNA, 547 bp, Homo sapiens
  misc_feature (89)..(89): "n" may be a, t, c, g, other or unknown
  misc_feature (194)..(194): "n" may be a, t, c, g, other or unknown
  misc_feature (460)..(460): "n" may be a, t, c, g, other or unknown
  misc_feature (490)..(490): "n" may be a, t, c, g, other or unknown
  misc_feature (502)..(502): "n" may be a, t, c, g, other or unknown
  misc_feature (516)..(516): "n" may be a, t, c, g, other or unknown
  misc_feature (532)..(532): "n" may be a, t, c, g, other or unknown
  misc_feature (536)..(536): "n" may be a, t, c, g, other or unknown
  misc_feature (541)..(541): "n" may be a, t, c, g, other or unknown
aataaatagagacagggtctcaccatgctgaccaggctcaactccaactcccgggctcacacaatccttccaccttggcctcccaaagngctgggaccacaggagtgagccaccacgctaggccaaatagtagtttcttaaaggacagataacattttggaatctgaaaccacatcaatccacttttttactgntaaaatccattgctatgtctggaattttcaaaggatcttttgcctttgcttgattttgcaacatcatgcattggtcatttgcaaagcctagatttactgagttatgcccatcttccaaataacatatttcattaaacaacattttaaaatattgcagtccttaaccactgatatcataaggaaagtcttttaagtactaggaagctgcaaactccagctggcaactttttaaaaattctaattttcacccaaattttatcactggnaataaatactggcagtggtttcctaaaagngcaagctccttnatttcaagaaaatntgccaatctaaggggnaaancctanctggta

SEQ ID NO: 5991 - DNA, 604 bp, Homo sapiens
  misc_feature (442)..(442): "n" may be a, t, c, g, other or unknown
  misc_feature (487)..(487): "n" may be a, t, c, g, other or unknown
  misc_feature (498)..(498): "n" may be a, t, c, g, other or unknown
  misc_feature (505)..(505): "n" may be a, t, c, g, other or unknown
  misc_feature (559)..(559): "n" may be a, t, c, g, other or unknown
  misc_feature (561)..(561): "n" may be a, t, c, g, other or unknown
  misc_feature (565)..(565): "n" may be a, t, c, g, other or unknown
  misc_feature (589)..(589): "n" may be a, t, c, g, other or unknown
  misc_feature (601)..(601): "n" may be a, t, c, g, other or unknown
acaatgcaattatttattttacaaggagattctatacatcagggaggcatcttgaagtacaatacaccaggctttcatttcttctttacattatgattgtgagtttccatataagttggtacttacatggaaagggaacacaaaatccatttttatatacataaaaacaaaacacccaaagagacttgacccccaaaatgtcttgtttcacttgaaaataacatgaatgagacgaaagatgaaccagattacttggtgacgcacagaaggcgaacaagtagctcaggaaatcaaatcctgtttcaagcttggcacattaagggtaagaaaggtagtgaaagaagggttcgaaaatatcatctcaagccacaaaaaatctggcagaagacagcctccaaatcaataagatagaatggttagaagtcaagttagaagttattgngtggctaccttatatccagacctctaatagactgagtggaattgncacttctcttncctcagntattccaaatggtagtaaacttcaaggagcttgggcttgatgactcacacctgntntttnaaacttttggaggcgaaaatggcnaattccttgaanccc

SEQ ID NO: 5992 - DNA, 592 bp, Homo sapiens
  misc_feature (13)..(13): "n" may be a, t, c, g, other or unknown
  misc_feature (269)..(269): "n" may be a, t, c, g, other or unknown
  misc_feature (346)..(346): "n" may be a, t, c, g, other or unknown
  misc_feature (447)..(447): "n" may be a, t, c, g, other or unknown
  misc_feature (517)..(517): "n" may be a, t, c, g, other or unknown
  misc_feature (526)..(526): "n" may be a, t, c, g, other or unknown
aatgattgaacanaatttattggctgtctttgagtgtctttggtatggctttggcagggctgtctgggttcctccgctttgcttgtttttgggctgctgctgcagcctttaaggctcttcttcgcttcttcagcttttgagtctcctggaaaacccgaatgcacagagccttcttggtcacgaatcggcggtgggctcttcggtaatacagaggggggaaggtgtactcaattcccagcccccagcatatcttctcaaagacatcatanttggtgttacggaggtttttgagcatctttttcctctggtcaatgctcattagcagatagccgtttgtgggctttgncctttcgatgtttctccaagtgttcttcataactgcggatcttgacagacaaggcaataactgaaaccacaaaccacagaggatgatagttgggcacagangaaggaaggcccagcctggtttacgttttaagaactcaaggaataacatcaccaatgctctgtcaacttnttataaatnccaatcactctgaaattcaagaattcaaagcttatcttaaacattaccttcccttaaaagcaaaaa

SEQ ID NO: 5993 - DNA, 594 bp, Homo sapiens
  misc_feature (458)..(458): "n" may be a, t, c, g, other or unknown
  misc_feature (506)..(506): "n" may be a, t, c, g, other or unknown
  misc_feature (526)..(526): "n" may be a, t, c, g, other or unknown
  misc_feature (586)..(586): "n" may be a, t, c, g, other or unknown
  misc_feature (593)..(593): "n" may be a, t, c, g, other or unknown
cttattttaattgtttgaaatttttctagagccaaagcagctctttaaagaagttgtttcttccaaagaacaaagccaggttaatgacattcaattctaaatgatacattggaattgtgccttttctaccacactggattaaataaacttgtcaaaatatggttttgtcattttctgagacacttggtaatttgctgttctttctttcatgtgcccgttagtacatttggccgactgaccacctgtaacagggaggtctcatgtttgttagtagatacgcaggtaaggaaacttgaattcatcctctcctcggctcaggtctttgcttttcttttaatatatgcatataaaatagtaggcatttgattctgcaaaggcactagactacttgaattaaacattctgtccagagggataataccaggctttccttttcctcatctgtagtaaagtttcangtccttgacagaaatagctgggactattccaaatttgcttcaggcatnccaatggtgacaaagggaancgaagtcatgaaactctgttcctcctatttccatcaaggggggctctctactatctttangaaggang

SEQ ID NO: 5994 - DNA, 589 bp, Homo sapiens
  misc_feature (479)..(479): "n" may be a, t, c, g, other or unknown
  misc_feature (532)..(532): "n" may be a, t, c, g, other or unknown
  misc_feature (575)..(575): "n" may be a, t, c, g, other or unknown
  misc_feature (579)..(579): "n" may be a, t, c, g, other or unknown
gatctttttaaaaacaatttatttttttccaatgtaagaataacaagtttaatattgaaaatctgaaaaaggcaggaagataggaagaagaaaaatatcaaccatagtcctaccacctaaagaacactcactgacagtgtggccatgctcattctttaagccttaatttaggtcccatttctggtgtggtgccttccttgaacttcctcccccagatcttccatgtcatatctgtaccactcagttgtacatatcatacacttttgtgtataatgtgatgtatgtcttatgtttccaacgagattgttacatcttcgaaggctgcaaacatgagttgtacttgttagcttaccccaaaataatacctggtataccggacccaatatctgctgattgatctaacctaaatgaatacaaaccatttcagaaaaagatatacaatagaccacatatccaggtcatgaaaattaagctttcangtcacctacttagtgactattgctcttgaccctagactcttggaaggccattnaactggccttttttcacaccaaactggtaaaaggggactggtntganccggatttcc

SEQ ID NO: 5995 - DNA, 342 bp, Homo sapiens
  misc_feature (14)..(14): "n" may be a, t, c, g, other or unknown
  misc_feature (46)..(46): "n" may be a, t, c, g, other or unknown
  misc_feature (75)..(75): "n" may be a, t, c, g, other or unknown
  misc_feature (159)..(159): "n" may be a, t, c, g, other or unknown
  misc_feature (169)..(169): "n" may be a, t, c, g, other or unknown
  misc_feature (251)..(251): "n" may be a, t, c, g, other or unknown
  misc_feature (255)..(255): "n" may be a, t, c, g, other or unknown
  misc_feature (257)..(257): "n" may be a, t, c, g, other or unknown
  misc_feature (296)..(296): "n" may be a, t, c, g, other or unknown
  misc_feature (306)..(306): "n" may be a, t, c, g, other or unknown
  misc_feature (320)..(320): "n" may be a, t, c, g, other or unknown
  misc_feature (337)..(337): "n" may be a, t, c, g, other or unknown
ctgagatgtagttncactctgtcgcccaggctggagtgcagtggcncaatcttggctcactgccgcctccgtctnctgggttcaagtgcttctcctgctgagtagttgggattacagtcatgcaccaccacacctggcttatttttgtatttttagtanaaacagggtntcactatgttagccaggctggtcttaaactcctgacctcaaatgatatgcctgccttggactcccaaagtgctgggattacnggcntnaaccactatgaccagcccggacattaactcacaatggcngggttattgnccttcctctatgcnaacaattcccaccagcntcaca

SEQ ID NO: 5996 - DNA, 577 bp, Homo sapiens
  misc_feature (198)..(198): "n" may be a, t, c, g, other or unknown
  misc_feature (219)..(219): "n" may be a, t, c, g, other or unknown
  misc_feature (234)..(234): "n" may be a, t, c, g, other or unknown
  misc_feature (263)..(263): "n" may be a, t, c, g, other or unknown
  misc_feature (397)..(397): "n" may be a, t, c, g, other or unknown
  misc_feature (503)..(503): "n" may be a, t, c, g, other or unknown
  misc_feature (519)..(519): "n" may be a, t, c, g, other or unknown
  misc_feature (541)..(541): "n" may be a, t, c, g, other or unknown
  misc_feature (543)..(543): "n" may be a, t, c, g, other or unknown
  misc_feature (546)..(546): "n" may be a, t, c, g, other or unknown
  misc_feature (568)..(568): "n" may be a, t, c, g, other or unknown
  misc_feature (576)..(576): "n" may be a, t, c, g, other or unknown
cttctttaatatctagcaataactgaggttcacggtgttcatccacagctggaagtccagttattatttctagtaaaaccacaccaaagctgtaaatatcagatttgggtgttatttctccacgcaaagcttctggtgccatataagctgttgttcccacaattctgctagtcatgactgtctgggcaaacttctcanaagcccgtgcaaggccaaagncagatattttagcantaaaagcttcatccagtaagatatttgcncttttaatatctctatgaatatgatgattttcatgtagaaaattgatgccattagctgcaccctgagcaatcttgcatctcatgtgccaagaaagtggtggagtaccatccaagcaagagagtctgtctagcantgaaccgttaggcatgtaaacatatactaagcagaggtcatctccatcacttgagaaaccaagtagttctactaagttttcatgttgacactttgccattactttnattcttgatcaaactngctggttcaagtctttagtagnantgncaacccattggttgcaagcttnttactggnc

SEQ ID NO: 5997 - DNA, 599 bp, Homo sapiens
  misc_feature (523)..(523): "n" may be a, t, c, g, other or unknown
  misc_feature (542)..(542): "n" may be a, t, c, g, other or unknown
  misc_feature (571)..(572): "n" may be a, t, c, g, other or unknown
  misc_feature (575)..(575): "n" may be a, t, c, g, other or unknown
  misc_feature (581)..(581): "n" may be a, t, c, g, other or unknown
  misc_feature (595)..(595): "n" may be a, t, c, g, other or unknown
gagttatatatgtatatattccgtgttcgcttgtacaggaggatttacatggctgtataaagatggctaggggcgccgcgctcttctggggcgctcacggtgacaggctggggttaaaactggctgccccaggagaagcggaggcctggaattaaatacgtttcggcgcactggatttaaataagtttcctgaatatacaaaggtgggggccacgagtttgctgccagtcatcgaggaaacatttagctttccaaaaatatgctggtttcgataaatagattttagcctctctgctatagtttttttttcttttaattttagaaataagtttatatgtgtgatctgttttcaggtggtacagggagggaaggaagggcaaggcagtagctctcagctctgcactgtcctagtcaggtcctttgcggagggggcagcagggcccacgctgtcgtggagtttgcgcacatgtttctttaaagtcaaaatttcttgcaaaacccttttgccgcaagttggccggtnaaaatatagtgagccgttnaacacctttgccggacaaccttgcaagtnnaantttttnggcttggcattttncgga

SEQ ID NO: 5998 - DNA, 543 bp, Homo sapiens
  misc_feature (63)..(63): "n" may be a, t, c, g, other or unknown
  misc_feature (101)..(101): "n" may be a, t, c, g, other or unknown
  misc_feature (247)..(247): "n" may be a, t, c, g, other or unknown
  misc_feature (397)..(397): "n" may be a, t, c, g, other or unknown
  misc_feature (431)..(431): "n" may be a, t, c, g, other or unknown
  misc_feature (433)..(433): "n" may be a, t, c, g, other or unknown
  misc_feature (463)..(463): "n" may be a, t, c, g, other or unknown
  misc_feature (480)..(480): "n" may be a, t, c, g, other or unknown
  misc_feature (488)..(488): "n" may be a, t, c, g, other or unknown
  misc_feature (523)..(523): "n" may be a, t, c, g, other or unknown
  misc_feature (528)..(528): "n" may be a, t, c, g, other or unknown
  misc_feature (540)..(540): "n" may be a, t, c, g, other or unknown
  misc_feature (542)..(542): "n" may be a, t, c, g, other or unknown
ctttgacggagtcttgctttgtcgcccaggctggagtgcagggtcatgatcttagctcactgnaacttccgcctcccgggttcaagtgattctcctgcctnagcctcccaagtagctgggattacaggtgcccgccaccgcacctggctaatttttgtatttttagtagagaaagggtttcaccatcttggccaggttggtctcaaactcctgacctcgtgacccacccaccttggcctcccaaagngctggcaactgcttgattttaatgaacaaaatgtaagtctacatcaacttcctgggtcagttcactaagccattcattcgaggtccacatcatgcctctataaatcccttccttacctagggttatttctgagttggaaaaagcaaacanacccactgctctctcctcttgttccaagaagcananttaaaaagttgcactctgccttgaagcttnaatgttaaaggaaattnggtcttanaaggttattcctctttataacatcccattaagtgnccttngggggagttaantnc

SEQ ID NO: 5999 - DNA, 279 bp, Homo sapiens
  misc_feature (273)..(279): "n" may be a, t, c, g, other or unknown
ctgcagtttgaatttatattttattattttgaaatacaaaaatttaaaaacatttcaaaatacaccagtacatgtttgttgtaaaaatttcacctaggaggatataaaatagaaaagccgaatattccttctaactctcccctctacctcaattcccttcagaggtaacacagcaaaaaaaaaactggggaaaagcaaacaactttccagacctctactattctaaaacacaaagagcattacagcttgctatgcatttttttttttgggggnnnnnnn

SEQ ID NO: 6000 - DNA, 548 bp, Homo sapiens
  misc_feature (521)..(521): "n" may be a, t, c, g, other or unknown
  misc_feature (541)..(541): "n" may be a, t, c, g, other or unknown
ggagacgaagtctcgctttgtcacccaggctggagtgcagcggcatgatctcggctcactgtaacctccacctcctgggttcaagcaattctcctgcctcaacctcctgagtagctgggattacaggcatgcaccaccatgcccagatttttctgcattattattattattattatttgtttttagtagagacggggtttcaccatgttgtccaggctggtttcgaactcctgacttcaagtgatctgcctgtctcagcctcccaaagtgctgagattacaggcatgagccaccatgcctggccacaaacatttatttactattttgagtatatgtttaaagcatccaagcacattttatccaattttaaagatatattatccatgctttaaaacttttggaaaatattttaactcagagatgtctacattctctggatttttcatattaattcaatatgatgtacagtaaaggaatttaatggatcacctatattcattttcctgcttgggctttaaggnacaaagacatttcggagttnaaccggg

SEQ ID NO: 6001 - DNA, 536 bp, Homo sapiens
  misc_feature (453)..(453): "n" may be a, t, c, g, other or unknown
  misc_feature (536)..(536): "n" may be a, t, c, g, other or unknown
atttaccaatgtcatgtattctgaacaaaggcaaaaaatacaaattcctaccattaaactggcttggttgttgtttgggttggagtagctgtgggggcttggggaagggtgtcgtttctttctagtagtctcatgtcgctttaggtcagctgggctggcttacacgcgctgtgcggtcttcatggagatgggagctctgtgtgtcagcacaggaagtggtctcccagcgttcagcctgaagcagcccaagtcctgtaggtgcttgccgtctctgaagccccaggaacatcagtgcaagaaggaagagactgctggcaaagatgactcccaaggctgttctccgctctggtgggacaacctgggtgctggccccaaggggctcctccagagagatgtgtgtgacctgcaggtgtaagtggcacctgcagagccaggttctgcgtgaaagaagangagatctgaagtgcctgccacctttgcctgagctggaaaagagcccaaaacttggctggggatccaccacttcttttggtccn

SEQ ID NO: 6002 - DNA, 552 bp, Homo sapiens
  misc_feature (541)..(541): "n" may be a, t, c, g, other or unknown
  misc_feature (552)..(552): "n" may be a, t, c, g, other or unknown
cagttcattgcaatttatttaatttaaaaataaaaacagaaacaaaaaccaaaatgaaacaaaaatcagtttccaacgaaaatacaaacactttgggtggttatccagcttgtctttcccctgtaggctgttctgggctcaaaccaatcaaatgagtgaaaaccaattttgacaggagccataaagcatgttgcaccaattaaattacaccaatatattattataatacctttgaaatgcctttcagaccaataaataaaaaagacaaattcaaataaaaaagtcaactttttattaccaaaaaaaatagaaattaaataaaagtcacaatgtggatttttttttttttttaatgtgcagtcaagtttctctctttttttcttctaggaatgataccatgccagtaaatccctacagaacatttccagtttggcaacaagcagtcagtcgatcattcacatttgtactcaagacagcaggcctgggcaaaactcgcctgaatttcaccctgaaaagtgctccccatcatctgaagaaacancacctggtaan

SEQ ID NO: 6003 - DNA, 554 bp, Homo sapiens
  misc_feature (478)..(478): "n" may be a, t, c, g, other or unknown
  misc_feature (492)..(492): "n" may be a, t, c, g, other or unknown
  misc_feature (538)..(538): "n" may be a, t, c, g, other or unknown
aaaggtatttggctctcttgcccttctgccttctgccatgtgaggacacagtattcctccccaccatgaggggagccatcttggaagcagagagtggccttcacaggcaacctctctgatcttggacttgccagcctccagaactgtgagaaataaatttctgttctttacaaattatgtatttcagatattttgttatagccacacagacaaattaagacaagcaatttcttgtgccaagcattgaactaggatttggcactgaataagcaaaatccttgctatgacaaagccatcagtctagttggagaaacaaaagacaactgaagtaatcgaataagcattacatgttgtgtgataacaaggactattgaaaaaaatatggcagggtaagagattatagcatttgggagtgttgatgggggtatgttctgagtgtaacagagaatcacagagaggtctaaatcaacctgggganggaatgaagacttntgagaagagaaaacacttgagcataagtgggatagtccaaataatntaaggatggggagata

SEQ ID NO: 6004 - DNA, 546 bp, Homo sapiens
  misc_feature (496)..(496): "n" may be a, t, c, g, other or unknown
  misc_feature (509)..(509): "n" may be a, t, c, g, other or unknown
  misc_feature (515)..(515): "n" may be a, t, c, g, other or unknown
  misc_feature (518)..(518): "n" may be a, t, c, g, other or unknown
attagaaagtttattgcattaatctataaactcatttggtgatataaatgacaatgtaggctaagaacgatgaaagtttatcatctttggaaaatagagatatttcaacactgaaagcattttttgtttgtttgccacaaccaagtaaaccctaatgtattttgatttttctttttaaaaatatagattgcaattcggtcatatcaaaatgaagcctagaccaaatactgaactagcataagcagacccagtgttaggacatcaatattaacaggactctaaacgggcagtttgctgtacatctttagttaataaacaagcaaacatccataccacgtaattcacacttgcatatgcatgtacactttcatgatgtgaagcctttaagaccaaaatctctcttaaacattcagcttgaataataaagacatgttgcctagagatagaaaattcattattttaaaaaatataaccttaaaacttgaatttttatgantttattttaagcntaaagnggnctactaatattggccccatttttaaggg

SEQ ID NO: 6005 - DNA, 544 bp, Homo sapiens
  misc_feature (492)..(492): "n" may be a, t, c, g, other or unknown
  misc_feature (542)..(542): "n" may be a, t, c, g, other or unknown
aacaatatttgtaccgtttttatttgtaaaaataaccatctgaatgcatttccatagtatattacagttaagtacttcattacgttattagagcattcagtagttgcaaaagtattaaactgtgcttgagaagattcagattgtttcaaagtcattcactgaactaaaagtcattttccccatttttacagtcatgacatttaccagagtcattcaactccaatttacataagaaaacattatagacaaaatcccactgaaatcatcaaacaatattttatgctgttacaaatatgttatgcaaaatataacactggcaccagatttgtatcatcgtgctttacaaagatatattgcacatgctagagcataaaatatgtagacaaaactaccaaataaaagatatttgcattgaatttttagatcacataagaaacgcatagaattacattttatacaacactcagattggcctatcttaaaatgcttttnccctataatactggcctaagggttaaaggttcgtaaggacgaagcctttntc

SEQ ID NO: 6006 - DNA, 545 bp, Homo sapiens
  misc_feature (509)..(509): "n" may be a, t, c, g, other or unknown
  misc_feature (531)..(531): "n" may be a, t, c, g, other or unknown
  misc_feature (541)..(542): "n" may be a, t, c, g, other or unknown
gcaagaaattattgtctctctatctcatatatagttcactctttgcagtacaaagtgttaaaatgtcaaacaaaaataaatatcaatgttacagtagctagaatattcaataaaatagatccctgccattcttgattgaaatgttcagtgagacttaatttcatttggatattattttccagagatttgcgaagtctcatgttcctgttattgcagctcatttctagggggtggtaaagatggggtagtctctcttcccagacaaaatgctgggagagagtgggatgagtctgggggtggggtggatctgaaatgccagtatagtcacgagatcttcaggatgtgtattccttcattaccaggtagcagagctgtagtgtttattggtcctaactgtggcatcagaacactccccatctgaagagtcacagtccgattcttcaaactgcatggggttctcatagccacgttccttcacacacagcttgcccagagacatctgagtcttnacaccgggcaccggacacttcntggcaaaaannccc

SEQ ID NO: 6007 - DNA, 537 bp, Homo sapiens
  misc_feature (113)..(113): "n" may be a, t, c, g, other or unknown
  misc_feature (432)..(432): "n" may be a, t, c, g, other or unknown
  misc_feature (466)..(466): "n" may be a, t, c, g, other or unknown
  misc_feature (503)..(503): "n" may be a, t, c, g, other or unknown
  misc_feature (519)..(519): "n" may be a, t, c, g, other or unknown
gactggtgccaaatgttcacagcagctttattggtaacaacaacaacaacaacaacaacaaaactagaaacaacccaaatatccatctacaggcaaatggataaacagtctgnggtatatacatacaatggaatactgttgagcaataaaaaggcataaactattgaaacatgcaaaaaatggataaatctcaagataattatgttgatggaaagaatccagaccaaaaaaagagtacatattatatggctccatttatataaaattctagaaaatgcaaactaatctacagagacagaaagaagatcagcagttccttagaacggagaatgtaggtaggggcacaagagagggattgcaacgtgatttctccaaggggtgatggatgtttattatcttgatagtggtgatggtttctcgagtacacatgtncataaaaacttataatattggatacattaagtgngtagtttactggatgtaaattcccatcaacaaaggtnttaaaaatggaaaatnaaacaaatcagaagctgt

SEQ ID NO: 6008 - DNA, 546 bp, Homo sapiens
  misc_feature (465)..(465): "n" may be a, t, c, g, other or unknown
  misc_feature (470)..(470): "n" may be a, t, c, g, other or unknown
  misc_feature (489)..(489): "n" may be a, t, c, g, other or unknown
  misc_feature (493)..(493): "n" may be a, t, c, g, other or unknown
  misc_feature (507)..(507): "n" may be a, t, c, g, other or unknown
  misc_feature (509)..(509): "n" may be a, t, c, g, other or unknown
  misc_feature (535)..(535): "n" may be a, t, c, g, other or unknown
aattcagttccaggaaccctcccacaagggtgtttaaaaattccctgtgcccagagtaacctaccgctctactgggaagagcacactgaaatgtaaaacacaggagccagacctttccagggaatggaggcaacaccaaggaaggccttggaagaggtgttggctgtctcagcagccacgccctccgcttccttcgagccagagcctctgtttcatttggctcttttgcccttgcctcatgtgactcagtggctgctgtggtctgaatgtttgtcttccctccaaaattcctatgttgaaatccttaccttcaaggtgttggtattaggaggtggggctttggggaggtaattaggtcatgaggatggaaccatcaggaatgggattagtgccctctaaggcactaagaaaaggctggtgggctagactcagtgactcatgcctgtaagcccaacactttgggangcttnagtggaaggatcatttgangctnggagtttgagaccnanctggacaccttaaaaggaccctaatnttttccaaaaa

SEQ ID NO: 6009 - DNA, 500 bp, Homo sapiens
  misc_feature (166)..(166): "n" may be a, t, c, g, other or unknown
  misc_feature (172)..(172): "n" may be a, t, c, g, other or unknown
  misc_feature (198)..(198): "n" may be a, t, c, g, other or unknown
  misc_feature (318)..(318): "n" may be a, t, c, g, other or unknown
  misc_feature (336)..(336): "n" may be a, t, c, g, other or unknown
  misc_feature (366)..(366): "n" may be a, t, c, g, other or unknown
  misc_feature (389)..(389): "n" may be a, t, c, g, other or unknown
  misc_feature (421)..(421): "n" may be a, t, c, g, other or unknown
  misc_feature (430)..(430): "n" may be a, t, c, g, other or unknown
  misc_feature (452)..(452): "n" may be a, t, c, g, other or unknown
  misc_feature (468)..(468): "n" may be a, t, c, g, other or unknown
  misc_feature (474)..(474): "n" may be a, t, c, g, other or unknown
  misc_feature (487)..(487): "n" may be a, t, c, g, other or unknown
  misc_feature (494)..(494): "n" may be a, t, c, g, other or unknown
gagacggagtctcgctctgttgcccaggctggagtgcagtggcatgatctcggctcactgcaagctccgcctcccgggctcacgccattctcctgcctcagcctcccgagtagctgggactacaggtgaccgccaccacacctggctaattgtttttttgtatttntagtanagacggggtttcaccgtgttaaccangatggtctcaatctcctgaacttgtgatccacctgcctcggcctcccgaagtgctgggattacagcctgatttttctaaaattgaacccaagagttagaacaaaacaggatggaatctanaaggcagactgcgactgntctaagaaatctcgtgtagaagcagggatnacaggcatgtgccagtctccctnaaaactgggcccacttgagggaaactcatttntcagcatgnggggctttattaattaaccttnttggaaactgactggnccagangagacacaccctntgaaacnggagca

SEQ ID NO: 6010 - DNA, 312 bp, Homo sapiens
  misc_feature (217)..(217): "n" may be a, t, c, g, other or unknown
  misc_feature (220)..(220): "n" may be a, t, c, g, other or unknown
  misc_feature (260)..(260): "n" may be a, t, c, g, other or unknown
  misc_feature (276)..(276): "n" may be a, t, c, g, other or unknown
  misc_feature (279)..(279): "n" may be a, t, c, g, other or unknown
  misc_feature (286)..(286): "n" may be a, t, c, g, other or unknown
  misc_feature (310)..(310): "n" may be a, t, c, g, other or unknown
attttcaaaaacaactttattcatgacacatattaaaaaaaaattcccacccctggaaatgagctaaaaaaataaacaaaatccacctcccacctccctgttcccacttcctcccattccctccaaataaaagggaaaaaaggcaaaggaaaaaaaaaaaacaaaaaaacaaaacaactgaaaaacaaaaacacccctaaaccccccaaaacaaggnagngcatttccccagggggaaggggaatttacactggagccgntgggagcggaacgganatnttccggntacagaaacctgcaaagaaagacnct

SEQ ID NO: 6011 - DNA, 531 bp, Homo sapiens
  misc_feature (167)..(167): "n" may be a, t, c, g, other or unknown
  misc_feature (169)..(169): "n" may be a, t, c, g, other or unknown
  misc_feature (256)..(256): "n" may be a, t, c, g, other or unknown
  misc_feature (309)..(309): "n" may be a, t, c, g, other or unknown
  misc_feature (346)..(346): "n" may be a, t, c, g, other or unknown
  misc_feature (489)..(489): "n" may be a, t, c, g, other or unknown
  misc_feature (491)..(491): "n" may be a, t, c, g, other or unknown
  misc_feature (495)..(495): "n" may be a, t, c, g, other or unknown
  misc_feature (499)..(499): "n" may be a, t, c, g, other or unknown
  misc_feature (513)..(513): "n" may be a, t, c, g, other or unknown
  misc_feature (521)..(521): "n" may be a, t, c, g, other or unknown
  misc_feature (530)..(530): "n" may be a, t, c, g, other or unknown
gagacagggtcttgctctgtcacccagatagagtgcagtggtgggatcacggctcactgtagcctccacctcccaggctcaagtgatcctttcacttcagcctccctagtagctgggaccacaggcatgtgccaccatgcctggctatttttttttttttttggtananacagagtctcactatgtcactatgttgcccaggctggcctccaacccctggggctcaagcaatcctcccacctcagtctcccaaagngttgggattacaggtgtgagccaacatgcctggcctgtttctgtctttactgnccacatagccataccttcatcatcatatacagaaagnggcaaatcataattaacgggagagtaataagtattttggggaaaaacagggaatagagaacctggaacattatcttccaacagagaatatccacatgaaaattaaaggaaatatagctatatgcatgagttctatcttcttanancttntagnatccctaacattancttcctgnttggtggtna

SEQ ID NO: 6012 - DNA, 555 bp, Homo sapiens
  misc_feature (430)..(430): "n" may be a, t, c, g, other or unknown
  misc_feature (496)..(496): "n" may be a, t, c, g, other or unknown
  misc_feature (501)..(501): "n" may be a, t, c, g, other or unknown
  misc_feature (506)..(506): "n" may be a, t, c, g, other or unknown
  misc_feature (511)..(511): "n" may be a, t, c, g, other or unknown
  misc_feature (527)..(527): "n" may be a, t, c, g, other or unknown
  misc_feature (544)..(544): "n" may be a, t, c, g, other or unknown
cttagaaagtgagaatttgtaatttctttattaaacattacattcagtgtaaaggctttaaccatcataatcaccatgatataatatgtgagtatgtatatgtaaaaaaatacccattgaacataaaattatgttttgaaatctatgcaacatgaaatatagtttgatataaaaaacccaactaatcagaaacatgaaaaccagtatgttttaataaaagcctgttgctggttctggaataactgtggcatgcatgttcctagtcatgttggacttctccttcagctttgattggagtagtgtgtgttccacaatgccaattctaatgtccatctctacagtttcttgcttcagttttgttaagctctgtttaatcttcaccaaaggagcaccatcagtcatgctgctgcccttttcttccatttcttgntttaccttttctaattcttccataacctcagagaggagtctggttctttccgcactcctccatttncctgnttggnatcgntcctttgcctacttancttggcttgactgcccnaattcttgacc

SEQ ID NO: 6013 - DNA, 555 bp, Homo sapiens
  misc_feature (470)..(470): "n" may be a, t, c, g, other or unknown
  misc_feature (551)..(551): "n" may be a, t, c, g, other or unknown
  misc_feature (555)..(555): "n" may be a, t, c, g, other or unknown
gagatgaagtctccctgtgttgcccaggctggagtgcagtggcccaatctcagctctctgcaacctccgcctcctgggttcaagccattctcctgcctcagcctcctgagtagctgggattacaggtgcctgacaccacgcccgtctgatttttgtatttttcgtagagacagggtctcacaatgttggccaggctggtcttgaactcctgacctcaggtcatccacccgcctcggcctcccaaagtgctgggattacaggcgtgagccaccgcgcctggccttgcatgccatttaaactctctcaatctcacaccctgtcccagtctcacactttctgtgtctcacggtggcatgcaattacccaatacaacctgtcaagtacacactgttttatagtatttcatagtaacacccagtcgcctgtccagcgacaaccatggaaggtcacatacattctctacaagtctnctggtgtcacacgcatctgacacattcccttcatacacaagtctgtccctgtacacaaacgcacgcaaccatttctggggnaaan

SEQ ID NO: 6014 - DNA, 543 bp, Homo sapiens
  misc_feature (460)..(460): "n" may be a, t, c, g, other or unknown
  misc_feature (475)..(475): "n" may be a, t, c, g, other or unknown
  misc_feature (518)..(518): "n" may be a, t, c, g, other or unknown
  misc_feature (524)..(524): "n" may be a, t, c, g, other or unknown
  misc_feature (526)..(526): "n" may be a, t, c, g, other or unknown
  misc_feature (533)..(533): "n" may be a, t, c, g, other or unknown
  misc_feature (543)..(543): "n" may be a, t, c, g, other or unknown
gagacagcgtctcaccttgtcatctaggctggagtgcagtggctccatcatagcctcctgcagccttgatgactgtgctagagccaccctctcactttagcctcctgagtagctgggactacaggtgcttcccactgtgcctggccaattaacaatttcatttttatttttagtagagatgagatctcactatgttgcccaggctggtcctgaactcctgagctcaagagatcctcccaccttggcctcccaaagtactgggattacaaacaagagccactgtgcctgaccaggctctaagattgctaatctggctatagaaggactaatgttggccacctcagagacattcattcattttaagaaacatcatctttcactgaatataatatgacattttttagaaggcacagcatatatgtaccataaagagccatctcaactctgacataaactttgntatcatacagcatgnttattttatgcgaatgaaagaactcttttagatggtttagacnccaatntntcatatnaccccctggn

SEQ ID NO: 6015 - DNA, 530 bp, Homo sapiens
  misc_feature (477)..(477): "n" may be a, t, c, g, other or unknown
  misc_feature (496)..(496): "n" may be a, t, c, g, other or unknown
  misc_feature (505)..(505): "n" may be a, t, c, g, other or unknown
  misc_feature (517)..(517): "n" may be a, t, c, g, other or unknown
  misc_feature (524)..(524): "n" may be a, t, c, g, other or unknown
  misc_feature (529)..(530): "n" may be a, t, c, g, other or unknown
gagacggagttttgctcttattgcccaggctggagtgcaatggcacaatctcagctcactgcaatctccatctcccgggttcaagcgattctcctgcctcagcctcccaagtagctgggattacaggcatgtgccaccacgcctgactaattttttgtatctttagtagaaacggggtttcaccatgttggccagtctggtctcgaactcctgacctcataatccgcccgcctcggcctcccaaagtgctgggattacaggtgtgagccaccacgcctggcccctgattttaagcaatacccagcttacttggattttggggtgaagtcagtgctgagtctcccaactctgttggcactccaggggtgggacagacactgtccctgggtgcagaggccctggaggcagcactgccctttcccccaaaggccaggctctgaccttgagagtggtgggagtgggtgatccttctggganggtggacttccaagaacgntggctgttngggaaccttgantgggaanaccann

SEQ ID NO: 6016 - DNA, 560 bp, Homo sapiens
  misc_feature (456)..(456): "n" may be a, t, c, g, other or unknown
  misc_feature (528)..(529): "n" may be a, t, c, g, other or unknown
  misc_feature (551)..(551): "n" may be a, t, c, g, other or unknown
  misc_feature (555)..(556): "n" may be a, t, c, g, other or unknown
  misc_feature (559)..(559): "n" may be a, t, c, g, other or unknown
agcgtcaagcacagcaaccttttattaactgttttcagacacagataagaaacattgcatatattgcataactgagcactctcaacgagttgaaattacacccgtttcactgatggagaaactgctcacagagaggcagttttaaaccaagatttaatctctacattctaaagagaaaatcaaatttaccatcaagcattacaaatgagtataatgagtttcttccatgaactccgcagaaacacaagcaattgcattgcaatctgacattccactcacccctgcttttccgatattgttgaaggcaaaaacatcctttgtcctggaagttcaccattcaattttagccatctgcagctacttaaatttaaaataattaaaatctaaaaataaaaattcagttcttcaatttcactacccatattcaagtgctcaacagtcacatatgactaatgnctattggattggtcagcttggctatagggatatcttcatcatttccaaaaggtttaatggacaagcattggnnaaaaatcctttgccccaaattnttgnnggnt

SEQ ID NO: 6017 - DNA, 557 bp, Homo sapiens
  misc_feature (483)..(483): "n" may be a, t, c, g, other or unknown
  misc_feature (510)..(510): "n" may be a, t, c, g, other or unknown
  misc_feature (516)..(516): "n" may be a, t, c, g, other or unknown
  misc_feature (529)..(529): "n" may be a, t, c, g, other or unknown
  misc_feature (535)..(535): "n" may be a, t, c, g, other or unknown
  misc_feature (543)..(543): "n" may be a, t, c, g, other or unknown
  misc_feature (552)..(552): "n" may be a, t, c, g, other or unknown
ggtctactgaagaaatcctactttgtgatatcctcatgttaatatcagcatactctttctgagcaaataactctagtgcaaagcacagtacctggaagtatcagaattaaccagtaatgccaataatgcataagaattgttaatgagtaaataaaagctgattatactatatttattttttagtcagaatctctcacatcaaggatcacaatccacttccaagcaatgggtaaaagggtgacagttatcttctgaagattcagatgctttaacttttgggggaaaagtattaccccatatgcttcttataaagggctaaaatgtaaaaacgcatatacagaacttaacccttaactagaaagaaattattattaatggagtgtcattcctaaaaattacacaatacatccacactaaaggctgagaataataattctgaaggttttaacgactattctcttattctgagactcttttttgggnttttagtggagacagggtttcacccgngttggncagctgggtttgnaccccncacctcanggggaaccnccccc

SEQ ID NO: 6018 - DNA, 541 bp, Homo sapiens
  misc_feature (508)..(508): "n" may be a, t, c, g, other or unknown
  misc_feature (513)..(513): "n" may be a, t, c, g, other or unknown
  misc_feature (517)..(517): "n" may be a, t, c, g, other or unknown
  misc_feature (523)..(523): "n" may be a, t, c, g, other or unknown
ggtagagacagagtttcaccatgttggccaggttggtctcaaactcctgacctcaagtgatctggctgccttggcctcccaaagtactgggattacaggcatgagccaccatgcccagccaaggagtcagaattcttaaatggcttactcagttgtatatatagttgagggcagaaataaatttattaatgaaatctatgacaaaaacaaaccaatatccagaagactatgggccaccaccacacattagtcctacttacagggactggtcttcaaacattatacaatagctttcttcaaaatcaaataaaagatttgtaggcaaaaacataccaggtattctgaaataatatatgtaatgcctacttcactatgggatatgtgagtccatcaataactgtcagtttcctccctagtttatccatatatcccctaaatgcatgcccctgttatgtcaaaacaattttttgagttgccaaaattttttacatgccaaatttcccaaacngggcntttnttaaanattgccttggggggaaaa

SEQ ID NO: 6019 - DNA, 530 bp, Homo sapiens
  misc_feature (508)..(509): "n" may be a, t, c, g, other or unknown
  misc_feature (511)..(511): "n" may be a, t, c, g, other or unknown
  misc_feature (518)..(519): "n" may be a, t, c, g, other or unknown
  misc_feature (523)..(523): "n" may be a, t, c, g, other or unknown
  misc_feature (527)..(527): "n" may be a, t, c, g, other or unknown
acattcatatgaagtctttttattgatcttcctttgcaatttcacaagaataaagttgagataacttacaaaaacaagcaggattgcaatcaaattgctcaatattaaggggccacgtctagcatctggacttgcttcattagttctgggatgataacttggtgtcaataaaaggtgtagagtggaagagtgtggctattgatctgtgggtctttaaaaattaatgttcctattacacagggtctggggttgagtgaggacaaaaggagggaaaaggaagagctaagggatgatgagaaactcatattagcttcttagaattaatttgtttttcaggcaatccagaccttctttgcaatcatgagtattttaactcatgagtatttaattccttaaaaatacaaactccccaaaacccaggtcagctctaaacctagggatgagcatttacttggggacagcatgcccattttggtaagcacagaagcttttcaccctggttttccanntnctggtcnnaaancccngcc

SEQ ID NO: 6020 - DNA, 507 bp, Homo sapiens
  misc_feature (1)..(507): "n" may be a, t, c, g, other or unknown
nnnnnnnnnnnnnnnnnnnnnnnnnnnnnnnnnnnnnnnnnnnnnnnnnnnnnnnnnnnnnnnnnnnnnnnnnnnnnnnnnnnnnnnnnnnnnnnnnnnnnnnnnnnnnnnnnnnnnnnnnnnnnnnnnnnnnnnnnnnnnnnnnnnnnnnnnnnnnnnnnnnnnnnnnnnnnnnnnnnnnnnnnnnnnnnnnnnnnnnnnnnnnnnnnnnnnnnnnnnnnnnnnnnnnnnnnnnnnnnnnnnnnnnnnnnnnnnnnnnnnnnnnnnnnnnnnnnnnnnnnnnnnnnnnnnnnnnnnnnnnnnnnnnnnnnnnnnnnnnnnnnnnnnnnnnnnnnnnnnnnnnnnnnnnnnnnnnnnnnnnnnnnnnnnnnnnnnnnnnnnnnnnnnnnnnnnnnnnnnnnnnnnnnnnnnnnnnnnnnnnnnnnnnnnnnnnnnnnnnnnnnnnnnnnnnnnnnnnnnnnnnnnnnnnnnnnnnnnnnnnnnnnnnnnnnnnnnnnnnnnnnnnnn

SEQ ID NO: 6021 - DNA, 546 bp, Homo sapiens
  misc_feature (481)..(481): "n" may be a, t, c, g, other or unknown
  misc_feature (538)..(538): "n" may be a, t, c, g, other or unknown
  misc_feature (546)..(546): "n" may be a, t, c, g, other or unknown
agagaattgatgcatttgagaaaagatgaagcagatagatatataattgttcacagtggtaaattataggtggttttctcatattttatgtcagtttcttgtatatcaaaaaatacattcatattatgagacacaggaatctttacatccaaaataatttgatacagatgccttaacattgctgaatgagacaactttggaaagattcttgttttgtgattcctttttaccctctaagcacagtgctttgttaacactgtgtgtgtagtaaatgtgtgtgctgcttaaggtaaagaatttctagtaaactaaatgcccaaggtgactgcgtgattccatgccagacaggaaaaagcagtcatgctttttgcccctagctgaacgtttgttttccccacaaactatgtattcatccacagaatagtgaaatatgctagatcctagtacaagacaagaattcaatctaaaaaatctctagatngataattaaaatattgctaggtttggtattcacaaaactggagatcctgatggatantttcctcn

SEQ ID NO: 6022 - DNA, 548 bp, Homo sapiens
  misc_feature (490)..(490): "n" may be a, t, c, g, other or unknown
  misc_feature (496)..(496): "n" may be a, t, c, g, other or unknown
  misc_feature (498)..(498): "n" may be a, t, c, g, other or unknown
  misc_feature (524)..(524): "n" may be a, t, c, g, other or unknown
  misc_feature (526)..(526): "n" may be a, t, c, g, other or unknown
  misc_feature (548)..(548): "n" may be a, t, c, g, other or unknown
gaatttaagactttactttattcagcaaaatcatttatttacacaatggggaatgctggtttgattttgtcaatgaaataaaaacaaaatgaacagagacaatactgaactgtatatatactttgtatcagagttgaccaactgtttccttacctgtatcaggaacatcaagagcgacagtatcacaaggacactggtttaacaatacaccacataggtccagtaataccctgggaatttcccaatgcaatcaccaactttttctttttttataaatatataaaaaaacaaaaagtcagcaaaaccagcattatgatgtagcaagcagagtataactctgaagtcagtggggtcagtaaaagccttatcagaccatccatagttttacaatgtgatctgctcttcctcagaccactaatatagaatccaaacaggtgaaaaatcgtcactccttagaatacaacaatgatctgataaggatttgacttantggaangnaaaaaaaaaaaaaaaggggattgccnancctaaccctttttaacaacttn

SEQ ID NO: 6023 - DNA, 543 bp, Homo sapiens
  misc_feature (411)..(411): "n" may be a, t, c, g, other or unknown
  misc_feature (542)..(542): "n" may be a, t, c, g, other or unknown
gaaattttttagttgaccataatcatcatttatgccagacggatttctggaagtagagtttttaatcaccagtgatctaaattcagtcaataacagcttttttggaagcatctcactatcatcctgaagtttgccattgttagatatttctttagctgaccatagtgagtcttccttgagttcacgtttcttcccaatttcattttcttgagatattttgctactttctggtactgcttcatcactgaaagtgtcatttgtttctatatccatccttggcctttttctaacattgacatcttcctcctgtttttgaactttcacatcaatttctaactctggttttgtgtccttgaataactgttccaatacttcatcttctatggccacatcatccatttcccttttttnatttgatcttagcttttctgcagcatgagatttactggcagaatttttcacaatagattttaaatctggatctggaaataagttattggctgagtttgggtcccaggctcattctcagatagaagctgctnc

SEQ ID NO: 6024 - DNA, 599 bp, Homo sapiens
  misc_feature (582)..(582): "n" may be a, t, c, g, other or unknown
  misc_feature (595)..(595): "n" may be a, t, c, g, other or unknown
  misc_feature (598)..(598): "n" may be a, t, c, g, other or unknown
acatttccaaaatgtttttcttgtttgttttgttgttttcatcttgactagcaccatctgtacacaagaaagtatgaacataaatgtttggataataataaagattcgcaaggcacttaatcagtcattctgggttgttttgtgttcgctttccacagcaatcctacatccacgcccctcctttctcacgaaagcaagagaagagtgaggtctcttttgctagcagttcttatgtacaaacaaggtctttaaggttcctcaaagtgctttttcagtctcacagggcttggacacccctcgggcttcccatccttttctccttccacggtgtttgacgtttgcacctttcctacagaaaacaaaagaaaactcgccttccgctcaacgcccgctccagacttgccaccaaccttcatcctcattcattgtctttgatgccccagcacagagggcctaggggcgtgcaacatctctgaagtcctggggagcggggggaccactaggacaaagggtctggctcatctaccggcgcctggaggtgaaggtcgaagcaggtgatcatcatgaaaatgggccttgcanaagttgaccccgnttnt

SEQ ID NO: 6025 - DNA, 585 bp, Homo sapiens
  misc_feature (105)..(105): "n" may be a, t, c, g, other or unknown
  misc_feature (153)..(153): "n" may be a, t, c, g, other or unknown
  misc_feature (173)..(173): "n" may be a, t, c, g, other or unknown
  misc_feature (454)..(454): "n" may be a, t, c, g, other or unknown
  misc_feature (521)..(521): "n" may be a, t, c, g, other or unknown
  misc_feature (537)..(537): "n" may be a, t, c, g, other or unknown
  misc_feature (552)..(552): "n" may be a, t, c, g, other or unknown
  misc_feature (573)..(573): "n" may be a, t, c, g, other or unknown
  misc_feature (580)..(580): "n" may be a, t, c, g, other or unknown
  misc_feature (583)..(583): "n" may be a, t, c, g, other or unknown
ctctcttggatgtatcaaaatctcattgaggcattctaaaccaaagaaacctctgaatttgaaacagggttagtagggacttttatacccagctgggcatcccanaagcctggactctcaggactgtggctagattttgcccatgatctgtanattatgctcttgcaccgganacttgaaagttatgagtttgcattcaaacaaagaaccaccagataaaacagatgttctctaaaactgaggaagaaaagtttagagatatgcactgtatagagaaagaaagctttttgctggattgttctccttgttaaggaaatgtttaaaactagtactcccgggcacctgtgattgcattttataggattctatttagtaatatgatgtctattttacattcagccccaacctacgtcactgaaatagaataggaaatagcagccactatctgagagtncccagttctaaggaaagtttgggcctcctcaagaagtccctatttccatagcctcaatcatgaatanggcttggttttggganatggaactattaacngcaggaatgcctatacttcanagccttntantt

SEQ ID NO: 6026 - DNA, 534 bp, Homo sapiens
  misc_feature (445)..(445): "n" may be a, t, c, g, other or unknown
  misc_feature (458)..(458): "n" may be a, t, c, g, other or unknown
  misc_feature (462)..(462): "n" may be a, t, c, g, other or unknown
  misc_feature (487)..(487): "n" may be a, t, c, g, other or unknown
  misc_feature (506)..(507): "n" may be a, t, c, g, other or unknown
  misc_feature (515)..(515): "n" may be a, t, c, g, other or unknown
gagacgaagttttgcccttgttgcccaggctggagtgcaatggcacaatctcggctctccgcaaccttcgcctcctaggttcaagcgattctcctgcctcagcctcctgagtagctggggttacaggcatgcgccaccacacctggctaattttgtatttttagtagagacggggtttctccatgttggtcaggctggtctggaactcccgacctcaggtgatccgcctgcctcagcctcccaaagtgctgggattataggtgtgagccaccatgccctgcctaatcttggattttttttttttttttttttgagacagagtcttgctctgtcacccaggctggagtgctgtggctggatctcagctcactgcaagctccgcctcccaggttcacaccattctcctgcctcagcctcccgagtagctgggactacaggcacccgncaccacgcccggntaantttttggatttttaagtggaaacanggttttaccgggttaaccnngaagggcntgaactcctggactatgaa

SEQ ID NO: 6027 - DNA, 555 bp, Homo sapiens
  misc_feature (413)..(413): "n" may be a, t, c, g, other or unknown
  misc_feature (493)..(493): "n" may be a, t, c, g, other or unknown
  misc_feature (498)..(498): "n" may be a, t, c, g, other or unknown
  misc_feature (504)..(504): "n" may be a, t, c, g, other or unknown
  misc_feature (520)..(520): "n" may be a, t, c, g, other or unknown
  misc_feature (531)..(531): "n" may be a, t, c, g, other or unknown
  misc_feature (535)..(535): "n" may be a, t, c, g, other or unknown
  misc_feature (554)..(554): "n" may be a, t, c, g, other or unknown
gtactcatcagaatgggatactccacaactgtctcaccaactcagtgccagtacacatgctctagaggacttctggactcgcagctacaactgtacaagtgcacacaagtgaatctaccctgttatcctccacccactgattgaggatcgaattgcacatttctcttaaccatgacaggagaaagcaaacagtgaaacagaatcatgggtgatctttctcactttccctcttgttttcattggtttgtccataccattctaattaacatgaaagggctctgcatatagagagattgtctcactgacttcctggatcaccgaaaaccatcagggttgaaatttcatttgagtctttcctgacgcccagcaaatattccccctcggattattttacaccttgagggcattttggncttcagttcaacactcttgctctggtcccaaatggggcgctatttaagggaatttaaagagaaagctgagaagaataacntttanccgagntctcttggcatttaanctcttgaaaancccnggattaaactattcatgcng

SEQ ID NO: 6028 - DNA, 584 bp, Homo sapiens
  misc_feature (468)..(468): "n" may be a, t, c, g, other or unknown
  misc_feature (477)..(477): "n" may be a, t, c, g, other or unknown
  misc_feature (507)..(507): "n" may be a, t, c, g, other or unknown
  misc_feature (548)..(548): "n" may be a, t, c, g, other or unknown
  misc_feature (558)..(558): "n" may be a, t, c, g, other or unknown
  misc_feature (579)..(579): "n" may be a, t, c, g, other or unknown
gttagaggaagggtctcgcccagctgatttcaaactcctgggttcaagcaatcctcccacctcagcctccctaagagctggcattacaggcgtgagccactgctcccggccttgttttatgcatttttccatatgtaggtaatagctcataataaaaggtttttttgaaaatacacaaaaaaactaccattacactcccaccagactggaaacaatttaaaagtccaaccaagtttaatcaagtgttgtgcaaaaagtagaacaaatggaagtctcacacatccctgatgggagggcaatgcattacgccactttgaaaaccagacaatatatgataaaattgaaggggagcacaccctactcagcaattcctttcctaactatatgctgtcaagaactcttgcacacgcacacatgtatattcccaggcatcttctaaagaaaatggtgggtatttgtgaaggttanggttactangaaaagtcgggccccgtggcttacgcctgnaatccagcttttttggaagcaaagccggaagatggtttgancccagaattnaaaactggctgaaccatttangggga

SEQ ID NO: 6029 - DNA, 536 bp, Homo sapiens
  misc_feature (53)..(53): "n" may be a, t, c, g, other or unknown
  misc_feature (179)..(179): "n" may be a, t, c, g, other or unknown
  misc_feature (368)..(368): "n" may be a, t, c, g, other or unknown
  misc_feature (426)..(426): "n" may be a, t, c, g, other or unknown
  misc_feature (485)..(486): "n" may be a, t, c, g, other or unknown
  misc_feature (507)..(507): "n" may be a, t, c, g, other or unknown
  misc_feature (529)..(529): "n" may be a, t, c, g, other or unknown
  misc_feature (531)..(532): "n" may be a, t, c, g, other or unknown
  misc_feature (535)..(535): "n" may be a, t, c, g, other or unknown
ctcttttatggtgtttattttctatttccattgaacagttgtattttatttgngtctttcactgtaaatcacctccaatcttttttttttgggggggatgaagtcttggtctgtccgcaggctggagtgcagtggccgtgatcttagctcactgcaacctccgcctcccaggttcaagngattctcctgcctcatccccaacacagaacatattgtcagaaaacacctcgggtctctgtctcttttggagccaggcgttgcaggcctccctgggagctacaggcagcctcgagtacttcagctcagtagttagccagcccatctccatgccaaacccactgacgtagcccaacaagccgctgcggtanagggtctcattatcgggcagacagaccgggaggacgttggggcccagggggatgctgngctgcagctccaggagggcgatgtccccgctaaagttatgggactcattctgacggtanncggggtgcacaacgacccggnggacagggggggtccccagttncnnatnt

SEQ ID NO: 6030 - DNA, 562 bp, Homo sapiens
  misc_feature (444)..(444): "n" may be a, t, c, g, other or unknown
  misc_feature (505)..(505): "n" may be a, t, c, g, other or unknown
  misc_feature (507)..(507): "n" may be a, t, c, g, other or unknown
  misc_feature (513)..(513): "n" may be a, t, c, g, other or unknown
  misc_feature (515)..(515): "n" may be a, t, c, g, other or unknown
  misc_feature (544)..(544): "n" may be a, t, c, g, other or unknown
  misc_feature (546)..(546): "n" may be a, t, c, g, other or unknown
  misc_feature (559)..(559): "n" may be a, t, c, g, other or unknown
ccgggttattattttttattaagatcaaaatacaagtcccactatgaactggctgttctcacaataaataacaataacttacgtttgtttgttcggcaaaggctcacatactctgtcctccgtcgaataacttaaacactttcaaggcaagtctggtttctactgtttcccagcaatcatgcgctttgggagtttgagtgtctgttcctctgagttatccccttccttttccccgctaggagcccgggcgaagccgccagggagcgctgagctggggcagggcgggggtccgcgtgggcgagctccgggccggccgagatggggacacaggtggggcgtggagagacagagcggcggccacgtagagaggagaggagagggcagagctaaccctggtaagtcccagaattctggttttgaaaaactaagagtcctcggaagcangggtctggcagtctggtgaaagcaggttgcatcctggcgccttgggcttgtccaaaaccgngncttttngnactttttcataaataccattgaataattncnaaggcaaaaaacnttt

SEQ ID NO: 6031 - DNA, 563 bp, Homo sapiens
  misc_feature (141)..(141): "n" may be a, t, c, g, other or unknown
  misc_feature (161)..(161): "n" may be a, t, c, g, other or unknown
  misc_feature (199)..(199): "n" may be a, t, c, g, other or unknown
  misc_feature (452)..(452): "n" may be a, t, c, g, other or unknown
  misc_feature (475)..(475): "n" may be a, t, c, g, other or unknown
  misc_feature (483)..(483): "n" may be a, t, c, g, other or unknown
  misc_feature (552)..(552): "n" may be a, t, c, g, other or unknown
  misc_feature (557)..(557): "n" may be a, t, c, g, other or unknown
gtctctgtaggatactaaggtacaggatgtggtaatatgttcaggcagtcagatacaggaaatatttatggtacataatataatatcttctcatgtccaggtgttgaactctgaagtctagtgacttgaatttgatctagngaaatatatactcacaaagngaggaattatatctagaaatctgtaatttttaattgtnccgctaaagcgctttaccttcttttgtacttcttgaaaatactggctgcattgcaacagaagacaaatatgattaatgtcatgcaattcataatatcttaaattgcattgctggattctttctcaattaaaagaaaaaatgaaagaaaaaggcttttaaaatgtttttcatgcatctgataacagtgacatagaaaggaaaaaatgaaacatagttcagaatcttaaaagtaagaataaatttcagccagccngacatgactctattcaacaaacntgattgancggatttaaggtatagctaaaagggcttaaatttcacttggtatcccaatccttttttttttaattaanggtanatttta

SEQ ID NO: 6032 - DNA, 503 bp, Homo sapiens
  misc_feature (3)..(3): "n" may be a, t, c, g, other or unknown
  misc_feature (46)..(46): "n" may be a, t, c, g, other or unknown
  misc_feature (162)..(162): "n" may be a, t, c, g, other or unknown
  misc_feature (178)..(178): "n" may be a, t, c, g, other or unknown
  misc_feature (198)..(198): "n" may be a, t, c, g, other or unknown
  misc_feature (254)..(254): "n" may be a, t, c, g, other or unknown
  misc_feature (256)..(256): "n" may be a, t, c, g, other or unknown
  misc_feature (303)..(303): "n" may be a, t, c, g, other or unknown
  misc_feature (422)..(422): "n" may be a, t, c, g, other or unknown
  misc_feature (434)..(434): "n" may be a, t, c, g, other or unknown
  misc_feature (460)..(460): "n" may be a, t, c, g, other or unknown
  misc_feature (466)..(466): "n" may be a, t, c, g, other or unknown
  misc_feature (481)..(481): "n" may be a, t, c, g, other or unknown
  misc_feature (493)..(493): "n" may be a, t, c, g, other or unknown
  misc_feature (501)..(501): "n" may be a, t, c, g, other or unknown
canatctgtcgccacagcagcggacacgtttaatggcaggcgcctntacagttacaagacatgcctgaggtcagttcgcccccttagggggcactccccgagctaaacacagatgacagcgacccagggtgctggaggcccggggtcacctgaggactgcanaagtcctgcgctccgntaactgtgtggacacgcggntgccaggggcacaggtaggcaacatggatgggaagagagcccaggccgcccccgtntnacagctgcagagcacgcagaccacggcactgcaggccaaccaggcanagctgctggtgcgacacatcctggggctgggctggtcggggagaagctctcccgctgacgctgcctgggcctgcccctgcagggcccgggaaccgagcccaggcctctgtttctctganaggctggagcanaacccttggtggccctggaaagcggntgcaangggggccttaatcangggaggcacccnggcgttgngt

SEQ ID NO: 6033 - DNA, 569 bp, Homo sapiens
  misc_feature (509)..(509): "n" may be a, t, c, g, other or unknown
  misc_feature (534)..(534): "n" may be a, t, c, g, other or unknown
  misc_feature (540)..(540): "n" may be a, t, c, g, other or unknown
  misc_feature (553)..(553): "n" may be a, t, c, g, other or unknown
gagacgggagtctcactcttgttgcccaggctggagtgcaatggagcgacctcggctcactgcaacctctgcctctcaggttcaagagattctcctgcctcagcctccctagtagctgggattacaggtacccaccaccatgtccagctaattttttgtatttttagtagagatggggtttcaccatattggccaggccggtctcgaattcctgacgtcaggtaatccacccacatcagcctcccaaatgctgggattacaggcgtgagccactacacccggctaccttttggcctttttgtttcatctcatttgactgtcttcttttttaattcctatgtttcttcaaatgaattaaccgtttcttttttgatcatttttatttttgcttccttgctgtacacacctctctttgaaatcattccttatggctcctcttaccatattccttcatcaagtgtaatattatgagatttctccatgattcacacatgactttcagctgatcnttacttcttagccttaattcccttnactaanccctctggcattnttagaataatgggtta

SEQ ID NO: 6034 - DNA, 582 bp, Homo sapiens
  misc_feature (439)..(439): "n" may be a, t, c, g, other or unknown
  misc_feature (497)..(497): "n" may be a, t, c, g, other or unknown
  misc_feature (530)..(530): "n" may be a, t, c, g, other or unknown
  misc_feature (533)..(533): "n" may be a, t, c, g, other or unknown
  misc_feature (535)..(535): "n" may be a, t, c, g, other or unknown
catgctttttttaaaaaaaaaaacaggagaaagcgaatacagaggaaagagagaataaaattaattgggagatggagatgatatttggggatttgaaagcaaacaagatgtaagagaggccctctttgactgaaaatgacacagaaaaaggtgatcaagtcttccagggcctgctgttactgatggagactacagctacaatgaaaaattactctcactaccatatcttggggaaggagcgctctagttgcaaggaatttgtaaataaaggccgagagactctaacaaacaagatggagaacaaaaacaaagattccattaaaaaatttgttaagtgaaaaaccaagaccatctcagtggacaaaagagccagaactcttcctcgtagagccggcccgtggggaccgcacctgccgcccaaagagtggcgatttgaggnccttctcctggaaagtgaatagctggagttctgaaaaatggtcccttctctggactgngggtttatttcttgggatcttggaccaaagganggncntgggtttcttgttaagagccccaaaaaggtctttaatctaaaagggc

SEQ ID NO: 6035 - DNA, 588 bp, Homo sapiens
  misc_feature (462)..(462): "n" may be a, t, c, g, other or unknown
  misc_feature (490)..(490): "n" may be a, t, c, g, other or unknown
  misc_feature (514)..(514): "n" may be a, t, c, g, other or unknown
  misc_feature (588)..(588): "n" may be a, t, c, g, other or unknown
gagaaaaaaattgggcttttattggcaattacaaaagtaatagattttcttacataatacgttccttcagtaatatatttttcaagtatcttaccatagaatttctaaagtactttgtcattgaccccataatttattataaagtaggtcccataatcacattttttggaagttgctgaaattgagataaaaaatattgtttttttatgagaaaaaccggacaaaatacagaatggccaaaactagattaactggctcagttatgtctactaggtgaaagaaaatacagaatctgttactgtagaaattttaagaggttttgagtcagttccagtataaaaataaggccaaagttctcctgtaaaatcatcattaaaagtcagagaagagatctatcattcaaattataaaaggaaacctcattcatttcacagtctaaaaaaaatgccaatcttactaggnggtacttttggcagcagaataatttccntatgggccaataccatataattanttccgactggatacccaaatcttccttatccatcctggacttaaaatgggtggctcttcctcctgggggaaggn

SEQ ID NO: 6036 - DNA, 542 bp, Homo sapiens
  misc_feature (457)..(457): "n" may be a, t, c, g, other or unknown
  misc_feature (485)..(485): "n" may be a, t, c, g, other or unknown
  misc_feature (489)..(489): "n" may be a, t, c, g, other or unknown
  misc_feature (506)..(506): "n" may be a, t, c, g, other or unknown
  misc_feature (508)..(508): "n" may be a, t, c, g, other or unknown
  misc_feature (522)..(522): "n" may be a, t, c, g, other or unknown
  misc_feature (530)..(530): "n" may be a, t, c, g, other or unknown
gtacacaagaacttatgtttattgcaaacaaacaaacaaaaaaaaaaggaaagagaggaaaagagaaaatggtcagaagcacaacatataaggttaagaatttaaaagcatcttacattctgccctaatggcagcataattaatagcaacaaacggccgtcttgctgcctgccgcagccggagggtatttttgcagacctgacgagcaaattttgtgaaatatgtagtatgaaggaagaaagcttggcgggtcttcactgcagactttggactcccagtgtttcggactggcattccctgcatggcctggcgggacacgtgacttctaacacgagggtcctctgtagttgggctaggagataacttctcttcttctgactgggtgggcattttcaagcctccatattttttccaataaagccaacaaatagcacataatctacactgcatattaggngggccccaagaatccctggtgagactgngtancataacaacttttacangnttttccttaaaaangattttangcttgaacgtgg

SEQ ID NO: 6037 - DNA, 586 bp, Homo sapiens
  misc_feature (501)..(501): "n" may be a, t, c, g, other or unknown
  misc_feature (556)..(556): "n" may be a, t, c, g, other or unknown
  misc_feature (583)..(584): "n" may be a, t, c, g, other or unknown
gagatggagtcttgctctgtcgcccaggccagagtgcagtggcgcagtctcagctcactgcaagctctgcctcctgggttcacaccattctcctgcctcagcctcccaagtagctgggactacaggtgcccaccaccacgcccggctaattttttgtatttttagtagagttgggtttcaccatgttagccaggatggtctctatttcctgacctcgtgatccacccaccttggtctcccaaagtgttgggattacaggcgtgagccactgcgcctggccacctcaattatcttttttaaaaggcattatgaaacactgaaaatctatattgaaatcagcaaacttcaatatagcaagggaagatttagcaccaacattttaattgactcattacaaaaaccccttccccccaaaagaagatatttcttgattttttatatttaagatatcctaaacatttttattcatgttacaacttgtaacacaagcaccatgcatgnattattgaaatgtctgggtttttggttggccttggttttaatggaggcaaggctnactctggtggcccagctgggagtgcanngg

SEQ ID NO: 6038 - DNA, 575 bp, Homo sapiens
  misc_feature (431)..(431): "n" may be a, t, c, g, other or unknown
  misc_feature (456)..(456): "n" may be a, t, c, g, other or unknown
  misc_feature (458)..(458): "n" may be a, t, c, g, other or unknown
  misc_feature (489)..(489): "n" may be a, t, c, g, other or unknown
  misc_feature (544)..(544): "n" may be a, t, c, g, other or unknown
  misc_feature (549)..(549): "n" may be a, t, c, g, other or unknown
gctggcaataaataagatatctttattatgattatgttaatagttaaaatttgcatgttttctagatagtctgttaacaggataaaaaaatacaaaaaggcgagcttcttaatgattcagctgaattaactataaaattaaaatacctgctaattattatcttctaaaataacacaaaatatattcaatacgcaatacaaacctcagtaatccaattctcctaatatgcaattatttataacctctgaactaagaggaagtggtttgactaaacagagaaataacaatgtttttatcctaagtaatctatactttggagtagaaatacttatttaatacaatatgttaattattaatatttcacaaggagtaatctttattttgaaaaacaatgttaattataccaatttttagttataatttggtagtgngaattcgcccaacctaaattcctgngngcctggaaaataccactttttaaaagctagnattaatcatttggacacaggttactaattcaaatggcatctcaatctacttatcnttaanggaccgaaattaacatctttttggtg

SEQ ID NO: 6039 - DNA, 577 bp, Homo sapiens
  misc_feature (480)..(480): "n" may be a, t, c, g, other or unknown
  misc_feature (569)..(569): "n" may be a, t, c, g, other or unknown
  misc_feature (577)..(577): "n" may be a, t, c, g, other or unknown
gacaagaaagggctctgtcacccaggctggagtgcagaggcaagatctcggctcattgcaacctccgcctcccaggttcaagcaatctgagtgcccatttctaaaggactggcttgtggagagggcaagaggcgataaggagaaggctagggcaggcagtgctcaccttcttcaggatgatatcgatgtagccggcaatgagctgtgcaatctgctccccttcagttgtctgtactgagtaatagccatcttggtaatctccaaaatcctagggtgacaagtgggggactcagagggaaagctcaaatctatccaggatggaaatggctaggatgggaggcccaaggttgagctgatgagatgccttccgtggcaacggccctcttggaagatgcccacctttcttgaacctcctctttattttctccttggagggaaatttttacttctgaggagtggcctctacactacaccagttcnaatccatatcatttaaggaagtctcttaattttactctgatgataaaatgagaggatttatattggcataaaaggccccctttaaggtngcttgtan

SEQ ID NO: 6040 - DNA, 607 bp, Homo sapiens
  misc_feature (477)..(477): "n" may be a, t, c, g, other or unknown
  misc_feature (531)..(531): "n" may be a, t, c, g, other or unknown
  misc_feature (542)..(542): "n" may be a, t, c, g, other or unknown
  misc_feature (548)..(548): "n" may be a, t, c, g, other or unknown
  misc_feature (553)..(553): "n" may be a, t, c, g, other or unknown
  misc_feature (575)..(575): "n" may be a, t, c, g, other or unknown
  misc_feature (592)..(592): "n" may be a, t, c, g, other or unknown
agagttgctaaaatgatgtactactgcatgtattgcaatactcaggcctcggaaagcttcctttctccccacattggaaggtttttatggttttgtcatttagtatggagcaaaacggttgtatccccctcggtatatactagcctgcaatgaagaaagaacgagacccacatcatcagcatggctcctagtcttggcatcagtcaaaggtgcaaaagcattcatggcaccaacgccgtaggtgggggctggagcaagtgcgtggtggtaggggtcggcagcataaactcgtccgtaactgtcactgtaggcagcggcagtggcaggggtaggctgggcgtagcggtatgcagcataaccaccataaatgtctgcaccataaaatccatcctggtaaacaacacccgccgtaggcccgggatcgggggcgggggccgccgcggccctgaaggtgttgtacacggtgcgacccgcggnctcgcaagtgcgcccctcggtaagcggcccggcggtggcttcttggataccggnaagcctggcanttgcanaaatntttccaagtgaactggggggcnctgtccatggaaaaaanccctcctgggtgggc

SEQ ID NO: 6041 - DNA, 592 bp, Homo sapiens
  misc_feature (475)..(475): "n" may be a, t, c, g, other or unknown
  misc_feature (480)..(480): "n" may be a, t, c, g, other or unknown
  misc_feature (537)..(537): "n" may be a, t, c, g, other or unknown
  misc_feature (556)..(556): "n" may be a, t, c, g, other or unknown
  misc_feature (582)..(582): "n" may be a, t, c, g, other or unknown
aactaaatcttaattttggatggcttacccaactattaactggcagagctggggtttgagcccaagcaattcagtaaaaaagttatactcttaaccactatagtatgctgcttcttcagtatttacatatgtttgtcaggaagaaataactttttttttttttgagacggagtctcgctctgtcgccaggctaaagtgcagtggtgtgatctcggctcattgaaacctccacctcccgggttcaagcgattctcctgcctcagcctccctagtagctgggactacaggtgtgcaccaccacgcccagctaatttttgtatttttagtagagatggggtttcaccatgttggccagtatggtctcaatatcttgacctcgtgatccgcctgcctcagcctcccaaaagttctgggattacaggcgtgagccaccaagcccagcctgaaataatttcttaacaatgcctaacacagngcttncatacattttaagaactaataaatacttggttcttccaaaattggcaggcaccaaangtaattgggacttagttcnggggcaggaaaagggaatgaaaactnttttaaaaga

SEQ ID NO: 6042 - DNA, 591 bp, Homo sapiens
  misc_feature (249)..(249): "n" may be a, t, c, g, other or unknown
  misc_feature (470)..(470): "n" may be a, t, c, g, other or unknown
  misc_feature (473)..(473): "n" may be a, t, c, g, other or unknown
  misc_feature (496)..(496): "n" may be a, t, c, g, other or unknown
  misc_feature (523)..(523): "n" may be a, t, c, g, other or unknown
  misc_feature (543)..(543): "n" may be a, t, c, g, other or unknown
  misc_feature (549)..(549): "n" may be a, t, c, g, other or unknown
  misc_feature (559)..(559): "n" may be a, t, c, g, other or unknown
  misc_feature (581)..(581): "n" may be a, t, c, g, other or unknown
  misc_feature (586)..(586): "n" may be a, t, c, g, other or unknown
gagatggactcttgctttgttgtctgttgtccaggctggagtgcagtggcacaatctcggctcactgcaacctccgcctcccaggttcccaggttcaagcgattctcctgcctcagcctccctagtggctaggattacaggcatgcaccaccaagcccagctaattttcgtacttttagtagaaagaaggtttcaccatgttggccgggctggtcttgagctgctgacctcaggtgatctacccacctnagcctcccagggtgctgggaatacaggcaggagccacctcacccagccttctctctcatctttattaatctaattcttatttgttcttcaggagtcagttcaagcataagcatctcacaagtgcctccttccctcccagtctgggtcaggtgcccctcttatgtactcactcaagccataagcatgtctctattttaaaagtaactggttgcttggggtgnctncctaccagaccctaagctctttngggattatgtcggacaatcttcttcanagtcactgggccccaatatntaacanggatcctaanacgggttaagcattttccaaangcttnctaaa

SEQ ID NO: 6043 - DNA, 606 bp, Homo sapiens
  misc_feature (261)..(261): "n" may be a, t, c, g, other or unknown
  misc_feature (520)..(520): "n" may be a, t, c, g, other or unknown
  misc_feature (543)..(543): "n" may be a, t, c, g, other or unknown
  misc_feature (551)..(551): "n" may be a, t, c, g, other or unknown
  misc_feature (566)..(566): "n" may be a, t, c, g, other or unknown
  misc_feature (575)..(575): "n" may be a, t, c, g, other or unknown
  misc_feature (588)..(588): "n" may be a, t, c, g, other or unknown
  misc_feature (604)..(604): "n" may be a, t, c, g, other or unknown
cttttttttttttttgccttttccaaaacagatgattcatttgcagattaaaatttcaaccatatacagacagcttcaaaagatcacccctggccgctgcccctatctgcacagctgcctctcccatctcctctccctactaagcaacctctttcttctctcctgcagctcacacaatgttcatgagcataccatcaaatacaaatattccaatttttcctgttcccttcacacaaatgtagccttctctctatatactgntctgtactttgctttttaattgttagtaatttttccgcaacaggacacaaagagcaatctcattctttctggaggtccatgcagaatactgccctcaatggatgtcacctatgtgaccagttcccactgatgacccttacactgaaaaccggcttacacaggagtggtctatgatctatgatgtattaacatggacatttcctctttcattatgaatttgtaaaggtttggatttccataattcttttttaatcagtgnaaacataaaataaggttttgganaagagatncaggaagccaatttnggaactttnggtttgggccccncatctttaaaatgggnct

SEQ ID NO: 6044 - DNA, 582 bp, Homo sapiens
  misc_feature (492)..(492): "n" may be a, t, c, g, other or unknown
  misc_feature (520)..(520): "n" may be a, t, c, g, other or unknown
  misc_feature (536)..(536): "n" may be a, t, c, g, other or unknown
  misc_feature (553)..(553): "n" may be a, t, c, g, other or unknown
ggtagttcttagttttattataaccttgtattttctggcaaaaatataaatctaaatgcatgatctctgggcacacagctcaagtatcagccttgagatgacctaagcagcaaaaatttggcctatttaattaaatgcacaggaggttgcagccgcatttattagaaaaatattatcctttggaaattcctttcttgaagattggctccagggcgttgttctttctgtttttatgcaattgcacttccttggcaggcagccaggcgctccggtgctcacaggccatgggacagtccagttccctgcagacccagcggggcatgggcggacagagccgcaccgtgaagcccgcctgttatttccatcgggtggtcctggagacgacacggctggggaaatgggtcaccggaactccacggcggccagacgcccatccaatttgcctgcgggaactcgctcttacctttcttacaaacttcttttggaagcgtnggatttaacgttccgccagttccaaggngctgtcccggactganggtactgaccggtgganagcattttgacaaaggggacacccgggat

SEQ ID NO: 6045 - DNA, 589 bp, Homo sapiens
  misc_feature (464)..(464): "n" may be a, t, c, g, other or unknown
  misc_feature (509)..(509): "n" may be a, t, c, g, other or unknown
  misc_feature (529)..(529): "n" may be a, t, c, g, other or unknown
  misc_feature (538)..(538): "n" may be a, t, c, g, other or unknown
  misc_feature (546)..(546): "n" may be a, t, c, g, other or unknown
  misc_feature (549)..(549): "n" may be a, t, c, g, other or unknown
  misc_feature (562)..(562): "n" may be a, t, c, g, other or unknown
  misc_feature (564)..(564): "n" may be a, t, c, g, other or unknown
agtcatttttaatgcatttttctctgtgcacaagagaaataactgatgaagtcaaaagacacactttcctttatacatagcagttaaaagtaatgcaaacatcacatgacactttcagtgaaagttacatttccaattacaaatcaaaatgcatattagggtctctttatgggagaagctgagaaggaagtcttaggtaaaaagcactttcctggcattactacactgatccttcaggctgcacaaagattaaggtcatatacagtcaatctgcaaatgttgacacaatgttacactgtaaattttctgtacaattaaatgtatacttagagataccaggataaacatttctactatattttaactgaacttgcctagccaacattttcactgagaagtttatcaaagatgctgtaagattctacaaaattgtgagacataactagcttcagaaacattcttgnattctttctcattttgggtaccatattacactcagattctactgnaatatttttagaatgtccgngccaattgngcttactnggncggattccaaatntngcaaaaagaccaatgggtttaaatt

SEQ ID NO: 6046 - DNA, 454 bp, Homo sapiens
  misc_feature (335)..(335): "n" may be a, t, c, g, other or unknown
  misc_feature (356)..(356): "n" may be a, t, c, g, other or unknown
  misc_feature (374)..(374): "n" may be a, t, c, g, other or unknown
  misc_feature (394)..(394): "n" may be a, t, c, g, other or unknown
  misc_feature (410)..(410): "n" may be a, t, c, g, other or unknown
  misc_feature (413)..(413): "n" may be a, t, c, g, other or unknown
  misc_feature (435)..(435): "n" may be a, t, c, g, other or unknown
  misc_feature (444)..(444): "n" may be a, t, c, g, other or unknown
ctgggtgagtgtcactagccaatcataggattatttctttttttgagacagggtctcaatctgttgcccaggctggggtgcagtaatgcaatcatagctcactgcagcctcaaactcctgggttcaagccatcctcccgcctcagcctcctgagcagctaagactacagtcatgagctattataacatgcctggctaatttttttaattttttatagagagagggtctaccatgttgcccaggctggtctcaaactcccagcctcaaatgatcttcccatctcagccttccagtgttggaattacaggtaggagccgagtccatagggttattgngaggattcaatgagataactnatgcaaagtgctcaacangatgccttgtatatactaangccttaatgttgcctnccnctcacacacatgcacattcacncatacacangcagactggt

SEQ ID NO: 6047 - DNA, 584 bp, Homo sapiens
  misc_feature (455)..(455): "n" may be a, t, c, g, other or unknown
  misc_feature (472)..(472): "n" may be a, t, c, g, other or unknown
  misc_feature (503)..(503): "n" may be a, t, c, g, other or unknown
  misc_feature (506)..(506): "n" may be a, t, c, g, other or unknown
  misc_feature (529)..(529): "n" may be a, t, c, g, other or unknown
  misc_feature (557)..(557): "n" may be a, t, c, g, other or unknown
  misc_feature (562)..(562): "n" may be a, t, c, g, other or unknown
  misc_feature (564)..(564): "n" may be a, t, c, g, other or unknown
  misc_feature (579)..(579): "n" may be a, t, c, g, other or unknown
aacatagaatttattttttagagcagttttaggtggaatggaaggtacagagatttcccatatattccgtgctcccacacttttacagcttcctctattatcaatatctcacaccagaatggtacattcattacaactgatgaacccacattgacacatcgtcatcacccagagtacaaagtttacattgaggttcattctcggccttgtccattctatgcatttggacaaatttataatggcatgtatccaccattataacatacgaagtagtttcagtgctctaagaatcatctgtgctccacctattcatctcctgcactcccccaacaccgggcaaccactcatctttttactgtctccatagtttggtcttttccaggatgtcatacatatttggaatcacgcattatgcagccttttcagattggcttttttcatttagtaatatgtgnttaagtttactccatgnctcttcatgacttgatagctcatttctggantanggctgagtaatactcattttctnggatggggcccaaattctttggccattnccctncncaaagcctttttggngggtt

SEQ ID NO: 6048 - DNA, 587 bp, Homo sapiens
  misc_feature (513)..(513): "n" may be a, t, c, g, other or unknown
  misc_feature (560)..(560): "n" may be a, t, c, g, other or unknown
  misc_feature (562)..(562): "n" may be a, t, c, g, other or unknown
  misc_feature (580)..(580): "n" may be a, t, c, g, other or unknown
cattcgattaaaatattttcactttttcctgtgatttcttctttgatccacaggttatttataagttagttaatttccaaatatatgggggctcttctaggtgtcttgtatttatttctaatctattttgtgtgcagataacataatctgtaagatgtcattcttctgaaatctatttaaacttgttttatgattcaccctatggtcagtctgtcttggtgaacattccatgtgcatttcaaaaactatgtatattctgcagttttgggggaaagtgttctataaatattaagttaaggtggttggttgtgtcactcagatcttctctgtactgttgtatagttgttctatcaatcactgagagcagtgtgttaaaatctccagacgtggttgtgaatttgcttatttctccctttagttctgcagcttttactccatgtattttgaagctgctattgatgcagatccatttatatctaccaaatggtatggatctttataaattatgagtgncctttttttggccctaacataattcctggcttgagcctaatttgggngnttccctaacctaccggtngcagggg

SEQ ID NO: 6049 - DNA, 590 bp, Homo sapiens
  misc_feature (514)..(514): "n" may be a, t, c, g, other or unknown
  misc_feature (519)..(519): "n" may be a, t, c, g, other or unknown
  misc_feature (551)..(551): "n" may be a, t, c, g, other or unknown
  misc_feature (561)..(561): "n" may be a, t, c, g, other or unknown
gagacggagtttcactcttgtcacccaggctggattgcaatggcgtgatctcggctcactgcaacctccgcctcccgagttcaagcaattctcctgcctcaggctcccgagtagctgggattacaggcgcctggccaccatgcccggctaatttcacttagcattttctttcttcagcacttctaacatccttctattcatcagatttctgaaaatgattaggcagtattattaaaggtacttgtagctatggtctctggagtatttcccaaatgcatgtaaatatctgggttgggaaagggggaacagcagaaataaaagtcataaaaactgaatgaaacacataatatttgaaagcaaattcgaaaaaaggctagtgagtctcatcattttccttgcagtgataactcccataattctctgtttattgacaaaaaagagactattgtgaaaacagaattcctaaggcattaatctatgcctcaactaaggaagttagagagaaacccagggntcagntcccaacttcacctggctttttcatgccttancttttggctnaacctaatttccttgaagcatggaagggg

SEQ ID NO: 6050 - DNA, 551 bp, Homo sapiens
  misc_feature (17)..(17): "n" may be a, t, c, g, other or unknown
  misc_feature (41)..(41): "n" may be a, t, c, g, other or unknown
  misc_feature (83)..(83): "n" may be a, t, c, g, other or unknown
  misc_feature (218)..(218): "n" may be a, t, c, g, other or unknown
  misc_feature (311)..(311): "n" may be a, t, c, g, other or unknown
  misc_feature (465)..(465): "n" may be a, t, c, g, other or unknown
  misc_feature (487)..(487): "n" may be a, t, c, g, other or unknown
  misc_feature (509)..(509): "n" may be a, t, c, g, other or unknown
  misc_feature (526)..(526): "n" may be a, t, c, g, other or unknown
  misc_feature (538)..(538): "n" may be a, t, c, g, other or unknown
  misc_feature (541)..(541): "n" may be a, t, c, g, other or unknown
  misc_feature (551)..(551): "n" may be a, t, c, g, other or unknown
gagacagtctcactctntcacccaggctgggctgcaatggngcaaccttggctcactgcaacctccacctcctgggttcaagngattctcctgcctcagcctcccgagtagctgggattacaggcgcgtgaagccacgcccagctaatttttgtatttttagcagagacgaggttctgccatgttggccaggctggtctcaaactcctgacctcaggngatccacctgcctcagcttcccaaagtgctgggattacaggcgtgagccaccgcaccaggcctcccaaaacactattaatggaaatattttgngaagttaagagcttttaaaatcacacttctgagtatttccaattaacaaactgttataacccagggctgctgcatgttaccagtgggggataagtgaggaggtgtgtcaaactgtcaatcatgatgcacaccgatttaatacagtgttttggtngcaagacttttctcaaattcanggaacagtgcagtggatttacnatcatggcataaaaatnctttaactcacntgnggatggtttn

SEQ ID NO: 6051 - DNA, 587 bp, Homo sapiens
  misc_feature (447)..(447): "n" may be a, t, c, g, other or unknown
  misc_feature (531)..(531): "n" may be a, t, c, g, other or unknown
  misc_feature (555)..(555): "n" may be a, t, c, g, other or unknown
  misc_feature (562)..(562): "n" may be a, t, c, g, other or unknown
  misc_feature (582)..(582): "n" may be a, t, c, g, other or unknown
  misc_feature (587)..(587): "n" may be a, t, c, g, other or unknown
ggagatagagtcttgctctgtcccccaggctggagtgcaatggcgtgatcttggctcactgcaacctctgcctcctgggtcaagcaattctcctgcctcagtagatgggattacaggtgcctgccatgagacccggctgatttttgtatttttagtagagatggggtttcaccatgttggtcaggctggtgttgttgaactcctgaccttaggtgatccacctgcctcagcctcccaaggtgctaggattacaggcatgaggcaccgtgcccagtcagctgcttgtcttttaaataaagtgaatttcaaaaacagatacttcatattctgggcatagcatcacacatacaaccacattaccaatataataatattaaatgattacttaacagacatcctaataacgcaaacaccttttattcacatttgctgagtagcaattacagngtttcttcattagttttccacctggtaatggaattatgagcaattctaacaatttaagtcccaaactttgaccaacaataatcncaagggttataacaactggacttnaaggccnccttgatttttcccccccanttggn

SEQ ID NO: 6052 - DNA, 591 bp, Homo sapiens
  misc_feature (467)..(467): "n" may be a, t, c, g, other or unknown
  misc_feature (481)..(481): "n" may be a, t, c, g, other or unknown
  misc_feature (508)..(508): "n" may be a, t, c, g, other or unknown
  misc_feature (529)..(529): "n" may be a, t, c, g, other or unknown
  misc_feature (559)..(559): "n" may be a, t, c, g, other or unknown
cagtagcacaccttttgtttattgacctatgtaaaaaaataataggtcttgaaaagtcagaacaataaaagaatatgcaaaaaggttatttctgattctagaaggctatacaaatatgcaaaaaaggaataagttatttttttttgcttgtcttttttccaaaattttttcccaaacttcatttctaattatacaaatgactaaggaccagtttaacaaatcgtttttatgtatatattacatgctttggaatatagatagaaaatgttccaaaaaagttgttcagaaacttttctattcacaatatgaacaagaaacttgtataaaagaagggggaaaggagcaccttttatgtaattttgaagcaaagatgacaaaaaagatcaatctggaatatggaaatcatttgctttaaaaaacaaacaaacaaaaccctacaataaaccatagctaattagttcttccanggaaagtttgaggnagtttagcctcataattaaatccccgnagcttgggactttttggcctngtgggggtttcctttttaaggtaacctggntttggacttggggacttggaacacttggggaa

SEQ ID NO: 6053 - DNA, 573 bp, Homo sapiens
  misc_feature (168)..(168): "n" may be a, t, c, g, other or unknown
  misc_feature (490)..(490): "n" may be a, t, c, g, other or unknown
  misc_feature (502)..(502): "n" may be a, t, c, g, other or unknown
  misc_feature (559)..(559): "n" may be a, t, c, g, other or unknown
  misc_feature (572)..(572): "n" may be a, t, c, g, other or unknown
gagacagggtctctccctgtcacccaggctggagtacaacggcataatcaaagctcactgtaactctgaactcctggactcaagcaatcctcctgcctcagtctcccgagtagctgggactaaaggcatgcaccaccatgcccagctaacttttgaatttttctgtanagatggggtctccctatgttgcccaggctggtcttgaactcctggcctcagcaatcctcccacctcagctctacttctttctttctttccttctttcctcccttccttccatcctagcaatcctcccacctaaactgcccttccttccttcccacctaaactgccctgccctcccctctcctccactcccctcccctcccttccttcctttcttccttccttccttcctgtagccttggtctcccaggctcaagtgatccttccacctcagccttcagagtagctgggattacaggcatacaccaccatgtcggactaatcnttaattttttgnggggatgggacctactatggtggccaagctgggcttaaacttttgaactcaagcagncctctggcttaanc

SEQ ID NO: 6054 - DNA, 588 bp, Homo sapiens
  misc_feature (500)..(500): "n" may be a, t, c, g, other or unknown
  misc_feature (515)..(515): "n" may be a, t, c, g, other or unknown
  misc_feature (518)..(518): "n" may be a, t, c, g, other or unknown
  misc_feature (524)..(524): "n" may be a, t, c, g, other or unknown
  misc_feature (529)..(529): "n" may be a, t, c, g, other or unknown
cccctggggactcaaggcagaagtgccactccctccgttgaccacggctgggaggggtgcctgtctcttcagggaagaggtggggagactaacaggttccctcccagctcaggtctacactgacttcagtcgtaactggttccagcatccctcaacccagttttatcacgcggtctaggcccaaggtccagggctctgggactccctccgatgctcccacccctggcccctgcaccttctggcttctgcagggaccgctgggccctggatgaggcctctcccacctcgctggaagaccagagacaccttcggatgccaccttgacgctggagcggatctggacctagcccagcagctcccaagtgactgtgtttccagcagcctgatccttgttgaggcccagggaagtgtcccaggccccgacttgccagacgaggctctattccggctgctgaacccacttttctcctttatttaaataaatactcattctgggctgnacacgttccaagcancangggcangcaancccggtgcccttgcgtggcaagggaacaacttggcaagcccttacttgggcgaattccg

SEQ ID NO: 6055 - DNA, 595 bp, Homo sapiens
  misc_feature (484)..(484): "n" may be a, t, c, g, other or unknown
  misc_feature (491)..(491): "n" may be a, t, c, g, other or unknown
  misc_feature (528)..(528): "n" may be a, t, c, g, other or unknown
  misc_feature (575)..(575): "n" may be a, t, c, g, other or unknown
  misc_feature (589)..(589): "n" may be a, t, c, g, other or unknown
aaaaaaaagaagagttatctacccagcaatctgtttccctgtctgggggagggggttgcatgcaggctgggggacaagacgggcagctggaggtgccaggatcaatggcctcaaggggtgctcccaactgggtgctttttcccatacaacctagcgctatgcaggtgctgaaggtgacacctctgctcttgagatctggctctgagtaggcctgaggtgcacgcccctctgctctctcctcccctctcccctccctccccagagagaaaacactcacttgccaggtttatccagaagcccccccgcagggcactggcagcacatcaggatgtactcctgcagggcctgctgatggaacatccagtggctcatgctaagggcagggtcacctgttgaagggcaaagggtcagtaagggcccggcagatccagccaagtatcaatgacctaattccactttctcacctgggggaaatagtcaaggnttcctgntcccctttcttctttcattcattcttgggacaactgntatctttccccatgtcctacgcacaagcatgtcctttttcctgaacntttgacatggggtnaaaaaa

SEQ ID NO: 6056 - DNA, 581 bp, Homo sapiens
  misc_feature (522)..(522): "n" may be a, t, c, g, other or unknown
  misc_feature (534)..(534): "n" may be a, t, c, g, other or unknown
  misc_feature (581)..(581): "n" may be a, t, c, g, other or unknown
ccgtctggtctcataaccactattgatattttccatggattcagaactacgttttagaacagggcactctgggttttctttgaggcatgcacagtccaccttgtacttacaatttccatagtcaaaatcaaaggcaatagtaatttcagttccctttggaatactgtgtatagaataaatataaagatgtatggttccatcttgaatttcatgcctcacctctgcattgggtgtacaagaccgcctgatgaatcgagcctcattcccaaaagtccttgcatcaacacacatttctagcccatgaaatttagagtagaataacacaaaagggtatggtcttttaaagaaatacccatttgcttcaaactgttctctcagcataaacttccctctgtattcaatgataagtgcatcaggaggcaaatcttttgcagatttaagaattttcttatcttttggatatggctctctacaggaggtttgaagagccaaatggtgggattcaaatcggattaatcatcncttttttggcanttccatggccaaactcaaactatctttggcctcctttgaacaccctn

SEQ ID NO: 6057 - DNA, 429 bp, Homo sapiens
  misc_feature (132)..(132): "n" may be a, t, c, g, other or unknown
  misc_feature (226)..(226): "n" may be a, t, c, g, other or unknown
  misc_feature (408)..(409): "n" may be a, t, c, g, other or unknown
  misc_feature (411)..(411): "n" may be a, t, c, g, other or unknown
  misc_feature (418)..(418): "n" may be a, t, c, g, other or unknown
  misc_feature (421)..(421): "n" may be a, t, c, g, other or unknown
  misc_feature (426)..(427): "n" may be a, t, c, g, other or unknown
gaagggcaatctttcaattgcttaaaattaatcagtgcaaagtgaggtaaaagatccccgtttgtcagggccgaggcaggaggctcacacaagcctgcgtctcttggagtccctccccaggtccccctcctngacatccaccttacagcccagtggggacaccaggttcagcagagggtcctcagaggcacggccgaagagcgccagcaggagggccacaccgaancctgtggctcgctcaccagcatgcaccggtgcagcaatgtccaggtggacccagactccgggccagtcgaagccgatgtgtgaggcgatgaagaggccagcacaggagctggggctgttgtctcggtccgccactgagttcttcatgtccgccacagctgaggtgaactcgctgaagtgcanntnggggcantanaccanngg

SEQ ID NO: 6058 - DNA, 533 bp, Homo sapiens
  misc_feature (455)..(455): "n" may be a, t, c, g, other or unknown
  misc_feature (466)..(466): "n" may be a, t, c, g, other or unknown
  misc_feature (489)..(489): "n" may be a, t, c, g, other or unknown
  misc_feature (496)..(496): "n" may be a, t, c, g, other or unknown
  misc_feature (500)..(500): "n" may be a, t, c, g, other or unknown
  misc_feature (510)..(510): "n" may be a, t, c, g, other or unknown
  misc_feature (520)..(520): "n" may be a, t, c, g, other or unknown
gtgacgcagcatcaggtgcttttacttcagtgaatgaaaaataatggtcacaactcaaatgaatgggaatttaatatgaatatatgcaccttaccagagatgtttgctaccaatgatatcttagcaattccatattccttacaaagtcagtataattgttgtaaaaaaatcaactgtggttctgaatacccattcacagttgacctcaacaatgtatctgatgtaggagactgagtatccgtgacaggcagaagcatgtgatggtcctcagtcccaagtggaagagctaatggtaaagtcatatcagaaggcttcacatccatagtttctgataaaggacttttttgtatggaatcctgttcactcaaagtatgatcctctgcactggagtctagagttttatctgcaccagaatggacttttgttttgtgcttctttaaatttttaatatctgngtaagaatttncacataattcgcagataaatggnctttctnctgnatgggacccnaagtgtttgntgagctcttccgg

SEQ ID NO: 6059 - DNA, 523 bp, Homo sapiens
  misc_feature (440)..(440): "n" may be a, t, c, g, other or unknown
  misc_feature (457)..(457): "n" may be a, t, c, g, other or unknown
  misc_feature (459)..(459): "n" may be a, t, c, g, other or unknown
  misc_feature (465)..(465): "n" may be a, t, c, g, other or unknown
  misc_feature (474)..(474): "n" may be a, t, c, g, other or unknown
  misc_feature (500)..(500): "n" may be a, t, c, g, other or unknown
  misc_feature (505)..(505): "n" may be a, t, c, g, other or unknown
aaagcaaataaaacatttattgttcagatttttttccattttcttcctttttacaaaaacatgcatacatacacagggtatggtgggtcctaggaaagacacacacacacgcctcactcacacacacgctcacacacacgcctcactcacacacatgctcacacacattttccttcttgaccccaggcctggacccccaaaagccttgaagactttgccagagcagcctcccctcctccatgtctgtatcttctctcccaccccttccccctcagtcaggctattcctatgtggggtgggaatcagagctatggtgggggaggccccagaaacagagaaggctccccgagtggggcagtggccgaggggtcccaggggtatgctgcgcttctgggggagatgaagggtttggcaccattggatcaggaagcacaggactnccagagcacccatctgntncaccangggcatcgncaggaaggttgatgtaagggggcctntggcnagggtccgaccaaatgga

SEQ ID NO: 6060 - DNA, 585 bp, Homo sapiens
  misc_feature (508)..(508): "n" may be a, t, c, g, other or unknown
  misc_feature (515)..(515): "n" may be a, t, c, g, other or unknown
  misc_feature (537)..(537): "n" may be a, t, c, g, other or unknown
  misc_feature (539)..(539): "n" may be a, t, c, g, other or unknown
  misc_feature (549)..(549): "n" may be a, t, c, g, other or unknown
  misc_feature (558)..(558): "n" may be a, t, c, g, other or unknown
  misc_feature (584)..(584): "n" may be a, t, c, g, other or unknown
aaatatattttttgagacggagtctcactctgttgcccaggctagagtgcagtggcatgatcttggctcactgcaacctccgcctcccgggctcaagggattctcctgcctcagcctcagctggtattataggcacttgctaccatgcttggctaatttttgtatttctagcggagacgaggtttcaccatgttggccaggctggtcttgaactcctgacctcaagtgatccacccgcctcagcctcccaaagtgctgggattacaggtgtgagccactgtgcccggccacatctgtacttttaagggtacagctttacagtacataggaatttgagaaccacttcacaggaagagggaaacagcccaatatttatttatgtatacacataatcccaagtgtgtgctggggccaccaggcccttctgggggaacaaggactgtcgtgcatgtgagtgacgacattaataagcatttacatactgtacagatgcaaccttttgatgatncatatantttgataaaaattgagaaaacngntttgttgtanaataccttngccacttttttagcatgagaacagtnc

SEQ ID NO: 6061 - DNA, 580 bp, Homo sapiens
  misc_feature (514)..(514): "n" may be a, t, c, g, other or unknown
  misc_feature (547)..(547): "n" may be a, t, c, g, other or unknown
  misc_feature (558)..(558): "n" may be a, t, c, g, other or unknown
  misc_feature (560)..(560): "n" may be a, t, c, g, other or unknown
agacatcagaaatgtattatttcatagttctggaggctagtagtccagtagtagtccaagatcaatttgttggcatggttgattccctccctcccttccttccttttttttacagggtattactctatgcccaggctggagtgcagtagctcaatctcagctcactgcagcctcaacctgctggactcaagcagtcctcccaccccagcctcccaagtagctgggactacagatactcaacaccacacccggctaatttttttgtagagatggaatttcaccatgttgcccaggctggcctcgaactcctaggctcaggcgatctgcccacctcaacctcccacagtgctggtattacaggcgtgaagccaccacgccccaccaagattgatttcttctgaggggtctcttcttggccatcttctgtgtcttcccatggtcttccctctggtatgcgtctttgtcctgatttcttcttccttggctggtgaagaagccgccggctccgggtcanaaactttgggccggctggtggttctgagccatntggccgtctgntnggttcactggttggaatctg

SEQ ID NO: 6062 - DNA, 586 bp, Homo sapiens
  misc_feature (411)..(411): "n" may be a, t, c, g, other or unknown
  misc_feature (419)..(419): "n" may be a, t, c, g, other or unknown
  misc_feature (451)..(451): "n" may be a, t, c, g, other or unknown
  misc_feature (454)..(454): "n" may be a, t, c, g, other or unknown
  misc_feature (511)..(511): "n" may be a, t, c, g, other or unknown
  misc_feature (565)..(565): "n" may be a, t, c, g, other or unknown
  misc_feature (579)..(579): "n" may be a, t, c, g, other or unknown
  misc_feature (585)..(585): "n" may be a, t, c, g, other or unknown
aacattaagtgtcattttaaaaaatgggttaaataagcagcattgctgaggatggccgtgcagggctgattatcccctatttgcacgttctggcggtgggaaggctagaagtctaatgactgaattatcgccctaatgcctctcgctggctgggaataatcccggggcaacagctgccgcggggtttttggctggtttcctctaattgcatccagattaagggagttgtggaggggcggggcttctccatcccccgcggagcagcgtctcctccgccaagccctgaacacccaggtcatggcttccgaggtcctggctggtccgagaggtgcagacctcactggggtccgggccagcccatggggagcgtgaggtgcgagcagtgcacggtgggggtggcacttggtgcanagatgcanctgattggtccgggtcatgtcttggggagcancangggtgaaaactgtagggccaggagactcagaaggaaatgccttctactaggaccttnccaatgaaggggagcccttggacctgctatcctcttcctccttccaaaaacaangggttcaaagcacnaaggtnt

SEQ ID NO: 6063 - DNA, 579 bp, Homo sapiens
  misc_feature (454)..(454): "n" may be a, t, c, g, other or unknown
  misc_feature (465)..(465): "n" may be a, t, c, g, other or unknown
  misc_feature (505)..(505): "n" may be a, t, c, g, other or unknown
  misc_feature (535)..(535): "n" may be a, t, c, g, other or unknown
  misc_feature (549)..(549): "n" may be a, t, c, g, other or unknown
  misc_feature (556)..(556): "n" may be a, t, c, g, other or unknown
  misc_feature (579)..(579): "n" may be a, t, c, g, other or unknown
gaggcagagtctcgctctgctggtcaggctagagtacagtggtgcgatctcggctcactgcaacctctgcctcccaggttcatgcgagtctcctgcctcagcctcctgagtagctgggattacaggcacctgccaccacgcttggctatgatttttgtatttttggtagagacagggtttcaccatgttggctaggctgttctcaaactcctgacctcaagtgatccacccacctcagcctcccaaagtgctgggattacaggcatgagccaccatgcccagtctatttttattttttgagacaggatctggctctattgcccagggtggagtgcaatagtgcaatcttggctcactgcagcctctgcctcccaggctcaaaccatcctcccacctcagcctcctgagtagctaggactacaggcgtgtaccaacatgcccatctaatttttgnatttttggtanaaatggggtttcgccatgttgcccagactggctggaactnctgggcttcaagtgaaccttccaccttggncttccaaagtgctnggattcngactgagccccatacccatcctn

SEQ ID NO: 6064 - DNA, 580 bp, Homo sapiens
  misc_feature (580)..(580): "n" may be a, t, c, g, other or unknown
gagacagggtctcactctattaccctggctagagtgcagtggagcaatcatggctcactgcagccttgacctcccagcaatcctctcacctcagcctcctgagtaactgggaccacaggtgtatgccaccaagcctggctaatttttttattttttggagagacaacgtctcgctatgttgcccaggctggtttgaaatcctggactcaagcaatcctcccacctaggcctcccaaagtgttgggattatgggtgtgagccacagcgcctagtccagagatttattgactttattcactgccttacttttgtcttggctttctcttttcaaggaaaacaagggcatctgttgccctcgtcctgcttaattttgattctcctcagtgtagggtcctgacctggaagattatcctggctggtcagttttgagagttcccagggactagatggctctaactcagctggtcccaaccaggtgttattttattccccttcatcccccctttctcatcccctaagtaacatctggcaatggttaaaaactggtttttggtgtcacaaccaagccatgctttcgggn

SEQ ID NO: 6065 - DNA, 599 bp, Homo sapiens
  misc_feature (100)..(100): "n" may be a, t, c, g, other or unknown
  misc_feature (474)..(474): "n" may be a, t, c, g, other or unknown
  misc_feature (487)..(487): "n" may be a, t, c, g, other or unknown
  misc_feature (528)..(528): "n" may be a, t, c, g, other or unknown
  misc_feature (531)..(531): "n" may be a, t, c, g, other or unknown
  misc_feature (535)..(535): "n" may be a, t, c, g, other or unknown
  misc_feature (553)..(553): "n" may be a, t, c, g, other or unknown
  misc_feature (564)..(564): "n" may be a, t, c, g, other or unknown
gtagagacaggtcctcattttgttgccaggctgatctcaaactgcaggcctcaagggatcgtcctgcctcagtgctgggactacaggtgtgagccactgngcccagcccgtacactttttaaaaaacttaattcttcaaattcacgaataataattctacatattcgtggggtagaatactttgatacaaagaatgtacagttatcagctcagggtaacaagcatatccatcatctcaaacacctataatttctttgtgttgggaacattcaatattcttctattttaaagtatatattaactatagtcatgctatagtggtacacaacactagggcttattcctatgttattttgcatcctcccacaaatctctccctatcccttccttccccctatcttctcagcctctagtatgcgctgtcctaatttttacttctataagattaactttttaaaacttccacatgagtgngaacatgcattgnttaattttccattggtggcttatttcacctactataaaggnctncagntcctttccatgttggctncaaaatgaaanggacattctttttttaatggctggaatagaatccc

SEQ ID NO: 6066 - DNA, 581 bp, Homo sapiens
  misc_feature (546)..(546): "n" may be a, t, c, g, other or unknown
  misc_feature (570)..(570): "n" may be a, t, c, g, other or unknown
atgaaaaatccaaagtttattgcaaattgtattttgcttcccttcgttcttcatttttacaggatttattgatatccatgattttttcacagatgtacttgttgactttggagagtctctgtgcaatttcagtttcatccacagtttcttgtgctattctgtcatacaaacactctctgacgatgcttagtttgcgaggcgagaggggtggtttagggactgcatctttctttttttttgtggcgacgcctgtgacgcttctgtttttcagaacatctgttccccaaatcataactgccaagttcttcgtgtacttggaatctccttgggttacttgtagctggtgccatttctcctcatcaacccaaatcccgcttcccagatggaccttgccattgtctaggatatacttgtccatgacaggcgcaggagcggggtaataggacgacgtatttgcttcctcactgaaagtgctccgtaacttccggctcggctcgagacattctgactttactttttccagacaatggcgggaccgttgccaancttaagaaccagcacgtcttggancctccggttag

SEQ ID NO: 6067 - DNA, 581 bp, Homo sapiens
  misc_feature (214)..(214): "n" may be a, t, c, g, other or unknown
  misc_feature (305)..(305): "n" may be a, t, c, g, other or unknown
  misc_feature (331)..(331): "n" may be a, t, c, g, other or unknown
  misc_feature (360)..(360): "n" may be a, t, c, g, other or unknown
  misc_feature (368)..(368): "n" may be a, t, c, g, other or unknown
  misc_feature (452)..(452): "n" may be a, t, c, g, other or unknown
  misc_feature (542)..(542): "n" may be a, t, c, g, other or unknown
  misc_feature (556)..(556): "n" may be a, t, c, g, other or unknown
  misc_feature (558)..(558): "n" may be a, t, c, g, other or unknown
atctctgccaggttttggtatcaggatgatgctggcctcataaaaagagttaaggaggaatcccttcttttcaattgtttggaatagtttcagtagaaatggtaccagctcttttttgtacctctggtagaattcagctgtaaatttgtctggtcctgggcttttttttttttttttttttttttttggtagactattactgcctcaatttcanaagtcgttattggtctattcaaggattcaatttcttccaggttcagccttaggagggtgtatgtttccagaaatttattctctttttctanattttctagtttatgtgcagagaggngtttataatattctctgatggttgcttgnatttctgnggggtcagtggtgatatcccctttatcatttctgattgtgttggattcttctctcttttcttctttattagtctagttagcagnctattaattttttttcaaaaaaccagctcctggatttggtaatttttgaaagattttttggggctctggctccttgagttctgctctggncctaattctggaancngctactttggggttgggttttgg

SEQ ID NO: 6068 - DNA, 348 bp, Homo sapiens
  misc_feature (63)..(63): "n" may be a, t, c, g, other or unknown
  misc_feature (143)..(143): "n" may be a, t, c, g, other or unknown
  misc_feature (151)..(151): "n" may be a, t, c, g, other or unknown
  misc_feature (200)..(200): "n" may be a, t, c, g, other or unknown
  misc_feature (265)..(265): "n" may be a, t, c, g, other or unknown
  misc_feature (267)..(267): "n" may be a, t, c, g, other or unknown
  misc_feature (272)..(272): "n" may be a, t, c, g, other or unknown
  misc_feature (288)..(288): "n" may be a, t, c, g, other or unknown
  misc_feature (291)..(291): "n" may be a, t, c, g, other or unknown
  misc_feature (301)..(301): "n" may be a, t, c, g, other or unknown
  misc_feature (326)..(326): "n" may be a, t, c, g, other or unknown
gccacagccagaaaaatttattttaaaatagaaacatacattaagctttaaaacaaccaactnttaaacaaaagaggaaagagcctttgatcccagagtccatgcggaatgaattccatacgtgtttgaaattcacataaggngcacttanaaaaccacctgaaatggaaatccaacagcccccttgcctgtgagggctnccacccctgcccgcgtgaggacatggccgaaccccggacactcgtgtgccgggagccaccacagntnaaggngaccggcagcacccanctntgtgaccaanacagatgttcacacgtgggggcatngtaagcgctaccagctccaaat

SEQ ID NO: 6069 - DNA, 579 bp, Homo sapiens
  misc_feature (538)..(538): "n" may be a, t, c, g, other or unknown
  misc_feature (545)..(545): "n" may be a, t, c, g, other or unknown
  misc_feature (556)..(556): "n" may be a, t, c, g, other or unknown
  misc_feature (564)..(564): "n" may be a, t, c, g, other or unknown
  misc_feature (566)..(566): "n" may be a, t, c, g, other or unknown
ctttttttttttgagacagagtctcactctgttgcctaggctggagtgcagtggctccatctcggctcactgcaacctctgcctcccaggttcaagcagttctcctgcctcagcctcctgagtagctaggattacaggcatgagccaccacgcctggctaatttttgtatttttagtagagatggggtttcaccatgttggtcaggctggtctcgaactcctgacctcgtgatccgcccgcctcggcctcccaaagtgctgggattacaggcatgagccaccatacctggcctctatcttataacaagtcacttccctcaacatatcaagattaccagtatgaagggcagttacttaattcctaatttcctacaatgttaaagacattttcctctttacttacagaatttaaggtactcatattttcttggttctaaacaattaacacagaaataaaaataaactgaaatatgttttttctttttatagactgggttttgctctgcacccaggctggaatgcatggtggtgacacagnttcctgnagccttgaatnctaggagntnaagcaatcttctg

SEQ ID NO: 6070 - DNA, 561 bp, Homo sapiens
  misc_feature (534)..(534): "n" may be a, t, c, g, other or unknown
  misc_feature (542)..(542): "n" may be a, t, c, g, other or unknown
  misc_feature (547)..(547): "n" may be a, t, c, g, other or unknown
  misc_feature (553)..(554): "n" may be a, t, c, g, other or unknown
  misc_feature (556)..(557): "n" may be a, t, c, g, other or unknown
ctggtgcctaccaaggtgaggtctttatggtgtatagaggttggtgagtttcagagccagtgtggccagtctagtccctcccctttccctagcccagcacaattccctccattgagggcccacatcacctccagagggaggagggaggggtcagacccccccatagcaccaatctggataggccactctctgacaaaacagagcgagcagtgccttccacaaacggggtaaatggggctaagaaggggggaggccttttcctgtgggagaccaagagtagcaccatctgtagaaagaaagctggggggtaagggaggcacatagatggtggcagacagctgaggggtcctggcttctctccccacctggcaatatgcagacagcaccgtgcctgtgcatgtgcctgtgtggctggagaagtcttcagattgcaaaccacccaaggggtgagggagccccaggtgccccaaacatgtggggtaaagtcaaggtaagtgcatgtcttggagggctggggtggggaatggaaggggntctgggcncaaanattgtnngnnatga

SEQ ID NO: 6071 - DNA, 586 bp, Homo sapiens
  misc_feature (530)..(530): "n" may be a, t, c, g, other or unknown
ggtttcaacagtactttgtttccagaacaaagaaatgtttctaaccacatcttgtaccccttcctcatcaactccagactaccacagacctttttccaaaactgtgtgtcacacatccaggtcttgtgctttagagctgcctctcaggcaattttagccagccatttctccaagtcctggatgtcagcagagcccacgtcccctcttccacccttggcactgcactccaggaactccactttgaggggcaactgtgagaattcaaactctttgcctttcttccccagctgagcaggggcagtgctggaactgtccagtgtgctgggggcagcagaacgggtaactcgtaaggtgttgagttctttctccagctgctgttgaattaactttgctgattttgccattgcaatatcttgcttattgcaggctattaagaatgatggtgtattcttcagacccatactgtcaatgaggacttgatacagaaactcagccacatctttcacctctcgctggaatgctgcactatncacaacaaaccaataccctggtgaagacttaaaccggtctaagactgaagcctcaa

SEQ ID NO: 6072 - DNA, 560 bp, Homo sapiens
  misc_feature (489)..(489): "n" may be a, t, c, g, other or unknown
  misc_feature (515)..(515): "n" may be a, t, c, g, other or unknown
  misc_feature (520)..(520): "n" may be a, t, c, g, other or unknown
  misc_feature (524)..(524): "n" may be a, t, c, g, other or unknown
  misc_feature (529)..(529): "n" may be a, t, c, g, other or unknown
  misc_feature (546)..(546): "n" may be a, t, c, g, other or unknown
  misc_feature (557)..(557): "n" may be a, t, c, g, other or unknown
cgctgttccaaagtttaattaaaaacacaatttacaaatatttaatatcttctgaaaagcatttctaagttaagaatgaaaaagtatgtacataatatataatcaaataccaggcagcctcaacttccaccaggtccacactcagcaacatccgtctttttaggttcttcagtgtcttctgtcaaatccacaaagttgttttccatgacgggggaaggaatggaaatccccattgcttttcgaactccatacgtgcttacgatatcacctggagttacttgctgtgcaagttctttaagattattggtcacttgttcagcaagatgcatttctctgtatgagggacccaagagacagatcatgttcggagggggtctggtgctcaaacgttcattctgggcttcctggagttccctgagcaatctggtggtctcatcaagtttcttctggaatatttcagcttcttcagagtcaaaaacttcaactggnacgccaaaatttggtactggtttcancgctntgancctgncttgagaccggagtccnaacgccctggnggg

SEQ ID NO: 6073 - DNA, 544 bp, Homo sapiens
  misc_feature (483)..(483): "n" may be a, t, c, g, other or unknown
  misc_feature (495)..(495): "n" may be a, t, c, g, other or unknown
  misc_feature (498)..(498): "n" may be a, t, c, g, other or unknown
  misc_feature (506)..(506): "n" may be a, t, c, g, other or unknown
  misc_feature (521)..(521): "n" may be a, t, c, g, other or unknown
  misc_feature (523)..(523): "n" may be a, t, c, g, other or unknown
  misc_feature (528)..(528): "n" may be a, t, c, g, other or unknown
gctttaaaaaccacacagtaggatttttgtgaacataaagaggttcaagggacactcaggagagaaaataagagcttaaagacaaaggccaattccatgtaattgaaaccatatctagtcacaagtacatttgaaatgctgcaaaaaaaaatgtttttgcaggtgaataaatgtccagtcctctagtttggaattctgtttaactcactgtcaggcagggcaggaaacaaggtcactctgctttttttctctgtcaacactttgggaggaggatggagaagaatatacttcagtgtttcttctccagtgggagagcccttccctcagtggtttaagaagccctctctcaacggggactcttcattagcacctgctacggcctgagctacgtgcacccttatctcttactgagccagttacacaggggcatgactgaggccatgtgaaaatataattaaacgttggtaaaaattcacagaatgntaaatcccccanttnaaggctgnacgcgcgcaaaaagnanaaacncccggcttaccaaacc

SEQ ID NO: 6074 - DNA, 560 bp, Homo sapiens
  misc_feature (473)..(473): "n" may be a, t, c, g, other or unknown
  misc_feature (521)..(521): "n" may be a, t, c, g, other or unknown
  misc_feature (527)..(527): "n" may be a, t, c, g, other or unknown
  misc_feature (542)..(542): "n" may be a, t, c, g, other or unknown
  misc_feature (551)..(551): "n" may be a, t, c, g, other or unknown
acagtttcaggttttatatttaagttcttaatctgtttttagctgatttttttgacatggcataagataagcgtcaattttcattcttctgcgtgtggatatctggtattctcaacaccatttattgaagagattgtcctttccctattttgtgttcctcacctttgtcataaataaggtgactataaaggtgtgggtttatttcttcgttttctatcctctcctattgattgatgtgtctgcttttatgctagtatcgtgcagtttgattataattgcttcataatgtttttaaatcagggggcatgatgcttccagacttcttcattctgctcaagactgttttggctatttggtatcttttatgattccatatggatttaagctgtagattgctttgggtagtatgaacacctgtccaacatttattcttccaatctataaacacgggatatctttccatttatttgggntttcttcactttatttcatcagtggtttatagctttcagaaaccaagnttttancctccttgggtaaantaaacctanggatttaaa

SEQ ID NO: 6075 - DNA, 518 bp, Homo sapiens
  misc_feature (177)..(177): "n" may be a, t, c, g, other or unknown
  misc_feature (267)..(267): "n" may be a, t, c, g, other or unknown
  misc_feature (411)..(411): "n" may be a, t, c, g, other or unknown
  misc_feature (468)..(468): "n" may be a, t, c, g, other or unknown
  misc_feature (474)..(474): "n" may be a, t, c, g, other or unknown
  misc_feature (487)..(487): "n" may be a, t, c, g, other or unknown
  misc_feature (511)..(512): "n" may be a, t, c, g, other or unknown
  misc_feature (514)..(515): "n" may be a, t, c, g, other or unknown
ccagacttcaatcaacattttaattaccaagtctatatttagcaagacaatgtgggagagataaagaggaaggaaggggtaggtggggaggggttctcaaaggagctgacccattttctgcattggctgcagagccttgcagtcctggccaggagttcttggccttgtgcctttcanaagtgccgacaggcatcaaggaggtacttacgcagctacagctcagtggcagctgcaaaccccatctacgaaacatgtcatcaggactgncctttaatagtcttcctcctctctgcagctgcgggaaagaggactggccaagaatttcaggtggggtcagtgtgactgcagggtcaccgcaacagctttggctgtggcgttgaggacggtggtgggaagccgagcagcagggancatggcagggatgtctctggggaccctctggatgggccggatgttggggcccttcantggtgnccaggatcccctntaccacttttggggtaggcaaaanncnnatt

SEQ ID NO: 6076 - DNA, 564 bp, Homo sapiens
  misc_feature (488)..(488): "n" may be a, t, c, g, other or unknown
  misc_feature (495)..(495): "n" may be a, t, c, g, other or unknown
  misc_feature (503)..(503): "n" may be a, t, c, g, other or unknown
  misc_feature (508)..(508): "n" may be a, t, c, g, other or unknown
  misc_feature (529)..(529): "n" may be a, t, c, g, other or unknown
  misc_feature (556)..(556): "n" may be a, t, c, g, other or unknown
  misc_feature (564)..(564): "n" may be a, t, c, g, other or unknown
aagcaggagatgctttatttcagaacaaggtacaataggccacacctctgtcctgcacctgggaaccttgggcatggatgagcagagcaaccacaggtctgaagagacaaagcagaggaagcctgagcgtgcttctcccctgtgtggaggggcaggccgccattgttgtggtgtggctcctttcatctcctcagctgtccagggactagggtatgaagggacaagaaaaccaggcccaatatcctctaaaattaagctgaggcaggagagggacacccaaggcaagggtgacaggcctttcttgttggctggagagccagtctccggccggattctggtgccaacggcaaaggaaggccttcttctcccccttggatgtgaccagacacgtgcccagagctgcctgctcatggtgggttgtcctgcgttggggcagtctcaactactggtcccacagaagaagtcttcaggaagctcacttaggagtncattcanggcattgnttctnggaagtctttcttaagggacncttttgctttaggtctgggctgttttnaaccttcn

SEQ ID NO: 6077 - DNA, 565 bp, Homo sapiens
  misc_feature (441)..(441): "n" may be a, t, c, g, other or unknown
  misc_feature (498)..(498): "n" may be a, t, c, g, other or unknown
  misc_feature (508)..(508): "n" may be a, t, c, g, other or unknown
  misc_feature (534)..(534): "n" may be a, t, c, g, other or unknown
  misc_feature (536)..(536): "n" may be a, t, c, g, other or unknown
  misc_feature (548)..(548): "n" may be a, t, c, g, other or unknown
ataacacttgaaagtataaaatgctacatttccaaaaatatatatatttttttctgcaccagcacccttgtatagtaaaagtatctactttttgttcatttgtttcaatgcactacactttatctacaatttcattacatgtatacagcaaataggcaagcatggcttttacatccttaatgatttttttctatacagggaggtttaaaaaaaaatacttgaacagtttgcccagtaatgtgacacataatgcatgtaccttgttctcatatttttttaggtgtaaaataaagattcagtaattttaactcagatatttatctttttaaaaatagtgttgcagttttgttatttgcattacttttcaaaactccttaagtttttctctcatgggcacactttcttctaatacttcaaattttggcaggcaatataaaaaangctgcaacttctgccctttgagggcactgtagtgactaaacagcatatcaaatttgnatctttttgnaatcacttcaccaatggtatcctggncnaaaggtcatgcntggagcattatccccca

SEQ ID NO: 6078 - DNA, 562 bp, Homo sapiens
  misc_feature (449)..(449): "n" may be a, t, c, g, other or unknown
  misc_feature (462)..(462): "n" may be a, t, c, g, other or unknown
  misc_feature (478)..(478): "n" may be a, t, c, g, other or unknown
  misc_feature (531)..(531): "n" may be a, t, c, g, other or unknown
  misc_feature (539)..(539): "n" may be a, t, c, g, other or unknown
  misc_feature (541)..(541): "n" may be a, t, c, g, other or unknown
  misc_feature (543)..(543): "n" may be a, t, c, g, other or unknown
attttagagataggatctctctatgttgcccaggctgcatttgaactcctgggttcaaagtgatcttcctgcttcagcctcccaagtagcttggactacagatacatagcaccatgccgggcaagtctatttgttctttaatatatcggttagctgttcaagacctttctgttcctgtggcactttgccttcattttattatactgtcatttattagcattgattacttttactactagttcctcaaatgtttggtgaagctataccttattctctaagacattagttgctgtgacagatacatccagatgtttgcctgtcaaaccttacaatgtatagagttcatagccctacctactgcttctgcaaagttctagaacttatttcctcagaattatgtctctaaactcctaaatatgcctgtgctctacagttccatcccatcctangccagtgagagangaagaacagactcttncactgggttcacaaaaaacttggcttggagcccaatcttgataaaggctgcangggtctananangagtcacaggcaaggtgct

SEQ ID NO: 6079 - DNA, 472 bp, Homo sapiens
  misc_feature (448)..(448): "n" may be a, t, c, g, other or unknown
  misc_feature (453)..(453): "n" may be a, t, c, g, other or unknown
  misc_feature (457)..(458): "n" may be a, t, c, g, other or unknown
  misc_feature (462)..(462): "n" may be a, t, c, g, other or unknown
  misc_feature (466)..(466): "n" may be a, t, c, g, other or unknown
  misc_feature (469)..(469): "n" may be a, t, c, g, other or unknown
ctaacagatgcagagccacagtcaccaacgtgtggaatttctataggaacagataaagagactaaaacatgcaaaaatatatggcaatttgttgtgcacataagataatcaggggagaaaaggcaaatgtgtttaataaatggtaatgggacaaactgactagtatttccatttggaaaaaaattaatgtagcattcagggaaaaaaaacttcccagccaggcgtggtggctcatgcctgtaatcccaacactttgggatgccaaggcaggtagatcactttaggtcaggcgttcaagaccagcctggccaacatggtgaaaccccatctctactaaaaatacaaaaattagctgggcatggtggcatgtgcctgtagtcccagctacccagggactgaggcatgagaactgcttgaacctgggaggtggagattgcagtgagccaanaatgngccnnttgnactncancct

SEQ ID NO: 6080 - DNA, 356 bp, Homo sapiens
  misc_feature (224)..(224): "n" may be a, t, c, g, other or unknown
  misc_feature (240)..(240): "n" may be a, t, c, g, other or unknown
  misc_feature (252)..(252): "n" may be a, t, c, g, other or unknown
  misc_feature (263)..(263): "n" may be a, t, c, g, other or unknown
  misc_feature (301)..(301): "n" may be a, t, c, g, other or unknown
  misc_feature (323)..(323): "n" may be a, t, c, g, other or unknown
  misc_feature (326)..(326): "n" may be a, t, c, g, other or unknown
  misc_feature (342)..(342): "n" may be a, t, c, g, other or unknown
  misc_feature (350)..(350): "n" may be a, t, c, g, other or unknown
  misc_feature (352)..(352): "n" may be a, t, c, g, other or unknown
cggtagtttcccaagtttattgtaagtggttttaagttaagtctcatccaaacaagttatcacacagcacttaaccaagccctgggatttactgtcttgatgactacacggctttgcacagtctgagatgcttcagtgtgcaaggcagcagctgggggggaggaggggggtcttcacagggacagctggcaagagacttcctgaggcacatcagctacgttggncaatttagggcacggnctggttctgcanctttgaaaggnggattctttctattagcacactttacaagagggattgnaaaggattaactcagtcaccanaancgaaacaccacttcanaaattcananacct

SEQ ID NO: 6081 - DNA, 569 bp, Homo sapiens
  misc_feature (450)..(450): "n" may be a, t, c, g, other or unknown
  misc_feature (467)..(467): "n" may be a, t, c, g, other or unknown
  misc_feature (490)..(490): "n" may be a, t, c, g, other or unknown
  misc_feature (532)..(532): "n" may be a, t, c, g, other or unknown
gtggcaagacaacttgtaattacctgttgaagcatttttatgagagttgcttaaaatccttgtcaagtaattccaacatctgatttgtctcagtgttgtcatctgttgactgtcatttcttattcaagttgtgatttttctggttcttggtatgacaggctattttacatcgtatcctgaaccttttgtctattattttaatcttttatttttagtaggcagtcactccatttgtgtttagcatgcaagccctggcttagtttttgtgggctatgagtccagtggtaatttagtttttaaagcctttgcagtgttattttggtctgcttggtttatctggtgctgctggggttcccgaatggtccttcatgatgctactttagggaaagaaggattttctcccaagccaggtcccatggtatctctgggagaagggagtctcaggctcanggtaataaaaaatcttnctggggtagaatgctttttggcnaaaggccctggatgcctaattttttaaccccaaagaccaagnttaaggcttggatgtttggcaatggggattcctgatt

SEQ ID NO: 6082 - DNA, 524 bp, Homo sapiens
  misc_feature (444)..(444): "n" may be a, t, c, g, other or unknown
  misc_feature (462)..(462): "n" may be a, t, c, g, other or unknown
  misc_feature (469)..(469): "n" may be a, t, c, g, other or unknown
  misc_feature (488)..(488): "n" may be a, t, c, g, other or unknown
  misc_feature (492)..(492): "n" may be a, t, c, g, other or unknown
  misc_feature (500)..(500): "n" may be a, t, c, g, other or unknown
  misc_feature (508)..(508): "n" may be a, t, c, g, other or unknown
aacatttattatgattattttatttaaaaaaaaagccccacatctccgggcaataaactacaatacagtaaaaagtagcatctggtgttaagacactctgccgacaggctgcatgccttcagtgtcggcaaaggctctgcacagacatccacagtattccacactgcctcccccatttcagaagtccctactgaaatgagaaggacactgaggcacacaggggaagagaatggcctgaggttagactgccacgaaaggcacgtgggaactgggcccagaaaattccaaccgttccatacaaaatgctacccagcagggaaaaagagtcacttcttcttccaagtgaccagtaatgccacactcatggggcagcaagaagggtggcaagggaaccaagccctgacctgagcccagtgatcaggccagagcccaccaatgggactngccacaggtccaggctanccccttncttcaccggattggcctanttcnaaaccaanccttcttngggaaaaccatttgca

SEQ ID NO: 6083 - DNA, 556 bp, Homo sapiens
  misc_feature (497)..(497): "n" may be a, t, c, g, other or unknown
  misc_feature (516)..(516): "n" may be a, t, c, g, other or unknown
  misc_feature (522)..(522): "n" may be a, t, c, g, other or unknown
  misc_feature (524)..(524): "n" may be a, t, c, g, other or unknown
  misc_feature (536)..(536): "n" may be a, t, c, g, other or unknown
  misc_feature (543)..(543): "n" may be a, t, c, g, other or unknown
  misc_feature (552)..(552): "n" may be a, t, c, g, other or unknown
aatggtctaaatattctcttacttattaaagataggaaggaaatacttaactagtactgcattctgtgtatgtatgtgcatgtatatttgtgtgtgtgtgtatgcaagctcacagctgtctgctgcatgtagcatcttggaatatatctgcaagataagagaggtgctgttaaaatgttctcatattctacaggtgaaaaacaagggctgcattatttttaaactcatcaaccattcacccccctcgccctagcaggctcgggaaaaaaacaaacccaagatttatttcaatgagaaaaaaaacacaaaacactattatgccaaaccactgctaatttagaggaccaaaaggacatgactagatgaaatacatgccgaaaatttttgagcagtgctgaagggcgttctcgtaacatatacctactttgcatggttgtaggcttcaatctcttccagtaatacgctgtcgttcaaagagaaagggctggctttggccnaacttttagtccatggccngtttanangccccaagaatnactgggnagttttggnaggg

SEQ ID NO: 6084 - DNA, 551 bp, Homo sapiens
  misc_feature (43)..(43): "n" may be a, t, c, g, other or unknown
  misc_feature (261)..(261): "n" may be a, t, c, g, other or unknown
  misc_feature (309)..(309): "n" may be a, t, c, g, other or unknown
  misc_feature (369)..(369): "n" may be a, t, c, g, other or unknown
  misc_feature (386)..(386): "n" may be a, t, c, g, other or unknown
  misc_feature (468)..(468): "n" may be a, t, c, g, other or unknown
  misc_feature (485)..(485): "n" may be a, t, c, g, other or unknown
  misc_feature (496)..(496): "n" may be a, t, c, g, other or unknown
  misc_feature (527)..(527): "n" may be a, t, c, g, other or unknown
  misc_feature (538)..(538): "n" may be a, t, c, g, other or unknown
  misc_feature (551)..(551): "n" may be a, t, c, g, other or unknown
aataatggaaaagcttgttttattgtaaaaattaccagtatgngacacagagacaagaagcaagcagatgccattggaaaaatggtgccagtagacttgcttgttgcagggttgccacaaaccttcagttaaaaaaaaaaaaaagaagcaatttctgctaagcacaatgaaacaatgtatgcctgtgcgtatggaggggcatggggaaatttgggaggtgatgaaaatattatcttgatttcacgagtgtatgcaggtcanattcattatacatcactgatatttcaaagctgtaagaaaaaacaaaancaagattgattgtgtgaaaagatgttcagcattattaatcattataaagacttgaaatgntttatttctattcttgnctattcaacttatttgggataaaagtggagaatagttttccttatcctaaattcacagcttgcacaggcaactgaaatgctntcatgcgtttggacccnatggacactanctgggtaaaccggtccggaaaccgtttaccngttaacttganttaccacttttan

SEQ ID NO: 6085 - DNA, 528 bp, Homo sapiens
  misc_feature (453)..(453): "n" may be a, t, c, g, other or unknown
  misc_feature (462)..(462): "n" may be a, t, c, g, other or unknown
  misc_feature (490)..(490): "n" may be a, t, c, g, other or unknown
  misc_feature (506)..(506): "n" may be a, t, c, g, other or unknown
  misc_feature (524)..(524): "n" may be a, t, c, g, other or unknown
  misc_feature (526)..(526): "n" may be a, t, c, g, other or unknown
  misc_feature (528)..(528): "n" may be a, t, c, g, other or unknown
gaggtagggtcttgtgctatcacccaggctggggtgcagtggtgtcatcatatctcactgcaacctcgagctcctgggctcaagtgatcctcccacctcagcctcctgagtagctgggactacaggtgtgcatcaccatgcccagctattttttaaaaaaagatttcttgtagagatggggtctcgttatgttatccaggctggtcttgaactcctgcctcaagcaaccctcctgtctctgcttcccaaaatgctgggactatagatgtgagccaaaacgcttggcagtggccattcttttggtttaaatcttgccttcgttgtactagaatataatccatctgataggaatgaatttgactattttatgtatcttcaagtccacagcctctggcataaagccagatgcttacagaaagcttaataaataggtattaaaatggtttttaaaanggctggtanaaactggactggacttaaattacctagnttaagcttttgggaangggaaatgccctaaaaancncn

SEQ ID NO: 6086 - DNA, 561 bp, Homo sapiens
  misc_feature (489)..(489): "n" may be a, t, c, g, other or unknown
  misc_feature (494)..(494): "n" may be a, t, c, g, other or unknown
  misc_feature (504)..(504): "n" may be a, t, c, g, other or unknown
  misc_feature (509)..(509): "n" may be a, t, c, g, other or unknown
  misc_feature (511)..(513): "n" may be a, t, c, g, other or unknown
gagtgggagtctggctctgtcgcccaggctggagtgcagtggcacaatctcggctcactgcaagcgccgcctcccaggttcacgccattctcctgcctcagcctcccgagtagctgggactacaggcgcccaccaccacacccagctaattttttgtatttttagtagagacggggtttcaccatgttagccaggatagtctctaactcctgacctcatgatccgcccgcctcgacctcccaaagtgctgggattacaggcatgagccactgcgcctggccggtacttgattagattctaattccagagaagatattggttagtataaactggttagttataaacctaccacatatatattggaaaaattaccctgcgtaattcagattaatttcataactttataataagcatttaaaattttttttcctttaatgcaggcattacaaggagccagtcaaattattgctgaaatccggagactcattnttggngaaaaaaacntttgnannnttggaaacttgttgcctcaaaacttgctagttactgcctacctgagta

SEQ ID NO: 6087 - DNA, 520 bp, Homo sapiens
  misc_feature (470)..(470): "n" may be a, t, c, g, other or unknown
  misc_feature (472)..(472): "n" may be a, t, c, g, other or unknown
  misc_feature (494)..(494): "n" may be a, t, c, g, other or unknown
  misc_feature (501)..(501): "n" may be a, t, c, g, other or unknown
  misc_feature (507)..(507): "n" may be a, t, c, g, other or unknown
  misc_feature (510)..(510): "n" may be a, t, c, g, other or unknown
  misc_feature (514)..(514): "n" may be a, t, c, g, other or unknown
gagatgtagtttcgctcgttgcccaggctggagtgcaatggcacaatcttggctcaccgcaacttccgcctcctgagttcaaatgattctcctgcctcaacctcccaagtagctggaatcacaggcatgcaccaccatgcccagctaattttttgtatttttagtagagacgggggtttctccacgttggtcacgctggtctcgaactcccgacctcaggtgatctgcctgcctgggcctcccaaggtgctgggattacagacgtgagccaccgcacccagcctcttaattcttaatggggccaaataatcctttccctccgaaatataaaaccaggacaagagaaaaatgtgagttctctcaccacctattcccactaccttcccccttcagaggccaagtttggcttgcatgtgatgatccctgctgctctgtgctgctcctacccatcttcactgacccaacagaangnggcgcttttaatattatgcctnctttganacctgntanctgncaatac

SEQ ID NO: 6088 - DNA, 526 bp, Homo sapiens
  misc_feature (447)..(447): "n" may be a, t, c, g, other or unknown
  misc_feature (467)..(467): "n" may be a, t, c, g, other or unknown
  misc_feature (478)..(478): "n" may be a, t, c, g, other or unknown
  misc_feature (480)..(480): "n" may be a, t, c, g, other or unknown
  misc_feature (499)..(499): "n" may be a, t, c, g, other or unknown
  misc_feature (502)..(502): "n" may be a, t, c, g, other or unknown
  misc_feature (520)..(520): "n" may be a, t, c, g, other or unknown
gagatggagtttcgctcatcacccaggctggagtgtagtggtgcaatctcggctcactgcaacctccgcctcctgggttcaagcaattctcctgtcttagcctcccaagtagctgggattaaggtgtatgccaccacgcccagctaattttttgtatttagtggagatgggatttcaccatgttggtcaggctggtctggaactcctgacctcaggtgatccacctgcctaggcctcccaaagtgctgggattacaggcgtgagctactgcgcccgacctcaaaaattcttaatacctgttgcacacaagtttttatgaaaattggcacttccattacaacaccgttctgtggtggcagaggacaccattttcaagagcaatttcacagcatctaactgaaacgaaactgatgatccaacaatgccacagctagacatttatcctgnagaattaggagaccaactgnattagaatatntntattgggcacatttttgcnggnaccaaaccaaccaaaccnttaacc

SEQ ID NO: 6089 - DNA, 577 bp, Homo sapiens
  misc_feature (55)..(55): "n" may be a, t, c, g, other or unknown
  misc_feature (454)..(454): "n" may be a, t, c, g, other or unknown
  misc_feature (481)..(481): "n" may be a, t, c, g, other or unknown
  misc_feature (563)..(563): "n" may be a, t, c, g, other or unknown
  misc_feature (574)..(574): "n" may be a, t, c, g, other or unknown
atgtgcaatcaaatttattaatcagtagaaaaacaacatgtattcaatttaatgntaatccacaaatagctcttggtcagatttatgaaagtctgtgtaagttagaacacaattttacatttttttctctaagcaatatgcaaaagataacaatatttaactacaaatatataaacaattttagtattatactaaggattgtacttgaagaagttacaatgtaatggaaataataacttaccatattacaggtctcaacactatcatgttggcccctattcagagactgtgcagcgtacacaattagtgcagcagcagttcttggtataatatatgacaaccaagtttactggtaagcttgaaaataattcttatgtaaaaattagagattttatgaatttctgatggttcagtaattttttttcagaaatgttatttcagtcacttaatctgnccttctatccatattccacaggtctgngagttaacctcatccaattgctgatgagtcttctcctaggttgcaatttcttcttaatcctttacaagctcctttttctctnctagcactggngac

SEQ ID NO: 6090 - DNA, 589 bp, Homo sapiens
  misc_feature (508)..(508): "n" may be a, t, c, g, other or unknown
  misc_feature (513)..(513): "n" may be a, t, c, g, other or unknown
  misc_feature (524)..(524): "n" may be a, t, c, g, other or unknown
  misc_feature (544)..(544): "n" may be a, t, c, g, other or unknown
  misc_feature (556)..(556): "n" may be a, t, c, g, other or unknown
  misc_feature (589)..(589): "n" may be a, t, c, g, other or unknown
gagacagagtttcgcacttgtcaccaaggctggagtataatggcgcgatctcggctcactgcaacctctgcctcccaggttcaagcgattatcctgcctcagccccccgagtagctggaattacaggtgcccgccaccatgcccagctaatttttgtatttttagtagagacgggtttcactgtgttggccaggctggtcttgaactcctgacctcaagacccgcctgccttggcctcccaaagtgctgggattacagctgtgagccaccgtgccaggtctagatcatattttaaaataaggaactattaaaaatatgtatgccaaatttacatggattatttcaaagtaaagtattaaattaacaagaaatttgtttcaaaataggaaattcagttttctgatccaccatctgggatggagccacaagcaacaggcagattttcataaaagtccttacaggaagagcaccactctcaagggtgaacccttggacacaacagaaaatnccaangcccagatccngaataaagaaggaatttctnctgacaacaganactgactttgtggcagcactggaaaaagacatn

SEQ ID NO: 6091 - DNA, 588 bp, Homo sapiens
  misc_feature (501)..(501): "n" may be a, t, c, g, other or unknown
  misc_feature (521)..(521): "n" may be a, t, c, g, other or unknown
  misc_feature (549)..(549): "n" may be a, t, c, g, other or unknown
  misc_feature (560)..(560): "n" may be a, t, c, g, other or unknown
  misc_feature (562)..(562): "n" may be a, t, c, g, other or unknown
  misc_feature (564)..(564): "n" may be a, t, c, g, other or unknown
  misc_feature (574)..(574): "n" may be a, t, c, g, other or unknown
gagatggagtctcggtcgcccaggctgaagtgcaagggtgcgatctcggctcactgcaatgtctgccttctgggttcaagtgattctctgcctcccaagtagctgggaccacaggcacccaccaccacacccggccaatgtttgtatttttagtagagatggggtttcaccatcttggccaggctggtcttgaacctctgacctcgtgatccaccctcctcggcctcccaaagtgctgggatcacaggcgtgagccactgcgcctggcctttaaaaaaatttttttttagacatgaggtctcattatgttgtccaggctggtcttaagctcctgggctcaagcgatcctcccacctcagcctcccaaagttctgggattacaggcgtgagcaaccgtaacatgaggtcccagcttcatgttcattttttgttgttgctacaacaaagtaccctacatttagtggcatcaaacaccacaaatctaccatcttacaagttctnggggccagaagcccaactanggctattaaggttaaggcaaggtgtcanaaaagcttcantncntttgggggangctttaaaaaaatg

SEQ ID NO: 6092 - DNA, 583 bp, Homo sapiens
  misc_feature (422)..(422): "n" may be a, t, c, g, other or unknown
  misc_feature (430)..(430): "n" may be a, t, c, g, other or unknown
  misc_feature (493)..(493): "n" may be a, t, c, g, other or unknown
  misc_feature (498)..(498): "n" may be a, t, c, g, other or unknown
  misc_feature (540)..(540): "n" may be a, t, c, g, other or unknown
  misc_feature (552)..(552): "n" may be a, t, c, g, other or unknown
  misc_feature (569)..(569): "n" may be a, t, c, g, other or unknown
  misc_feature (573)..(573): "n" may be a, t, c, g, other or unknown
  misc_feature (576)..(576): "n" may be a, t, c, g, other or unknown
gagattatgggggtgggtggcttttgggagggagaagcgggggagttgaaaaacttctcaagtgtccactctgtttttgagacagtaattaggattcagaaagctccttattaatagctcataatttgggggggcacttcagggactccaattacaaagttcaaaataaatcactgcacgtcccctcccccctcccccaaaaaaagaaaaaaggactaattttagataacagaaatcattctacaaagaactggattatgagggggcaagggagtaatagccaccaggttataaggaaccctaaaacatcacagaaaagttcactgacttaggaggcccaagatgcaagctccagtaacaacataaagctgctcaaatgccttctgaaagcatagacgctgttgtcttcagtgggggtgttngggggttnggcggttattcaagtctggctctgatggcctttctttcccgctggttctccactagggttcangctgngctcttgaggaaaggcttcatccatgagtctatctggatagnatctttggtctncaaaccccctagaaatntgantgngtccccc

SEQ ID NO: 6093 - DNA, 561 bp, Homo sapiens
  misc_feature (432)..(432): "n" may be a, t, c, g, other or unknown
  misc_feature (493)..(493): "n" may be a, t, c, g, other or unknown
  misc_feature (500)..(500): "n" may be a, t, c, g, other or unknown
  misc_feature (525)..(525): "n" may be a, t, c, g, other or unknown
  misc_feature (528)..(528): "n" may be a, t, c, g, other or unknown
  misc_feature (536)..(536): "n" may be a, t, c, g, other or unknown
  misc_feature (546)..(546): "n" may be a, t, c, g, other or unknown
  misc_feature (560)..(560): "n" may be a, t, c, g, other or unknown
agtagagacagggtcttgaaatgctgcctaggctggtcttaaactcctggcctcaagagagcctcctgcctctttttttccttttaaaataagaactatcactgttttcttctccttcctttttttttttttttttctctagcaactattgccaccctggccccaaaagttatttatagagtacattggtagtaattatacttacaatttagtccatggagtgcaggaccatgaggaactatagctagataagattgtgccagaattagaagaatagacattttactttcagagaccatgactaaaagaatattaacaccaagatgctccttccatcagctggatgtacctttgggcttggaaagatggcaagtataggagttgtactggaacggctggatcaaataggttgaaggcatttttgtcattgtncatgtggggaaaagcaaccaagtaataagacacaacagatatctcttaaggcccgcacagntcacagngaccctccttcccagacaacgtaanggnggacagtnccaaattttntcccctaactgggna

SEQ ID NO: 6094 - DNA, 578 bp, Homo sapiens
  misc_feature (41)..(41): "n" may be a, t, c, g, other or unknown
  misc_feature (52)..(52): "n" may be a, t, c, g, other or unknown
  misc_feature (101)..(101): "n" may be a, t, c, g, other or unknown
  misc_feature (126)..(126): "n" may be a, t, c, g, other or unknown
  misc_feature (329)..(329): "n" may be a, t, c, g, other or unknown
  misc_feature (491)..(491): "n" may be a, t, c, g, other or unknown
  misc_feature (493)..(493): "n" may be a, t, c, g, other or unknown
  misc_feature (512)..(512): "n" may be a, t, c, g, other or unknown
  misc_feature (553)..(553): "n" may be a, t, c, g, other or unknown
gaaaagagaagtcatgtcattattaaaatcctcactatagngcaaatagtanaaatttccaaggaatctcggagatatttaagccaactcattttacaggngaatgacctgacacccagacaaggngaaatgacatgcctaaaagtcacacaggagagctagaagagaaaaaaagcatttttttttcccaaaacaagcagacaggatttttcatgttaatcaaaaagaatcaagatcatcagattaggaagaaatgaggaataaaacatacgttacacacagatttaaagaactagtcagtctgctgcccccaaaaccaaaaccttctntaaacatatggacatatatccatcaagatgcttacccttcaaatatcagaatcttggaaaattcaatttacaaatacattaattgcattatgatgatgaaataagttaattaaatgtgaaaacatcaaacagcaccaatcctagaagttaagacaggaaatncnctattatttaaaatagtcnctggattgggacagaatggaccattaccccttgccaaaccntttaaaaaactttttggcctaaagg

SEQ ID NO: 6095 - DNA, 588 bp, Homo sapiens
  misc_feature (473)..(473): "n" may be a, t, c, g, other or unknown
  misc_feature (506)..(506): "n" may be a, t, c, g, other or unknown
  misc_feature (540)..(540): "n" may be a, t, c, g, other or unknown
  misc_feature (561)..(561): "n" may be a, t, c, g, other or unknown
  misc_feature (574)..(574): "n" may be a, t, c, g, other or unknown
  misc_feature (583)..(583): "n" may be a, t, c, g, other or unknown
  misc_feature (588)..(588): "n" may be a, t, c, g, other or unknown
agtttttaaaaaatgctcctcaatgagattgtgttcaattttttttcagcattcttgcaacttttcccttaagtatagacctgtaaactgggaaaattgtacagtgcacttaattgtcctatctgagcaggtttattttatactcaacctctgtatctctgattagagaaaagatacagatatcacaggcagagtcaagtgctatttgaacaccaactggggcagatgctagcttaataaaaaagaaaaaattaaaaaaataaaaataaaaacaatgaatcctcttccatgttaacacaaatagcacacagtgtatggaaaagaaatgaagtacaacttttagggagcacagacatatatactgctactcttaaaattctttctcttctttttttaagaatgtcacatttaaatgcaagtcttaagaattcatagttaatcatcattgtatcaatattagcttatatacctgntctagttttaaatggcaaatagtcccacgttgngctaataaatcatattaatttcttctggtccctntggcaaaccctattgggagcncttcctttaaaangggttccanggctn

SEQ ID NO: 6096 - DNA, 581 bp, Homo sapiens
  misc_feature (444)..(444): "n" may be a, t, c, g, other or unknown
  misc_feature (463)..(463): "n" may be a, t, c, g, other or unknown
  misc_feature (490)..(490): "n" may be a, t, c, g, other or unknown
  misc_feature (498)..(498): "n" may be a, t, c, g, other or unknown
  misc_feature (508)..(508): "n" may be a, t, c, g, other or unknown
  misc_feature (517)..(517): "n" may be a, t, c, g, other or unknown
  misc_feature (566)..(566): "n" may be a, t, c, g, other or unknown
  misc_feature (574)..(574): "n" may be a, t, c, g, other or unknown
gagacagagtttcactcttgttgcccaggctggagtgcaatggtgtgttctcggctcactgcaacctccgcctcccaggttcgggtgattctcctgcctcagcctcccgagtagctgggattacaggtgtatgctaccacacccagctaattttgtatttttagtagagatggggtttcaccatgttggccaggctggtctcgaagccctgacctcaggcaatctacccacctcggcctcccaacgtgctgggattacaggcatgaaccaccacacccggcctctacttcttcttttgagaaatgtctgttcagatcctttgcccattttaaaatcacattatcattattattttgctgctgaattgagttccttgtatattccggatatacaagtcccttgtaagatgaatagtttgcagatagttcctgcattcaacaggtnggctcttggtctgatggtnctttgctgggcaaaacctttttagttngaaatcgncggcttggcnatttttggngcccgggcttttgagggcttcacatccaattttgcccaaataagggccnaaaggttnccttttc

SEQ ID NO: 6097 - DNA, 591 bp, Homo sapiens
  misc_feature (491)..(491): "n" may be a, t, c, g, other or unknown
  misc_feature (520)..(520): "n" may be a, t, c, g, other or unknown
  misc_feature (557)..(557): "n" may be a, t, c, g, other or unknown
  misc_feature (567)..(567): "n" may be a, t, c, g, other or unknown
  misc_feature (590)..(590): "n" may be a, t, c, g, other or unknown
ccacaaagaacttgggattctttggccttactggagttttgttatagctaacaccagtctgtattaattaagaaggcactattaatgagggacggaaaaatctacctgtacacaaaattctgtactttaacagcatcttcaaataaacctttaaaggataatggtttacgatcattttaagcattttaagaactgagttatttggacaagaaccatacaaacctttttcactctgccatgaatgatcgaagaatcctgctctaggactggatcttttcagagaaaataacttatcacctgttttactgcagttgctactagcaattattatatagcatgtgctcttcaaaacagaaataaaaattgatgtgtgaaatccctttcattggttttggtaaaccatccaattttgggctgtcatttcaattataatacagttgtattttaagagagaagataatccaatataacaaaggcttgataaatattgncactctgtaatcaggacatactaaactgnaattcaacgaatttccaagaacttttcaggttttggnccccaggganaaatcttgggtttgccaaaaaang

SEQ ID NO: 6098 - DNA, 587 bp, Homo sapiens
  misc_feature (510)..(510): "n" may be a, t, c, g, other or unknown
  misc_feature (557)..(557): "n" may be a, t, c, g, other or unknown
gaattttctaaatcctaaataactgaaaggtacatccaaatgtctgatatataaatacacaaatatattccttatatataaaccaaccaagagctagggcaggaagagaaagagcgaagctgtcctgtgttcacactaatgtccgtgttttacaaggtgacaggtgtgtgagcaccaggaaggatacatgatatccatgatagtggcctgatagctatgacacttgaacacagtgaagaaagtgcagggcacagggccaagaaggaaatctgaggagagagaggtcaccttgggacttgagtaatggatacttcagactggctgttttcactctaaaccctgggggttacgcttcctcagcatgctgcctgtatatgctttatcggtgctgatgcccaacccttcatctttaaagtcttgggaccactcttctttggtggtttcctcttgctcagggtagctatctgcactgaatccagcattctctgccaagacagcagggatcctcgncttcatgaaaaccgcaggaacatggttctggctttggatcacacgangtaaccgaattatcttcctgggttttgggg

SEQ ID NO: 6099 - DNA, 587 bp, Homo sapiens
  misc_feature (562)..(562): "n" may be a, t, c, g, other or unknown
  misc_feature (567)..(567): "n" may be a, t, c, g, other or unknown
  misc_feature (571)..(571): "n" may be a, t, c, g, other or unknown
acgaacatattgctttatttcttggtagtaaattaaggctttctagattcatacagcacgcagtgatttgaacattagaattaaaaaacaacaacaacaaacaatgagcattcaatttagcagagccaggaaggaagcaatgttttaaaacagataaatttcctagtgagacctttggtttggtctccaaaaatctgctgagctgtttccccagtaacctccatcatagattcccaccccaagggagaacagaatggatgaacaggagactgggagaaaagaagaaactggcaagacggtatgtgctgggcaatcagtgtgaacagtcagctttgtctcatgtttggaagacagtttaggtgatgcggtcagggattcattctctggatctccctgctcattctcagagtattaaaccagctcactcggaagaccccagggccaaggattaagggacaatcctttgtgacacccaaatcctgaaacttcaaatagggtcacaagtcacagagctgaggaatgctggctttaacttctttatgggtttaactctgggggtttncctanatcngggctacttaaaggat

SEQ ID NO: 6100 - DNA, 580 bp, Homo sapiens
  misc_feature (443)..(443): "n" may be a, t, c, g, other or unknown
  misc_feature (530)..(530): "n" may be a, t, c, g, other or unknown
  misc_feature (550)..(550): "n" may be a, t, c, g, other or unknown
  misc_feature (563)..(563): "n" may be a, t, c, g, other or unknown
  misc_feature (565)..(565): "n" may be a, t, c, g, other or unknown
  misc_feature (569)..(569): "n" may be a, t, c, g, other or unknown
  misc_feature (575)..(575): "n" may be a, t, c, g, other or unknown
aaaaattattttagacacgaggtctcgttttttgcacgggctggtctcaaactcctagcctcaaacgatcttcccagctcatcctcccaaagtgctgggatcacaggtgtgagctacggcacccagcctgtttgttttgaatataatgtaggatgaagaaaaatcaagcctttggtggtccgtgtctctccaaaggttgagtggagaagcgtatggtgagaggcccttggtggccatggacatcaggccacacaagccacagagggcttgtggagatgcttatggctgggaacagactaggaacaaacacgggtgtggtcaaagctcaatcgctgagcactcggtaactctgcaggaagttaaaactttcacaacgaccatccatgtggttgactgggacatacaggcagagctccttctggaaaatggatttcttccactgnttggccattttaagtctaatcccaataaagtttggcagcaaatcagagcccaatcttttatcagggggctttaaggatttaacgganggacattttaatggccttanggaatgataatgncntganggattnctttg

SEQ ID NO: 6101 - DNA, 576 bp, Homo sapiens
  misc_feature (512)..(512): "n" may be a, t, c, g, other or unknown
  misc_feature (535)..(535): "n" may be a, t, c, g, other or unknown
  misc_feature (538)..(538): "n" may be a, t, c, g, other or unknown
gagatggagtctcactctgttgcccaggccggagtgcagtggcgcaatctcagctcactgcaagctctgcctcccgggttcaggccattctcctgcctcagcctcccaaatagttgggactacaggtgcccgccgccacggctagctaatttttttttgtattttttagtagagacagtgtttcaccgtctctactaaagatcaaggatggtcttgatctcctgacctggtgatccacccacctcagcctcccacagtgctgttgttaggtatcttctaaggaggagacaatgtctgagacagggactgtgcagagcctctgtcttctgaagcacagattgctttggatttggcaactgctgtcatttgggggttgccttgcttgctgccttggtgcttgttagttttgttctccatactctagctccaccttctcaggacactgctgccctaacagaagagaccagcagctcacagagccttcctgagttcagcatctttatgtgcaactntgcaaacccttttcttaagcttntgngtggatggttgtgggataacctgtggatgaaacttttt

SEQ ID NO: 6102 - DNA, 577 bp, Homo sapiens
  misc_feature (366)..(366): "n" may be a, t, c, g, other or unknown
  misc_feature (418)..(418): "n" may be a, t, c, g, other or unknown
  misc_feature (443)..(443): "n" may be a, t, c, g, other or unknown
  misc_feature (566)..(567): "n" may be a, t, c, g, other or unknown
  misc_feature (577)..(577): "n" may be a, t, c, g, other or unknown
gaggcagggtcttgcgctgtcacccaggctggaatgcagtggcaccatcttggctcactgcaacctccacctcccgggttcaagcgattctcccacctcagcctctcaagtagctgggaccacaggcacgcaccaccatgcccagctaattttgcattgtttgtagagacagggttttgccatgttacccaggctggtctcgaactcctgggctcaagtgatcggcccacctgagcctctcaaagtgctggaattagaggcgtgagccaccacgcctggccaaggatctcttacttcttgaaattttctattggcttctacagcttcatttatttatctacttcagggtcacaaagctctggctgnttttttcttgaccttttatagccttcttctctgcctgctcctcaaatactgngtatttctggccttggtagacttgnttctatcttaacacattttccctgagtggtctcatctacttctaagggttaatttaccacgtactggatatctcgagaagctcttatatgaataatttgggctcaaattttctcccatggcannaatttttttn

SEQ ID NO: 6103 - DNA, 562 bp, Homo sapiens
  misc_feature (3)..(3): "n" may be a, t, c, g, other or unknown
  misc_feature (36)..(36): "n" may be a, t, c, g, other or unknown
  misc_feature (57)..(57): "n" may be a, t, c, g, other or unknown
  misc_feature (157)..(157): "n" may be a, t, c, g, other or unknown
  misc_feature (168)..(168): "n" may be a, t, c, g, other or unknown
  misc_feature (248)..(248): "n" may be a, t, c, g, other or unknown
  misc_feature (272)..(272): "n" may be a, t, c, g, other or unknown
  misc_feature (287)..(287): "n" may be a, t, c, g, other or unknown
  misc_feature (424)..(424): "n" may be a, t, c, g, other or unknown
  misc_feature (434)..(434): "n" may be a, t, c, g, other or unknown
  misc_feature (482)..(482): "n" may be a, t, c, g, other or unknown
  misc_feature (489)..(489): "n" may be a, t, c, g, other or unknown
  misc_feature (491)..(491): "n" may be a, t, c, g, other or unknown
  misc_feature (521)..(521): "n" may be a, t, c, g, other or unknown
  misc_feature (534)..(534): "n" may be a, t, c, g, other or unknown
  misc_feature (550)..(550): "n" may be a, t, c, g, other or unknown
agntggctttctcttttaatcaaaaacatactttgntacagagttctcaagaaaggntcgactattttttagccacagactttaaccaggcaaaagtatacagaaagccacaaaggaactcctgggactttcaactgaccagttgtccccaaagcanaagctacgagnggctcttctctggcttctggcatagctgcattcctctgaatttaggggaggaaacagttgggaaataccaccaccaaatntgtccccaacccccaactcacttnttctaaactgggctntgcagcccaccaggttttcatcatctataagcattcacacttttcccttaaatcacatgtccaatgcattgaacagaactcaatacttgaagaaagtttgccaactccatgtttagtcttaatcaatccaagcccgnggagtccttntatcaatggccagcagcctttgcaacagcagctgggttcatcccttcntttcagntnccccaaagtggcctttaccagaattccaanccccaaccttaanccagccccaaggaagnttccaggtctta

SEQ ID NO: 6104 - DNA, 582 bp, Homo sapiens
  misc_feature (488)..(488): "n" may be a, t, c, g, other or unknown
  misc_feature (510)..(510): "n" may be a, t, c, g, other or unknown
  misc_feature (523)..(523): "n" may be a, t, c, g, other or unknown
  misc_feature (538)..(538): "n" may be a, t, c, g, other or unknown
  misc_feature (542)..(542): "n" may be a, t, c, g, other or unknown
  misc_feature (544)..(544): "n" may be a, t, c, g, other or unknown
  misc_feature (568)..(568): "n" may be a, t, c, g, other or unknown
gagtctctgacagaaacagagctctacaaactttctggcgacctcccaggaaaacagaaggaagctgtatcctgtacttcccctgggatctaatgaaatatacagcctctgggcttctttcaatttggactttcagatcgctaagccagtgaaaaggggatcctagctgtcacaaacgtcacatggtcagggtcacctgctgctcgggggttctcatgccagttgttgacataataagccccccttacactttaattacaattcacagtgtgcaaactatgcaatctgctttaaggcagactgtcttttaaatcaacactaaaattctactactaatatggcaatgcaatgtagcagaggaagggtgtgtccacatgactaactatatgcagatatctgccgtttgggagacagtgggtagcatttgccaaaatataaaatggtgttgctgaccccaattctgggagatggtacttgaatcttactgngctctgagacttcttttcatangccacaaaaaggnaatgccatatacctnatgngnagcattttacaattgggtaacccnatttttttttacaa

SEQ ID NO: 6105 - DNA, 573 bp, Homo sapiens
  misc_feature (536)..(536): "n" may be a, t, c, g, other or unknown
  misc_feature (549)..(549): "n" may be a, t, c, g, other or unknown
  misc_feature (557)..(558): "n" may be a, t, c, g, other or unknown
  misc_feature (565)..(566): "n" may be a, t, c, g, other or unknown
  misc_feature (572)..(572): "n" may be a, t, c, g, other or unknown
gagatgaagtctcactctgttgcccaggctggagtgcagtgcagtggtgtgatcttggctcactgcaaactccacctcctggagtcaagtgattctcctgcctcagccttcagagtagctgggatcatagatgcccgtccccatgcctggttaatttttgtatttttagtagagacagggtttcaccatgttggccaggctggtctcgaacttctgagctcaagtgatccacccaccttggcctcccaaagtgctgagattacagcatgagacaccatgcccagctgtgagcctgtatcttaatcaaagtcctgagaataaccttgaagaagactcccttgcaatgagcaacaacagaagaagcaagggacctggaatctggcagacctgggttcgaattctggctctgtcactttctggtgaagtgacttgagtaatgaacatgagcctttctgggtagcgttacagcacaaagcaatttgaggaataaaatgaaagagcacgtgtctaagtgcctaacaatgcgcttgacacantgccgggcttaancttatttnncacccanncttganc

SEQ ID NO: 6106 - DNA, 590 bp, Homo sapiens
  misc_feature (520)..(520): "n" may be a, t, c, g, other or unknown
  misc_feature (559)..(559): "n" may be a, t, c, g, other or unknown
gtatggaaacatttgactttatttaatattgagacaatacatatagttctgattaagagcatcagaaactctgaatcaagtgtattcttcttggtcaagagcttaataaaagtccctctcttaaaggctcatcttgataggaatagaaacaaaaggttaccccatagttctcttacatttggaagttagctatatagagggtacaaggatattcattttccttcaggacaaagtcatctctgtacgccctttattgttgaattgcagtttgatttaggggattagaggtggtatggtaccagtaattgagtaatggtggaaatgtgaaagtcagtcacaggactctcattggtgccagtgtcatagttaagaaagaaagaaagaaagttttatatatcctgtaatctagactggaagctaaataattgctaggaagcaaacttaagtgatagctggtaagttttttggtttggttttgaccagagatgatgaagtaggtggatcttttcttgggttgctnctaaactctttcattttaacctaataattttagtttggngccaaaagtaaatgctggtttgggaccttaa

SEQ ID NO: 6107 - DNA, 576 bp, Homo sapiens
  misc_feature (498)..(498): "n" may be a, t, c, g, other or unknown
  misc_feature (538)..(538): "n" may be a, t, c, g, other or unknown
  misc_feature (574)..(574): "n" may be a, t, c, g, other or unknown
aaagactatagctaagaaatgaaaagaaaaaataaagtaactgatttccttgggcagcagaattactgggagacaggggttgtacactaaatattctaaatgtttctaaaaatgaaaatatattattcaagagcatgtagtacttgcaaatgatcaagcatttccaaaaaaaactgcccagccctattaaatttataaaatatttctgcaatacagctggaataattacaaggtacacaacatattacagtatttgttgtatctattatttgaattgatctacacactaacatatgaaaatacgtgctaaaatttttggaagaaaaggaggtttcctaggacacggagaggggaggttaggggcgacaactaatgagtatggcattgctttgggaggtgattaaagtgttccaatatggctgggtgcggtggctcgcgaggtcaagagatcaagaccatcctgccaacatggtgaaaccccgctctactaaaaatacnaaaaattacccgggcatggtggcaacttttgtagtcccanctactggggaagcttagccgggaatcccttaacctngg

SEQ ID NO: 6108 - DNA, 578 bp, Homo sapiens
  misc_feature (506)..(506): "n" may be a, t, c, g, other or unknown
  misc_feature (519)..(519): "n" may be a, t, c, g, other or unknown
  misc_feature (524)..(524): "n" may be a, t, c, g, other or unknown
gggtaaagaaaagaagtttaattggctcacggttccacaggccgtacaggaagcatggctggggaggcctcaggaagcttaaaatcagggcacaaggtgaagaggaaggaggcacgtccacatggttggagcaggaggaagagagcgaagagggagtgctacacacttttaaacaaccagatctcgctaagaactcactatcacgacaacagcaaggagcaagtctgcccccatgatccaatcacctctcaccatgcacctcctccaatactaggggattaaaattcaacatgagatttgagtggggacacaaatccaaaccatatcagtgtccatgtctattcctaattagcttttgactttgtactcagcgtattaatttctgagagctactgtaacagtgccaccaactgggtaactgtttgttgtaaaacaaacacatcctctcacagttttacaactggttgttgtaaaaccaatgcattctctcacagttcttgagctangtgtcttgaaatnaaagngtgggctggacatgctcctttgaagccttgaaggaaaatccttggctggctttt

SEQ ID NO: 6109 - DNA, 581 bp, Homo sapiens
  misc_feature (526)..(526): "n" may be a, t, c, g, other or unknown
  misc_feature (529)..(529): "n" may be a, t, c, g, other or unknown
  misc_feature (541)..(541): "n" may be a, t, c, g, other or unknown
  misc_feature (543)..(543): "n" may be a, t, c, g, other or unknown
  misc_feature (573)..(573): "n" may be a, t, c, g, other or unknown
  misc_feature (581)..(581): "n" may be a, t, c, g, other or unknown
ctttctttcttctttctttctttcctttctttctttctgtcacatatgatagtttaagaaaatagttcaccaaaatactgtcttatttgtaaggaagacttcatgatatgaatagctaactattctgaatttacatattttccatcctagtataatgtacaactccatctctcaaaagtgtaaatttttcacattcattcaaaactccttagagagtaagtagtttcattcagagttacctgattgtagcccaatttaccttaaagtctttcttcagaaggaagaaaacaaaaaagtaaaaatcatctctgaacactcctttaggagatagacttcagtcagccaaaggatagagtagtcaccaggagtcctcagagtcctcttggtcacctctctggtttcatttctggaaatccttacttaatctgaggtaacatgcttcctgctgactggcggatcacacatacacgatattccccctcagtctgacacacagtccgagtcaataagctgccagactggcggnctntaaagaaacttntnaaccaagaaccttttcaaaacttcctaggnttaacctn

SEQ ID NO: 6110 - DNA, 578 bp, Homo sapiens
  misc_feature (513)..(513): "n" may be a, t, c, g, other or unknown
  misc_feature (544)..(544): "n" may be a, t, c, g, other or unknown
  misc_feature (569)..(569): "n" may be a, t, c, g, other or unknown
ggctgttgagttgcaggtgttccttatatactttggatattaacccctcattagatacatggtttgcaaatattttctcctattccatagattaccagttcagtctcttaactgttttctttgctgtgcaaaagctttttaattagatgcagtcctgtttgtctatttttttaaattgctttcgctgtagctataagttgttttctgttaagactttggtaaccacaaagaaaatacctatagaagatacacgaaagaaaaaaaaaaaaggaaggatcaaagcaaaatcaacaaatcacaaaggaagacagcaagagaggacaaaagggacaaaacaactacaagaaagaaaccaattaacaaaatggaactagtaagtctttccctatcaataattactttaatgtaaatggagtaaactccctaatcaaaaaacatatagtggctgaattaattttaaaaataagatctaactatatactatctagaagagactcactttagatttaaggncaccaggctaaaagtgaaggaataggaaatntattcctgccgatgcaaccaaagancccaggtgg

SEQ ID NO: 6111 - DNA, 569 bp, Homo sapiens
  misc_feature (471)..(471): "n" may be a, t, c, g, other or unknown
  misc_feature (490)..(490): "n" may be a, t, c, g, other or unknown
  misc_feature (516)..(516): "n" may be a, t, c, g, other or unknown
  misc_feature (520)..(520): "n" may be a, t, c, g, other or unknown
  misc_feature (525)..(525): "n" may be a, t, c, g, other or unknown
  misc_feature (531)..(531): "n" may be a, t, c, g, other or unknown
  misc_feature (546)..(546): "n" may be a, t, c, g, other or unknown
ctcattgtaacactcgtttttatataaatattcgcaagtcatgttacagaagaagccccaccagggaaaaaagtcaacgttagggttttgttagattgacccctgccttctaggttgggccccagcctggaggcgcctgctgctttgggaaggctggggttgctgccgtgaggctgccgaagaagctgcctgtgtcgcccacccctgggccgacccccttctttggtgtgtggtacatggtgaccttctctggccacccttagcctggggcagggttttggagaacagggttcagggaagcagggcccaggagtcctgggggcacttggaaatggggtgaaggggactgagccattaagaggtggtggagtctgagatttagaggctgagcctttgggggtgggggcagagtgaacgggaacatgttgggggaaccggggcttgtcagccaagtaggaacttctgcccttnccttcagcccaagtcccangtcctggcccctgtgggcatttctgntggnccacnttccanggagaaacctgatgnccctttccggtttttcccttgaa

SEQ ID NO: 6112 - DNA, 562 bp, Homo sapiens
  misc_feature (49)..(49): "n" may be a, t, c, g, other or unknown
  misc_feature (120)..(120): "n" may be a, t, c, g, other or unknown
  misc_feature (129)..(129): "n" may be a, t, c, g, other or unknown
  misc_feature (167)..(167): "n" may be a, t, c, g, other or unknown
  misc_feature (179)..(179): "n" may be a, t, c, g, other or unknown
  misc_feature (202)..(202): "n" may be a, t, c, g, other or unknown
  misc_feature (270)..(270): "n" may be a, t, c, g, other or unknown
  misc_feature (317)..(317): "n" may be a, t, c, g, other or unknown
  misc_feature (451)..(451): "n" may be a, t, c, g, other or unknown
  misc_feature (496)..(496): "n" may be a, t, c, g, other or unknown
  misc_feature (510)..(510): "n" may be a, t, c, g, other or unknown
  misc_feature (516)..(516): "n" may be a, t, c, g, other or unknown
  misc_feature (532)..(532): "n" may be a, t, c, g, other or unknown
  misc_feature (535)..(535): "n" may be a, t, c, g, other or unknown
  misc_feature (554)..(554): "n" may be a, t, c, g, other or unknown
  misc_feature (560)..(560): "n" may be a, t, c, g, other or unknown
cacttgaattttaaagtttatttactttgaagtaaccaacttaaaaaanggcctgagttaagtgtattaaaaagaagaaatagtcgtaagatggcagtataaattcatctctgcatgtanaaaccgganaaaaagcaagttcagtacttcaccaaaaaattattaanattggcaaagtncaagtgtagggctgtgactgcanatctggaagggctgaaaggtagatctatgttcctttaactatagtccaccatgagggcttcgcaaagngtgttccccagtgctgatggtctgtgaaatttacttattgcccagtntagagaatgatgtgttagttgaccaaatacttgttctaaatatattgttggcacggatgtggtgaaaagggaacacttttacactgctggtggaaatgtaaactagtacaaccactatggaaaacagtgtgganatccttaaagaactaaaaggtagaactaccatttgaccagcaatnctacactagggttnttcccngagggaaagaaagtcnttntttgaaaaagaatcttgcncccccntg

SEQ ID NO: 6113 - DNA, 581 bp, Homo sapiens
  misc_feature (520)..(520): "n" may be a, t, c, g, other or unknown
  misc_feature (524)..(524): "n" may be a, t, c, g, other or unknown
  misc_feature (529)..(529): "n" may be a, t, c, g, other or unknown
  misc_feature (541)..(541): "n" may be a, t, c, g, other or unknown
  misc_feature (545)..(545): "n" may be a, t, c, g, other or unknown
  misc_feature (549)..(549): "n" may be a, t, c, g, other or unknown
  misc_feature (555)..(555): "n" may be a, t, c, g, other or unknown
aaaaatgatgaatattttatttttcagacgtccatattttaaatgtaatagttttataaaagaaaaggttggcaacctgttaaggagatcttcatgtgaaaaatacatgtagaagttttaaaaatttgtggatataattgtcattcagaattaagcaggttgattgctgttatctagatgggtctcttcctttatgtttttcagtcacataatcttgatttccatagttatcacatgtacttaaagaagttaatcaatgcctatatggtccaaggtataatttgcacacagtagtttttggtttttatattgtggatcatatgtatcaaaggtaatattcataaagaacaatgttatagttggctacaaagggacaattccacatttctatacagggaatattttaagggtagagttatatcagctatggtgattgagtttaaatatccctgcagggtcaggaacaaaccagctttcccataagtcgttgtgaacactagggaagtcccaagggttatgncttncattncagtggagtaanttancttnctgcanaaaagcttccaaaatctgggatttgg

SEQ ID NO: 6114 - DNA, 573 bp, Homo sapiens
  misc_feature (480)..(480): "n" may be a, t, c, g, other or unknown
  misc_feature (514)..(514): "n" may be a, t, c, g, other or unknown
  misc_feature (531)..(531): "n" may be a, t, c, g, other or unknown
  misc_feature (538)..(538): "n" may be a, t, c, g, other or unknown
  misc_feature (543)..(543): "n" may be a, t, c, g, other or unknown
  misc_feature (550)..(550): "n" may be a, t, c, g, other or unknown
  misc_feature (573)..(573): "n" may be a, t, c, g, other or unknown
atgagatgagtttcgctcttgttgcccagcctggagtgcaatggcacgatcttggctcactgcaacctccacctcccaggtttaagcgattcttctgcctcagcctcctgagtagctgggattacaggcatgtgccaccacgcccggctaattttatatttttagtagagatggggtttctccatattggtcagactggtctcgaactcccgacctcaggtgatctgcccacctcggcctcccaaggtgctgggattacaggcgtgagccaccgcgtccggcccccattttctttttctttcttctctttttttgagacgcagttttgctcttgttgcccaggctagagtgcaatggtgccatctcagctcaccataacctctgcctcccaggttcaagcgattctcctgcctcagccttccaagtagctgggattacaggcatgcgccaccacgcccagctaatttggattttaagtanagacggggttcttcatggtggtcaagctgggctngaacttccgacttaggngatccanctgcntaacctnccaaaggcttggaatacagggan

SEQ ID NO: 6115 - DNA, 560 bp, Homo sapiens
  misc_feature (485)..(485): "n" may be a, t, c, g, other or unknown
  misc_feature (503)..(503): "n" may be a, t, c, g, other or unknown
  misc_feature (506)..(506): "n" may be a, t, c, g, other or unknown
  misc_feature (517)..(517): "n" may be a, t, c, g, other or unknown
  misc_feature (520)..(520): "n" may be a, t, c, g, other or unknown
  misc_feature (544)..(544): "n" may be a, t, c, g, other or unknown
  misc_feature (557)..(557): "n" may be a, t, c, g, other or unknown
ccttaaaaccactgcataccacacctggaggttgtgagaattaacctgtaatgaagatgagtggccagcaccaggacggggacgtctgcaataaacatggcaaaatctgaaaagcaggtgaggtcgaccaggctcccaggctcccaggctgagacaacagaaccctcagggctgtcttcactgagacgcttgatttgttttgttttgattttggttggaatttgatttgagggagacatgatcccaccacattttacatgaacaaagcaaatctgacatccacgcccaggaccaagccaagaaagaggcggtacaatggtgcggccaggaggctggctggctgtcaccatcggcagggacagtaggagaaagccaagagccacagtgacccttccacagaccacagtcctccctactgccacccactccttgcccgagccaaagtcctgctttctctggacatactccattcgccaaatacctangcccctaccatgtgccangcnaagcacaaggnggnattggcccttgccctttttggaanaaaccgggcattnaag

SEQ ID NO: 6116 - DNA, 570 bp, Homo sapiens
  misc_feature (494)..(494): "n" may be a, t, c, g, other or unknown
  misc_feature (501)..(501): "n" may be a, t, c, g, other or unknown
  misc_feature (514)..(514): "n" may be a, t, c, g, other or unknown
  misc_feature (516)..(516): "n" may be a, t, c, g, other or unknown
  misc_feature (546)..(546): "n" may be a, t, c, g, other or unknown
  misc_feature (558)..(558): "n" may be a, t, c, g, other or unknown
aagtgttacaaattttattaaaaattaacatttcaagaggtcatacgtatacaaatcaaactgcaaaaaaattccaggcataaaaactattatctgggttagtgtgccatctttcttctccaaatgtcaaaatgtccacaaaaaaagtctttagaaagtcaaatccactgtccatttgtgttgggtaagaaacctatgtcttcattcactgcatggaatccatgttaaaagaaccctgtcttggttgtatattatcacaggactcttgtattaatccatttttcctcaattccccatagtagactgccatcttgatttctcagtggtagggtccatttgaaactcttcaagctgactgggtgcttgatgaaaaaattaaaagaaaaaaacgctgttggcatcttaatcttttaaacagaaaacatccacccaccttgaagatatcctaccattccccaaacttttatttggaacagcttttaactttgaaatgnaaagtgnatgcaaacacacncncacttcttgataagactggcgcccaagtancaaagtccttgnactaccccagat

SEQ ID NO: 6117 - DNA, 560 bp, Homo sapiens
  misc_feature (466)..(466): "n" may be a, t, c, g, other or unknown
  misc_feature (526)..(526): "n" may be a, t, c, g, other or unknown
  misc_feature (529)..(529): "n" may be a, t, c, g, other or unknown
ggtcataaatacattttatttcattagaaatgcataattacagtgtttaagagcatttcccctagaaaagtaggtcagcaataccccatcggaaccgagagctggctttgcaaacacctgcctcatgacactggacagagcacacagcaaagggctcccgtctcatgacactggacagagcacacagcaaagggctcctgctactcccctgggattttttttttcaaattttcttttttgttataaacaccatagcaaattaaaaaaagctgtttaaacagaaaaatatcatagttcttgatttcccgcgcatatgcgacgctctccgcaccgtgcctcccctcgtgctccgacaccaacagcaggactcaaacgaaaggggtctccggctgggggcggcggcggctgctctttcagttgataggatgctgttccccgcggaggcagcggccttcagacgcacttnagcagaacacgtgcagcgctgctgtgccaaggcctgaaaacagggcccttgggggccggnccnaagcggacccgcaagggctctggggccatgg

SEQ ID NO: 6118 - DNA, 553 bp, Homo sapiens
  misc_feature (492)..(492): "n" may be a, t, c, g, other or unknown
  misc_feature (501)..(501): "n" may be a, t, c, g, other or unknown
  misc_feature (516)..(516): "n" may be a, t, c, g, other or unknown
  misc_feature (549)..(549): "n" may be a, t, c, g, other or unknown
aataaagtttgcttgtgatgatgaccttctgtgctctggaacttctgttttacaaaaaattggagttcttacggtccttgtccttcctcaggttgctgcctgttgccagaaaggactggctgtgaaatatctcggaggtagctttctttttagagaaagcaattatttcttcttccaaaagtcttctcttttcttcaagcttcattctctcttcttggtgaagtctcttaaggtgctcaaatttggcctgtagctctctctcagcttctttcaatatggcttctttctcctttactcgctgcacaaacatctgtttcatttcttcttccttcctctgacgttcaccatggaactcatgtcttttggcttcataggtctcttgaacactgactggcttgttttctgggcccacatctgtaaagcccatttcctccagtttgcagcgcctgtaaagctcatagtgcctggtatgggtctgctctcgcaggcctncatatttgnaccaatgagcatttnccgcactttaccaagccagggggtttcattttncctt

SEQ ID NO: 6119 - DNA, 559 bp, Homo sapiens
  misc_feature (494)..(494): "n" may be a, t, c, g, other or unknown
  misc_feature (512)..(512): "n" may be a, t, c, g, other or unknown
  misc_feature (540)..(540): "n" may be a, t, c, g, other or unknown
  misc_feature (545)..(545): "n" may be a, t, c, g, other or unknown
aagatggagtttcactcttgttgcccaggctggagtgcaatggggcgatctcggctcattgcaacctccgcctcccaggtcaagcgattctcctgcctcagcctcccaagtagctgaaattacaggcacgcgccaccacgcctggctaattttatttttagtagagacagggtttctccatgttggtcaggctggtctcgaactcctgacctcaggtgatctgcccgcctcagcctcccaaagtgctgggattacaggcgtctgcaaccgcgcccagcctagtgttttgtatgtttattttctcacttaatatactatggaggtgttttcctatattcttcatccttaacagacaatactgcattgactttatcataatttgtttaaacaatcccataataatgaacatttaggctgtttttagtcctctgctgttaatgctatagtgtacatcctagaatatccatctttataaatttctctaatttccttgnaataatggttttaagtgnaaaaatggtgggtcaaaaaatgaatcgnatttnaaatgggttaatat

SEQ ID NO: 6120 - DNA, 476 bp, Homo sapiens
  misc_feature (470)..(476): "n" may be a, t, c, g, other or unknown
caggccagtagttctaaacagaccactccagctgggctgttttcctctcaccctcatgcagcatttgctttgggacaggccactcctgataaccagccaagtgaattcatctcacaggactcagggactgcccgcctgggagcagctgtcattggacactggagtcaagaggaggcacagtctcctgcagtgaggggaggtttgcaccccaccttgggagtgtggccttcatgaagacagctgacttcaagggcacgttgagagccttcatctttctatgccaaattgatgtgactaagtggctgttccaagcagagcccagtgggcaaagatcaggactcctatccacattctgagtaagggaggatggagcccacctttgtgcctctggtgagaggcagtgcgatataacaattaaatgcatgagctctgaacttaggtgcctggacgcaaatggagcctatagctgnnnnnnn

SEQ ID NO: 6121 - DNA, 562 bp, Homo sapiens
  misc_feature (489)..(489): "n" may be a, t, c, g, other or unknown
  misc_feature (500)..(500): "n" may be a, t, c, g, other or unknown
  misc_feature (516)..(516): "n" may be a, t, c, g, other or unknown
  misc_feature (552)..(552): "n" may be a, t, c, g, other or unknown
  misc_feature (561)..(561): "n" may be a, t, c, g, other or unknown
gcatcagactgttgcctcccaagattcagctgtcaaagggcaggtccctgttctcagtaggtgagggaataaaactcggacactgggccatctcagaacacatctcagccacacacaagtggagaccagatcccttccttcctggtttgatgattggtgggatcttcctctgagcatcctgaacatattcatttaataaatatttattgagcacctgctgtgtgccaggcactgtttgatgtgctgcagaatagagcagcaaataagagcaaaagtttccaccctcgtggagcttatattctagtgctttatgttgaatagtgctaagtgtggaagacaaataataaagcagaatggtattctggaatatcagggtaaggatgaaggtcagtttttgaataaagacctgaagcaaggtcactggcagtgatattttggggaagaacattccaaacagggcatggcttgggtgttggacacgtgttaganggacagcatangctggtatggctgcantggaatgtcccaagtctaaccccaaattgagtttanaaaggcttnt

SEQ ID NO: 6122 - DNA, 487 bp, Homo sapiens
  misc_feature (481)..(487): "n" may be a, t, c, g, other or unknown
atgtaggtaagctttttattattggtttctttacaggaacaataatccaaacaaatcttgaaccaatctataaacagaaaacctgttatataaattattatctatttttgcaatacatcaaaatactggattgatgaaaataaatagataacaaaaaacaatatacatcatttctatgtttgctatcagaccccacaagtatgtttgtttttacaattcattataggtgaaaaacaaactgaaacacaacaggtacgtacaattacgccactgttaaggactgcagattacacgtgttaaagcttttcttaataaaatgggaacacattgctaggtacacagaaacatgattttgccctaaagaacagctgaactgttgagagaagcaagggcttcctagcggccttccagtgtagcagataatattaccctgtgtaacagagtattacagagtttgcattttccaagtctgtaagtctannnnnnn

SEQ ID NO: 6123 - DNA, 559 bp, Homo sapiens
  misc_feature (516)..(516): "n" may be a, t, c, g, other or unknown
  misc_feature (541)..(541): "n" may be a, t, c, g, other or unknown
  misc_feature (547)..(547): "n" may be a, t, c, g, other or unknown
  misc_feature (559)..(559): "n" may be a, t, c, g, other or unknown
ggaatatttgtattatacttatcagttcagcttccctaatgcaaaattccaaaatctgaactgctccaatgagtagttctttgagtgtcacttcagtactcaagaagtttcaggttaggccgggcgcggtggctcacgcctgtaatcccagcactttgggaggccgaggcaggagaatggcgtgaacccgggaggcggagcttgcagtgagccgagatcccgccactgcactccagcctgggcgacagagcgagactccgtctcaaaaaaaaaaaagaagtttcaggttttggaacatttcagatttcggatttttggattaggaatactcaacctatatctccagttggttatcatctgtgttttctcttttcttccagtctgataaaaatcaaagtattaatctttagagcaccatgcgagatatagggaaaactatatagaaaataccgtgacatatatttttagatctgcattaagacaaagctattatcggggaatggtgctaaactttanatccttccattaaagaaaagaattnagatgncttattggaatn

SEQ ID NO: 6124 - DNA, 560 bp, Homo sapiens
  misc_feature (533)..(533): "n" may be a, t, c, g, other or unknown
  misc_feature (542)..(542): "n" may be a, t, c, g, other or unknown
  misc_feature (559)..(559): "n" may be a, t, c, g, other or unknown
aagtaggctgccaacttattcttataactcctctccatcataatttctgcaaggccattgccttatttttccctcagcatggctgctttacacagtgtggccagcagatgggagcacaagaaagtcaatctagatggaaaacaagttatagggataattggcaaagcctccctttctatccctctctaagacccctttttgcaaggactagaatgtgaagtacgtaagtgtaaagaagtgttcatgaatgtgttttaattcattcaaagaggtatttttaaagaaagatttcaaatacaagcaaaagaggagaattgttagatgaacataactgtccccagaccaacaattatcaattcgtagccaattctgttttatttctgtccctaggaatttgatcctttcaattatttattctctcaccataaatacttgtcagaggaagaatccacttcatagtttgcatcagaaaaggtatatgggacgtttattctttagcttttagatatactgggtttctaataaattttacnggaaccctnttccctaaaagaattcna

SEQ ID NO: 6125 - DNA, 562 bp, Homo sapiens
  misc_feature (101)..(101): "n" may be a, t, c, g, other or unknown
  misc_feature (246)..(246): "n" may be a, t, c, g, other or unknown
  misc_feature (279)..(279): "n" may be a, t, c, g, other or unknown
  misc_feature (532)..(532): "n" may be a, t, c, g, other or unknown
  misc_feature (555)..(555): "n" may be a, t, c, g, other or unknown
  misc_feature (559)..(559): "n" may be a, t, c, g, other or unknown
gactactagacaaactttctgactagaatgcctatgtccacttttttgtttgtttatttttgagacggagtctcactctgtcacccaggctggagttcagnggcacgatcttagctcactgcaacctctgcctcccgagttcacgccattctcctacctcagcctcccaagcagctaggactataggcgcccgccaccaagcccagctaactttttgtatttttagtagagatggggtttcactgngttagccgaatggtctctatctccttacctcgngatcccccccgcctcagtctcccaaagtgctaggagtacaggcgtgagccaccgcacctggcctgcctatgtccacttttggcatgcacttctgccaccttgcacattgtagactaacagagtttcaccattcctgtctcgttgcccaaccactcaccttcctcaagaccccaccttcaattcctgcttaaaatatgtaacatggattctccttgctttttaagataaagacccaaatccttatactgactgnaagccctttgggggtacctatgnctancta

SEQ ID NO: 6126 - DNA, 566 bp, Homo sapiens
  misc_feature (491)..(491): "n" may be a, t, c, g, other or unknown
  misc_feature (497)..(497): "n" may be a, t, c, g, other or unknown
  misc_feature (524)..(524): "n" may be a, t, c, g, other or unknown
  misc_feature (545)..(545): "n" may be a, t, c, g, other or unknown
  misc_feature (566)..(566): "n" may be a, t, c, g, other or unknown
ctacacatactccttatatttcattattctaagttatacacaatgttcaacaggagtttgaagtttatttagtaataaacataagtcatggctgacaactgagaaaatcctattcacataaaccatcatagattaaaaatacatagtatttgtactttaatgcaatagggtcccaggattcaaacaaggaaatttgattccagagttggcattatgtagttatgtactctgctacaaagaactagtggaggtaaacttcggcagtaaaattctcaacagtcaaatattaatgcatttcatatacatggctttgcatccgtagaggaagatcagttccttcagcacacgtgccaatttctgagtcttccactagagaatcctcaacagtttcttcttcagaatcaaattcctgattatccagtgattcaaaattatccagaggttcaccattcagctctctattagctctgccatatctggacatggtctgntacttntggcagtctttaatccccttttcaggnggcaattcaatggcctttggncaattctttttgaagttctcn

SEQ ID NO: 6127 - DNA, 574 bp, Homo sapiens
  misc_feature (436)..(436): "n" may be a, t, c, g, other or unknown
  misc_feature (537)..(537): "n" may be a, t, c, g, other or unknown
  misc_feature (543)..(543): "n" may be a, t, c, g, other or unknown
  misc_feature (549)..(549): "n" may be a, t, c, g, other or unknown
  misc_feature (571)..(571): "n" may be a, t, c, g, other or unknown
ccaaggcgatacagattacagttgctgacctttttgcttctcatatatgaaaggcggccctcatgcgcatcagggtaagtgcaaaatagatatgtggtgatggcatgctttaaaaaggagtcgccaagcatttcaagccgctccaggttaaatccgtcactagcgtttgacagagtcaaagcctgaagaataagtccaggattggggccaagagtccttgaggagtacccaatagaagggctctgctcagaatccatcctgcccttgagcacttgaatagtgtctgtcgtaccaggcattacggccatcacaggacttccatctgaggtagatttgttagcatttccatcaaggtatttattactcaggagagtacattcatcgctgggctggggctggttctcgtaactgataaattctgaatggaatatgaggnaattggttgcacgggtatttcctgcttgtagtaatttaactgatttccttggcaaaagctctggtagctaaatcataactggcatttggcgaaaatttgantggaanaaaaanccttaattggtgggaaaaacgntgg

SEQ ID NO: 6128 - DNA, 572 bp, Homo sapiens
  misc_feature (493)..(493): "n" may be a, t, c, g, other or unknown
  misc_feature (547)..(547): "n" may be a, t, c, g, other or unknown
  misc_feature (551)..(551): "n" may be a, t, c, g, other or unknown
  misc_feature (565)..(565): "n" may be a, t, c, g, other or unknown
  misc_feature (569)..(569): "n" may be a, t, c, g, other or unknown
aatgagacagggtcttactgtgtcactcaggttggagtgcagtggcgcagtcttggctcactgctgcctggacctcctgtccaggattgcctcaagcaatcctcccacctcagcctcccaaatagctaggactacaggcgcacgccaccatacccagctaattttgtttatttttttgtagagatgagttctcactatgttggccaggttggtctcaaactcctgggctccagtgatcctcccacctcggcctgccaaagtgctgggattgcaggaatgagccactgtacctggcccagagcatccttaatgtggcaagcacttctaggtaagtgttaagtatagaaacataaagaagaccaaaccctagcatcagtgatcttccagttcaggagaaagcggtaattaaacatacctgtgccagacaagtgcaatgtaaatgtgttcagcacaatcaggggtatgcacaatgggctttagggaaacagagtanaggcatcaaagtcattcttataggcatgtcaggaaagacttggaagcatttccngaantttgggctcaaaanatgngag

SEQ ID NO: 6129 - DNA, 549 bp, Homo sapiens
  misc_feature (503)..(503): "n" may be a, t, c, g, other or unknown
  misc_feature (507)..(507): "n" may be a, t, c, g, other or unknown
  misc_feature (517)..(517): "n" may be a, t, c, g, other or unknown
  misc_feature (524)..(524): "n" may be a, t, c, g, other or unknown
  misc_feature (533)..(533): "n" may be a, t, c, g, other or unknown
  misc_feature (540)..(540): "n" may be a, t, c, g, other or unknown
  misc_feature (547)..(547): "n" may be a, t, c, g, other or unknown
cgtaacaaagaaattttaatgcataaggcacagtgagaggctggaatcattaagcatcctcaaacacaaagggcccagcaggctgagcaaaagaacagagacactctccctcactaccactgggcgccctggacagtcccctgaggagtagggggcatccagtctttggcacggtgcctgggggcaggaagtgactagcatgatcccagctacccctctgtgggaatactgccaccaagaggcagctctttggtctggataaagtcagtgcaaatgtccaggggtcaagctctggaggaatgagggtggcacagtgccctagggctgggcagtctctgaacagtctcctcagccctcatgggcaacatgtgggcttcttcttgctggcagttaggtagaggttgctgtcatcactgttgatgcggacaacatccccaatgcgtcgagcccccgatttctccagctcaccagcacattggcctcaaaggcaatgcttgcacacngaanaaaaattctnggcattnttaccccgnggagatnaaaatgnca

SEQ ID NO: 6130 - DNA, 534 bp, Homo sapiens
  misc_feature (476)..(476): "n" may be a, t, c, g, other or unknown
  misc_feature (496)..(496): "n" may be a, t, c, g, other or unknown
  misc_feature (503)..(503): "n" may be a, t, c, g, other or unknown
  misc_feature (521)..(521): "n" may be a, t, c, g, other or unknown
  misc_feature (529)..(530): "n" may be a, t, c, g, other or unknown
  misc_feature (533)..(533): "n" may be a, t, c, g, other or unknown
agagtacgttctgcattttatttctgcaggcaacacttttgctcaccagcaagaacacagcccgaggaagggacccaataacctttcaaaacgcaaactgctgcctgcggtgagggcccagggtcctccacggagaggacaggcatcttcctttcccaccaggaaggagtgagcccggagcctctgctatgcgcaaggcggtgtgcaggcaccggctgcagctttttgctctcttctttctctttggggctgggctgggtgtgcgttctggtgctgatgctttggcctgtgaggctgaggtcggcatctcgacccgttcaattacagcaacgaagaagccaccgctaagcgtggtcttgggggaagcccggaggcagtgctcggcacccgggaacgtgctcaggcctcggtggggcccgggcaggcagggcgggagctagcctgaagcgtccgggttctgctgcaacgcatcttgnaccatgtcttcattctcctnctggcanaaggagcacatggagtanaccaaccnnttna

SEQ ID NO: 6131 - DNA, 578 bp, Homo sapiens
  misc_feature (526)..(526): "n" may be a, t, c, g, other or unknown
  misc_feature (536)..(536): "n" may be a, t, c, g, other or unknown
  misc_feature (564)..(564): "n" may be a, t, c, g, other or unknown
  misc_feature (576)..(576): "n" may be a, t, c, g, other or unknown
gtacatcatattttctatagaagtgattatatcacaaagaaaaatcctgccaaacaactacaaatcaagaatctgtgggcaaaaagctcaattcatacaatgtaaacacattgaaaaaacaaatgcaaaataaaaaaagctgttgatacatcacctcgaaaaattaacacaactaaattaagggctatagaaaatatgttcagcttatatcatacacgtcatttaacttgaattttacaatttttaaactaatagaattcagatttattacttgaaataatggtatacccagctgttcttcataatggcaagcatattccatatacaatacaatttatttagcatagttttatactcttaagtaaaatatgttagtgattaaaagcataaaggaataaatatgccaagcgcaaaatataataatggaatagacttatgtaggtattaaaatactgcataatgacaaatactgaattaatacaactttcctattattcataatcataatatatgaagagaaaactgntcctatgccngggtttttttttctggaaaaaaactttngggttatacccntt

SEQ ID NO: 6132 - DNA, 578 bp, Homo sapiens
  misc_feature (485)..(485): "n" may be a, t, c, g, other or unknown
  misc_feature (490)..(490): "n" may be a, t, c, g, other or unknown
  misc_feature (526)..(526): "n" may be a, t, c, g, other or unknown
  misc_feature (560)..(560): "n" may be a, t, c, g, other or unknown
  misc_feature (565)..(566): "n" may be a, t, c, g, other or unknown
accaatttgcaaaatttaattttatacacatacacaaataaaacaatttttaacaaatttaaaattcatggtccaccaaattatttttcattatttaactcaataggaactttcagatcaacacgtacatattgtaaaaaatagttgactccacattatgcaatatactatagcaaaggaatattaaaatagtagataagaaagggcactggagttttgtaaaacaggaaaaaagaagtcctgtattttatacattgaatatttatccacaatagcataatttgtctgaaaataaagtaatgatctacaattatataacaaggagtatcttgggatatttcaataattcaaacatttattttttagaaaagtggtatagcaaatgagaattatgcaactaaatcaccattctaagaataaaatgtcaaaaataatcctacatgacatacttggaaatgttcatatccaacaaggcaaaccaggtnaaaanggaaactaattcccaataggaagcaatatttaccanggtttgccctttggccttatctaaatatggggcncctannggcagatacctg

SEQ ID NO: 6133 - DNA, 576 bp, Homo sapiens
  misc_feature (498)..(498): "n" may be a, t, c, g, other or unknown
  misc_feature (507)..(507): "n" may be a, t, c, g, other or unknown
  misc_feature (510)..(510): "n" may be a, t, c, g, other or unknown
  misc_feature (526)..(526): "n" may be a, t, c, g, other or unknown
  misc_feature (545)..(545): "n" may be a, t, c, g, other or unknown
  misc_feature (552)..(552): "n" may be a, t, c, g, other or unknown
  misc_feature (554)..(554): "n" may be a, t, c, g, other or unknown
aggaaaaaaaagagaaacctttatttacaaccatgggagtcccacaggagtacacaaaacacacaatgtgcacacacacaaaatgaaccttttaagtcaataccatgcgtgctcctggccgcgcgccacccctcagtgccctatccgcaccaccatcacagtgacgttgtcggctgagccccgctgcaccgccttgttggccagcctgttgcaggctgcttcgtagcgggcgtcggctgcggacttcccttcccgggtctggatcttttcatcctcgagacaggacaagatgaagttcacggcttcttctggggtaaagaccttgaagagcccatcacaggccaacaaaatgaacctgtcattgggggtcagctggcagcgtctgatgtcgggcacagaggtgacaccgcagcgcttgtactgcccgtccccaatggagcgtgacacctctagcacgcccaaaacacgcccatccctgacgtttccttcagcttctgnatcctcatncgntcttcatactgagttngaatatgctctttgctgangcttaangnttgatggtttgactttctaata

SEQ ID NO: 6134 - DNA, 572 bp, Homo sapiens
  misc_feature (442)..(442): "n" may be a, t, c, g, other or unknown
  misc_feature (476)..(476): "n" may be a, t, c, g, other or unknown
  misc_feature (518)..(518): "n" may be a, t, c, g, other or unknown
  misc_feature (531)..(531): "n" may be a, t, c, g, other or unknown
  misc_feature (534)..(534): "n" may be a, t, c, g, other or unknown
  misc_feature (547)..(547): "n" may be a, t, c, g, other or unknown
  misc_feature (551)..(551): "n" may be a, t, c, g, other or unknown
gagatagagtctcgctctgttgcccaggctggagtgcagtggcacgatctcggctcactgcaacctctgtctcctgggttcaagcgattcttctgcctcagcctcctgagtagctgggactacaggcccgtgccaccacgcctggctaatttttgtatttgtagtggagatggggtttcaccatattggccaggctggtctagaactcctgacctcgtgatccgcctgcctcagcctcccaaagtgctgggataacaggcgtgagccaccacacctggcctctcctccttgtttctaagctgatctttaagcccagtcgtggaaccagatcatctaccaaggaaggcaggcagtctggggaggcagagacaagggaagcaagctggtggtgtggggaggcgagcaccagcagacagtagaagggccccaacacatgcaggangtggccttcagggcaggaatgcctataaggatanagggtggtgaatgaaaatccctggttaaacttaccttctcancggcaggaaggtnaanggcttggcttaantcgnccacttgccaagcttaacagg

SEQ ID NO: 6135 - DNA, 578 bp, Homo sapiens
  misc_feature (467)..(467): "n" may be a, t, c, g, other or unknown
  misc_feature (486)..(486): "n" may be a, t, c, g, other or unknown
  misc_feature (515)..(515): "n" may be a, t, c, g, other or unknown
  misc_feature (524)..(524): "n" may be a, t, c, g, other or unknown
  misc_feature (552)..(552): "n" may be a, t, c, g, other or unknown
  misc_feature (576)..(576): "n" may be a, t, c, g, other or unknown
agatgttatggcagatttaacccaaactcatgggattctgagccccctgggaaaggcattagatcttataggtcagactgttaccatggagaacgtccgtgctgaaggattaatagatagccgggtatcctggaaaagtttgtgtgcttcatacacagataacattagcatactcataaaaaaggctctggccaaatgggatcatttgggttttgaaactctagatatttgggatatccagtggaataatacatggggatgaggtgggggatgggaattcaaatgacaggcccttgtgccagagagacactcagaaagtcaagcaagcaagaactgagatgtgtctcgagcatattttgcattatttggttccagaatagcaacaagagctgggtgtagctactgtttctcaggctgggttttacgtgcttttggtagcttcataagccccaaatccttttctgggntcaattctataacatgggncgtcttctaaactcctcggtactactggnaagttgggncacgggcaacatggacctatggaatcanaatctgcatttaataagactggcngg

SEQ ID NO: 6136 - DNA, 566 bp, Homo sapiens
  misc_feature (423)..(423): "n" may be a, t, c, g, other or unknown
  misc_feature (506)..(506): "n" may be a, t, c, g, other or unknown
  misc_feature (529)..(529): "n" may be a, t, c, g, other or unknown
  misc_feature (539)..(539): "n" may be a, t, c, g, other or unknown
  misc_feature (560)..(560): "n" may be a, t, c, g, other or unknown
gagatagagccttgctctgtctcccaggctggagtgcagtggtgcaatctcagctcactgcaacctctgcctcccaagttcaagcgattcttctgactcagcttcctgagtagctgggattacaggcacccgccaccacgtccagctaatttttacatttttagtacagggtttcaccaccttggccaggctggtctcaaactcctgacctcaggtgaaccgcccaccttggactcccaaagtgctgggattacaggcgtgagccactgcacgcagcctacggatgccttttaaaggaaattcttatagaccccctaagaaaatgtctctgattccaacgaatcctgggactggacaattagataaacactgtcttaagaattagtactacgccttaaaaaaaaaaaaaggcttttcaattgngaaacatcacagcaaaataagttcatttttacaactagtaaaatattagactatcataattatcaaagtttatgattcatagnaaaatgggttagactcagaatgngaaattaggnttaaaaaaaactgggtggttntactaa

SEQ ID NO: 6137 - DNA, 583 bp, Homo sapiens
  misc_feature (458)..(458): "n" may be a, t, c, g, other or unknown
  misc_feature (533)..(533): "n" may be a, t, c, g, other or unknown
  misc_feature (544)..(544): "n" may be a, t, c, g, other or unknown
  misc_feature (547)..(547): "n" may be a, t, c, g, other or unknown
  misc_feature (556)..(556): "n" may be a, t, c, g, other or unknown
  misc_feature (567)..(568): "n" may be a, t, c, g, other or unknown
  misc_feature (571)..(571): "n" may be a, t, c, g, other or unknown
gataattacatatttaatacgtgttgcttttaacagcaatttttaaagtaaacacatcatagaccttataacttattaaaggttttatagtgcttacaaagttgattctaaaaaatataccttatttgttctaaatgaataacattatctggaagatataataataaattatagtagtatgttttccaccacgatagttaagattgtgtacacatattcaatatgaaatcctcttaggattttcacaccttcagcctgaaaacataaaagcagattaaagtttggcatacaagatctcagtctgatagtaattgctttaaaactcaaagtgtaaaaatatctacttgacattctaggaaagcatggccacatgcacagacacattctctcactcactccaacacacacgtgtgcacacatactcacaccccagagtactcagaagatcttgcccttgnggatcagacaactggcaccaatttcaaaaactaatggaaaaaattagctaagaatatggttaaaccatacttaanaaggtgctggntgncattaagancttaacatgcnnaanaagccctctcaa

SEQ ID NO: 6138 - DNA, 514 bp, Homo sapiens
  misc_feature (29)..(29): "n" may be a, t, c, g, other or unknown
  misc_feature (75)..(75): "n" may be a, t, c, g, other or unknown
  misc_feature (169)..(169): "n" may be a, t, c, g, other or unknown
  misc_feature (186)..(186): "n" may be a, t, c, g, other or unknown
  misc_feature (403)..(403): "n" may be a, t, c, g, other or unknown
  misc_feature (451)..(451): "n" may be a, t, c, g, other or unknown
  misc_feature (460)..(460): "n" may be a, t, c, g, other or unknown
  misc_feature (475)..(475): "n" may be a, t, c, g, other or unknown
  misc_feature (478)..(478): "n" may be a, t, c, g, other or unknown
  misc_feature (501)..(501): "n" may be a, t, c, g, other or unknown
  misc_feature (505)..(506): "n" may be a, t, c, g, other or unknown
gactgttcatggccatctttattcccagngctggctatcccaagatactgccaggccacagccaacccccacctntgccaatgtgactgggtcaccaccccatacaccagagcagccttgagccctgccccaccccctgccctgcggaagccaagtccccagctataanaccctgcccctcctggnggcccaggaccctcaaagatgcacacaggggccccagcgaggggcccctccgtcattagccttctcctccaggctgggctgccaagcagcctggagctgagtctgtcccttggacgctgggccacgtcaccttctcctccagaaggcttcacctatgggcccaggaagtcctccttccgatagcccttcgcccgaaagtcacggtggagcttgttgnactgccacaggttggccaggaggctggatgcttgcccgggaggacttntcactggcngggcttgcccgcttnttnttgatgaaaatgacttttggagnccgnnaaaatacc

SEQ ID NO: 6139 - DNA, 572 bp, Homo sapiens
  misc_feature (490)..(490): "n" may be a, t, c, g, other or unknown
  misc_feature (498)..(498): "n" may be a, t, c, g, other or unknown
  misc_feature (572)..(572): "n" may be a, t, c, g, other or unknown
aaaattgtcaagatatttattgtgttaacatgtgagacatacaatttgctcagtaaaaatagcacatgaaaaaatattataagcttatattcataaagaaatgggtatgttattacctctttttcttgcttgctcaggactattaatttgacaaggttggaatgtgcacagcacagctgagacaccaccattttaacactgaatcactataccatgaactgacagaaccctgcatgaaggatgaaaaactcatacccaaagtcaagaatcacacagcagcatggagggggaaaatgaactatatgatgctaaccgcatttaatttcgaagtggggggaaacagggcatggggagtgaataatggttgaagttccaggctctaactgtcatccttaagtaaattaagtttaactcatctattaaaaagtgagttaaaacagatgagttttaaggtccatctcaactctaaatgagatcctagcaaaaccanggaatccnccctttagatccttatgaaacccaggaaaaggtggggcccagtgcttacctgaggcacagttggaaccaccctn

SEQ ID NO: 6140 - DNA, 573 bp, Homo sapiens
  misc_feature (464)..(464): "n" may be a, t, c, g, other or unknown
  misc_feature (508)..(508): "n" may be a, t, c, g, other or unknown
  misc_feature (542)..(542): "n" may be a, t, c, g, other or unknown
  misc_feature (546)..(546): "n" may be a, t, c, g, other or unknown
  misc_feature (556)..(556): "n" may be a, t, c, g, other or unknown
  misc_feature (563)..(563): "n" may be a, t, c, g, other or unknown
  misc_feature (573)..(573): "n" may be a, t, c, g, other or unknown
attgtggtaaaatatacataccataaaatttacaattttaaccatttaaaaatgtacaattcaacgtcattaagtatattcccaatagtgtgtgcaaccatcaccaccatccatctccagaactctgtcatcatcccagtgtgaaagtgttttagaaaccatatatgtaaaggcaggtcaattaggaatgtgctagctgaagtcttgaccggacagcaaattcatccatccacctacctactgtgtttatgtaccaggcttgataaatacagaaacaaatgagaccagaactacaaggtaagaaccttgtcgtctgtgatgctgggccccctgtcctacttcaaaacagagtgggaagatagaaaggattcttagatgagtctctaattgaaggaattcaagttttacttattctcctttcccagggaaatgggaggtgctctcacccatggcctcagcctttncagtacccaagaagtgtgggatttctctctcttttggatatggnttggtctgggctcttgcatgggagacagaggacnatgnatactatcanttggtanagcctttagn

SEQ ID NO: 6141 - DNA, 574 bp, Homo sapiens
  misc_feature (1)..(574): "n" may be a, t, c, g, other or unknown
nnnnnnnnnnnnnnnnnnnnnnnnnnnnnnnnnnnnnnnnnnnnnnnnnnnnnnnnnnnnnnnnnnnnnnnnnnnnnnnnnnnnnnnnnnnnnnnnnnnnnnnnnnnnnnnnnnnnnnnnnnnnnnnnnnnnnnnnnnnnnnnnnnnnnnnnnnnnnnnnnnnnnnnnnnnnnnnnnnnnnnnnnnnnnnnnnnnnnnnnnnnnnnnnnnnnnnnnnnnnnnnnnnnnnnnnnnnnnnnnnnnnnnnnnnnnnnnnnnnnnnnnnnnnnnnnnnnnnnnnnnnnnnnnnnnnnnnnnnnnnnnnnnnnnnnnnnnnnnnnnnnnnnnnnnnnnnnnnnnnnnnnnnnnnnnnnnnnnnnnnnnnnnnnnnnnnnnnnnnnnnnnnnnnnnnnnnnnnnnnnnnnnnnnnnnnnnnnnnnnnnnnnnnnnnnnnnnnnnnnnnnnnnnnnnnnnnnnnnnnnnnnnnnnnnnnnnnnnnnnnnnnnnnnnnnnnnnnnnnnnnnnnnnnnnnnnnnnnnnnnnnnnnnnnnnnnnnnnnnnnnnnnnnnnnnnnnnnnnnnnnnnnnnnnnnnnn

SEQ ID NO: 6142 - DNA, 569 bp, Homo sapiens
  misc_feature (491)..(491): "n" may be a, t, c, g, other or unknown
  misc_feature (499)..(499): "n" may be a, t, c, g, other or unknown
  misc_feature (521)..(521): "n" may be a, t, c, g, other or unknown
  misc_feature (542)..(542): "n" may be a, t, c, g, other or unknown
  misc_feature (544)..(544): "n" may be a, t, c, g, other or unknown
  misc_feature (559)..(559): "n" may be a, t, c, g, other or unknown
aagactctgttatgattttatttcttcaattgttccaatcacagtttctaatacagaaataaaactattcagcgtctccgttcttgcttcattttgtttcacagagatctgcatttctgagtttccaggctccaatagcagttctgttaagaacagacagccagtatcatcctgagcactgaggtatgctttccatggccgagacccagccctactcattgcgatggtctggatgttcactacttgaagagccatctggagggtgtcaggatggaattctccccgccaaggcaacacttgccgatgagcaactttaaggctaagccaagttttctcaaaataatcagcagtaagctggcgattggggactagcatgagggctccagaatcagggagttcttgtaccctctccttgttctcttcaggaatcaagggtcctaaaagagacagaaaacttgtgtgaaagatgttcttaatctgtaggactaagntttttatncaaattccaaatgtcccaatgnggcctttatttttggacaaangnttgaaataaccgggnccaaactttt

SEQ ID NO: 6143 - DNA, 570 bp, Homo sapiens
  misc_feature (493)..(493): "n" may be a, t, c, g, other or unknown
  misc_feature (526)..(526): "n" may be a, t, c, g, other or unknown
  misc_feature (531)..(531): "n" may be a, t, c, g, other or unknown
caaagtagacctctgtcttggattactatgtacctggacaggtgaactcttgtatgtttctgttttggggatttttaggggttttccatgtacattcatagagcctggtcagcagcgaggagtccttgttgcgtatggacggaaggctccctggcacccagatgtctcccttcgtcctggctgacacagagcatggtggtcatctgctcttcatgtccagcaggctcagaaagaactcggagttcccctcgcacccttgggccaagcttttcaagtccgagtgccaggactggatgagctggggtttgtgtgtctgctggcggcacagtgggtgtgcacaagaccaccatttgggtatctaacaaacacaggctcacaaaagggattttggcatatctgacaaagctttttgtctgaaaagttggattgagcttcctttcaacttcatcttatcgtaggtgtagaattaagtttcggacctggccaggccganaagccactggatggtcctccggcatggatctgnccctnagggccccatcaggaatgggcaaagaactgccttaccag

SEQ ID NO: 6144 - DNA, 583 bp, Homo sapiens
  misc_feature (507)..(507): "n" may be a, t, c, g, other or unknown
  misc_feature (553)..(553): "n" may be a, t, c, g, other or unknown
gagacggtctcactccgtcacccaagctggagttgcagtggcgtgatctccactcactgtagcctctgcctcagttcaagcgattctcctgcctcagcctgagtagctgggactacagtggtgcgcctggctaatttttgtatttttagtaaagacagggtctcaccgtgttggccaggctggtctcgaactcctggcctcaagtgatccacccaccttgctcagcctcccaaagtgctgggattacaggcctgagccaccgtgcccggccatgttgcttttataattgagatatttcatttgttttgggggttaggcaaatttaatttgccattcctcaaactcagtaacttcaaatataaacaatgcctagaatgaatatggttcctcattatttctatcaaactactacaaatactgaagaatcccaaagtagttttccacagaggcagaaaagcagttcaaggggttgaaaatcttcaatattaataagccctgggacatttnaatgggactttatatttcaagggaatgcaatttgaatcataatcantatatattggccccaaaagtaccttaattc

SEQ ID NO: 6145 - DNA, 583 bp, Homo sapiens
  misc_feature (468)..(468): "n" may be a, t, c, g, other or unknown
  misc_feature (471)..(471): "n" may be a, t, c, g, other or unknown
  misc_feature (488)..(488): "n" may be a, t, c, g, other or unknown
  misc_feature (521)..(521): "n" may be a, t, c, g, other or unknown
  misc_feature (523)..(523): "n" may be a, t, c, g, other or unknown
  misc_feature (547)..(547): "n" may be a, t, c, g, other or unknown
  misc_feature (574)..(574): "n" may be a, t, c, g, other or unknown
gctgcgacagtctctttatttccatctcagtctcccctgcctgctcattcctggggctccaggccccaagctcagcagcagagagtttataaataaataaattacaaaagcgggcagggagtggcctggccagccctcccggggctatggctcagtgctcagtgagtgacagctgcaggatccgctgtaagtcctcctcctcctgctgcccgcgccgctcccgctcctcctgctcccgtgaagacaactccagggccaggcgcagctgctcttcaaagctgggtggaccgggggctgggggtgtcctgggaggggatcctgggcccctgggctctgtggacagctgcaggctttcctggagggcccgctccagctgaagctgttcctcataaaccgtggcctggggaggagggcgggcaccgggcccgggtgttggtcaagggcttcccagacggtcacctgctccgnctnatgcccgcttcaagcangctctgctggatggcgaactgcaggaaggcatngncctcgtcccgaagggcttcgttgngcttcatgccaacacgctttacccgtngggacttta

SEQ ID NO: 6146 - DNA, 579 bp, Homo sapiens
  misc_feature (494)..(494): "n" may be a, t, c, g, other or unknown
  misc_feature (532)..(532): "n" may be a, t, c, g, other or unknown
  misc_feature (561)..(562): "n" may be a, t, c, g, other or unknown
ctttgagacatgctgtcagtcagttgcccaggctgaagtgcagtggcgagatcatgcgtcactgcagacttgacctcccgggctccagagatcggcctcccaagtagctgagacaacaggtgtgtgccacgacatccggctaatttcttaatttttctgtagggatgggatcttactatgttgcctaggctgttcttgaactcctgggctcaagcagatgatcctcttaccttgacctcccgaagtgctgggacttacaggtttgttccaccatgccagcccacaggctgttttttaggactagaagacacttctctcccctgtatccttcccttcttctacatgtgcaacctcattcctgcgctacagctctctctttaccaggtggatggcacctatacacctacagcctgggcatcagcatcactgctggcgtctccccctacccaacgccagcccttacttaccttctattctctcatctacttcgatgnggctcctcatttgggccccaccatcattcccttcctgnttggaagcctaattcactaatcctcatgnnaacctgggcagcacttg

SEQ ID NO: 6147 - DNA, 581 bp, Homo sapiens
  misc_feature (491)..(491): "n" may be a, t, c, g, other or unknown
  misc_feature (520)..(520): "n" may be a, t, c, g, other or unknown
  misc_feature (522)..(522): "n" may be a, t, c, g, other or unknown
  misc_feature (562)..(562): "n" may be a, t, c, g, other or unknown
  misc_feature (576)..(576): "n" may be a, t, c, g, other or unknown
gagacagagtcttgctctgtcacccaggctggagtgcagtctggatcgcagccaagagcgcgatcttggctcactgcaacctctgcctcccaggctcaagcaattctcctgactcagcctcccgagcagctgggactacaggcgcacaccaccacgcccggctaattcttgtatttttagtagagatggggttccatcatattggtcaggctggtcctgaactcctgaccttgtgatccacccgccttggcctcccaaagcgctgggattacaggcgtgagccactgcacctggctggaatatattttaaaataatatgcatgagaaaataaccagtttcctggacttcagaagaggaagaaaagttgccctccctctcatttctttttgctttgacaattaaaacatcagacactactgttcaaaagcaccccaaagaccagtgcataaaaacaggtagcccctaattcatctgcataagacataactgnttatcaaaccgattataatcaagcatttncnaacagctggcttatttctcaaaaagcatttggcttaaaantagaatgggatatnccaat

SEQ ID NO: 6148 - DNA, 573 bp, Homo sapiens
  misc_feature (458)..(458): "n" may be a, t, c, g, other or unknown
  misc_feature (485)..(485): "n" may be a, t, c, g, other or unknown
  misc_feature (516)..(516): "n" may be a, t, c, g, other or unknown
  misc_feature (522)..(522): "n" may be a, t, c, g, other or unknown
  misc_feature (533)..(533): "n" may be a, t, c, g, other or unknown
  misc_feature (565)..(565): "n" may be a, t, c, g, other or unknown
  misc_feature (571)..(571): "n" may be a, t, c, g, other or unknown
agtagagacggggtttcaccatagccaggatggtcttgatctcctgacctcgtgatccgcctgcctcggcctcccaaagtgctgggattacaggcgtgagccaccgcgcccggccctcctgctgtgaattttctgaaccatgtatgtgaattaatttgcacaggttttcccccattacttagatgtacaggatttctttcctgtgtgacttctcacatgaccttgaaaggctttgggacaactgaaagctttcccacatttttcgcatttactgggcttctgtccaatctgcgttcttacatttttggaagagcaaagcccgcctgaaggttttcccacactggctgcatttacaggtttctccccagtgtgctttctctcatgtttgtgtaaagatgaggaccaaccatacgttttcccacacgtttcacatttatagactttctctctaagtttgngatttgacatctgtggaagggccaagncttgcggaagacttttccaacgctggcccanttacanggttcttttancatgcgtctcccgggttgggtaaggataaggnccaccnaa

SEQ ID NO: 6149 - DNA, 578 bp, Homo sapiens
  misc_feature (462)..(462): "n" may be a, t, c, g, other or unknown
  misc_feature (464)..(464): "n" may be a, t, c, g, other or unknown
  misc_feature (497)..(497): "n" may be a, t, c, g, other or unknown
  misc_feature (548)..(548): "n" may be a, t, c, g, other or unknown
gagatggagtcttgctctgttgcccaggctggaatgcagtggcctgatctcagctcactgcaacctccgcctcccggattcacgccattctcctgcctcagcctccctagtagctgggactacaggcgcccagctaattttttgtatttttagtagagacggggtttcaccgtgttagccaggatggtctcgatcttctgacctcgtgatccacccgcctcagcctcccaaagtgctgggggtgacaataagaaatgctactctttaaattgccttccttatttcagagaccaagtgacagtgtttaacaccagagacacagtgggcacagttactttcatgggcagcagggccacagtggtaaaatgaatgtttttgacttgtgagggtctttggtagtatctctaggaataaaatagcctactaaaatatatgttgatctacataattagaaattatcangnaagtagaattctaatttggatcaccataatagncatgggcctttccccaggttttggaacctgacaattttgcaaacctggagnccatgacattggtgggaatatatactaaaa

SEQ ID NO: 6150 - DNA, 576 bp, Homo sapiens
  misc_feature (525)..(525): "n" may be a, t, c, g, other or unknown
  misc_feature (564)..(564): "n" may be a, t, c, g, other or unknown
ctaatatccttatttagcaaaattaaaagttggcgatgatgtgttgctttcccagacttttatttgaaatgtgactgctttgtaaaactccagagtcaaggactcataggcaggaggatgtcataaattaacaggaaaggatgagaaatctccactccactccctcctccctcccttgatcactcattccctctcttccattcattaaccacccaccacatgccatgccctaaggaagcagctatctaagaagtccctgcctgcaggggctttacagaccaggaggaaggcaacccatagagccaggatcctgataaccactgctgactgcccctctgcctaggcaccaactaaggtggctccaaaaagtgaggccttgttgggaagggaaaaaacagcaaaggtcaagcttggatgaacccatccagaattttgcaatcagaaatacctagaaaagaattattttagaagaacagggggatgccagggcttggggatgaggaatgatgtttcagtgcttaaggnccctgaaggcttgggcttcctgctcaaaacccagggggnccaggttgcctt

SEQ ID NO: 6151 - DNA, 578 bp, Homo sapiens
  misc_feature (548)..(548): "n" may be a, t, c, g, other or unknown
cagagcaaaacaaagtattttattccactagcagatgtttctccaaaaacaaaaaacaaaccaatacaaccacaaatactacccacacacaaccctgaaacataagttgccatattccagtggtcctgaattttaacatgttttgctctacattaattcaagaaataaaatgagaaacagctttgaaaatgagattaactcctttgctgtaattatacttactctataattcaaactatttagctgaagtcagttaacgagtaaaaaccgcggatacagctcaaactgctcttaacttctttaaatgtttactgttctatcaaaactcagacccaagctgcacaggtgtaacttgaggcactaacaatcttcctaccagacgtaatagttttatgtgttcttaaagctgggcgcatatacaaaatcactgtcatcacacataaacatcagaaacttttcttggacaactagaccaatagtttcctctattataattatttttaaatcaagcatgtgtaacagttcagcatttaaaaggactcccaggntatgattaaaaggatgctcaggttgagaaa

SEQ ID NO: 6152 - DNA, 580 bp, Homo sapiens
  misc_feature (523)..(523): "n" may be a, t, c, g, other or unknown
  misc_feature (530)..(530): "n" may be a, t, c, g, other or unknown
ggaggcctcttctgcagaagataatctggattttttatgtgatgactctccacagtcttttttggttttatcttttcctttttttgacttgatttcttttctcctgtgatggaaatttaatttaatggaacattcttggcataaccttaatttaacgagtgcatttctcttctcaccatgctcaatataaccaaaattaacttcccaactctttaagccttcttttttatcacaatatttatttccacagaaaaattgaccttttcctgaaattacttctttttctactcgccacctaaatccaaactgataataaaaaaattacatttatgccaatgtaaatttaaattatacagaaatctaaacatggagccaacaatgacattcaccaacctaaaaaataaatgtaattcccatcatgacagatttttctcttcttataggatttgaagaaaatacattgaacaatcaccaatttatctggtaaagaacaatctactttaagatagcttaaaagttatangtgccangccacaagatcctaagttaccaataatatatccggtctggaagacgccaa

SEQ ID NO: 6153 - DNA, 580 bp, Homo sapiens
  misc_feature (507)..(507): "n" may be a, t, c, g, other or unknown
  misc_feature (524)..(524): "n" may be a, t, c, g, other or unknown
  misc_feature (538)..(538): "n" may be a, t, c, g, other or unknown
  misc_feature (549)..(549): "n" may be a, t, c, g, other or unknown
  misc_feature (554)..(554): "n" may be a, t, c, g, other or unknown
  misc_feature (560)..(560): "n" may be a, t, c, g, other or unknown
  misc_feature (564)..(564): "n" may be a, t, c, g, other or unknown
gtagagatggagttgcccaggctggtcttgaactcctggcctgaggtgatcctcctgcgttgacctcccaagtatcttagactacagatgcactccaccacgcttggctaacttaaatttatttttttgtagagacagggatttgctttgttgcccgggctggtctgaaacccctggcctcaagtgatcctcctgcctcggcctcccagaatgccagcattacaggcgcgagccaccatacccagccttattcttgagtaatttttcttgtcaattttatttttctgttgtgagagtgatcatggaaacagtgggtgagaacactggtctgtctagtccattcttgtcttgctgttgaaattccagatgcagccagttgaggccccagcttgcctcacttcatcacagccctttttcttcctttgcacatgtatggtgtgctcagtaagtcaagtgccaatccacctggagttgccgggggtttttttttctttctttctttctttnttttttttgaaacggantttgctcttggtgnccaacctgaangccangggacnattnggttactggaacctcc

SEQ ID NO: 6154 - DNA, 574 bp, Homo sapiens
  misc_feature (438)..(438): "n" may be a, t, c, g, other or unknown
  misc_feature (487)..(487): "n" may be a, t, c, g, other or unknown
  misc_feature (511)..(511): "n" may be a, t, c, g, other or unknown
  misc_feature (524)..(524): "n" may be a, t, c, g, other or unknown
  misc_feature (539)..(539): "n" may be a, t, c, g, other or unknown
  misc_feature (546)..(546): "n" may be a, t, c, g, other or unknown
  misc_feature (556)..(556): "n" may be a, t, c, g, other or unknown
  misc_feature (567)..(567): "n" may be a, t, c, g, other or unknown
ctgggccacactgagtgaattttaatgcaggatggaagcacacagatgggtgatcaggtctctctttactgaaacacagaacatgtgccaaggtgagtccaaggacacctctgggaacaggtgaagcccctccccatacatacactccggtggatgtgagcgagggtcctgttgccacatctggggttaggggcttggacatgctgcccttcatgggaaccttctgggtacctctcagcacagtaacgcagctgcagtctgtcggtgggggcccaggctaggggcagcaccctcttttggcatacgggacatgcctggctgcagctgatgtccgttagcctctcctgacacgcagtaaggagacctggaagtgaggcgcgtgggcgtggagttcccggtggagctgctgcatcagcctttctgccactctggggtcantgagggtcttccggggaagccacactcacccgcaggaggaggaaacctncattttacctgcactcacgtctgnggccggccttgtnccggcagtctgggcntggctgntgggggcttnatcggggcttncttaggt

SEQ ID NO: 6155 - DNA, 583 bp, Homo sapiens
  misc_feature (435)..(435): "n" may be a, t, c, g, other or unknown
  misc_feature (451)..(451): "n" may be a, t, c, g, other or unknown
  misc_feature (461)..(461): "n" may be a, t, c, g, other or unknown
  misc_feature (464)..(464): "n" may be a, t, c, g, other or unknown
  misc_feature (487)..(487): "n" may be a, t, c, g, other or unknown
  misc_feature (500)..(500): "n" may be a, t, c, g, other or unknown
  misc_feature (509)..(509): "n" may be a, t, c, g, other or unknown
  misc_feature (543)..(543): "n" may be a, t, c, g, other or unknown
  misc_feature (572)..(572): "n" may be a, t, c, g, other or unknown
gcccagctggcacatttattggcattaaaacacaagacccttcccatcaccaggaagccacgcccaaagggtgtccctctgccccatttctgcaaaaactctcaggccttagcagtagcctgagctgcccccagggctgtgagctgctgaatcttctgactcatcatttccatgacggcctgtttcatggcgtgcttctcctgaagagctggttggattttctccatctgcttggttagaaaatctatcttcctcttgaagaagtccttggcatcctcagctgtcttctctacatagtacccagttcccacatcgatgagcacgtgttccacatcatgcagcttccaggggcatacatctgagaagcaagaattaagggaaaaactagccagcccagcatgagccatgattccgccagccagcctgcttggcctncaaagacctttttttncaaaaggctncangcataaggctgaataatctgganggcttagacaatnctataactncaatggaaggaagacggaaagttggtcttaaggngaaaatgatgatgctggacaccttttggnctgcctaatcc

SEQ ID NO: 6156 - DNA, 508 bp, Homo sapiens
  misc_feature (3)..(3): "n" may be a, t, c, g, other or unknown
  misc_feature (17)..(17): "n" may be a, t, c, g, other or unknown
  misc_feature (40)..(40): "n" may be a, t, c, g, other or unknown
  misc_feature (94)..(94): "n" may be a, t, c, g, other or unknown
  misc_feature (96)..(96): "n" may be a, t, c, g, other or unknown
  misc_feature (103)..(103): "n" may be a, t, c, g, other or unknown
  misc_feature (105)..(105): "n" may be a, t, c, g, other or unknown
  misc_feature (109)..(109): "n" may be a, t, c, g, other or unknown
  misc_feature (171)..(171): "n" may be a, t, c, g, other or unknown
  misc_feature (173)..(173): "n" may be a, t, c, g, other or unknown
  misc_feature (225)..(225): "n" may be a, t, c, g, other or unknown
  misc_feature (251)..(251): "n" may be a, t, c, g, other or unknown
  misc_feature (278)..(278): "n" may be a, t, c, g, other or unknown
  misc_feature (294)..(294): "n" may be a, t, c, g, other or unknown
  misc_feature (303)..(303): "n" may be a, t, c, g, other or unknown
  misc_feature (375)..(375): "n" may be a, t, c, g, other or unknown
  misc_feature (393)..(393): "n" may be a, t, c, g, other or unknown
  misc_feature (417)..(417): "n" may be a, t, c, g, other or unknown
  misc_feature (419)..(419): "n" may be a, t, c, g, other or unknown
  misc_feature (430)..(430): "n" may be a, t, c, g, other or unknown
  misc_feature (438)..(438): "n" may be a, t, c, g, other or unknown
  misc_feature (443)..(443): "n" may be a, t, c, g, other or unknown
  misc_feature (481)..(481): "n" may be a, t, c, g, other or unknown
  misc_feature (497)..(497): "n" may be a, t, c, g, other or unknown
ganactgattctcactntgtcgcccaaactggactgcagnggcacaatctcggctcactgcaacctccgcctcccgggtttgagcaagcaattntnttgtctnancctntggagcagctgggactacaggccacggcaacactcccagctaattttttgtatttttagtananatgggatttcaccatgttggccaggctggtcttaaaactcctgacctcaggngaaccacctgcctcggcctcccaagngctgggattacaggcgtgagccaccgnacccagccgacccttnttaaaaacncagagaactgaggtgtcctgatgggcatccaaggaaaaagcagcccaacgagttttgcaggcccggggtcancagggggaccaggctttnaccccctacacagccccgaatttntncagcaaatccnggatctgntttanggacatcagggtcttgggctttaaacctttcccgtatngttccacgtctggaanaacttgggaaa

SEQ ID NO: 6157 - DNA, 588 bp, Homo sapiens
  misc_feature (310)..(310): "n" may be a, t, c, g, other or unknown
  misc_feature (350)..(350): "n" may be a, t, c, g, other or unknown
  misc_feature (396)..(396): "n" may be a, t, c, g, other or unknown
  misc_feature (400)..(400): "n" may be a, t, c, g, other or unknown
  misc_feature (435)..(435): "n" may be a, t, c, g, other or unknown
  misc_feature (462)..(462): "n" may be a, t, c, g, other or unknown
  misc_feature (515)..(515): "n" may be a, t, c, g, other or unknown
  misc_feature (541)..(541): "n" may be a, t, c, g, other or unknown
  misc_feature (563)..(564): "n" may be a, t, c, g, other or unknown
  misc_feature (573)..(573): "n" may be a, t, c, g, other or unknown
  misc_feature (577)..(577): "n" may be a, t, c, g, other or unknown
  misc_feature (581)..(581): "n" may be a, t, c, g, other or unknown
actaaaataaacctgttcgggggaacagctactagatgaatttaagggttttatgcaccttatagaacttatagcaaaaatagttctagttgatttcattataaataacgttttcaagaacctgtgcaaaactgtcaataatttcctaaagcacaattgatcagaaaaatccatgattgttcagccttcacacccttcttcatgtaagaacacctttctgtacatctcacagttacttattaggttgaaaggtatatggagaatggtcattagacgtctcgacagccacctgctgttgaccacttgcctnctcaacaggaaccgctgtcgtctgcatatgtgcatactgnggcaagtaggctccttgcataactgacgttgcaggcatgtatggtnccgngctggctaatgacagatgactcatctgctgggccnaaaggcttgacattgatgcccggcttnaatgacatggggggctccattgagggagttaacacgggacccaggggcttganaatatatgggtgaggttgcttccccnaaggcttttgacctggtaggcnnatcccgganaatncatnttggggg

SEQ ID NO: 6158 - DNA, 527 bp, Homo sapiens
  misc_feature (31)..(31): "n" may be a, t, c, g, other or unknown
  misc_feature (37)..(37): "n" may be a, t, c, g, other or unknown
  misc_feature (51)..(51): "n" may be a, t, c, g, other or unknown
  misc_feature (64)..(64): "n" may be a, t, c, g, other or unknown
  misc_feature (82)..(82): "n" may be a, t, c, g, other or unknown
  misc_feature (163)..(163): "n" may be a, t, c, g, other or unknown
  misc_feature (247)..(247): "n" may be a, t, c, g, other or unknown
  misc_feature (278)..(278): "n" may be a, t, c, g, other or unknown
  misc_feature (493)..(493): "n" may be a, t, c, g, other or unknown
  misc_feature (497)..(497): "n" may be a, t, c, g, other or unknown
  misc_feature (499)..(500): "n" may be a, t, c, g, other or unknown
  misc_feature (516)..(516): "n" may be a, t, c, g, other or unknown
  misc_feature (520)..(520): "n" may be a, t, c, g, other or unknown
  misc_feature (522)..(522): "n" may be a, t, c, g, other or unknown
accattatagctaattattttattacaatgntttcanaattagatctaggngacataaaatacncaaaagcataaagccatntgaatagtacagtcaacaagcaacaaccagtacaatcagcaataatagagaacttttaactttgtatgtcacagagaatgnatatacctttttaataaaaagcctgaataaaccaataactattaaagaaatcacaaagctgattaaaaatctactattaaaagngtcatcaggattagattggtttacactttgncctagctaacttttaacaaacaaataattctaatgctatttaaattattccagaccacaggaaaaaaattgaaaactcacatattcatatttttttaaagctagcacaacttcaataacaaaacttgataaagatagcatcagaaggacaaaatacaattttactttggaatgaaaatgcataattctaaattaaatactgggaaataaaatccnctcngnngcaaatcattttttcncaangnccagt

SEQ ID NO: 6159 - DNA, 592 bp, Homo sapiens
  misc_feature (403)..(403): "n" may be a, t, c, g, other or unknown
  misc_feature (489)..(489): "n" may be a, t, c, g, other or unknown
  misc_feature (564)..(564): "n" may be a, t, c, g, other or unknown
acaacccgtaggttttgacattttctattttctctggaaccttaaaagatgttcacaatgaacatgggctattcttcatatggtctaagatatctcccatctcatgaactcacattacttatgaaaacagatgatgtaagcattccaacctctccttgacttgccaatgttagtcatgtggggtcaagtgaaattaaaaaggccttggaaaccagagagtcctgggtttgaattctgattctgattctgtgacttcaaggatacatttttttcttttattaaaggagcatcatatgactcctagccagctggacagtgaggataaaatgagacaaggcatgcaaaacgtacagacatagaaggcacgcaataggttttacaacctctcccttgccttgattgntcttagttttattttctatttaaatcaatcaactagtttaggaataaacatgacatcttttgaacaatttgcatgcagaacttggnatataaaaaatgggaaattaggacttagggatttactggtaaatactcctggtgaatatatcatggattcatgcntttggggaggcctaacttttatccagag

SEQ ID NO: 6160 - DNA, 583 bp, Homo sapiens
  misc_feature (430)..(430): "n" may be a, t, c, g, other or unknown
  misc_feature (512)..(512): "n" may be a, t, c, g, other or unknown
  misc_feature (528)..(528): "n" may be a, t, c, g, other or unknown
  misc_feature (563)..(563): "n" may be a, t, c, g, other or unknown
  misc_feature (570)..(570): "n" may be a, t, c, g, other or unknown
ccttcttttattaaagctatcattccaggctttgatcaaagatccaagaatatttgttctaccaggctggaatgaatgtggtttggaagttcagagtacatttaaaagctgcaacaaaatataggtagccaacaatctcagaattttggatcagcccagatggagatagcaatttgaaatgtcttcgatcccttacttaaatgacgaaatgtctatcagcccagatagagcaatttgaaatgttttcgatcccttacttaaatgatgaaatgtatatcatactatctgtaaattggatattccattacagtgataacgtacagaattcccatgcgttattacactttcctgagagtaaagcaattagaataaccttaatcctagcaacaaagttttttttgtaggttttttttttttggtttttttttgncttttttgttgcgtttaaaacatttgggctattccctgacgatctatcatggaaatttgatgctaacattggcactttgaangcaaactatttttaanccaatggatttggttaaaaaccttatccaaccggncttaaancccgcttccaaaa

SEQ ID NO: 6161 - DNA, 591 bp, Homo sapiens
  misc_feature (446)..(446): "n" may be a, t, c, g, other or unknown
  misc_feature (462)..(462): "n" may be a, t, c, g, other or unknown
  misc_feature (525)..(525): "n" may be a, t, c, g, other or unknown
  misc_feature (550)..(551): "n" may be a, t, c, g, other or unknown
  misc_feature (588)..(588): "n" may be a, t, c, g, other or unknown
ggccctccttacactttggagactcttcccttatgtgaaattttataaagaatgaaatctgaaggaggtgggagagggtatgtccgggcccccatctccttggtgttcccttcttatgccataatttctccttggcctcagaggcacctttactgcaggtgagggctctttcaagcccagatggagcctcaatggcctgggtgacacccaaggtctctctagactcttatgttctacctgtctttctgaaagccccatggagtggggaggacagccatgacatagtaagaaaaggagaattccctagcacctgactgaaaaaaataactgggaagagagacagtgacaatacacaatacacatgacctcacgtacatggagcacggtgaccatgaactgtaacattaagtatcacctcagaagcattccaaacctgggtgactgancgccccagtagatgangaggagcaggaaggcttgtgtggatgttcacacaccggcccaacttccccaagaagataagcnctcatgggaaaatcagagagactgnngaactcaaatccctgggattcccggaatgggcacctnttg

SEQ ID NO: 6162 - DNA, 579 bp, Homo sapiens
  misc_feature (476)..(476): "n" may be a, t, c, g, other or unknown
  misc_feature (493)..(493): "n" may be a, t, c, g, other or unknown
  misc_feature (507)..(507): "n" may be a, t, c, g, other or unknown
  misc_feature (510)..(510): "n" may be a, t, c, g, other or unknown
gagattgagtctcactctgtagcccagactggagtacagtggtgcgatcctggctcactgagacctctgcctcccgagttcaagcaatcctcctatctcaggctcccgagtagctgggattacaactgcacaccaccaggactggctaactttttcgtattttcagtagagacagggtttcttcatgttggccaggctgctcatgaactcctgatctcaaatgatccacccacctcgacctcccaaagtgctggggttacaggcgtgagccaccatgcccagccttattttacttttctttaacctgacaattaaccactgatgttactttttgggagctaggttatatattttttaggttcttgattaaatggtaaatattccagaagacacatatgcagtatacatgctgacttgattaattttttgtaacacctcagggtagagatctatttcatgatcaacacaataaatangagacaaatacctttgnttgcaagaaacagnttnccaagcataatgggatacctaggttaccattcttaactttatgcctaatttaacctaaggaaaaagtca

SEQ ID NO: 6163 - DNA, 588 bp, Homo sapiens
  misc_feature (520)..(520): "n" may be a, t, c, g, other or unknown
  misc_feature (560)..(560): "n" may be a, t, c, g, other or unknown
  misc_feature (570)..(570): "n" may be a, t, c, g, other or unknown
  misc_feature (587)..(587): "n" may be a, t, c, g, other or unknown
gagatataagagtctcgctcagtcgcccaggctggagtgcagtggggcaatcttggctcactgcaacctctgccttccgggttcaagcgattcttgcgcctcaacctccccagtggctgggattacaggcatgtgccaccacacccagctaattttttttgtatttttagtagagacagggtttcaccatgttggccaggctggtctcgaactcctgacttcaggtgatccacccacctcagcctcccaaagtgctgggattacaggcatgagccaccgcaccgggccagtttcctgactttttattttcagctataaaacaattatgagagccaaaggagccaggatcaccttccaaaacattttgttttgtacttctctaatttatgaggcattctttcttctcaaagcaggatattacagtgcagattaaaactggatattaaagttaatggtgacaaattattaagtagtttgaagaaatccttagaatatcaagattaagagagacttaatggcngaagaaaaaagctactgggggttcaaagcttaaggtttanaattctggcntgggatcttaacccttnt

SEQ ID NO: 6164 - DNA, 584 bp, Homo sapiens
  misc_feature (464)..(464): "n" may be a, t, c, g, other or unknown
  misc_feature (509)..(509): "n" may be a, t, c, g, other or unknown
  misc_feature (517)..(517): "n" may be a, t, c, g, other or unknown
  misc_feature (557)..(557): "n" may be a, t, c, g, other or unknown
  misc_feature (559)..(559): "n" may be a, t, c, g, other or unknown
  misc_feature (569)..(570): "n" may be a, t, c, g, other or unknown
  misc_feature (582)..(582): "n" may be a, t, c, g, other or unknown
aaaactaaaattggttttaataaaagttttggagtcatctaaatgagtaactatacacattcctcctctccagcaagtatacagaaatcttcccttactccaatttgacgctgcaaaatcatacatgcaccccaaactgatctgttattgaaatttctttttctggtctcacccattactttaacatatcagaggaattaacataacagcctagagaacagaaataagagataataggtgcttcagtaccacccaaattatctactaagaccacagtgtgggcaacagaatgcagattcatggtagtagttccttgaatgaaagagttcagacagaatcttccacaaacacaaatttttgcggtatccaaatcttggcagagatggaatggaatgatatgagagccatatggaatcctcatagcgggtcccgcgcttgccttcagggtggagatgaacaggaangctcggacccggcggctgactcctgggaagtctgctgacagaagnttaacacnggttggcccccttggcccgggttctaagcccaagggggcnantggccggtgnnaccctccccttnaa

SEQ ID NO: 6165 - DNA, 549 bp, Homo sapiens
  misc_feature (457)..(457): "n" may be a, t, c, g, other or unknown
  misc_feature (468)..(468): "n" may be a, t, c, g, other or unknown
  misc_feature (503)..(503): "n" may be a, t, c, g, other or unknown
  misc_feature (511)..(511): "n" may be a, t, c, g, other or unknown
  misc_feature (532)..(532): "n" may be a, t, c, g, other or unknown
  misc_feature (540)..(540): "n" may be a, t, c, g, other or unknown
  misc_feature (545)..(545): "n" may be a, t, c, g, other or unknown
acccatttctaacaatttttactgtaaaatttttggtcaaagttctaagcttaatcacatctcaaagaatagaggcaatatatagcccatcttactagacatacagtattaaactggactgaatatgaggacaagctctagtggtcattaaaccccctcagaaagtctaagattcagaatgtctccatcatattagaagaaaaatgtactgtattaaaatttaaattgcatttttacaagttgttttttaattagtgttctatttacattgcagaacttccaccaactgcagtagtttaactttggcacaacattaagttccatttcttttgggtattggatcctgctttttgagtgtgtatgccccaaaacgttttcaatgtcatcaaagattgggcaaattcacagtaaatcagacatcttgagttgaagaattgattctccttcaacgttttangcagattcagncatctggatttaaacagcttccgttcacatgtcgnggaggttnccaaggggcactatcattggntcttcttnatccnttcc

SEQ ID NO: 6166 - DNA, 575 bp, Homo sapiens
  misc_feature (477)..(477): "n" may be a, t, c, g, other or unknown
  misc_feature (486)..(486): "n" may be a, t, c, g, other or unknown
  misc_feature (546)..(546): "n" may be a, t, c, g, other or unknown
  misc_feature (553)..(553): "n" may be a, t, c, g, other or unknown
attgcctaatgacctatatagaaccaccagtatagtgttaaatagaaatggcaagaacagacatatttgtcttattactgatgggaggaggaaggtacccaatctttcagcattaagtatgattgttagctgtcggtttttcataaatgcttgtttaccaagttgaggaatatcccttctattcctagtttgctgagtgtttttatcacaaacaaatgttgaattttgtcaaatggtttttcttcataagttgagataatccatgcgtgttttttgtcctttattagtagattatattacattaatttccatatactgaaccaagctttcattcctgagataaattacactttgtcatcgtatatagtcattttaatatgctgctagattcagtttgctaatattttgtcaaagattttggctatatttataacccggtattggtctgtaagtttcttggggtatcttgggttttgnaatactggncctggaaaaaggggtaaggaagggtcccattggatccaatttttgggaaaagttgtgaanactggcntcaacctcttataatcacccgg

SEQ ID NO: 6167 - DNA, 573 bp, Homo sapiens
  misc_feature (462)..(462): "n" may be a, t, c, g, other or unknown
  misc_feature (473)..(473): "n" may be a, t, c, g, other or unknown
  misc_feature (480)..(480): "n" may be a, t, c, g, other or unknown
  misc_feature (501)..(501): "n" may be a, t, c, g, other or unknown
  misc_feature (517)..(517): "n" may be a, t, c, g, other or unknown
  misc_feature (544)..(544): "n" may be a, t, c, g, other or unknown
aattaaactggggatttcaaaaaagtggcctttattttccaatttctatagcaaaaccagccataagtgaacatggatgctcttcaatatttttccagtattgaatgaaaaaagacctctgccccagcccacatttcctttgttgaatgagtagagaagactgagaagtatcactcacccgtgatgtggtttgtcccttttccagccagtgtgttggtaataaaagtcacctttcagagctttggtccctgtaatgcccgtctttcctgtgtccaggaataacctttgctactaggcagtcctctgaaagatttgtagaaggttaaagtggaaagggacttggaagctcatagaatccatgcctcttcttttagcatcaaggaattagaagtcctgagagatgaagaatgttgtcttccaactcaaaccatttctgaagccatttccctggtactgcattgnccacacccttncccatgntatcctcatccggtaagctgntttaatgctggacagnctgattggctttggcagcaacatttgntttacagattcctacttaaggaagaaagg

SEQ ID NO: 6168 - DNA, 584 bp, Homo sapiens
  misc_feature (544)..(544): "n" may be a, t, c, g, other or unknown
  misc_feature (565)..(565): "n" may be a, t, c, g, other or unknown
aaattaaggctcgaaagaaggaaaaggactgaaactataaatgaaacccttcatgtttctagggctgccagtcagctgcttttagtgcctgcctcagttccgcccactctgggcagggagggacctatcgatgtgcctatctttctacacaggggctgtgaatgaagctgcaggctcacgtgtaaggggaaggccaggcaaggacccaggacagtctgctgcagaggaaaggggcacctgacagctaccgacagaggaggagggcgcactcccctggaggaggagcaggagctgtgagcctcctgagacagccaatgctaactcggtgaaaaaggttaagaccgactaacattcacaaaacagccaaggcataagggctctgcagcttaggaatcaatgcggaactcagatctacatgaattccactcagcaaatgtaaagccttttttccccttcccttccacatctcttctgggatgagccccataggatcctggagcaggggatgtcccagggccagtcagaaccttaccggagtgtgaancaaaggtgccctttgtgggtnctggggggggcaacacttt

SEQ ID NO: 6169 - DNA, 569 bp, Homo sapiens
  misc_feature (40)..(40): "n" may be a, t, c, g, other or unknown
  misc_feature (88)..(88): "n" may be a, t, c, g, other or unknown
  misc_feature (211)..(211): "n" may be a, t, c, g, other or unknown
  misc_feature (243)..(243): "n" may be a, t, c, g, other or unknown
  misc_feature (247)..(247): "n" may be a, t, c, g, other or unknown
  misc_feature (257)..(257): "n" may be a, t, c, g, other or unknown
  misc_feature (272)..(272): "n" may be a, t, c, g, other or unknown
  misc_feature (294)..(294): "n" may be a, t, c, g, other or unknown
  misc_feature (339)..(339): "n" may be a, t, c, g, other or unknown
  misc_feature (441)..(441): "n" may be a, t, c, g, other or unknown
  misc_feature (445)..(445): "n" may be a, t, c, g, other or unknown
  misc_feature (460)..(460): "n" may be a, t, c, g, other or unknown
  misc_feature (466)..(466): "n" may be a, t, c, g, other or unknown
  misc_feature (485)..(485): "n" may be a, t, c, g, other or unknown
  misc_feature (511)..(511): "n" may be a, t, c, g, other or unknown
  misc_feature (514)..(514): "n" may be a, t, c, g, other or unknown
  misc_feature (567)..(567): "n" may be a, t, c, g, other or unknown
ggtctgttttcaggtttttttttttttttttttttttganaatgggtcctaaccactttgcccaggctggtcttgaacccccaggctntagcaatcctcctcccctggcctcccaaagttctgggatttacaggtgtgagccacatcaaaatttaaaaagcaaaaaagaccccatgattctgttacacttcttattttaacttgaatatanagtccttttgtttgtttgtttgtttgtttganacanagtctcgctntgttgccgaggccanagtgcactgacgcaatctcggntcactgcagcctccaccacctgggttctaatgattctcgtgcctnagcctcccgagtagctgggattacaggcatgtgtcaccacacccggctaatttttggtattattagtagaaacagcatttcgtcatggttgcccaagctggnttcnaactcctgagcttangcaatncggccaccttaagcttccnaaagggctaggattacaggcatgaanccncatgccaggccaaataagaccccttttaatttgaattaccatccccttaagcngg

SEQ ID NO: 6170 - DNA, 587 bp, Homo sapiens
  misc_feature (548)..(548): "n" may be a, t, c, g, other or unknown
  misc_feature (568)..(568): "n" may be a, t, c, g, other or unknown
ctaataaaataaatattttattaacgaaagtctggaaaatgtgtgcactaaaaagtgactataaatgttaaattaaaaaaccttcaaagaacacatatcacacattcaatttttaaaactttatataaaagctctattataaatacaaagctaaactatctgagtactaacaacacagttcatacaaagaaacttaacagtagtaaaatacagatatataagatgcttatttttggtcctttaggataaaagaactaagttggttttttttacatggctccaggcacaaaaatagaatataagatggtaactgcaacattcttagtgtttatccttgtaattctttaaatgtcaccagtcataatagcaatgaactcctcttggtttactgtggtaagaaagaaaatgaaatagtcagaaatataaacattttattttttcagaatccacgactaccattttacactaagtatttaaaaaattttacattatgcaaaattattacattaagacatggctttttggcttttacttctttggtaggaagnggacctggttattaaaaggnactttttggtgccaaaatc

SEQ ID NO: 6171 - DNA, 588 bp, Homo sapiens
  misc_feature (576)..(576): "n" may be a, t, c, g, other or unknown
caaattcataggatgtctttttattatgctaataatttaatcacattccatggggtccacaataaactctttatattgaattccattccataataaaaaaaaaaaagaaaaaacaaaaacaaagcaaggagctctatttttgggaaaacaatgggtgctcactgcttaactggattgtattttatttggcttttcaacacggcaatacaaacatattatgaaatgagtgaaaagggcataataattttattctaggtttctactaccttcatgattaagacttaactagctactgctgcttggccataatccactacagtccctaaacaaaaaaactatgaacaaagacaaaaataatctgtaatttctcctacaaaggttaacccaaattaacttacagcagaggtgaacaagctactgcctgtgtgccaacataacccagcttgtttttattagtaaggttttacatattatctatgattggtttcacactacattggcaaagctgaataactgcaacagaaatcacacagcctgcaaagcctaataattcctattgggcccttaaaagacccnaaaatttggtgc

SEQ ID NO: 6172 - DNA, 585 bp, Homo sapiens
  misc_feature (495)..(495): "n" may be a, t, c, g, other or unknown
  misc_feature (508)..(508): "n" may be a, t, c, g, other or unknown
  misc_feature (558)..(558): "n" may be a, t, c, g, other or unknown
  misc_feature (567)..(567): "n" may be a, t, c, g, other or unknown
  misc_feature (571)..(571): "n" may be a, t, c, g, other or unknown
cataccctagtggtgcctggaactccagcaagacagaactgttcattcactcccctggaaagggggctgaaaccagggaaccaagtggtcttgctcagccggtcccattcccgtggagcccagcagtctaagaaccactggcttgaaattcttactgccagcacagcagtctgaagttgacctgggatgatcgagcttggtgtgggaaggggcatccaccatttctgaggcttgagtaagcagttttccccgacagtgctaaggaggctgggaagttcagactgggcggaactcaacacagcgtggcaaaacagctgtggccagactgcctttctagattcctcctcacagggcagggcgtctctgaaagaaaggcggcaggcccagtcaggggcttagagataaaactcccctctccctgagacagatcacctcagggaaagggtggctgtgggcccagcttcagcggatttaaacattcctgcctgccacttntgaaaaagtgcancagatctgacaaggaggatttaccgcacaacttgactttgtaaggacagnttgcttctnaagngagtcctgactcgg

SEQ ID NO: 6173 - DNA, 576 bp, Homo sapiens
  misc_feature (199)..(199): "n" may be a, t, c, g, other or unknown
  misc_feature (486)..(486): "n" may be a, t, c, g, other or unknown
  misc_feature (491)..(491): "n" may be a, t, c, g, other or unknown
  misc_feature (495)..(495): "n" may be a, t, c, g, other or unknown
  misc_feature (508)..(508): "n" may be a, t, c, g, other or unknown
  misc_feature (525)..(525): "n" may be a, t, c, g, other or unknown
  misc_feature (543)..(543): "n" may be a, t, c, g, other or unknown
  misc_feature (554)..(554): "n" may be a, t, c, g, other or unknown
caaaatgaagaactagtattttattccatcttacatccatacaatcctattaatgggaggagggcaatcttcagaattcaggagttctgatattgagagaatataaaggataaaaaaaaattctctcatatttaaataaagaatcttatcatgccaaagaccaacaacaaggcaacatttaccttgaaaattgcttagngtcctttatgtgtaattccaggagggaaaatctgctgcctcattcttatctttccttctactcacgaaaatgaagatacggtctttccatatcaattcatctatagctctttcactcaataattaaagatttgggaaatataacctatgttcttgggtcaacaacttcccaagggaagaagcatcttcagtaactctgaacttcacaggaaaagggtaaatcttgaagatgaagtactggcaaatatatgtcatatccttttcccattctttgaatgaacatacatncatcnatanagtccttggatgnatccagctggaaagaangggtgaggtaggacgttnttccgggcatngtacttgaatgatggatttatc

SEQ ID NO: 6174 - DNA, 597 bp, Homo sapiens
  misc_feature (510)..(510): "n" may be a, t, c, g, other or unknown
  misc_feature (526)..(526): "n" may be a, t, c, g, other or unknown
  misc_feature (568)..(568): "n" may be a, t, c, g, other or unknown
aaaaacaggagactatttaatccatctaaaaatacaaatcaggaaatggggggaaccataggaaaatcctccacctctaacagagcgaagttactggctttctgcttgctccaagaatcccaaggcttgatgtttggaaggaattatctgttcttcaactactcccagatactcaagacataagttacacacatctggagaagggttctgccctgctgaagctagatgggagctcaatgcatgggagaaaggagcatcaatctagaaaaaaatgatcaaagaacagctgagtgacagtgtggggccatcccaggcaagtgggctcttggtgctctggtgtagccagaacccatacaagctgggctggcctaggaagcccaccagccagcctgtgttcagctacagcttctgtgttcttatttaccatcatcagccacagcccttgggagcaaagcccttagacgccttcttcaagcccctgctgggtgggttcatcattatcttggcctnttccaaatctgaatgnaagcctttgacagggggatcatttggggaaggatgtcagtcncctggaggcttggaatcataccattgccg

SEQ ID NO: 6175 - DNA, 583 bp, Homo sapiens
  misc_feature (489)..(489): "n" may be a, t, c, g, other or unknown
  misc_feature (537)..(537): "n" may be a, t, c, g, other or unknown
  misc_feature (547)..(547): "n" may be a, t, c, g, other or unknown
  misc_feature (570)..(570): "n" may be a, t, c, g, other or unknown
  misc_feature (577)..(577): "n" may be a, t, c, g, other or unknown
gcgacagccgcactttatttggagttttccacctaagcagctcccagctgagctgcatgacatgtgcaaaagtcccctagaaagctgggcctcgcagtgtgtaaaaaaggccccccatggggcagagccgtgcaaccattttaaaaaaagagacagtgagagagaaatcaggccccctgggagcctggcttgggtggagtgcacatcgctcaggccggtccatgtgccaggccactcctgctggtttgggggctgttttcttctctgattgtgctttcctttccaagtccttaaaactctggggttgtagccaccagagagaccagaccaagtcctcggggtcaggagggtatctggcccggcggtgcagtttgagggtgacctcacacacagacacccacaacacaatgctcccccactgctcagccccgccagaaactcagggcttcctggcctcgcagccctcgccagccccttgtgtcccacctntggccctgacctggccccaatcgggccttatgtcacaattccagggangggcactggncttgacacaaacaaaggttttcnaaccctnggggcg

SEQ ID NO: 6176 - DNA, 583 bp, Homo sapiens
  misc_feature (517)..(517): "n" may be a, t, c, g, other or unknown
  misc_feature (530)..(530): "n" may be a, t, c, g, other or unknown
  misc_feature (537)..(537): "n" may be a, t, c, g, other or unknown
ggagttccagtgggcttttattgagataaattaacaaaaaccaagattttaccatatttttggaaccttataaactcagcagactccggtccatatatgcgtacatacaacataacacatcccaacaaaaacagagcccccccccccccccactggaacatctgccaattaagagaaagccaattttcccttcccccaatgtttctgaaattttgagttcccactgttcacttctcagtggaactggtcccttgtggctagggacattggaattctctaccatttttactgaacaaaaaataattttttttcctgtttcaaaaaagggaatagtgactttgttttctccaggctccccttcccccataaccaatgtaaaatacagcagcctgtatcttaataacccagccctaccccctcccttacccagcattgtctactggagaatttaaatacacttctgttggaatctgtcagctgtggatgggcagaagtccaggtgccaggctagctcctntgcctatgactgngcaaccnttggaccttaacttttaccccaaagatgagtttagatccaaagggg

SEQ ID NO: 6177 - DNA, 591 bp, Homo sapiens
  misc_feature (494)..(494): "n" may be a, t, c, g, other or unknown
  misc_feature (499)..(499): "n" may be a, t, c, g, other or unknown
  misc_feature (564)..(564): "n" may be a, t, c, g, other or unknown
aaatcacagttaccaaaagaaacagtgaataatttattacatacgctataataacattactctaaacactattgtctatgaggtatatctgagaaaattcggtaaggaattgcgcggtctgcattgccaacatgcccaggttcatagtaaagctttggaaccgtgaagaactagaaaaaagggaagaacgagggaggcagaggaggagacatagagaaagaacctttggtattagtacaaatcttgttctttgcagggttgcattgcaaagcaccacagtacaataagcccaccaactgactgtatggaggcccagttgaagctgaggtattcacaggaagaattaaaaaaagcacagagaggtccagactggctaaatcgttgctttggttcaagcaaggcactcgtcccgtggttatgtcacactttgcaagtgaagcatgaggctggggggattgctgaggagaggtctgccaagtgggggtgttttctgngtcangctgccatcgctctttctagatcctctctcgtatgggtgtggcagtatggaaaatggggaaagtnatgttcacttatagggagctcttctgt

SEQ ID NO: 6178 - DNA, 563 bp, Homo sapiens
  misc_feature (474)..(474): "n" may be a, t, c, g, other or unknown
  misc_feature (495)..(495): "n" may be a, t, c, g, other or unknown
  misc_feature (497)..(497): "n" may be a, t, c, g, other or unknown
  misc_feature (545)..(545): "n" may be a, t, c, g, other or unknown
  misc_feature (551)..(551): "n" may be a, t, c, g, other or unknown
  misc_feature (557)..(557): "n" may be a, t, c, g, other or unknown
  misc_feature (563)..(563): "n" may be a, t, c, g, other or unknown
acgtgaaagagtatttattgaaaacatggttactgacaggaagctcctggctgttgttaaatccatttcaagaagcagtttcttggactggaaggcaagggcatctgctgtttgttcctcgtggcccaatcccaggcttcatggtgatggagtgggcagagcaccctgccttcatgactcttagtagacagggaccaagaggaaactctgggtggtccgaggtgggtttgagaaatggctggcatttactggccaccaaaatcactacagattctgtacaagcaaaagacaaggcaccagaatgtaagtgtctctcctgggcccaaaatcccttctcctgggtaccgtcgtttctggctccaggctcagccatagtgatagacaaagtcatagctgctgggctccttggggatggggggttgggcttcgggaatctggatgttctccaggtccaggaacccgcagcttcatctncatgcttaacaaggtggccangncacttttgggcaacttactggacatgtccttcccaaaaaggcacttgnggccgnaatccnaatccn

SEQ ID NO: 6179 - DNA, 589 bp, Homo sapiens
  misc_feature (552)..(552): "n" may be a, t, c, g, other or unknown
  misc_feature (556)..(556): "n" may be a, t, c, g, other or unknown
  misc_feature (586)..(586): "n" may be a, t, c, g, other or unknown
gaaaagaccaagtggtggctttattagggtaaatatatcacagttgctacagtgaattgagctttctcagaagctattattttctttgggtgattggcaggtatagggcaatagccagtggggtgtcagtaatatgccctgtccctgacctcaaaggtaaagggatagaaaagagagggcgttgacaaactcattttcccacttcccactcatggcttatattatctctgagcatctcggtggctattcctcatttacttaagatgttttagtcattctggatgtgcaaatgcaaggcaagcattctcccactggccccctaacggttaactatcctggcttaaaattttcctttgctcacttccattctatgagtatatcgatggagcagctggacattagagttctttctctttgaccaaaggagccaaaatgcggtgacttgacttcaaccccaacagcccctgtaagtagccctggccaaacagaaaggctaactgaatgaagaaaaaaggaagacaattcatctcagtggccctttttgacagcttncaangggggtttgcctaaggaataacaattttcntaa

SEQ ID NO: 6180 - DNA, 576 bp, Homo sapiens
  misc_feature (540)..(540): "n" may be a, t, c, g, other or unknown
  misc_feature (551)..(551): "n" may be a, t, c, g, other or unknown
  misc_feature (556)..(556): "n" may be a, t, c, g, other or unknown
  misc_feature (564)..(566): "n" may be a, t, c, g, other or unknown
aaaacttaaaacgtttatttctggtagaaatgataaatactttgcactaaaaatctggaattcaagttttcctcgtacttcatgctccctccctgccccagaaccttacaaaaatatttctgtgtagagagggaaagagctggtgcctgctctggaggcaacgtccaggtccgggaaaggcactcgtggtctgtgatctgtctcagtgatgggaggtctccactcgccccacaggcagcctagggacctaggccgccccatgatgagatgccagcatcccctcagggctaggcctggacagaggctgcttgtcttggggcattagcacaaccactcacccagagcagtgctcctgcccccagcccctccccagagcagtgctctgtcagcccgaatcccaaaggtcaccactgtcctgactgctgcaggaacaatgtgaggctttatgtggatcaactgcgcccaattggctgttgacttaatgctcctggtgggctgcttatggttaaaaatggtggttcctgggttgggaagggaaangggttacctgnaaccnccggaacnnngcttctacct

SEQ ID NO: 6181 - DNA, 581 bp, Homo sapiens
  misc_feature (482)..(482): "n" may be a, t, c, g, other or unknown
  misc_feature (543)..(543): "n" may be a, t, c, g, other or unknown
  misc_feature (556)..(556): "n" may be a, t, c, g, other or unknown
gtattaacttgcacgtattaatctaaaggtaatgaccttgttatctggaggctatgagctagttgaaagctctagacaagacagctgacaaagatggactggaaaggagtctctgagagagattttataggtcacatgaacggactcactgttaagcagagcctactttaggtcttacccaatcaaatgtgtgaccagtgtagccgattaatacacactcaattagattagcaaggagtaacatgctgtttcaagtaaaaaactttggttgtgaaattgcagctgtttggagccatttagtagaggcagagggcatgcagcatggtcagtacagggtcctggggagacgctgtaggagagaaggtgcatcccctcagcatgctcctgcagtgcccagcatcctaaagtactcggtggccagcagcctgctccagagactctctcaaacggttctgttgtgtgaagtctcccatgagatcctncccagcacatgggagtacaaataccatgcaagttcgtctggtgacatcccagcaaattttnggcacttcatganaccgtgttccttttcaaaaggcaga

SEQ ID NO: 6182 - DNA, 586 bp, Homo sapiens; identical to SEQ ID NO: 5689
  misc_feature (1)..(586): "n" may be a, t, c, g, other or unknown

SEQ ID NO: 6183 - DNA, 566 bp, Homo sapiens
  misc_feature (428)..(428): "n" may be a, t, c, g, other or unknown
  misc_feature (455)..(455): "n" may be a, t, c, g, other or unknown
  misc_feature (549)..(549): "n" may be a, t, c, g, other or unknown
  misc_feature (564)..(564): "n" may be a, t, c, g, other or unknown
gagatgcatattttcctttattgctgaattaatgaggcaccaataatctcaaaaacacaagtcagactttattctgaaaataccataaagagacaaaaagagttagtcaagtattcttgcctgctggagacacagaatttcaatagcaccttttttaaaaaaagacatgaacatttataaaattgcagaacatatcttacatattcacatataaaatcatgaaccaataataatccggatggaaaaactgatctgtttcatcaacatcaataaacattttgttgagagtttgttccacatattatacttccctcagtatattagaagtacttcagctttctatttgaagtggttttcctaaaaataaccttttcccctgctcaggataaccagctattattatagtatacatattataataacaaggnatatgtctttgacctcatatatgactncccagttgctcaggaatagattactttcatacacaaatgggaaaagatgtcaatattgatgatagtatcgaaaaagtggagctactttaactgngtaaattaacgatgnca

SEQ ID NO: 6184 - DNA, 571 bp, Homo sapiens
  misc_feature (495)..(495): "n" may be a, t, c, g, other or unknown
  misc_feature (535)..(535): "n" may be a, t, c, g, other or unknown
  misc_feature (545)..(545): "n" may be a, t, c, g, other or unknown
  misc_feature (555)..(555): "n" may be a, t, c, g, other or unknown
  misc_feature (560)..(560): "n" may be a, t, c, g, other or unknown
  misc_feature (570)..(570): "n" may be a, t, c, g, other or unknown
gagatggagtctcgctctgtcacccaggctagagtgcggtggcgcgatctcggctcactgccagctccgcctcccaggttcatgccattctcctgcctcagcctcctgagtagctgggactacaggcgcccgccaccatgcccagctaattttttgtagttttagtagagacagggtttcaccgtgttagccaggatggtctcaatctcgacctcatgatctgcccgcctcggcctcccaaagtactgggattataaggtgtgagccaccacgcctggccaataaaagcattttaaaataccaaatattttaaaataccaaataatcaaaaagtagttgtcaacactggccaaactgccaaagatgttaacattagaggaggcttgaagaagaaagaaggagggaggaataaaaaccaaggagggagaagagctacattaaaaagagagagagatgtgaaatgaatccacaacgtcatcatctaagcaacaaggnacctcttcatcctggattctggcacctatatcatatttcnttaaaatggnatgaatcaanttttncaaatggcang

SEQ ID NO: 6185 - DNA, 568 bp, Homo sapiens
  misc_feature (522)..(522): "n" may be a, t, c, g, other or unknown
  misc_feature (554)..(554): "n" may be a, t, c, g, other or unknown
gtagagacagggtctcactatgttgcccaggctggtcctgaactcctgggcttcagtgatcctccctccttggcctcccaaagtgctgggattataggcatgagccactgtgcccagccctcataaagttataatatggtagcctagggctggtactcaatatgctgtgcctcgcagtataatatttttacacactcaagcttgttagcttttcagacgactttgggtttatagtttttaaatgtctgccagtaaatcagtcaaatgcaaatgctaaagactgcttcttccaatatatcattaaactcatgaagacataaaaatgatctattcctgctgtcaatataaaatatagaaatcttagacctaaaagttctgcatatactttcaataaaagtagaaataacagaagttactgagtttgattaagagatgactccaaaacctttaacttctgaagggatcatctacagcattggttttaaaactagaaaataagaccaacaaaaatatccaaatacnggttggtgaaaaactatgccatctatcaattngaattcaaaaatcc

SEQ ID NO: 6186 - DNA, 574 bp, Homo sapiens
  misc_feature (555)..(555): "n" may be a, t, c, g, other or unknown
  misc_feature (574)..(574): "n" may be a, t, c, g, other or unknown
ataaagaatatgcaatccatttgggatttattgcatttaaagaaaacagattaaaacaggtatgataaatacagtaagaaaataactttaaatttcaaacaaaacagtgaatcagggacagaattcagtcaaaaagaataagcagtgtaaaggcaataaagtaataaaatcagttagtgcttaattagatatggcaggggaaaaggggtgggagggggagactgagcctatctcataattgtttcccagctatatttgaggactgaagttactttagcaagtatgttttgtaacaagtagaaatacaataaagatgtaaatttgctttatttaaaggttaaagttatttgcttagtggtacataaaaggcttcagaaaattcaagtttaacaaaaaatggaagtgtaatcaaagaaagtgcacttaaagctgtttgccagcaattaaaaagtagcttctatacagcttctattagatgacttttcaatcacaaaaagagcatagtcataaaaaccattcttttcaaaagtgccgtttaaattttaaaataaaccnaaatacccccaatcatggn

SEQ ID NO: 6187 - DNA, 570 bp, Homo sapiens
  misc_feature (501)..(501): "n" may be a, t, c, g, other or unknown
  misc_feature (530)..(530): "n" may be a, t, c, g, other or unknown
  misc_feature (540)..(540): "n" may be a, t, c, g, other or unknown
  misc_feature (546)..(546): "n" may be a, t, c, g, other or unknown
  misc_feature (552)..(552): "n" may be a, t, c, g, other or unknown
  misc_feature (555)..(555): "n" may be a, t, c, g, other or unknown
  misc_feature (561)..(561): "n" may be a, t, c, g, other or unknown
ctactttccatttaacaaggcacttcaaaaaattctgttccatgtgttcagcctcttgctcccaatttctacccctgtcattaaaagtcattctttcccttgcttatggcatgtctagctgacagagggcaggacaacttttcaacagggaggtcccactttacccctaatcttggaaatgccattcccatgagaggctttcctaagattggtttcagaagtgtcacagttggggtcaacaggcagggtcatgttctgccccctctctagtggcattctctctggggagaaagatcctaggctttctcaaccatcagtggatcactcaaaacaaaaacaaaaagaagcagcaacttacaattcctaccacatgtatcgcgttcatctctctattcttaggtcctaggagggtcattatataaagaaatgaatgactagataaatgactggaaataataggatgaaaaacatcctgtccttcaggagttccatttctagccnggagactgagaaggcattgacagtgcaantgcaagtgcngtgaangaactntangctcangggcccagg

SEQ ID NO: 6188 - DNA, 570 bp, Homo sapiens
  misc_feature (489)..(489): "n" may be a, t, c, g, other or unknown
  misc_feature (570)..(570): "n" may be a, t, c, g, other or unknown
gcaatttcatagtttttattcagtggacttaaagccaagaaaccatcccaataattatttacaatttaataactgaatgattatcagatcgtgttatactgcaaaactgttcttacaccatgaatgctgatgctgtgaactttggatgttaaactggtaaaagctggaggcttcaaatggcatatgcaaatgtaaccaaagcctgaggactatgaagaaagaggagtttctaccactcggcatttatagtttttatatgcattgcagaagcatggggaattaagtgatctctgaaaaaaatgctttaaaaaactgagtatacatatagcctataaggtaaaaatccaagttacaagtgtattaaacactggcaactatgttatcagagggaatactgaattatatatatacataaactgtcattaaactgtgattacatgatacttcctaccacagcttattagactgtcaacagaagatattcctggnggctctctaagctccaggtttaaaagaattaagatcttccccttggctcaaagctaatcagtatcattctatacctaaatn

SEQ ID NO: 6189 - DNA, 342 bp, Homo sapiens
  misc_feature (296)..(296): "n" may be a, t, c, g, other or unknown
  misc_feature (307)..(307): "n" may be a, t, c, g, other or unknown
  misc_feature (309)..(309): "n" may be a, t, c, g, other or unknown
  misc_feature (328)..(328): "n" may be a, t, c, g, other or unknown
  misc_feature (334)..(334): "n" may be a, t, c, g, other or unknown
  misc_feature (340)..(340): "n" may be a, t, c, g, other or unknown
  misc_feature (342)..(342): "n" may be a, t, c, g, other or unknown
gctatttttgttttctctcctctgtgttggtcgcctgtctcgctccctctcatgctctctttctctcctctattttgtctctcactattcgtgttttgtgtttgtttctaggtttggctcaattggtaagggtgggattgaatttgctgagccccctagtgtaacagtcttctgcctttgtgggtaaagagtggagaggggggagggggacgacagacagacatcccttcttcccacccccctccccacctgccccccggcaaccgagggtgcccatttggtttggtttctattgnacagacatctnangatggctcacataggcggnaagganggaagncn

SEQ ID NO: 6190 - DNA, 569 bp, Homo sapiens
  misc_feature (498)..(498): "n" may be a, t, c, g, other or unknown
  misc_feature (522)..(522): "n" may be a, t, c, g, other or unknown
  misc_feature (530)..(530): "n" may be a, t, c, g, other or unknown
  misc_feature (536)..(536): "n" may be a, t, c, g, other or unknown
  misc_feature (547)..(547): "n" may be a, t, c, g, other or unknown
  misc_feature (550)..(550): "n" may be a, t, c, g, other or unknown
  misc_feature (560)..(560): "n" may be a, t, c, g, other or unknown
caaaagcactctatatatggagtggcaccagatttaacctatttaaaataaaagtcatacaaacacaaaatatatttctgtgtcatgccagctcattatataataaacatgttatgacagctaattctactagaattactgtgaatacttacagtacactgaattttattctttcacatccattttagttttaaagagaggttcacgagttaaatgacaatggcatggctatcttgaatggggtgcaaacatcattggggaatgtggatccaattaatccgaaggtccggtgtgacccgtattagttttatagacaagagaagggtttaagatagggtgaaatgagctatcagtggtttcaatgtctcatgaaagaaagaaatgcattaaaaaaaaaaaagtttgtcaaacatccgtgttatgcaattgagtattttctttgtaacgtgcaagaaaaaatatgtatacatttcataagtatctttagaagtattttgncttaataggtacttacagattatncaaggcanaactgntttaatgcagnttnctacaaaggncttaaaatg

SEQ ID NO: 6191 - DNA, 570 bp, Homo sapiens
  misc_feature (463)..(463): "n" may be a, t, c, g, other or unknown
  misc_feature (525)..(525): "n" may be a, t, c, g, other or unknown
  misc_feature (557)..(557): "n" may be a, t, c, g, other or unknown
  misc_feature (564)..(564): "n" may be a, t, c, g, other or unknown
  misc_feature (567)..(567): "n" may be a, t, c, g, other or unknown
aagcccccgagacgggagtcttgctctgtcacccaggctggagtgaaaagtacagtgcaatttgctaatgcacatcctgcacatttctggagaattataataaacttatctgcaagtgaagcaggcctcctcttctgtaatctctcaaaacatctggaatatattgcatatattatgaaagggacatctttttcacagatgccccaccgttacaacgtgtacctttgcttagtttaaaaattgactttaatactttatgcaaatagtgcctgtcccaaattctagcatgcacatggatctaccaacaaaaaaactaagttttcagtgtgtgaacataaacttcaaattaaacctctgatgctttagcccatgtatcaattaccaacagattttcttcatcaatgtctgcagaccacattcatgatttctataagacagaaatagagcagataaactatactgnatatgctgagtacagaatttgtgggaacataatgctgcaaatgaaagctacaaacactctgnaaatagcttagaaaaactagtaattgaaatcnccaagtnccngct

SEQ ID NO: 6192 - DNA, 568 bp, Homo sapiens
  misc_feature (543)..(543): "n" may be a, t, c, g, other or unknown
  misc_feature (546)..(546): "n" may be a, t, c, g, other or unknown
  misc_feature (553)..(553): "n" may be a, t, c, g, other or unknown
gagtcagagttttgctcttgctgcccaggcttgagtgcagtggcgcaatcttggctcactgcaacctccgcctcctgggttcaagtgagtctcctgcctcagtctcctgagtagctcatctttcttcacatccacagagtacataccatttcctgctgtcaggcaaatcttagaaatttctacaaatcccagaaagaatgggtaagcagcccctgggtcccttcctagccccttaccttgatgacaagatccacatagccgtgatcctcatcactggtgacaggagtgtatggcctgatgaccaggctgccatcaattcgggtggagaggtagatatgtttgcctggggaccgtgcagagagctacataagggttgtctgtgatgtgctgcatccctcaaaatactcaaagagatttgagagaacaagatgtcttgcttctgctgtggtcccaaggagctacaaggcagggaagattgccccattgagccctcagttggatctcttataagcgccccagttgaggaaacacttatttccgcgnttnctggcantactggcagaacctt

SEQ ID NO: 6193 - DNA, 573 bp, Homo sapiens
  misc_feature (442)..(442): "n" may be a, t, c, g, other or unknown
  misc_feature (446)..(446): "n" may be a, t, c, g, other or unknown
  misc_feature (515)..(515): "n" may be a, t, c, g, other or unknown
  misc_feature (541)..(541): "n" may be a, t, c, g, other or unknown
  misc_feature (545)..(546): "n" may be a, t, c, g, other or unknown
  misc_feature (548)..(548): "n" may be a, t, c, g, other or unknown
  misc_feature (567)..(567): "n" may be a, t, c, g, other or unknown
cggcaactataggctttattttcttgccaattctttacagaactgtaaggcagttgcttctttcttccgttgtagatagtcttctgttattgctacaaactgggattaatttttaagcttcaaagttacattattgccagacgcagtggctcatgcctgtaatcccctgcactttgggaggctgaggcaggtggatcacctgaaggtcaggagttcgagaccagcctggccaacttggtgaaacactgtctctactaaaaatataaaaaattagccgagcatggtggcaggcacctgtaatctcagctactccggaggctgagacaggagaattgcttgaacccgggaggcagaggttgcagtgaactgagattgtgccgttgcgctccagcctgggcaacaggagcgaaactccatctcaaaaaaaaaaaaaaagggaaangaangttacattattattgggaataaatatctgcatttccttaagcctttggcaggctatgttaccccctatntttggagaaggaccttgaaaagtganggcnngnccttcaccttatacctgcntttttt

SEQ ID NO: 6194 - DNA, 502 bp, Homo sapiens
  misc_feature (312)..(312): "n" may be a, t, c, g, other or unknown
  misc_feature (373)..(373): "n" may be a, t, c, g, other or unknown
  misc_feature (496)..(502): "n" may be a, t, c, g, other or unknown
ataaaagcccttggaatggtcaacacttcttatgaatacaagcaaattaagttgtttagattcaatgacaggctgtcatattgcaccatacaaaaacaaatttcatcaaagctttcagtcttacagtatatacagcaatgcattcatattgtaaaagggtatttttttgtgtacagatgaagcaaaacaatatttttactggctgaaacaaaaagtggaacaaagtctccaacaatagaggtcagtggcacctactcctgtgtggcttttgtctctttactgagcaagaggcttgttttaggttttctttgncctctgttctagttcatgctggtgtttaataagacgttctatttctgttccaagtgtttgnagattttccttcaaagtaatattttttagtaacgtatcctccaaaacagcctgtaattttcggttgatttccaaagagagctccaatgttaatccattggcagctggatgggatgtatataannnnnnn

SEQ ID NO: 6195 - DNA, 569 bp, Homo sapiens
  misc_feature (484)..(484): "n" may be a, t, c, g, other or unknown
  misc_feature (486)..(486): "n" may be a, t, c, g, other or unknown
  misc_feature (500)..(500): "n" may be a, t, c, g, other or unknown
  misc_feature (557)..(557): "n" may be a, t, c, g, other or unknown
  misc_feature (561)..(561): "n" may be a, t, c, g, other or unknown
  misc_feature (564)..(564): "n" may be a, t, c, g, other or unknown
aaaaggcaggcaggaaccaacatttattaaaactttgctgtgtatatattatgctggacagctaataacatcatattgtaattcctactgaatacttttgctcataagagttttttcactacagacaaattgggtaaaatcaaaatctgacattacaggaattactcaagtttcaatgcgtcactgtagctaagccagtgaactcctttgttctgctgagaaagagcaagaagaatgaatcttcacaggactactagaaacttcttcccagcaaggtatgaggaagccctaagtcaatggtgtaatcctaaatcagggtttgaaaacccacctaacaggcagagtgaaattaacaggcaaagtgaaatcaggcttccctgggaaagtctcaataggaaacaacctgtagatgagtcatctttgaggtccaggtgtttcttaactctctccaagtccttcccaccttcagaatccagcagaaacncnaaagagaacttggncacttcttcttggctctcctcttatccttggctttacctttggctttggaaacctgntatnacnttggg

SEQ ID NO: 6196 - DNA, 577 bp, Homo sapiens
  misc_feature (504)..(504): "n" may be a, t, c, g, other or unknown
  misc_feature (535)..(535): "n" may be a, t, c, g, other or unknown
  misc_feature (538)..(538): "n" may be a, t, c, g, other or unknown
  misc_feature (542)..(542): "n" may be a, t, c, g, other or unknown
  misc_feature (551)..(551): "n" may be a, t, c, g, other or unknown
  misc_feature (568)..(568): "n" may be a, t, c, g, other or unknown
gctgattctttttctgcatgatccttaaaagttgttacttcagggactctgtccttagccttctttaatgtctacagatgatcaggtgatttaatccatttcagtattccaactaccacctggaagatgctaataacttgaaaaaattgtcttcagttcatatctgtcttcagaaacccaaatatatgtgtctcatacattcctaacaacatagttatatcagatcaacatatgaataactgaatcattgtctgccaacctaaagtctttggtgtatatactgttttaaatgctgtgaaatattataaatatagtgactgattctactgctaagtatcatatacttaaatccctctgatgctagtaaaaagaagaaaaggaaaaatcacccaataatttcaatgcatatgtcttgcttttgccataaaatatgcttggaggttaaatttgggaaagtaaaaatgccagggtattaagtatttattggtgaataccattattccnccaactacagcttaaaagaacccctatgtantgngggnccagagttngcacttctatacctagnccttggaag

SEQ ID NO: 6197 - DNA, 574 bp, Homo sapiens
  misc_feature (500)..(500): "n" may be a, t, c, g, other or unknown
  misc_feature (515)..(515): "n" may be a, t, c, g, other or unknown
  misc_feature (517)..(517): "n" may be a, t, c, g, other or unknown
  misc_feature (521)..(521): "n" may be a, t, c, g, other or unknown
  misc_feature (571)..(571): "n" may be a, t, c, g, other or unknown
cttttcttttttttttttgagagggagtctcactctgtcacccaggctggagtgcagtggcacgatctcggctcactgcaagctccgcctcctgggttcacaccattctcctgcctcagcctcccgagtagctgggactacaggcgcccaccaccgcgcccggctaattttttgtatttttagtagagatggggtttcaccgtgttagccaggatggtctcgacttcctgacctcgtgatctgcccaccttgacctcccaaagtgctgggattacaggtgtgagccaccacgcctggcccacagtacataatgttaatagtacctgtggcgttgtcacaagtggaaaccagatatttttgttgcagatatcttgaaataatgtcaatgcttataatcactttgatattatagttgttattacgcctgcaccagatcttatttattggataaataaataagcccacatacttggcatttttatatttgataactattatgncaatataatggattncnttgnaatcctataaacccatatctagccttttttaagaactcctccaattttcnaaa

SEQ ID NO: 6198 - DNA, 574 bp, Homo sapiens
  misc_feature (498)..(498): "n" may be a, t, c, g, other or unknown
  misc_feature (520)..(520): "n" may be a, t, c, g, other or unknown
  misc_feature (525)..(525): "n" may be a, t, c, g, other or unknown
  misc_feature (554)..(554): "n" may be a, t, c, g, other or unknown
  misc_feature (570)..(570): "n" may be a, t, c, g, other or unknown
  misc_feature (572)..(572): "n" may be a, t, c, g, other or unknown
gagaatgagtcttgctctgtcgcccacgctggagtgcagtggcacaatctcggctcgctgcaacctccgcctcctgaattcaagcaatcctcctgcctcagcctccctggtagctgggactacaggtgcacaccaccatgcctgcctaatttctgtacttgtagtagagatggggtttcaccatgttggccaggctggtctcaagctcctgacctcaggtgatccacccacctcagcctcccaaagtgctgggattacaggtatgagccaccacgcccagctgataggagagctttgatggaaaccccatatgtgttgctagagtgtgagctccatgaggacaggacgtggccaccagcccccatggcaccccccgcatggtgctgggtgggggaaggcacttggcaagtgtgtgcagattgcatgacaaggtgcacccagccttgctccaagaaatcctgagcacacaactgcaggtgcacaaaagatgcagacagnttcatgtgtgcacacagacagntactnctttttgcagcctacttccccaggatgancaccccctttggaaananaa

SEQ ID NO: 6199 - DNA, 542 bp, Homo sapiens
  misc_feature (495)..(495): "n" may be a, t, c, g, other or unknown
  misc_feature (497)..(497): "n" may be a, t, c, g, other or unknown
  misc_feature (514)..(514): "n" may be a, t, c, g, other or unknown
  misc_feature (520)..(520): "n" may be a, t, c, g, other or unknown
  misc_feature (529)..(529): "n" may be a, t, c, g, other or unknown
  misc_feature (531)..(531): "n" may be a, t, c, g, other or unknown
  misc_feature (539)..(539): "n" may be a, t, c, g, other or unknown
ctggtcaaactccctttttattaagggttatcaagctgtacacggtccctaccctgctccgctccgagttcgggcagcgcaattcaccactctcccaaagccggaccacagctgggtgaggggtgggacagagagtaggagcagtcccagcatgcagtgcagcagcccaaagcctcgggcgaggcatcgcccttcatcccccttcagggcacagcgagatgcgggccagagctcttttgctgggacgtacacagccaaggtcaccctccagcccggtctgtcccatgtgcaggtgatggggggtacgataagcagcaatgagggcccaggaagacctcagtctcctgggggcccatcctaaaagatggcaagggcagcaaagtatttccatcctgctcctacaatttagaaaccttcttttttagtgtcaaaatatagcgttgaggggagctggacgctagggtcttaccctaacgcaaagcaaaaagccgaacngnaccggaaccagcgaacngaacangggccagcngnacacacanggc

SEQ ID NO: 6200 - DNA, 567 bp, Homo sapiens
  misc_feature (540)..(540): "n" may be a, t, c, g, other or unknown
  misc_feature (558)..(558): "n" may be a, t, c, g, other or unknown
  misc_feature (560)..(560): "n" may be a, t, c, g, other or unknown
  misc_feature (567)..(567): "n" may be a, t, c, g, other or unknown
cctactgaataaaaatccatttatttaatttagtcagtggcttttctttttaatttcaacttttattttaaattcaggggatactgaatttgcttaggacaatggcctacagctgcatccatgttgttgcaaaggacatgatttggttctttttttacgtctgcggagtacttcgatggtgtatatgtcccacattttctttatccaattcactgttgatgggcacctaggttgagtccatgtctttgctattgtgaattgtgctgtgataaacatacaagtgcatgcgtctttttggtagaatgattttttttcttttgggtgtatatccggtaatgggactgctgggtcaaatggcagttctgttttcagttctttgagaaatctttaaactactttccacagtggcttaactaattcacattccctccaacagtgtatacatgttctttttctctgcagctttgccagcatctggtggttttcgactttttaataatagttggctcattttctaagtgaatggttggtctttactgntgagtattgggagatatntncatctan

SEQ ID NO: 6201 - DNA, 571 bp, Homo sapiens
  misc_feature (446)..(446): "n" may be a, t, c, g, other or unknown
  misc_feature (526)..(526): "n" may be a, t, c, g, other or unknown
  misc_feature (534)..(535): "n" may be a, t, c, g, other or unknown
  misc_feature (545)..(545): "n" may be a, t, c, g, other or unknown
  misc_feature (548)..(548): "n" may be a, t, c, g, other or unknown
  misc_feature (556)..(556): "n" may be a, t, c, g, other or unknown
ccataaaggatcttccttcttccccaagttagagtggagaaaacaggaaaaaaataccttcagcttagggtggaaaaggaaggaaaacccaagatgagtgcaggtgacgaccgggcggcccccacagggtctctgcaggaccacaggagccaagactcaggcataagagcatcaccctttcagcagccaaggcgggtggcaccttcccctccatggtcactggaggctgtggggccatagctgcagagaacgcaggcggcgggagaccctctcagcctctcttcttccaagctcagtttcttgagatcttccaggatacccacaaaaaaagggggtgaacctttaacaatgccccagaggagcttcgtggctacagggggcctcctgacccccaacccagccctctcagccaggcctcaggaggctagtgtgacctcaaaactcanagcccccgtgagacacagggccagccagtcccatgccttgcaaaagggaacgttccttccaagtgtggattttggggctnacctttgnntttcctggantgncttggcanttagggaaggaatcc

SEQ ID NO: 6202 - DNA, 573 bp, Homo sapiens
  misc_feature (511)..(511): "n" may be a, t, c, g, other or unknown
  misc_feature (573)..(573): "n" may be a, t, c, g, other or unknown
ctatagaaagtttcatctagctgtaagcaaagtcttttcaacaacaacaaaacaaaaccctccaggaaaaactatatggctgtgtgagacaaataagcaaccatttgatagtgatttttgcctaaattttaaaataaaaatgtccacactcttttgttaaaacattaagcctctgtcaaaaatgtatttcttattttagggtacaggattaaaggacaagatgatactcacaagtaaagaaaatttacaagaaaaaacttaacaaaagtttcaataaaagtattgtaacattcaaacttgacttataacaaaagaaacaagattgcaaacaaaaatgtttacggggtttccaaacataaataaatgaaatagtgtttaggcagtagggctcatgctgatggctagcaggaagttaacagagtgtaacttacttggaaaaaatctttaatgtcaaataagcccaaattatggactgcagcaatttaatcatcactggcatttttcttacttnccaaataaagccttgattaaccattcatccctatatactcatcccttacttcagaaaatggn

SEQ ID NO: 6203 - DNA, 570 bp, Homo sapiens
  misc_feature (484)..(484): "n" may be a, t, c, g, other or unknown
  misc_feature (506)..(506): "n" may be a, t, c, g, other or unknown
  misc_feature (531)..(531): "n" may be a, t, c, g, other or unknown
  misc_feature (554)..(554): "n" may be a, t, c, g, other or unknown
gagatggagtttcactctttttgcccaggctggagtgcaatggcatgatctcagctcactgtaacctccacctcccaggctaaagtgattctcctgcctcagcctcctgagtagctgggattacaggtgtgtgccaccacacccggctaattttgtatttttagtagagatgaggtttcaccatgttggccaggctgatcttcaactcctgaccttgtgatccacccacctcggcctcccaaagtgttgggatttataggcatgagccacttcacccggccccatccttttatttcaacttgaaaagaactaaacccaaaaccagcataaaaacggcaataataaaaatcagagcagagataaacaaatacaaccaacaaaactaagagttggttctttgaaaagatcaaccaaactgacaaatccttagctagattaagaaaaaaaaagaacattcaataactacaatcaggaaatgaaaganggacattactaccaatacgacngagattaaaaggattttagagaatntatgaagaaatggtgcctccaanttaatacctaaaagaa

SEQ ID NO: 6204 - DNA, 587 bp, Homo sapiens
  misc_feature (541)..(541): "n" may be a, t, c, g, other or unknown
  misc_feature (583)..(583): "n" may be a, t, c, g, other or unknown
attttgagacgtagtctcactctgttgcccaggctggagcacaatggcacgatctcaactcactgcaacctccgactcctgggttcaagcgattctcctgcctcaatatcctatgagtagctggaattacaggtgtatgcccccacgcccggctaatttttgtattttttttttttttaagtagagacagggtttcaccacgttggcccaggctggtctctaactcctgacctcaggtgatctgctgaccttggcctcccaaagtcctgggattacaggtatgagctaccgcacccagtctaccctcatcatctagattcaacttagtttgcatgattatggagcatgtatttagactccagtatcagattagggatgacgacggatggggtgttaaaacaagttatttaacagattcctaaatttaaaaggtttatataaccacattctaacagtatacataaacactacaaaaaaggacaaagtattttgggggaaccagatcctttaaacatctggattctggtaatataaatctgantaagcagctgattttagattacaattcaattgaaatttttgncgaa

SEQ ID NO: 6205 - DNA, 591 bp, Homo sapiens
  misc_feature (455)..(455): "n" may be a, t, c, g, other or unknown
  misc_feature (469)..(469): "n" may be a, t, c, g, other or unknown
  misc_feature (512)..(512): "n" may be a, t, c, g, other or unknown
  misc_feature (553)..(553): "n" may be a, t, c, g, other or unknown
  misc_feature (566)..(566): "n" may be a, t, c, g, other or unknown
  misc_feature (580)..(580): "n" may be a, t, c, g, other or unknown
  misc_feature (586)..(586): "n" may be a, t, c, g, other or unknown
  misc_feature (591)..(591): "n" may be a, t, c, g, other or unknown
agataaggtggacacgtaaaagaaagcagagaggaaaggggaaggggtgtctgtgatgagttagaaagttagtcctttttttaaataaggaaaggaatgtgagctggtattgataacgcctggtattgtggcgtgtctgggcatttaacaaaggcaaaaaggaaaagaggagaagaagggaaaaaggtggggggtactatcaattaaagaataaaagattgatcgggttatttgaagagaaacctcatcatatcccacaccaacccgtctccccttcctggcagttaaaagcctgggtggtgaggcaagcctgtctggattcaaacggcagtgacgtcttgggcacgttctgctctctgaacctctctggggtgttcagggctgcggtgaagaacccgagtccagagtcagatgctgccctagtttgaatccaggcattgctatttacttgctgngtgacctggggcangtggcttcatctctctgggcctcaattcctcatctgtaagacnggctattaccacaccttcctcttgattactccctgtggganggaataaatgatnaatccctggaaggngtttgnaccan

SEQ ID NO: 6206 - DNA, 591 bp, Homo sapiens
  misc_feature (422)..(422): "n" may be a, t, c, g, other or unknown
  misc_feature (519)..(519): "n" may be a, t, c, g, other or unknown
  misc_feature (528)..(528): "n" may be a, t, c, g, other or unknown
  misc_feature (532)..(532): "n" may be a, t, c, g, other or unknown
  misc_feature (569)..(569): "n" may be a, t, c, g, other or unknown
ggcaacacagtcttgctctgtcgcccgggctggagtgcagaggcgcagtctcagctcactacaacctccgcttcccaggttcaagcgattctcatgcctctgcctcccgagtagctgggactactggtgtgcgccaccacgccctgctaatttttgtatttttagtagagacggggttttgccatgctggccaggctggtctcaaactcctgacctcaggtgatccactcacctcagcctcccaaagtgctgggattacaggcatgagccaccatgcctggccatacacatcactttgaaacctgttttcctttccaatctaaaaatgagttcggttctatttcctgagtcttcctctgaagggtggagacacagggccctgatgggaaaggtccaggcctgagaacctcccggcacacgtnccggccactaaggggagaacacttaccacccagtccggccaggacccccttaacttcacaccagttccccaaaaagcgtgtccagaacatgaggacnaaattcatnaccnggaaccggtcaagttctgggccacaaaatcctccaanacttggccttgaggacgccccc

SEQ ID NO: 6207 - DNA, 581 bp, Homo sapiens
  misc_feature (507)..(507): "n" may be a, t, c, g, other or unknown
  misc_feature (516)..(516): "n" may be a, t, c, g, other or unknown
  misc_feature (560)..(560): "n" may be a, t, c, g, other or unknown
  misc_feature (571)..(571): "n" may be a, t, c, g, other or unknown
  misc_feature (581)..(581): "n" may be a, t, c, g, other or unknown
ataacaaccgctaatcagtttattaaaatagttgactttgagcatctgcaatggtgacttccacctcaattcctggctcaacactgatggaagtcaactgcttaacaatctcagaaggactgtgcaagtcagtgggtagcttgtggattctcatctggaaacgatcccatgtctctgaaccttcaccacaaggagattttcttatagtgattctcaaagtcttggcaggcattcaaactggtcccttcacttagacattcttttcctttcctcctctgaatccagtcagcacacaccttctccagggattttacgctgcggatcattagagggattcgaatttggtgaatggtcacctccagcttcacaggtgttttctggtatctttaaaagccttggtgcagtgcggcttctggctgacttgttcggaacagcgatgagtgaggagcaggaatggcagactgcaactctgcaccacttatgactgcatctttctcaaagagctgnattgcttcnttttggttggtggtttttttgagacagaaattcactcttggtgnccagcttggantgcaatggcn

SEQ ID NO: 6208 - DNA, 587 bp, Homo sapiens
  misc_feature (463)..(463): "n" may be a, t, c, g, other or unknown
  misc_feature (557)..(557): "n" may be a, t, c, g, other or unknown
  misc_feature (559)..(560): "n" may be a, t, c, g, other or unknown
  misc_feature (584)..(584): "n" may be a, t, c, g, other or unknown
gtcatttgaaaagttcatttattatataccaatatacactttctgtaataaaaaagaagcctcccaatacattgagccatcttataaatgaaataagaaaataaaattttcatctgtttacaaatggggttaaattaatcagcacaagctatcatatgtatgtctgccctgcagtatatatgaattttaatcctggttatgaagaaaaaaatggtgctttattatttggcactataggatgctcttgaacattcagaagatacctttttccactttttatttttgtatactttttagatgagtgaaaatgtaaatatatcctaaagatgctatttggcagatttttttcaaataatagtagctcaaaagtacgtgtatgatacttgtacttcataattggctttactaaaatataaaatacacaagtgatcttactatgatttgaaaaaaaggtagtgaactncagaagttttaagctgtgagtaggaatttttaaatccattttatggtaagttggtatagaagtgagccagaatggatcgggtgcatttcttccnannggtagcccttatccttttccgggnaac

SEQ ID NO: 6209 - DNA, 582 bp, Homo sapiens
  misc_feature (430)..(430): "n" may be a, t, c, g, other or unknown
  misc_feature (516)..(516): "n" may be a, t, c, g, other or unknown
  misc_feature (518)..(518): "n" may be a, t, c, g, other or unknown
  misc_feature (522)..(522): "n" may be a, t, c, g, other or unknown
  misc_feature (561)..(561): "n" may be a, t, c, g, other or unknown
gagacagagtctagttctgtcgcccaggcaggagtacggtggtgcaatctcggctcactgcaacctccacctcccgggttcaagcaattctcctgcttcagcctcccgagtatctgggattacaaatgcccgccactgcgcccagctactttttgtatttttagtagagacagggtttcactgtgttggccaggctggtcttgaactcctgacctcatgatccacccacctcggcctcccaagtgctgggattagaagtgtgagccactgcgcccggccgagaaagagtcttttttctaaatccttctctcttttcaaaattcctcaatagaactcatcaccaatatatttcttcatggtggtatactgtgtagctacaactgtgaaataactaaaattcagtatcagagtcttggatttacaatactgnattttttcacagatctcttcatccgcttaattttcttccctaagatttggtgacttgctttaaaatataccggaaatatctacaancntttnctaacagtaaaccagccccaaaagctttttacaaggccnaactggattttccttccaacc

SEQ ID NO: 6210 - DNA, 571 bp, Homo sapiens
  misc_feature (85)..(85): "n" may be a, t, c, g, other or unknown
  misc_feature (134)..(134): "n" may be a, t, c, g, other or unknown
  misc_feature (178)..(178): "n" may be a, t, c, g, other or unknown
  misc_feature (190)..(190): "n" may be a, t, c, g, other or unknown
  misc_feature (219)..(219): "n" may be a, t, c, g, other or unknown
  misc_feature (294)..(294): "n" may be a, t, c, g, other or unknown
  misc_feature (435)..(435): "n" may be a, t, c, g, other or unknown
  misc_feature (479)..(479): "n" may be a, t, c, g, other or unknown
  misc_feature (482)..(482): "n" may be a, t, c, g, other or unknown
  misc_feature (503)..(503): "n" may be a, t, c, g, other or unknown
  misc_feature (518)..(518): "n" may be a, t, c, g, other or unknown
  misc_feature (523)..(523): "n" may be a, t, c, g, other or unknown
  misc_feature (548)..(548): "n" may be a, t, c, g, other or unknown
  misc_feature (570)..(570): "n" may be a, t, c, g, other or unknown
cctgagacagcagagcataagtccttttaattatgtgtttgaaaaatgtcacaagtcaaaaaaggaacacaaggcaggctccggntccctccacccccgtgaggagcccttgtccatttcagccttgcactcanaaagaccccgggggtcttgtagttccacgtgcttcatgtttcgnggtatctgtcanagccttaaaacaggcccacccactactgngaaatttcaaggaaataactgattcagttaaataacagtcccaaggtagacctggtctcacaggtgaccacccgnttaaatccagagccttcttttctgtccaaagccactgaaatttgatctcctccttcacacattcccaggtccccaatatgccacccaccttctgacaggtggctacaggtctacactaatggaagctctgctaaaaacatntccacccaacccttctgccaacgaggtcaagctggcaaggcatntgntaagccccttaaactggtcanccgcaaggtattgcncccanttccgggacccaaacaatacttccnggactttggaccttcttctttna

SEQ ID NO: 6211 - DNA, 581 bp, Homo sapiens
  misc_feature (559)..(559): "n" may be a, t, c, g, other or unknown
  misc_feature (571)..(571): "n" may be a, t, c, g, other or unknown
  misc_feature (581)..(581): "n" may be a, t, c, g, other or unknown
aatttttttaaacttttattttaggttacagggtgcaaatgcaagtttgttatatatgtaaacttgtgtcacagaggtttgttatacagatattttgtcacccaggtactaagcctggtacccaatagttatttgttctgatcctagtttctaggatcctgatttctagttttgtgaagaatgtcgttggtagtttggtaggaataacattgaatctgtaaattgctttggcagtatggccattgtaatgatactgattcttcctttccatgagcatggaatagttttccatttgtttgtgtcacctctgatttctttgaacagtgttttgcaattctcattgtaaagatctttcacctccctggttagctgtattgctaggtattttattcttttgtggcaattgtgaatgggattgtgttcctggtttgactctcagcttgactgtgttggtagataggaatgctagaagattttttaatgtgatttggattctgaacttccttaaagtttttttatcacccaaggagcttttgggacgtctatggggttctagaantaaatctgccgntgcaacaggn

SEQ ID NO: 6212 - DNA, 581 bp, Homo sapiens
  misc_feature (533)..(533): "n" may be a, t, c, g, other or unknown
  misc_feature (542)..(542): "n" may be a, t, c, g, other or unknown
  misc_feature (558)..(558): "n" may be a, t, c, g, other or unknown
gatgggagaaggggatcaccaaatccttcacaaatctaataactatggatcttctccctagaaaaaaatggacatatgtacatgcacacaaacccacaattttgtgtgtactctcaaaaatctgggctccaggttaaaaattcctatgttaagggaaaagctagtcactttataaaggttaagggtgtaaaagtatattaagtttcccttgcacatgatgcatcatgcaggaatttaacaacaacaacaaaaaaaaaaacctgaagcttttaaagaatttctcattcttctgtcattttgatttcaatttgcttgctatgtgaagtagtggcttcttttatgtgttgtataatttcttctgtcctttagtgtaaaattaattatgactatgattttaaagcttcaggttttttaaaaaaccatgtttaaataaaatattaggtaagcaaaaggtgaagcttacaaggaaggtgtaggaattacaaagtgaggcaaaagatcatgtttagccattctatgccaaaatttagaanataaggctnattggcccaaaagccntttttggttaccgggggcctgta

SEQ ID NO: 6213 - DNA, 575 bp, Homo sapiens
  misc_feature (468)..(468): "n" may be a, t, c, g, other or unknown
  misc_feature (490)..(490): "n" may be a, t, c, g, other or unknown
  misc_feature (508)..(508): "n" may be a, t, c, g, other or unknown
  misc_feature (532)..(532): "n" may be a, t, c, g, other or unknown
  misc_feature (535)..(535): "n" may be a, t, c, g, other or unknown
  misc_feature (551)..(551): "n" may be a, t, c, g, other or unknown
  misc_feature (559)..(559): "n" may be a, t, c, g, other or unknown
  misc_feature (570)..(570): "n" may be a, t, c, g, other or unknown
gagacagggtctcactttgtcacccaggctacagtgtagtggtgcaaccatggctcactgcagccttgacctgacctcctgggctgaagtgatcctcccacctcagcctcctgtactttaattactaaaaattctttagtgcggtcccaccatttgcagttttgaattatgtgtctgaatgccacaatgacccactggcatttccaataggtcatgtagactggtgagatctgccagaactccacacagggacagccggagaaatcagagatgttcaggagcaaagtaggcgcacagggctattttggtgaagtttcaatctaccacgtggaaggaatattagacacattcgctacggctccaagagcatgagtaagacaaacacagacaggccgcaggcaggcagatgtgtgagtgggcccgcagaagaatgtccagcaccagtgccatgccacaatggggtgcacnggttaaagacacagggacgctntgatggcttaatggcaancctccaaccagcagcttcaagcanttntacgtggaccaaacanttcatganggggcctgctnccaaa

SEQ ID NO: 6214 - DNA, 567 bp, Homo sapiens
  misc_feature (528)..(528): "n" may be a, t, c, g, other or unknown
  misc_feature (541)..(541): "n" may be a, t, c, g, other or unknown
  misc_feature (549)..(549): "n" may be a, t, c, g, other or unknown
  misc_feature (553)..(554): "n" may be a, t, c, g, other or unknown
  misc_feature (560)..(560): "n" may be a, t, c, g, other or unknown
  misc_feature (563)..(563): "n" may be a, t, c, g, other or unknown
gagtttggctatttattgatgccacacagagggaggttatgattacagtctggttttaagtactgaaatatccaccaaggtaccccttgaggaggctgggtagaaggggaaatggcaaagcagcacagagatgcagggagggcaatgggctgggccgtgtatgtcatacaattattttggaggacaatgatgggtaggattgtgctttacccaccatgttttttagtaacataacttagaatactacttgaataagcagtacagacaacaggagtagcatcaaatatgttagctaggttgtaacaccaggcagttcatgtcatgtggcctctccttcaaaagtgaatcactgtggaccaagcaccagaaacatcgtcccaaagattcatcttgaagtcagaaaggagaagagctaagacctgcactctctggagtagcagtgtgcagctttcaaagtttggaagattttaagtcaactaaatgggatggtattatctaaaaccatttaatctttacaatggggttcanaaactggatgaanggtttcanaacnntcctgnctntttg

SEQ ID NO: 6215 - DNA, 509 bp, Homo sapiens
  misc_feature (295)..(296): "n" may be a, t, c, g, other or unknown
  misc_feature (364)..(364): "n" may be a, t, c, g, other or unknown
  misc_feature (435)..(435): "n" may be a, t, c, g, other or unknown
  misc_feature (458)..(458): "n" may be a, t, c, g, other or unknown
  misc_feature (470)..(470): "n" may be a, t, c, g, other or unknown
  misc_feature (479)..(479): "n" may be a, t, c, g, other or unknown
  misc_feature (482)..(482): "n" may be a, t, c, g, other or unknown
  misc_feature (485)..(485): "n" may be a, t, c, g, other or unknown
  misc_feature (502)..(502): "n" may be a, t, c, g, other or unknown
cttttttgagatagggtctcgctgtcacccagactggagtgcagcggcgcgatcacggctcactgcagcctcgatctcaagcgatcctcctgcctcagcctcccgaggagctgggaccacaggcacaggacaccacgcctagctaattttttttgtattttttgtagagatgatggtctcgccctgttgtccaggccggtctcaaactcctgggctcaagtaatcttccctcctcagcctcccatagtgctggttttacatgtgtaagccattgcacctggcctaaattggctgnntcatctcctgggtggagaggttggaaagctgggaatacatttcccaggccccttgcagctaggcttgngggtgtgaattgattctgccagttaggggtgctcacgtgagacttgggaaagtggaaagaaggcacacganttttgcatcttttacagaccttnaggacaataaanggacctctngcnaangggaaccactttttgcnaaaaggt

SEQ ID NO: 6216 - DNA, 585 bp, Homo sapiens; identical to SEQ ID NO: 5617
  misc_feature (1)..(585): "n" may be a, t, c, g, other or unknown

SEQ ID NO: 6217 - DNA, 525 bp, Homo sapiens
  misc_feature (71)..(71): "n" may be a, t, c, g, other or unknown
  misc_feature (258)..(258): "n" may be a, t, c, g, other or unknown
  misc_feature (285)..(285): "n" may be a, t, c, g, other or unknown
  misc_feature (327)..(327): "n" may be a, t, c, g, other or unknown
  misc_feature (455)..(455): "n" may be a, t, c, g, other or unknown
  misc_feature (466)..(466): "n" may be a, t, c, g, other or unknown
  misc_feature (492)..(492): "n" may be a, t, c, g, other or unknown
  misc_feature (505)..(505): "n" may be a, t, c, g, other or unknown
  misc_feature (510)..(510): "n" may be a, t, c, g, other or unknown
  misc_feature (518)..(518): "n" may be a, t, c, g, other or unknown
  misc_feature (520)..(520): "n" may be a, t, c, g, other or unknown
gagacagagtctcattctatcacccaggcaggttggagtgcagtggcgtgatcccaggttcaagtgattgntcaacttccacctcctgggttcaagcaattctcctgagaggcggaggttgcagtgagctgagatcatgccatcgcactccagcctgggcaacagagtgaggctctgtcttaaaaaaaaaaaaaaaaaaaaaaaaaatcacaatagcaaagacttggaaccaacccaaatgcccatcaatgatagacnggataaagaaaatggggcacatatacnccatagaatactatgcagccataaaaaaggatgagttcatgncctttgcagggacatggataaagctggaaaccatcattctcagcaaactaacacaagaacaaaaaaccaaacaccatatattctcactcataagtggacagttgaacaatgagaacccatggacacangggaggggaanattacacactggggccctgatggggnaatggaaggggtnggggnaaggacancntttgg

SEQ ID NO: 6218 - DNA, 582 bp, Homo sapiens
  misc_feature (492)..(492): "n" may be a, t, c, g, other or unknown
  misc_feature (531)..(531): "n" may be a, t, c, g, other or unknown
  misc_feature (534)..(534): "n" may be a, t, c, g, other or unknown
  misc_feature (542)..(542): "n" may be a, t, c, g, other or unknown
  misc_feature (544)..(544): "n" may be a, t, c, g, other or unknown
  misc_feature (570)..(570): "n" may be a, t, c, g, other or unknown
  misc_feature (580)..(580): "n" may be a, t, c, g, other or unknown
gaggaactatgtaatctttttccactcttttgaaggagaaaagttaagattagagggtctcatggttttcctcttttacccagggaattgatattttagctaaccaattcccaccatatcccctggagctagggatgttcttccaaaggaaaatgaatcacagctgcaatctcacaaaatgccttgatcccacacagctgcctctctctccctcctggggaccaagaaggaaacaagggctatgttagttgtcattcaggtcagggagacagacgctccctttgaccttcttgactccctctcttcctcctctccatctttaacccctggattcaggagacttgtttaaccaggtcacattgagcattactcttgcttcatctgaagatcacccatactccactcctacccaatgtcaatttaggcaatccagtggtcatactctgtgcacagcctccttcccatatcatgttttggaaacacccttttggngcattcgaactctgaatgaggagcaccttacacccctgntgntggaaaancngacttaaatggataaaggcactgganccttacattntg

SEQ ID NO: 6219 - DNA, 581 bp, Homo sapiens
  misc_feature (484)..(484): "n" may be a, t, c, g, other or unknown
gcccatctgccccttctaccatgtgaggacagtgtttaaagcaccatcttcaaattagaaactgggccctcagacaccaaacctgctagtgccttgatcataaacttttcagcatccagaactgtgagaaataaattcctataatttataaattacccagtctcaggtattttgttacagcaccacaaacagacttagacactgtatgattccattactggaactctagaaaagcaattctaatctttctaaaaagataggaaagagtcattgtttggagccagcaaaggggaaaggattgattgggatgggacacataggaaattgccggtgtgatagaaatgttttgtctctatctatgaacaggcattcacagctcagtgacttccctttattctgttgggaaagagctgcttgaaaggaggagggattctctgctcctagatgcttatgtcttatgtaggcaggttgtaaaacatgggangcctgctccagcccagcatttcctgtgacagatcagccgaatatgcctaatctggcaattaccaggtcaagttgctggtatccttactaattctctt

SEQ ID NO: 6220 - DNA, 573 bp, Homo sapiens
  misc_feature (14)..(14): "n" may be a, t, c, g, other or unknown
  misc_feature (37)..(37): "n" may be a, t, c, g, other or unknown
  misc_feature (58)..(58): "n" may be a, t, c, g, other or unknown
  misc_feature (112)..(112): "n" may be a, t, c, g, other or unknown
  misc_feature (136)..(136): "n" may be a, t, c, g, other or unknown
  misc_feature (176)..(176): "n" may be a, t, c, g, other or unknown
  misc_feature (179)..(179): "n" may be a, t, c, g, other or unknown
  misc_feature (207)..(207): "n" may be a, t, c, g, other or unknown
  misc_feature (278)..(278): "n" may be a, t, c, g, other or unknown
  misc_feature (328)..(328): "n" may be a, t, c, g, other or unknown
  misc_feature (436)..(436): "n" may be a, t, c, g, other or unknown
  misc_feature (462)..(462): "n" may be a, t, c, g, other or unknown
  misc_feature (507)..(507): "n" may be a, t, c, g, other or unknown
  misc_feature (515)..(515): "n" may be a, t, c, g, other or unknown
  misc_feature (533)..(533): "n" may be a, t, c, g, other or unknown
  misc_feature (542)..(542): "n" may be a, t, c, g, other or unknown
  misc_feature (551)..(551): "n" may be a, t, c, g, other or unknown
agtagagacagggnttcaccatgttgaccaggctggnctcaaactcttgacctcaagngatctgcctatctcagcctcccaaattgctgggattacaggcatgagccaccgngtccagccttatgcacctttttgnaaattcatttagcacttctttcctgactttaaatgtatgnganactttaacttctcatttgaatcagttgnaacatcttactggttccctcattaatcaatcagttaaatggaattttgggcatacattcattcatatttgnataagtcataatttatttaaattattctttagttctacacataggcatgngaacacacactcacagatagacactacgccagtcaaatttaatattatattatgcttggattttaagtacttctcttcacatacttctctttattttttaaaatttgntcaagaaggcattggattatttcaanaattggaaccaaagttttaaaaaactttgaaaaaaatcaagtaanggctttgnaaagcttttacacgtatnttaaccttnaaaccaacnaggggatttaaaatccggggag

SEQ ID NO: 6221 - DNA, 576 bp, Homo sapiens
  misc_feature (489)..(489): "n" may be a, t, c, g, other or unknown
  misc_feature (545)..(545): "n" may be a, t, c, g, other or unknown
  misc_feature (559)..(559): "n" may be a, t, c, g, other or unknown
  misc_feature (562)..(562): "n" may be a, t, c, g, other or unknown
ccagattatcaatgtgaggaagctttaagaaaataaaatcaacctactcatttatttaaaacagaaataacatcatgcatttatttgaaggctctgtaagcatacatggagtgaatcatttaccttcagggctttttcataaaacttaacattaaattaactaagtagatgtatctcagggagttacaataagggacatggttttaaacaacttaaaaatgttttaaaagaaaacaaaaggtaaataccttataataacagacctaatttctaatttttagaattaaaaaaaatctgcaagcaaaaattacggactgcagtataacaagggtttaaaaatgttaatagcttagatttaacatgctactaatgctcactctacatctactgaggtagatggtcatcttaggatgcccacataggtagttaaacaaagcacaaaccttctgcatatgggtacgactatcaaagctctgcaacgaatacagngtttgtcaatgctggcccaactggtgagtctggatatggacttaacaagcagaccnaaatgaactgcaangcnatcactaaaaatta

SEQ ID NO: 6222 - DNA, 581 bp, Homo sapiens
  misc_feature (531)..(531): "n" may be a, t, c, g, other or unknown
  misc_feature (536)..(536): "n" may be a, t, c, g, other or unknown
  misc_feature (538)..(538): "n" may be a, t, c, g, other or unknown
  misc_feature (542)..(542): "n" may be a, t, c, g, other or unknown
  misc_feature (566)..(566): "n" may be a, t, c, g, other or unknown
ccgtcatctttgccttttaatataagatttggtttcatcatttctgagtgtaacatatttcttctaaaaatagagctctctgcttgtctgaaacttcgcgttcactgggaggtgaaggggaataaggctgaccgtaattctggggtgacgttgccagtttcatagtcatagataaacttctcaagggctcctggatgctcacagcaaggatgagttcatttcaaatccatggtactgaagaagcatgacaaagcgtttcaaggccccatctgtgcctggtgtggactcaaaccgttcaaccagaggcttattgtccttgacttgggaggaggaggtctctgtttgatgagcgtcgtttgcatcaaggatggctgcggcctgcagggagcacttctctgaccgcacttgagtgatgagctcttgcacatcaggcaggtcctttaggctgttcttgaaggcgccagcatcagaatttacttcattgcatatttcagggactctggcatacaggacaaggcttcgttccacttntttancnagcncataggactgaccatgaaaaaccnctggtaacctttaat

SEQ ID NO: 6223 - DNA, 504 bp, Homo sapiens
  misc_feature (315)..(315): "n" may be a, t, c, g, other or unknown
  misc_feature (453)..(453): "n" may be a, t, c, g, other or unknown
  misc_feature (473)..(474): "n" may be a, t, c, g, other or unknown
  misc_feature (481)..(481): "n" may be a, t, c, g, other or unknown
  misc_feature (490)..(490): "n" may be a, t, c, g, other or unknown
  misc_feature (496)..(496): "n" may be a, t, c, g, other or unknown
  misc_feature (504)..(504): "n" may be a, t, c, g, other or unknown
gctgttacacagaagagactagttaagtgtaccattgaagactattacgcatcacgtgcctacgttcatcaggccttaagccctcaaagaacaacagcatcaggggctctgtgagagccgccacctgagcctcaccgcttagttcataaaacagccctgtgtcctttctacaaagccaggtcgtgttttctacccacagttcaggactccagcgtagacagcaaacacaaaatttgtttcctttttgaaacaaaacagtcttagtagaagcaaaacaaacaaccacaatctaaaccagccgcgaggaaccctttnctagctggaaaggagaatgtgtcgccagcgattcggagtgaaaaggatgggaagatgcctgtgccacacccttgaatgtggtccacagattcaccagctccaaggcagcatctctttccaaagcacctgcagcaggangctgtgtgggggcaacaaanntcactcntgataccanagaatncccccggn

SEQ ID NO: 6224 - DNA, 579 bp, Homo sapiens
  misc_feature (496)..(496): "n" may be a, t, c, g, other or unknown
  misc_feature (550)..(550): "n" may be a, t, c, g, other or unknown
  misc_feature (557)..(557): "n" may be a, t, c, g, other or unknown
  misc_feature (566)..(566): "n" may be a, t, c, g, other or unknown
  misc_feature (578)..(578): "n" may be a, t, c, g, other or unknown
agtagagacagggtttcaccgtgttagccaggatggtctcgatctcctgacctcatgatccgcccgcctcagcctcccaaagtgctgggattacaggcgtgagccaccgtgcccacccaggatctacattttaacaagatctcgatgatttgtgcatgcattaaaggttgagaaagcactagtctacatgcccatctatctggacaccccacagccactccagcccagcatggccatgctgaatgcagacccctcccctagaccacaaatttctgtttggttttccttcctgatgaacagtttctatcctatgtatggagatgggagtgtggtctggagtggggtcaatgtccccgccatgtggctgcctcactttttaatgggctccaaatgacacagagctgggtcacctgggtctcactgcagtttcctggatcagggatactggaaagatgtcatgttccacatggacaccagcctaactttaaggctgacncaaaaagactccttccagcatgcaagtgggatggtctttttgtaccacgctgtncctttcncttaatggngccagggccctna

SEQ ID NO: 6225 - DNA, 583 bp, Homo sapiens
  misc_feature (506)..(506): "n" may be a, t, c, g, other or unknown
  misc_feature (532)..(532): "n" may be a, t, c, g, other or unknown
  misc_feature (541)..(541): "n" may be a, t, c, g, other or unknown
  misc_feature (562)..(562): "n" may be a, t, c, g, other or unknown
  misc_feature (566)..(566): "n" may be a, t, c, g, other or unknown
aggtttcaagcagtctttacttgggtttaaaaacagtgcttcatgcatttacaataagttattacagaactctaagtcactgatgcacacacaaaagctaaacccaacttactaactatgcagacctctcctgatctccccaggctgggcagtaattagtaccttacaggtgtgatccatggcccagagaaggcagccactgtcagttacagttggactgctgcatcacagtggaggcagcagagttgaagatccacagagggctgtaatacagcccagaaaagacaacggagagtgaaggctagaaacattgaggaaggggtcaagaagcacttgtacttcctgttatcttttccaatagaatattcctgcaagttacccatcagaaaaaggtgttcagagggtttgaaaaagaagtggttagcccatgccagtgaaggtgacaaaaaacaaaacaacttgatttttggtcatatcagaaaaggatggaggggaacacccaagtncttgcacgggccccaagtgcttccanccaaaggantgctgtttcaccagcccaaantttntaacagcaccaccaaaa

SEQ ID NO: 6226 - DNA, 571 bp, Homo sapiens
  misc_feature (468)..(468): "n" may be a, t, c, g, other or unknown
gtagagatggagtctccctatgttgcccaagctgctgtcaaactcctgggctcaagggatcctcccaccttggcctagatttgtatttttaattgacaaataataattgcatgtagttatgggttataatgtgatgttttgatatagctacatatactataaaatgattatattaagctgattaatatgtccatcacctcacatacttattttttataatgaagacatttaaaaacgtattcttttagcaatcttgacatttataataccttattatgagggctaaaaatgaataatattaataatcctgtacaatgggtctcagaaacttagccctcttgtctaactgaaacgtctgtaccgtttgatcaaccaaagatggcttttgttggcaattcaatttttttgacaaattcctcattttgtcttcatttggagttttatccattacaagagaggaagatgacncaagccagaatagaggaagatgaacaaccctcaggatctgaaggacactggtgggtttttttaattaatttgaggtatattgctaaaacgggctacttgtgcc

SEQ ID NO: 6227 - DNA, 579 bp, Homo sapiens
  misc_feature (127)..(127): "n" may be a, t, c, g, other or unknown
  misc_feature (494)..(494): "n" may be a, t, c, g, other or unknown
  misc_feature (499)..(499): "n" may be a, t, c, g, other or unknown
  misc_feature (503)..(503): "n" may be a, t, c, g, other or unknown
  misc_feature (546)..(546): "n" may be a, t, c, g, other or unknown
  misc_feature (557)..(557): "n" may be a, t, c, g, other or unknown
  misc_feature (569)..(569): "n" may be a, t, c, g, other or unknown
  misc_feature (578)..(578): "n" may be a, t, c, g, other or unknown
cagtttaatgaacatttattatatattccaactgagtgaaaggcactatgctaggcagtgagagaaatacaaatgaaaataagactcaacctcttttcttacatttttttttttttttttttttganacagtctgtctctctatcacccaggctggagtgcagtggcatgatcttcgctcactccaacctccacctcctgggttaagcgattctcctgcctcagcctcccaagtagctgggattacagatatgcaccaccgcatctggctcatttttatatttttaatagagacagggtttctccatgctggccaggcttgtctggattcctgacctcaggtgatccacccaccttggcctcccaaagtgctgggattacaggtgtgagccaccatgcctggccttttcttacatttcttatcacggcatggatacaggcagagtaacacaaactatcctgtaggcagttttaaaataagtccatatttgagcncattnaaangtattgaacagatgggagattattcagaatgagattttgcttnaaagcctttcncctaatttcggnctggactgnc

SEQ ID NO: 6228 - DNA, 587 bp, Homo sapiens
  misc_feature (546)..(546): "n" may be a, t, c, g, other or unknown
  misc_feature (575)..(575): "n" may be a, t, c, g, other or unknown
  misc_feature (580)..(580): "n" may be a, t, c, g, other or unknown
  misc_feature (582)..(582): "n" may be a, t, c, g, other or unknown
  misc_feature (584)..(584): "n" may be a, t, c, g, other or unknown
ctttttttttttttttcaaatactgagatgtttattgcattttaaaaatatccacactcttaaatatcctgtttcaaattcctcctaaaatcctttacagcacacaacatcaactactgcagtagcgttctcacaatattacacttgaaaataccatttaggaacaatattttaggaaatagagggtttaaggcaagacattcatttggaaaagttaatttctctctatcatccagattgacacgattatttttccacctcttcagtgccttgggatacgcaacatacattcagcaacagggcacgcgtgtgaccctacggacaagtgctgaggttgggagtgcccactgaaatatggaaatattcttacataaggcgtggccacggggacatggcatgggagggcttgtttcactccatttcaatctggtgtcaggaaattccttatctataactgccattcccccagtaactgcttttcaacaaactcaaacccttgaaaaggtctaagatggttctgttaacatcaaaaaaaaacagccttanagctttccgacactgtttagtgatgaagnctcangntnttt

SEQ ID NO: 6229 - DNA, 559 bp, Homo sapiens
  misc_feature (462)..(462): "n" may be a, t, c, g, other or unknown
  misc_feature (471)..(471): "n" may be a, t, c, g, other or unknown
  misc_feature (514)..(514): "n" may be a, t, c, g, other or unknown
  misc_feature (539)..(539): "n" may be a, t, c, g, other or unknown
gaggtggaggtctcactatgttgccctggctggtctcgaactcctgagctcaagcgatctgcccgtcttggcatcccaaagtgctaggttacaggcaagagccactgcacccagtcataatctctcttgaataaaccctcttacttccccttttgcatctctctctctaaatcctacatttgtctccacagataacatctcaccaatttagagacacttttctttctgctagatcaagatgtttaaagcatttgttctcacttctttcatgaaaccttctgagatcagtcagctaagatctagttaattgaatcatcaactactctaatacttctgcctgtcctgttttgggttgaaagggacacaattcaaggtcaaagaccatgtcagttgcttcctttgcattctcaacactcagacagcaccctctgtagacctgagtattgacaaaatgctcttcanaagagcttntccagtcactctggaaacggccttcagaggcctccgaaatagncctataattaataaatatttggccntggggggtttaacaagtggg

SEQ ID NO: 6230 - DNA, 577 bp, Homo sapiens
  misc_feature (473)..(473): "n" may be a, t, c, g, other or unknown
  misc_feature (477)..(477): "n" may be a, t, c, g, other or unknown
  misc_feature (499)..(499): "n" may be a, t, c, g, other or unknown
  misc_feature (501)..(501): "n" may be a, t, c, g, other or unknown
  misc_feature (504)..(504): "n" may be a, t, c, g, other or unknown
  misc_feature (537)..(537): "n" may be a, t, c, g, other or unknown
  misc_feature (563)..(563): "n" may be a, t, c, g, other or unknown
gagatggagcctcactctatcacccaggctggagtgcagtggcgcgaatctgggctcactgcaacctccacctcctgggcttaagcgattctcctgcctcagcctcctgagtagctggggttacaggtgcctgccaccactccaagataatttttgtgtttttaatagagacagggtttcaccaagttggccagactggtcttgaacccatgacctcaagtgatctgcccacttcagcctcccaaagtgctgggcttacaggcgtgagccactgtgcctggccagaaagccctctttgatgaggactgagttacactgagttttaaaggatgagtagaaagtggccaggcaaagagagggagggaaagcttccaggaggaaggagtagcttgtgtgaaggttctgaggtcagaaaagtagttttgcaaaataaaggaactgaaaaagagatcaggtagagagacagaaaggcnctanagagaagcacataaggtggcananaangagaagcagttcttcctaagatatctatcaagngcctatttttaacagggctagcattnttgatgagactgtt

SEQ ID NO: 6231 - DNA, 576 bp, Homo sapiens
  misc_feature (547)..(547): "n" may be a, t, c, g, other or unknown
attttttgagatggagtctagctctgtcgcccaggctggagtgctgtggcgcgatcttggctcactgccagctccgcctcccaggttcactccattctcctgcctcagtctcctgagtagctgggactacaggtgcccgccaccatgcccggctattttttgtatttttttagtagagacggggtttcaccgtgttagccaggatggtctccatctcctgacctcatgatccacccgccttggcctcccaaagtgctgggattacaggcgtgagccaccacgcccggcaacacatgttatctgtgatggaagaaaggttttactttaagaaaatctgcagctagtaacacaacaggtgggccagaccagcagctctggctcagattctgctctacaatgataagctgtttaaccttcgacaagttactaaactgcctgagtccaagtgttctcatctataaaaagggtgagcaataatatctattttgtaaagttgtgagtgctatataaaatatctacagggactctctagtgataagtggagcanctactatggtgtaaaacatacaaattgct

SEQ ID NO: 6232 - DNA, 564 bp, Homo sapiens
  misc_feature (109)..(109): "n" may be a, t, c, g, other or unknown
  misc_feature (156)..(156): "n" may be a, t, c, g, other or unknown
  misc_feature (190)..(190): "n" may be a, t, c, g, other or unknown
  misc_feature (221)..(221): "n" may be a, t, c, g, other or unknown
  misc_feature (251)..(251): "n" may be a, t, c, g, other or unknown
  misc_feature (476)..(476): "n" may be a, t, c, g, other or unknown
  misc_feature (480)..(480): "n" may be a, t, c, g, other or unknown
  misc_feature (482)..(482): "n" may be a, t, c, g, other or unknown
  misc_feature (484)..(484): "n" may be a, t, c, g, other or unknown
  misc_feature (514)..(514): "n" may be a, t, c, g, other or unknown
  misc_feature (521)..(521): "n" may be a, t, c, g, other or unknown
  misc_feature (550)..(550): "n" may be a, t, c, g, other or unknown
aacaaaaatgatcacacatgataatggcagtggcaattgtttatataatggccactacacaccagacagtattctaagcactgatatattacaaactcatttaaacctntcaaccttatgaagtaggtattattatcaatctcatttacagctganaaactgaagcaaatcacttcaactaaggcaatgnggtctcaggatgtgtgctctctgttactcanaaacaaaaggtacacttttctgaggccctntagtgcaggcacaaagacaccatagctcttactggatctccagcctatcactctaacactagccaagataataactaatgttaaaaattatgacttggagtcaacaaggctaagatatattttatatactttataaaagcaaagaaaggtatacattttatagtgaattctattcgacactgattataggaaaaaagaaattagtactttaaggaaagcaaactntggntntncccaaattacgttttaaaaaagctaaaatncccatangggtctgcgtggctaaggttattatttcntcaaaaatcaaatg

SEQ ID NO: 6233 - DNA, 597 bp, Homo sapiens
  misc_feature (422)..(422): "n" may be a, t, c, g, other or unknown
  misc_feature (491)..(491): "n" may be a, t, c, g, other or unknown
  misc_feature (574)..(574): "n" may be a, t, c, g, other or unknown
  misc_feature (597)..(597): "n" may be a, t, c, g, other or unknown
atcatacaacaaattaacacaaatttattgggtggaaaatgtgaaaagggacaaaaaaaggggtagttttgtactgatataagagttcataaagtgataaactcaggtccaaaatcttcagcccacatcaaagacttcatgttcttatgactctagaaacaggccagccccggctgctgggctcttggaatcatggagtgtagctacacataaagaagctcccttgtcaaggacatgacatcatgttttacatcttggtccttttcctgccacctgtcttccccagaaggcctctgcaaccggttttttgtcagctcaagttgtagaccatcaaacctgtgcttaaaccagcgatgagcttcttccagattagctgttatctgttctgattccacactggcttctttcagcgtattctctgntgcctctttacatttcttcaggtgtctgacagtttcttccaattcctggcaccgattctctacttctgncttattttccgtctgcttctaaggtgccagctcttgctggttattccgactgaggcatcatattggctcttagccacatttgnatcttttctggaggtaagcattn

SEQ ID NO: 6234 - DNA, 583 bp, Homo sapiens
  misc_feature (456)..(456): "n" may be a, t, c, g, other or unknown
  misc_feature (515)..(515): "n" may be a, t, c, g, other or unknown
  misc_feature (523)..(523): "n" may be a, t, c, g, other or unknown
  misc_feature (528)..(528): "n" may be a, t, c, g, other or unknown
  misc_feature (580)..(580): "n" may be a, t, c, g, other or unknown
  misc_feature (582)..(582): "n" may be a, t, c, g, other or unknown
acagagtctcgcactgtcgcccaggctggagtgcagtggtgtgatctcggctcactgcaacctttacctcctgtgttcatgccattctcctgcctcagcctcccgagtagctgggactgcaggcatgcaccaccacgcttggctgatttttgtacttttagtagagacagggtttcaccatgttggccaggctggtctcgagctcctgacctcaagtgatccacctgctttggcctcccaaaatgctgggattacaggcatgagccaccatacctggcctcttttttttttttttttttgagatagaatttcactctgtcacccaggctggagtgtagtggcatgatctcagctcactgcaacctccacctgccaggttcaagagattctccttcctcagcttctcaagtagctgggactacagttgtgcaagtaccatgcctgggtaatttttgnattcttgagtagagataggattttgccatgttgcccacctggcttgaactctgacttangcaaccanccacntagcttccaaaggctggatacagctgaccatggatctttaacatgccaaagntnt

SEQ ID NO: 6235 - DNA, 587 bp, Homo sapiens
  misc_feature (459)..(459): "n" may be a, t, c, g, other or unknown
  misc_feature (506)..(506): "n" may be a, t, c, g, other or unknown
  misc_feature (517)..(517): "n" may be a, t, c, g, other or unknown
  misc_feature (561)..(561): "n" may be a, t, c, g, other or unknown
  misc_feature (582)..(582): "n" may be a, t, c, g, other or unknown
aacgttaaatcgattttatttaaagccataaataaataagccaattaacgctcaagtctgagagggctgcagtctttttaacaataccatagtccaaaaagactaatacttattgctgattcagctcacaatattacccctttccagacaacagcacattcaaatgttcaagaaaacattttatgggcaccttttatgggcatttgagattcacagagcaatgggccatggccctgccctcaaggaacttacaatgtagctggagagacacaaaacatccaaaacagacatgaggggctggctctacctccacacctctatctgaacaaaaacgattactggcttaagtcctcgtgttgtaacgcatgagccacaggaatatcttagcaagtacgcactttatcaagtttcaatttgcatgtcaaaacaaaagtttttatgttggtcatttatatttgnattcactcagatttccctcaatcaaattaaaagagaaggcctaattncaagccactgnaccataatggttgctggcctcgatgaaaggatacttggtcatgnccaaaaattttcccaggtccncattt

SEQ ID NO: 6236 - DNA, 574 bp, Homo sapiens
  misc_feature (414)..(414): "n" may be a, t, c, g, other or unknown
  misc_feature (417)..(417): "n" may be a, t, c, g, other or unknown
  misc_feature (448)..(448): "n" may be a, t, c, g, other or unknown
  misc_feature (496)..(496): "n" may be a, t, c, g, other or unknown
  misc_feature (525)..(525): "n" may be a, t, c, g, other or unknown
  misc_feature (547)..(548): "n" may be a, t, c, g, other or unknown
  misc_feature (558)..(558): "n" may be a, t, c, g, other or unknown
  misc_feature (561)..(561): "n" may be a, t, c, g, other or unknown
  misc_feature (565)..(565): "n" may be a, t, c, g, other or unknown
cttaaatatgtctttttttaaatgtttgcaagaaactctaagggctaaggaaatgcactgcattatgatctgggctccttagagtacaaacctcaccaggcttaagcatcatccataagaaatggtggattacttaatgacttataagtaaaacagtcattaaatgatcctttcatactttaatcctcttatgcagagactgagatacttccatacattccaatatctgcaactttggttctattaaagtatttgataaaagcaaaacaattttgtgaccacagaactctatggaactttttttccttttaaagtgtcaggtgaacctagcgtgataaggcaatgttgcctacatatccgcgacccagcacaggagggacagcacagacagggcatgttccagctcaccattgntgnataatactgctcccaccaggggtaacactgnttatgttccctggaccctacatctattcgtacctgaaacataatttgnataaaatatgatggttctttagaaatatnttagttttttaataaactggcnnatgaaaaaanggnttcnaattgggaa

SEQ ID NO: 6237 - DNA, 165 bp, Homo sapiens
  misc_feature (146)..(146): "n" may be a, t, c, g, other or unknown
  misc_feature (148)..(148): "n" may be a, t, c, g, other or unknown
  misc_feature (152)..(153): "n" may be a, t, c, g, other or unknown
  misc_feature (155)..(155): "n" may be a, t, c, g, other or unknown
  misc_feature (158)..(158): "n" may be a, t, c, g, other or unknown
  misc_feature (164)..(164): "n" may be a, t, c, g, other or unknown
gagatggagtttagctcttgttcccaggctggagtgcaatggcgcaatctcggctcaccgcaagttcctgcctcagcctcccgcgtagctgggatcacaggcatgtgccaccacgcccggccaattttgtatttttagcagagacngngttnntncangctganc

SEQ ID NO: 6238 - DNA, 597 bp, Homo sapiens
  misc_feature (417)..(417): "n" may be a, t, c, g, other or unknown
  misc_feature (456)..(456): "n" may be a, t, c, g, other or unknown
  misc_feature (464)..(464): "n" may be a, t, c, g, other or unknown
  misc_feature (466)..(466): "n" may be a, t, c, g, other or unknown
  misc_feature (471)..(471): "n" may be a, t, c, g, other or unknown
  misc_feature (478)..(478): "n" may be a, t, c, g, other or unknown
  misc_feature (481)..(481): "n" may be a, t, c, g, other or unknown
  misc_feature (523)..(523): "n" may be a, t, c, g, other or unknown
  misc_feature (569)..(569): "n" may be a, t, c, g, other or unknown
  misc_feature (592)..(592): "n" may be a, t, c, g, other or unknown
aaaactttcagtgttttatttttgactgcagctgtttacagaaatatagttgcgagtatacaaatgttccaatagaagcaaaatatctttttaatatttaacaagttatcacagatagctaaaaacatagatgcaaatgaaattcccccagagaacaaactgaaaatatctggtatcagtgctctgaaatcccaactatgaaagccatatacacaaaaatgtaacccttatatcattgcaggacaatggaagaaggcagttcagtggttgatcagtgtgctcaagcaaataaaattaaataaaaattaaaaatggcagaatggtagctaaaccacttgagaacaggttaatgaaattattggtactatacttaaaacattaagtaaaagaagtgaatgaaactcatttaaaggttgncaaaaaattagcaactacttggagcttatcaattaaaanggaaccangntagcngaccccntcntagatccaaagaaatttgatccaggtcactggaatcagctgnaactctcaaggcccatgacttaatgccggagtttttacgggccccnaagttgattccaggccacttttnaaagg

SEQ ID NO: 6239 - DNA, 599 bp, Homo sapiens
  misc_feature (474)..(474): "n" may be a, t, c, g, other or unknown
  misc_feature (496)..(496): "n" may be a, t, c, g, other or unknown
  misc_feature (568)..(568): "n" may be a, t, c, g, other or unknown
  misc_feature (583)..(583): "n" may be a, t, c, g, other or unknown
acaacaggtaaaaaaacatacaacagaaacgcttttataagatacaattagtaatacaaatataaaatcttctaaacaatcactggtattgttctactactaactataacacagtggcattaacaatttgtcccactttttatactcattctgcttattagtttaaaactgactggtcacagactgattttgggaaccagctggcaaaatcacaacttcattttggtaatgaataactatagattttcaagagcttagaaagattttttggaatataatttcctaagtatgaaatatgaaagttaatatgataaatgaatgacaaattagtatactatttaaattttagttaaatattctggaaaaactgtttcacttgcttggtgatccacagagcacccacaaagttagcttttaaatttggaagtttaaaatcatgaaggaaatattttaaatagaaaagctcacatcttncatataaatgggttaaaaaatntaaacttattggacctaatctatcagaattggtttggttggttaccaggggttaaggctggaagaatggttntctttaccaaaaaantaggaaaaaatctggt

SEQ ID NO: 6240 - DNA, 609 bp, Homo sapiens
  misc_feature (478)..(478): "n" may be a, t, c, g, other or unknown
  misc_feature (523)..(523): "n" may be a, t, c, g, other or unknown
  misc_feature (525)..(525): "n" may be a, t, c, g, other or unknown
  misc_feature (527)..(527): "n" may be a, t, c, g, other or unknown
  misc_feature (529)..(529): "n" may be a, t, c, g, other or unknown
  misc_feature (555)..(555): "n" may be a, t, c, g, other or unknown
  misc_feature (577)..(577): "n" may be a, t, c, g, other or unknown
  misc_feature (605)..(605): "n" may be a, t, c, g, other or unknown
aagagatggggtcttgctatgttgcccggactgggacttaaactcctgggctcaagcaatcctcctgtctcagcctcccaaacagttaggactacaggtgcacgccaccacactcagctaatctttttatttttattttatttttttgtggaggcagaatcttgctatgttgctcaggctggtcttgaactcctgggctcaggcaatcctcctatctcggcctcccaaagtgttgagatctcaggcaagcggcaccatgtctggctgatctgtcttcactcataccttaacaccttttcctctgccaggcgacagtcttttgagaaaagcaactatactaccaattctggaccccttgaaagatccagcagcacacaccttgggtgctcaagaaatatgcgttaatttgaatttcaaaccctatcacaatagctgctacagtttactgacgggctactctggctggggccctggacangaatgggcctcttactccattaatccttaacccttaccttatgangnangnagtataatgccattttacagaagganggaactgcttaaaaactggtangggcattgcccaaggtacactggttgtnaaag

SEQ ID NO: 6241 - DNA, 573 bp, Homo sapiens
  misc_feature (413)..(413): "n" may be a, t, c, g, other or unknown
  misc_feature (515)..(515): "n" may be a, t, c, g, other or unknown
  misc_feature (529)..(529): "n" may be a, t, c, g, other or unknown
  misc_feature (543)..(543): "n" may be a, t, c, g, other or unknown
  misc_feature (546)..(546): "n" may be a, t, c, g, other or unknown
  misc_feature (549)..(549): "n" may be a, t, c, g, other or unknown
  misc_feature (553)..(553): "n" may be a, t, c, g, other or unknown
  misc_feature (561)..(561): "n" may be a, t, c, g, other or unknown
agaaaaattccactttaattaaactgttcaatctggatttttttcccccgatactaactgaaattaaaaatagaaatcaatttctgcgacctttcaaggcagtctttgaaatgtcaaggttttaaaaattattttacagcaggaatttacatataaatacactctgtacaatgcgttaactgaacaatcactgggcttccatcatggaggagaaatgattctaggacgagccagggcagcattcaattactgccttcttagtggaagacttttcagccgtctcagcagctcctggggcgacacgtctgcggtttcctcgtcactctggctgtcgctgctgtcggaactctcggagctactacttttctctggttttttattcttttgcttgcctttgggtttgtgcttcctgngttcttttcttctcttcttccgctggctcttcttggcctgggcttgcttggtcttttatgttctcttttgaggacctcaagggcttgacgagcattgggcanaaacggaggaaccncggccgactttctnttnacnatcngatctttngatcggaaggag

SEQ ID NO: 6242 - DNA, 442 bp, Homo sapiens
  misc_feature (400)..(400): "n" may be a, t, c, g, other or unknown
  misc_feature (404)..(404): "n" may be a, t, c, g, other or unknown
  misc_feature (411)..(411): "n" may be a, t, c, g, other or unknown
  misc_feature (428)..(428): "n" may be a, t, c, g, other or unknown
  misc_feature (433)..(433): "n" may be a, t, c, g, other or unknown
  misc_feature (436)..(436): "n" may be a, t, c, g, other or unknown
  misc_feature (439)..(439): "n" may be a, t, c, g, other or unknown
ggccagtgtctgacctttattaagaggtgaggtggggagagggcccgccagggtgcccactccctcttggtgacccccccatctggagttaaggctccaagcagcaagtgacagaggagggtgcctggctccagcagcctgggcatggcggcgactcccccaaaaacaccccagctgggtgggtgcctgggggcctaggtgaggctggtgttggagctgctggtagcactgcctcgcttttgcaggcagcgcacagcactggggacctgcaggcctgtcgtcacctggaagctgccacaccataccgtgaaagcaggcagcagcggctgtgtgaacctggtcttgaaagtgtgcagcacttgtttggtgcgggcattgtagaaggacaggaggccttggnggangtacagngcacacccaggcagtcnggcancgnggncgt

SEQ ID NO: 6243 - DNA, 589 bp, Homo sapiens
  misc_feature (569)..(569): "n" may be a, t, c, g, other or unknown
ggctttttatccaggttatattttaatatctggagttttaatccagcatacaaaaatcaccagtatacatctattaagttaactgcagtattatttcaccatcaccatttacatgtacttttcaggtatcagagacttagtgctttaagtagcaaattacctaaattatgaacacatatttccaaaaacaaaatcaagctcataattaccaagtatatatgtacagtgcagattaaaaaaaaactgaattagcacatatttctcttttctaaagctcctatgaagaacttacactcttctgcactaccaatctattctgtacatttaaaataacatttgttttgatttaaagtcaaaaatataaaggcttaaatttttgtgagactaacccataaaaaaggactccaattttaaaccaatccctgaaaccaaagcattcaaatatttgaatattagttcaatatttctacatagcacgataaggattttcaggtacttcaagttttggctttatttttaataatgggaatgggctacaattaccattaacaattattcaagtattttangggccttacatatcattacc

SEQ ID NO: 6244 - DNA, 596 bp, Homo sapiens
  misc_feature (555)..(555): "n" may be a, t, c, g, other or unknown
  misc_feature (569)..(569): "n" may be a, t, c, g, other or unknown
gatttagttacatcattcttttcttctctactttctcttcctgaaaaactcttccttacataaacaaattcatactggagatatatgtcagaaaacattcagcctgagtaaactgaacgctctgtacagaaaacaacagaacaaaacagaacttcaacagtaacactggcgtggcataatataagccacgcaaaatgcttccaaatccattatctcttctgagtttcatcttgtgaggtttgaagggtacactgattgtacttaaaaacctaaggcacagagaaggttaaataacatgcctgagttactaaaaagagaatccagatctagttcaaaatctggtcttcttttcactataccaataacatctgactggaggcaagatgagagagcaatgagtaagcactaatgttatttcagggccttaaaacccttatatattatgaactactcttcattagaaaaaagtatgcattttcttaaagcataaatcacaatatatatttttaaagggttcccaagtcttttctacttcatacaaatgaagttggctgnattttaaaggcttnccctttgggaaaaccggacccaaaaaa

SEQ ID NO: 6245 - DNA, 511 bp, Homo sapiens
  misc_feature (3)..(3): "n" may be a, t, c, g, other or unknown
  misc_feature (17)..(17): "n" may be a, t, c, g, other or unknown
  misc_feature (37)..(37): "n" may be a, t, c, g, other or unknown
  misc_feature (47)..(47): "n" may be a, t, c, g, other or unknown
  misc_feature (61)..(61): "n" may be a, t, c, g, other or unknown
  misc_feature (63)..(63): "n" may be a, t, c, g, other or unknown
  misc_feature (77)..(77): "n" may be a, t, c, g, other or unknown
  misc_feature (106)..(106): "n" may be a, t, c, g, other or unknown
  misc_feature (130)..(130): "n" may be a, t, c, g, other or unknown
  misc_feature (175)..(175): "n" may be a, t, c, g, other or unknown
  misc_feature (240)..(240): "n" may be a, t, c, g, other or unknown
  misc_feature (253)..(253): "n" may be a, t, c, g, other or unknown
  misc_feature (402)..(402): "n" may be a, t, c, g, other or unknown
  misc_feature (421)..(421): "n" may be a, t, c, g, other or unknown
  misc_feature (452)..(452): "n" may be a, t, c, g, other or unknown
  misc_feature (455)..(455): "n" may be a, t, c, g, other or unknown
  misc_feature (457)..(457): "n" may be a, t, c, g, other or unknown
  misc_feature (473)..(473): "n" may be a, t, c, g, other or unknown
  misc_feature (493)..(493): "n" may be a, t, c, g, other or unknown
  misc_feature (504)..(504): "n" may be a, t, c, g, other or unknown
ganacggagtttcgctntgtcgcccaggccggactgnggactgcagnggcgcaatctcggntnactgcaagctccgnttcccgggttcacgccattctcctgcctnagcctcccgagtagccgggactanaggcgcccgccactgcgcccggctaattttttgtatttttagtanaggcggggtttcaccttgttagccaggacggtctcaatctcctgacctcctgatccacccgcctnggcctcccaaagngctgggattacaggcgtgagccaccgcgcccggccggcttctagtttttatcatttctgtttaaaagctaacagtctcattgttgcaactgtgaaggcaactggtgaattaacgatgggacacatattctttgcactaccatcaggtanaggatattttccctgctgnaattttgagcaggccccgggacttggttttnaangnaacattggataaatangctggttcaagttttatgcncaggctttaanaggccta

SEQ ID NO: 6246 - DNA, 566 bp, Homo sapiens
  misc_feature (75)..(75): "n" may be a, t, c, g, other or unknown
  misc_feature (82)..(82): "n" may be a, t, c, g, other or unknown
  misc_feature (101)..(101): "n" may be a, t, c, g, other or unknown
  misc_feature (168)..(168): "n" may be a, t, c, g, other or unknown
  misc_feature (208)..(208): "n" may be a, t, c, g, other or unknown
  misc_feature (225)..(225): "n" may be a, t, c, g, other or unknown
  misc_feature (253)..(253): "n" may be a, t, c, g, other or unknown
  misc_feature (323)..(323): "n" may be a, t, c, g, other or unknown
  misc_feature (327)..(327): "n" may be a, t, c, g, other or unknown
  misc_feature (404)..(404): "n" may be a, t, c, g, other or unknown
  misc_feature (472)..(472): "n" may be a, t, c, g, other or unknown
  misc_feature (474)..(474): "n" may be a, t, c, g, other or unknown
  misc_feature (502)..(502): "n" may be a, t, c, g, other or unknown
  misc_feature (507)..(507): "n" may be a, t, c, g, other or unknown
  misc_feature (511)..(511): "n" may be a, t, c, g, other or unknown
  misc_feature (521)..(521): "n" may be a, t, c, g, other or unknown
  misc_feature (530)..(530): "n" may be a, t, c, g, other or unknown
agagagacagggtctcactttgttgcccaggctattttctggatgtctattaaaaaaaaattagtcctgcacagngttctanaaagggtttttcttttcanaatatccatattctccaagtagcaagttagaatataaggaatatttgccattaaacctttctgttanaaatgtaaacatgaaattgcctaatatagacctatctcanatgctaaatagaattgnttataacacctttggaatataattatgngagctacacttaaccatctggcattttgcttcctgcggacaatttgcaatagcatagaaaaatattttgnttgngtatttcttatcaaacagatatgctaaagttctgtttagagagtaatagcattttattctaacttttaaaataaggnagccatttgcagcagcttgatatataagtaaacaaaaatttttaatattaataaaacactagcacatncnctgaagcatctaagaaattcaaaatttnaaacncttnccagtaatgncctttgagngggaccatttggaataaaggcccttgaaaaattgga

SEQ ID NO: 6247 - DNA, 527 bp, Homo sapiens
  misc_feature (17)..(17): "n" may be a, t, c, g, other or unknown
  misc_feature (27)..(27): "n" may be a, t, c, g, other or unknown
  misc_feature (37)..(37): "n" may be a, t, c, g, other or unknown
  misc_feature (54)..(54): "n" may be a, t, c, g, other or unknown
  misc_feature (77)..(77): "n" may be a, t, c, g, other or unknown
  misc_feature (103)..(103): "n" may be a, t, c, g, other or unknown
  misc_feature (115)..(115): "n" may be a, t, c, g, other or unknown
  misc_feature (139)..(139): "n" may be a, t, c, g, other or unknown
  misc_feature (141)..(141): "n" may be a, t, c, g, other or unknown
  misc_feature (161)..(161): "n" may be a, t, c, g, other or unknown
  misc_feature (170)..(170): "n" may be a, t, c, g, other or unknown
  misc_feature (208)..(208): "n" may be a, t, c, g, other or unknown
  misc_feature (212)..(212): "n" may be a, t, c, g, other or unknown
  misc_feature (222)..(222): "n" may be a, t, c, g, other or unknown
  misc_feature (257)..(257): "n" may be a, t, c, g, other or unknown
  misc_feature (259)..(259): "n" may be a, t, c, g, other or unknown
  misc_feature (279)..(279): "n" may be a, t, c, g, other or unknown
  misc_feature (309)..(309): "n" may be a, t, c, g, other or unknown
  misc_feature (312)..(312): "n" may be a, t, c, g, other or unknown
  misc_feature (399)..(399): "n" may be a, t, c, g, other or unknown
  misc_feature (419)..(419): "n" may be a, t, c, g, other or unknown
  misc_feature (429)..(429): "n" may be a, t, c, g, other or unknown
  misc_feature (439)..(439): "n" may be a, t, c, g, other or unknown
  misc_feature (463)..(463): "n" may be a, t, c, g, other or unknown
  misc_feature (478)..(478): "n" may be a, t, c, g, other or unknown
  misc_feature (505)..(505): "n" may be a, t, c, g, other or unknown
  misc_feature (514)..(514): "n" may be a, t, c, g, other or unknown
ccaatgaaagtctattnatttgctcgnaatgagacanaacgctacaatctgttnaacactgggctggacactgcagngattaggggcaggtgtggggcagggnggggcctttgancccgaggacaaatgtccatggcananccttccaaaaaactcgtccnttaccctgnggggcaaaaatagaaatcacatgatcgccactgattcncagnggaaagggcnctgagctgggcccggcaggcaggcagcctcagcananattcaggcagtcagcatggngcggccctcccgccagcactgtcaggtcancanaggttcaagcagtcagcatggcgcggccctcctgccagcaccgtcaaggagggggatgctgctcctgcctggggcctgcctttattntgagggcccctggccccaantgggtttaanaagggacctngggcttgcccaagaaccttgaaanccctgggttggccanttttggaggcgaaaggccacaggtccntgaaccccnttgccaaggtttt

SEQ ID NO: 6248 - DNA, 548 bp, Homo sapiens
  misc_feature (458)..(458): "n" may be a, t, c, g, other or unknown
  misc_feature (468)..(468): "n" may be a, t, c, g, other or unknown
  misc_feature (496)..(496): "n" may be a, t, c, g, other or unknown
  misc_feature (499)..(499): "n" may be a, t, c, g, other or unknown
  misc_feature (521)..(521): "n" may be a, t, c, g, other or unknown
  misc_feature (539)..(539): "n" may be a, t, c, g, other or unknown
  misc_feature (545)..(545): "n" may be a, t, c, g, other or unknown
ggctaatgacttattacttgctgtttatatttattttggactatggaaatgatgctagacaaaaagcaaagttgagtgattttcttatttaagttcaaagtgggtcgtaaaacagcagagacaacttgcaatatcaacaatgcatttggcccaggaactgctaatgaacgtacagtgcagtggtggttcaagaagttttgcaaaagataccagagccttgaggatgaggagtgtagtggcaggccactggaagttgacaacaaccaattgagagcaatcattgaagcagattgatcctcttacaattacatgagaagttgctgaagaactcaacgtaagaactcaacgtcaaccattccacagttgttcagtatttgaagcaaattgaaaaggtgaaaaagctcgataagtgggtgccttaccagctgagccaaaatttaaaaaaaccccggttttgnaatggtggcntctcttaatcttcacaaccaccgaaccnttnttaatcggactgtgaagggcancaaggactagattttatntgacangca

SEQ ID NO: 6249 - DNA, 545 bp, Homo sapiens
  misc_feature (422)..(422): "n" may be a, t, c, g, other or unknown
  misc_feature (451)..(451): "n" may be a, t, c, g, other or unknown
  misc_feature (456)..(456): "n" may be a, t, c, g, other or unknown
  misc_feature (473)..(473): "n" may be a, t, c, g, other or unknown
  misc_feature (486)..(486): "n" may be a, t, c, g, other or unknown
  misc_feature (493)..(493): "n" may be a, t, c, g, other or unknown
  misc_feature (545)..(545): "n" may be a, t, c, g, other or unknown
atttctggaatggctaatttttatttaattctgtaagcctaaggtaaaaagcataggcagtaacttttactagtcaataaaaagcagttctaccaatccactggtaattaatacactaaacagagttggaaagcattttactgaaagcaaaatatttagagaaaatagacatttatacaaaattataaaatgcttgtaataagaataagtgcatttcaaggaaagcacaaacttaatttatagagccagttaaagctttaaaaaatttaagtggaaattgaaatatgcaaaaatgtataaacattctacaaaagatggtcattcttttcctgagtatactaaagctatgaaacgtaaggtgacaaaaggaaggtagaagcttgggaactctttctcaagggcattttctttctacacactgnttcccttcttcttcatattcttgcttggnaatcncatttggtggaaaggtncccaagaggctanaatgganccgccaatccttgagctaacctccgtccctgtggattattgcaatcaatttn

SEQ ID NO: 6250 - DNA, 542 bp, Homo sapiens
  misc_feature (11)..(11): "n" may be a, t, c, g, other or unknown
  misc_feature (54)..(54): "n" may be a, t, c, g, other or unknown
  misc_feature (59)..(59): "n" may be a, t, c, g, other or unknown
  misc_feature (67)..(67): "n" may be a, t, c, g, other or unknown
  misc_feature (303)..(303): "n" may be a, t, c, g, other or unknown
  misc_feature (398)..(398): "n" may be a, t, c, g, other or unknown
  misc_feature (420)..(420): "n" may be a, t, c, g, other or unknown
  misc_feature (432)..(432): "n" may be a, t, c, g, other or unknown
  misc_feature (440)..(440): "n" may be a, t, c, g, other or unknown
  misc_feature (448)..(448): "n" may be a, t, c, g, other or unknown
  misc_feature (477)..(477): "n" may be a, t, c, g, other or unknown
  misc_feature (484)..(484): "n" may be a, t, c, g, other or unknown
  misc_feature (506)..(506): "n" may be a, t, c, g, other or unknown
  misc_feature (538)..(538): "n" may be a, t, c, g, other or unknown
gccatgacatntagaagcatttattttatgcaaaaaacttaaatatgattatgngtacncataaagngcacacattacctatgctgaacaatgccaagaaacataatatattgatgcaacagttttctaaaataaacataaaaatgagcccagaccatcagacaaaagcaaaacacttatttccaaatagcacaatgctgaaaattgatagcaatcctaaaacacctccaactttccttaaaagctgccaaagtccaactattttttaaaaattgattttttttacattaataaaaatctggngacaaacattataaaaccaaatgctggacagtctttactcctttaaaattccaaatattccaacataatcacaggagtaaaaaccattttaaagngatatgctttatgaaacaaacnacaatatggacntttattgnaaattatnttaaactaaaatgggggggaatccaaatntggaccnggttacctactggcaaatcatnaatttaaattttctcacttggataaaaatcanaagg

SEQ ID NO: 6251 - DNA, 493 bp, Homo sapiens
  misc_feature (121)..(121): "n" may be a, t, c, g, other or unknown
  misc_feature (400)..(400): "n" may be a, t, c, g, other or unknown
  misc_feature (414)..(414): "n" may be a, t, c, g, other or unknown
  misc_feature (430)..(430): "n" may be a, t, c, g, other or unknown
  misc_feature (448)..(448): "n" may be a, t, c, g, other or unknown
  misc_feature (452)..(452): "n" may be a, t, c, g, other or unknown
  misc_feature (464)..(464): "n" may be a, t, c, g, other or unknown
  misc_feature (473)..(473): "n" may be a, t, c, g, other or unknown
gttacacgtctctgattttaatgagtcaatctcaaggcaaagctataaccttttccatgtgaaccttaaaacggaaatcctacgtgtttggctcagctaccatagacatgtcttgccccanagttccagtgtatttttcacctttagtttcttggctcctctccgcctctacaccagcctcatatccacacgggatgctctctgctgagtattgtcttgagttagttctccctctcatgttctggctgatgctactcatggtcatagtatcacctgacggggaaggagtatgctatgaaggtgaaaaatgctaccatagcattttgtttgtttataaaatgtcaggccctggttccatttttcccccctcttatatctaaattttgaaaccactggcctntaacaagtctgtantaggcttaagttcaangggccatttggttctttngggnctggttgggaanccaattganggaaaagtttgctaaaaaaa

SEQ ID NO: 6252 - DNA, 535 bp, Homo sapiens
  misc_feature (330)..(330): "n" may be a, t, c, g, other or unknown
  misc_feature (335)..(335): "n" may be a, t, c, g, other or unknown
  misc_feature (401)..(401): "n" may be a, t, c, g, other or unknown
  misc_feature (441)..(441): "n" may be a, t, c, g, other or unknown
  misc_feature (456)..(456): "n" may be a, t, c, g, other or unknown
  misc_feature (477)..(477): "n" may be a, t, c, g, other or unknown
  misc_feature (484)..(484): "n" may be a, t, c, g, other or unknown
  misc_feature (503)..(503): "n" may be a, t, c, g, other or unknown
  misc_feature (509)..(509): "n" may be a, t, c, g, other or unknown
  misc_feature (535)..(535): "n" may be a, t, c, g, other or unknown
gagacggagtctcactctgttgccaggctggagtgcagtggcgcgatctcggctcactgcaacctctgcctcccgggttcaagcaattctcctgcctcaccctcccgagtagctgggactacaggagtgcgccaccatgcccagctaatttttgtattttttttttttagtagagacagggtttcaccatgctggccaggatggtcttgatatcttgaccttgtgatctgcccgccttggcctcccaaagtgctgggattacaggcgtgagccaccgcgacaggcccccctcatctttatccttaactaatgaggggtgtatttgtttgntttgnttttttagatggagtctcactctgtcgcccaggctggagtgcagtggcgcaatctcggctcactgnaaccttcaccttctgggttcaagcgattcttctggcttanccttctgagtaactnggaatgcagccttcgccacangccccgntgattttggatggttaagnaaaaanggggtttaccatgttggcaggctggn

SEQ ID NO: 6253 - DNA, 503 bp, Homo sapiens
  misc_feature (423)..(423): "n" may be a, t, c, g, other or unknown
  misc_feature (430)..(430): "n" may be a, t, c, g, other or unknown
  misc_feature (435)..(435): "n" may be a, t, c, g, other or unknown
  misc_feature (464)..(464): "n" may be a, t, c, g, other or unknown
  misc_feature (477)..(477): "n" may be a, t, c, g, other or unknown
  misc_feature (483)..(483): "n" may be a, t, c, g, other or unknown
  misc_feature (491)..(491): "n" may be a, t, c, g, other or unknown
cagtagctttaggggtatgagtgattttttggttacatggatgaacggtaccatggagaagtctagaattttagtgcacccaccacctggacactatatccaataggtactttttcatctctcacctctctcctgcttgccagccttctgagtctccaatgtacattataccactctgtatgcccttgcatatccataagcttagaaaccacctgtaaatgagaacatgttggatttagattttgattccagaattacttcacttaggataatagcctccagttccatcccagttgctgcaaaagacattatttcattcttttttatggctgagtagtattctacaatatacatatgccacattttctttatctactctttggttgatgggtatttaggttgattccgtatcattacaattgngaactgngctgngaaaaatatggcttttttaaaaaatgggnttccctttcattngggaanaacctcantaggggaattca

SEQ ID NO: 6254 - DNA, 547 bp, Homo sapiens
  misc_feature (427)..(427): "n" may be a, t, c, g, other or unknown
  misc_feature (435)..(435): "n" may be a, t, c, g, other or unknown
  misc_feature (474)..(475): "n" may be a, t, c, g, other or unknown
  misc_feature (506)..(506): "n" may be a, t, c, g, other or unknown
  misc_feature (521)..(521): "n" may be a, t, c, g, other or unknown
  misc_feature (531)..(531): "n" may be a, t, c, g, other or unknown
  misc_feature (537)..(537): "n" may be a, t, c, g, other or unknown
gtgattcacagtgcactgattttatttacagatcaaaagccacttaaataatctgcagacacaagtgctgtccagggcagaagcctggggtccaaatcagccttatccctcctcatgcccacagtcagcccaatgctgtctccgttccatgggccagcacaggcaggcgccactctgctgacatgaggacctggggtagctcagacatttgactacccaagcccagaaaggagctgggtccagcccttacggggaattcctttaattcccccaggccaggtgagtgctgactcagtgatgacaacagctgtagaagtaggggtttggcttctggcccagatccacgcccttgtcctctgtcatcacctggaaggcagccacactgacgtaatcctctgccactttctggaagagctcgtccacactntggcctgncttgctggatggttcaaagagctgaactttgatatctgnnaagaagaatggcttaaggcctataccctggnaattggttaaccggncaaaaggganggctancagttaagga

SEQ ID NO: 6255 - DNA, 541 bp, Homo sapiens
  misc_feature (430)..(430): "n" may be a, t, c, g, other or unknown
  misc_feature (442)..(442): "n" may be a, t, c, g, other or unknown
  misc_feature (445)..(446): "n" may be a, t, c, g, other or unknown
  misc_feature (452)..(452): "n" may be a, t, c, g, other or unknown
  misc_feature (492)..(492): "n" may be a, t, c, g, other or unknown
  misc_feature (511)..(511): "n" may be a, t, c, g, other or unknown
  misc_feature (541)..(541): "n" may be a, t, c, g, other or unknown
gttttttgagacagaatcttgttctgttgcccaggctggagtgcagtagtgtgatcttggctcactgcaacctccacttcccgggtttcaagcaattctcctgcctcagcctcctgagtagctgggattacaggtacccaccaccatgcctggctaatttttgtattgtttgtagagaggggggtttcaccatgttggccaggctggtcttgaactcctgatctcaagtgatctgccctcctcggcctcccaaagtgctgggattacaggtgtgagccaccacaccccgccctgtctggcctttttatgtggtttaagttccttcaccatctgactggccacacacatgggcagagcttggaagggagaggcagaggcagagactcagctcatggaaagggctgggctgcctgggtctgaagcccagctntactaccagctntgnncttatnggcaggtcacaaaccttttttaacttggggttttttggcnttgacattagccaagccanttgggctggttggaagcatgaggctgaccn

SEQ ID NO: 6256 - DNA, 470 bp, Homo sapiens
  misc_feature (404)..(404): "n" may be a, t, c, g, other or unknown
  misc_feature (415)..(415): "n" may be a, t, c, g, other or unknown
  misc_feature (427)..(427): "n" may be a, t, c, g, other or unknown
  misc_feature (434)..(434): "n" may be a, t, c, g, other or unknown
  misc_feature (436)..(436): "n" may be a, t, c, g, other or unknown
  misc_feature (442)..(442): "n" may be a, t, c, g, other or unknown
  misc_feature (459)..(459): "n" may be a, t, c, g, other or unknown
ggagacagagtctagctctgtcacccaggctggaatgcaatcagtgacatgatcttggttcactgcaatcgcgccactgcactgcagcctaggggacagagagcaagactccatctcaaaaaacaaaaacaaaaacaaaaacaaaccagaattggctttgttattttcttaaccctagacagaataggtggtcaaaggaaaagggaggagagataccagataggtttgcaaatatggtaaagttcattattacccaactgctcctttgaaatctaaaagcgttcttttttctccaggctgacactggccacatccacatgaagaatgtaagcacatcaatcagtacagatgccagctgagccctgtttctcctttttaaaccaaatataaaatttgaagtcctnccacaaccatntgaatgggcctnccctttngncaaggnacttttaaaattaaacntgaaaggttgg

SEQ ID NO: 6257 - DNA, 429 bp, Homo sapiens
  misc_feature (409)..(409): "n" may be a, t, c, g, other or unknown
  misc_feature (415)..(415): "n" may be a, t, c, g, other or unknown
  misc_feature (417)..(417): "n" may be a, t, c, g, other or unknown
  misc_feature (426)..(429): "n" may be a, t, c, g, other or unknown
gtaagaaataaatttattttttaaataaatcaccccatttcaggtattctgttgtaagtaacagcaaacagactaagacaagtaggtaaatcattatgaagagaactatctagtagtatttttcaaaacattgtcctgaacatataccaaggtagatcgcattctgggccataaaacataccttaataagtttaaaataatagaaatcatacaatgtatgccctcaggccgcagtggaattaaactagaaaccgatgacagaaaaagagctgaaaaatcccaaaatatttggatagtcaacaatacatttctaaataatacataggtcaaagaacaaatatcgagagaaataaaaaagaatattttaagctaaataaaactgaaaatactacctatcaaaatctggganatgccncnaaaggtagnnnn

SEQ ID NO: 6258 - DNA, 537 bp, Homo sapiens
  misc_feature (455)..(456): "n" may be a, t, c, g, other or unknown
  misc_feature (460)..(460): "n" may be a, t, c, g, other or unknown
  misc_feature (467)..(467): "n" may be a, t, c, g, other or unknown
  misc_feature (485)..(485): "n" may be a, t, c, g, other or unknown
  misc_feature (490)..(490): "n" may be a, t, c, g, other or unknown
  misc_feature (493)..(493): "n" may be a, t, c, g, other or unknown
aaattttttcatctcaaagagttctcagtccccaccccacacgaggtaccgtgaaggggcactaaagtacattttgatgtagggggtagagcttaaaggtgctgtccaagctaagaatcaagatgatgctgtttaaaaaagaaaggcaattccttctacctccatctctggagtcagctgagggagggcagtgaactagactctccccagaggattgtcctaactcttaactttagagaaaactgtgtaaggacctgcacatatagaatcatttatttgtccaaaatagcaaaaataggcctatttcacccttaagaatttgcaaatctgatcagtcatgatcataaaaatgtgaatggattccagatgcaatccatgtgggcatgctctgtggaactagctatgcatcttcagcttgaatgaacatgaagctggtcattttcattaaaacctgnntttnaaacttnccttaattaaattccccntggancanttaaatcttttcttacaataattcctttacattaaaaggtatct

SEQ ID NO: 6259 - DNA, 532 bp, Homo sapiens
  misc_feature (436)..(436): "n" may be a, t, c, g, other or unknown
  misc_feature (438)..(438): "n" may be a, t, c, g, other or unknown
  misc_feature (446)..(446): "n" may be a, t, c, g, other or unknown
  misc_feature (463)..(463): "n" may be a, t, c, g, other or unknown
  misc_feature (482)..(482): "n" may be a, t, c, g, other or unknown
  misc_feature (520)..(520): "n" may be a, t, c, g, other or unknown
cttttctttttttctttttctttttctttttttttttgagatggagtctcgcactgttggctggatctcggctcactgcaagctcggccttccgggtttatgccattctcctgcctcagcctcctgagtagctgggactacaggcgcccaccaccacacctggctaattttttgtatttttagcagagaaggggtttcactgcattagccaggatgatctcgatctcctgacctcaagtgatccgcccgcctcggcctcccaaagtgctgggattacaggcgtgagccaccgcgcccggtcaatttctaaggctccattagggctaaggttcatgtatccatggtgaagtatagaagaactcagaatcgttccaaacataatgggcttggagtaatggagaactccaagggcaggaggtaaccattaaagaggccntnatggaaangggaaggagcaacattnccactaaaagccttggttnaagtttggctttgcccctacagattttgaaccctgagnaagtacttacct

SEQ ID NO: 6260 - DNA, 524 bp, Homo sapiens
  misc_feature (27)..(27): "n" may be a, t, c, g, other or unknown
  misc_feature (195)..(195): "n" may be a, t, c, g, other or unknown
  misc_feature (255)..(255): "n" may be a, t, c, g, other or unknown
  misc_feature (295)..(295): "n" may be a, t, c, g, other or unknown
  misc_feature (435)..(435): "n" may be a, t, c, g, other or unknown
  misc_feature (437)..(437): "n" may be a, t, c, g, other or unknown
  misc_feature (441)..(441): "n" may be a, t, c, g, other or unknown
  misc_feature (455)..(455): "n" may be a, t, c, g, other or unknown
  misc_feature (465)..(465): "n" may be a, t, c, g, other or unknown
  misc_feature (490)..(490): "n" may be a, t, c, g, other or unknown
  misc_feature (501)..(501): "n" may be a, t, c, g, other or unknown
cccagttaatttttgtattcttcctanagacggggtttcaccatgttactcaggatggtctcaaactcctgatctcagatgatccgcacgcctccacctcccaaagtgctgggattacaggcgtgagccaccatgctcggcctaggtgacttttcatggggagataacacacaggcatggtgagcagcgtggcanaggacctgtgtgcagggccctgtctcccgccggggaatccttcatctgggaaatctccgntgcgggacagggatgctgtgtcgtcaggacgcagcgtctntccagggcacccgggcctcctctgagcctctttgcgctctttggctgcgtgctttctttcccaaacagtgcagacatggaggagacagaaggtgaaaatggtttctgagcccctcaaccgcctttggggacaccaacctngnggtntttaaaaccaagcnttccttgaanccggaaaaggaggagcacccgggtnttggccccaanggaccaccctgaatcacaaagcg

SEQ ID NO: 6261 - DNA, 545 bp, Homo sapiens
  misc_feature (391)..(391): "n" may be a, t, c, g, other or unknown
  misc_feature (437)..(437): "n" may be a, t, c, g, other or unknown
  misc_feature (460)..(460): "n" may be a, t, c, g, other or unknown
  misc_feature (462)..(462): "n" may be a, t, c, g, other or unknown
  misc_feature (469)..(469): "n" may be a, t, c, g, other or unknown
  misc_feature (473)..(473): "n" may be a, t, c, g, other or unknown
  misc_feature (489)..(489): "n" may be a, t, c, g, other or unknown
  misc_feature (495)..(495): "n" may be a, t, c, g, other or unknown
ccaaactgcaaattgccccaagttttatttgtagtccatacaaaagggaaaaaaaattaaggttttctaacaccacctacttggggagatggggaagtgggactgtgccgctcaccatcagctagaacattagtggtcagcagggacttggatacataccaactgactgtcccaacaggaactcagtctcaacagtctacagagggacagtcagggtaccctggactgctggcacagcttggcacataggaaatggttaagctgaccctttcctggcctccttcccatctaaaaagaaaaaggcgccggcgacctcagctgcaggttgcttccccatccagacgaccttaaatatcgcgcacaaaaataaaagggagccaggaaaaaaatnaaaacataaaagaaattcccattctggggaaaccggaagcaaggtnaaaggggaacccgcagaatttananccagtancaanatttgttgctgaggcnaaggancaaagtaggttactggccgaacacttaacaggatcatctcctggggaagg

SEQ ID NO: 6262 - DNA, 510 bp, Homo sapiens
  misc_feature (419)..(419): "n" may be a, t, c, g, other or unknown
  misc_feature (428)..(428): "n" may be a, t, c, g, other or unknown
  misc_feature (434)..(434): "n" may be a, t, c, g, other or unknown
  misc_feature (455)..(455): "n" may be a, t, c, g, other or unknown
  misc_feature (472)..(472): "n" may be a, t, c, g, other or unknown
  misc_feature (493)..(493): "n" may be a, t, c, g, other or unknown
  misc_feature (499)..(499): "n" may be a, t, c, g, other or unknown
gattttccattttttttattctagtactacagtttacagccattagatgataaacaataaaacatcactttttagaaaatccatatccaaagccaacctcaagtacacagtaatttaagttaaatccactttttaaaaaaatttcctaataggtttggtacttaatttttctgttttacacacataactggaacttgtaaatgggcaactgccttcttatatgtggaattatagttttttcttgtcctttcccccaaaccacatatattaaatcatgggacattatatatcaaccctcacctaggctttgggttattctataaggaaaagcctttgtcagagtttggctgtctccttcctttcccattcccacaaaagatgtgtgactaagtggacaaagaactcagcactgggcctgnttaagactntggccntattctcaaaaaaattttgangggaggttcctctaaanatcttataactttgccctttngagaancatgttttaaa

SEQ ID NO: 6263 - DNA, 515 bp, Homo sapiens
  misc_feature (406)..(406): "n" may be a, t, c, g, other or unknown
  misc_feature (420)..(420): "n" may be a, t, c, g, other or unknown
  misc_feature (422)..(422): "n" may be a, t, c, g, other or unknown
  misc_feature (436)..(436): "n" may be a, t, c, g, other or unknown
  misc_feature (441)..(441): "n" may be a, t, c, g, other or unknown
  misc_feature (448)..(448): "n" may be a, t, c, g, other or unknown
  misc_feature (500)..(500): "n" may be a, t, c, g, other or unknown
  misc_feature (507)..(507): "n" may be a, t, c, g, other or unknown
gagaatgagtttcactcgacacccaggctggagtgcagtggtgcgatcttggctcactgcaacctctgcctcccaggttcaagcgattatcctgcctcagcctcctgagcagctgggactacaaatgtgcaccaccacatctggctaattttttttttttttttttttgtatttttagtagagacggggtttcaccaagttggcctggctggtctcgaacacctgacctcaattgatccacctgcctcggcctcccaaagtattataggcatgagccactgagcccggccttttttgttttttgtttttttaaaggcagggttttgctctgttgcccaggctggagtgcagtggtgtgatcacagatcactgcagccttgacctctcctggtctcaagcgatcctnccaccttagccttnanaacagctgggaccncaggngggtggnaccatgcccaggaaatttttttggatatttggaaaaggcagggtttcccaangttgccngggctggg

SEQ ID NO: 6264 - DNA, 460 bp, Homo sapiens
  misc_feature (410)..(410): "n" may be a, t, c, g, other or unknown
  misc_feature (443)..(443): "n" may be a, t, c, g, other or unknown
  misc_feature (450)..(452): "n" may be a, t, c, g, other or unknown
  misc_feature (458)..(459): "n" may be a, t, c, g, other or unknown
gagacagagtctcgctctgttgcccaggctggagtgcagtggcttgatctcggctcagcgcaagctccgccccccggattcatgccattcttctgcctcagcctcctgagtagctgggactacaggcacccaccaccacacccggctagtttttttgtatttttttagtagagacggggtttcacagtgttcaccaggatggtctcgatctcctgaccccgtgatctgcctgccttggcctccgaagtgctgggattacaggcgtgagccaccgcacctggccaagaccaatttttaaaatttaagacacttcaaagatgcaaaataatttcagaactgattcctggaaacttgtaattttaatattaaagatagttctgtttgtatctttccatggataactaaaaatnacacaaaatggaaacagaaatgcccattcttgntttaacnnnggaacnnt

SEQ ID NO: 6265 - DNA, 546 bp, Homo sapiens
  misc_feature (432)..(432): "n" may be a, t, c, g, other or unknown
  misc_feature (465)..(465): "n" may be a, t, c, g, other or unknown
  misc_feature (470)..(470): "n" may be a, t, c, g, other or unknown
  misc_feature (480)..(480): "n" may be a, t, c, g, other or unknown
  misc_feature (494)..(494): "n" may be a, t, c, g, other or unknown
  misc_feature (496)..(496): "n" may be a, t, c, g, other or unknown
  misc_feature (507)..(507): "n" may be a, t, c, g, other or unknown
gttatgatccctttaacatccaatgcatggatgtatagcatttatggtaatggtacttcaatcatgaatcaggccaggcactgtggctcacgcctgtagtcccaatactttgggaggccaaggcaagaggatcacttgagctcacgggagttcaaccagcctgggcaacaaagtgagatacccacctccacaaaaaatttaaaaaactagccaggcacagtgatgtgtgcctgcggtcccagctacttgggaggctgacgcaggagaaccgctcgagcccaggaattcaaggctgcagtgagctttgattgtgccactgcactccagcctgggagacagagcaagatcctgtctcacaaaaaaaaagaaaaaaagaaagaaaaagaaaagtagtgaatcatgcaataagttgtttaatgaacatgcccctgncagccacagacttcacaagggccagggaattgntttgnttttcccaantttgggcttggttnangaattggaacntccagacttttgttgcataatggagcaaatcaatcttcc

SEQ ID NO: 6266 - DNA, 368 bp, Homo sapiens
  misc_feature (3)..(3): "n" may be a, t, c, g, other or unknown
  misc_feature (63)..(63): "n" may be a, t, c, g, other or unknown
  misc_feature (78)..(78): "n" may be a, t, c, g, other or unknown
  misc_feature (80)..(81): "n" may be a, t, c, g, other or unknown
  misc_feature (91)..(91): "n" may be a, t, c, g, other or unknown
  misc_feature (107)..(107): "n" may be a, t, c, g, other or unknown
  misc_feature (131)..(131): "n" may be a, t, c, g, other or unknown
  misc_feature (210)..(210): "n" may be a, t, c, g, other or unknown
  misc_feature (225)..(225): "n" may be a, t, c, g, other or unknown
  misc_feature (302)..(302): "n" may be a, t, c, g, other or unknown
  misc_feature (323)..(323): "n" may be a, t, c, g, other or unknown
  misc_feature (330)..(330): "n" may be a, t, c, g, other or unknown
  misc_feature (332)..(332): "n" may be a, t, c, g, other or unknown
  misc_feature (340)..(340): "n" may be a, t, c, g, other or unknown
  misc_feature (345)..(345): "n" may be a, t, c, g, other or unknown
  misc_feature (347)..(347): "n" may be a, t, c, g, other or unknown
agntcttcctttcttcttccttcttctttcttcctcttcttccttcttttctttggcttgggncttcttcttccttantnntcttcctctnttctttcttccctctntcttctctttttcttttttctttnctttcttcctcttcttctattggttcttttttcttctttcttccttcttctcctctttcttctccttcttcctccttcnccttcttttcttctnccttctccttggtctccttcttccttattcttccttcttctccttcttcctcctccttcctcttttcttcttccttntcttcttcttccttcttcttntccttcnancttcttgnctctncntcttctctccttctcctaggg

SEQ ID NO: 6267 - DNA, 455 bp, Homo sapiens
  misc_feature (411)..(411): "n" may be a, t, c, g, other or unknown
  misc_feature (418)..(418): "n" may be a, t, c, g, other or unknown
  misc_feature (420)..(420): "n" may be a, t, c, g, other or unknown
  misc_feature (426)..(426): "n" may be a, t, c, g, other or unknown
  misc_feature (430)..(430): "n" may be a, t, c, g, other or unknown
  misc_feature (433)..(433): "n" may be a, t, c, g, other or unknown
  misc_feature (449)..(449): "n" may be a, t, c, g, other or unknown
ggagaaattgtaaacctgattctaaactgtatatagaaactcaaaagaactagaatagccaaagcaaacttcggaggaaaacaaagaaaatgttgtgtgacttataatttatgacttcaagaactccaaagcaagagaaaatgttagtcgcataaaaatctatgaatacatcaaagaaacagaaaatagagccaaaatagattaaatttaaatagtcatttgatttatttttttttacataagtgccaatgcaatctcttgagaaacagaaagtctatcccacaaatggtgctggaacacattgatatccacttggaaaaaaaaaaaaaagaactttgacacctatcttacaccatatacacaattaatttagaaagaatcgtagtcctaaaaataaaaatggaaaccatnaagcatntnaaagcnaacnggngaattagaggggaacntttttt

SEQ ID NO: 6268 - DNA, 567 bp, Homo sapiens
  misc_feature (457)..(457): "n" may be a, t, c, g, other or unknown
  misc_feature (512)..(512): "n" may be a, t, c, g, other or unknown
  misc_feature (519)..(519): "n" may be a, t, c, g, other or unknown
  misc_feature (562)..(562): "n" may be a, t, c, g, other or unknown
  misc_feature (566)..(566): "n" may be a, t, c, g, other or unknown
aacattgtcacacatcagtttattgagaaaatcatgatgctatatgttaattctcttcaagtgattacttttcattatgtcagatgagactccaaaaggccatagccatgaagttagacactttcccatattttgttcaggaacacaaaaaccaaatgcaaagaaatgtttaagagaacatgaaattggcctcttccttcccccaaccaaaggtagtcattaacagtcaggaaggacaaactgaaacatgtaaaaagcaaatatttttgctagattttattttcaaagtttcaaacctttccaattttttttttattttttaccccaaaaaaggtatcaatacttttcattccactcttgtcaactttagccaaagccttctgagctgcagtcattttgctatttttcttttcagtcttcaaatctttagtattaaacttagtgtaatcttctttgnttctacaggctcatctgataactttattttctttgatggaggatttggcaatgangcttaanggtctggaagcttaagttttaaataagcatccctaaatctttngggng

SEQ ID NO: 6269 - DNA, 566 bp, Homo sapiens
  misc_feature (511)..(511): "n" may be a, t, c, g, other or unknown
  misc_feature (528)..(528): "n" may be a, t, c, g, other or unknown
  misc_feature (542)..(542): "n" may be a, t, c, g, other or unknown
ggcacttgctcaatctctttatttagtggcacacatggaatgaatgaattagctcttacttgcggcatacttaacaagtctgatcttgcttatagaaattggatcttaatacttcattctcagaatacttcaaaacgtaagccacagtttttctttcaaggatgtgggaagcattcctcattcaaatctgattaatggttttataaagtatgtacctcatttttattagccattatcttcatgctggattctaatattctttttaatggtgatctgttcaataaactgaaccctaatttccctacctcaacaacataaaaatgatgtaaagtggatcaaagtatgtaacaagttaatattaaaaatgcttcttcatatggtctttcactaaaataatcaacgtaaaaataatgtaaaaatgtgtttttgcttgaagatttagtgaacgttcaaggaatcacaatttttgagctttacatccagagtctatactatgtgaaaatactacagngcctcatttaaaaagcnccgtgattaaattncaaatccaaatgccaaaatcaata

SEQ ID NO: 6270 - DNA, 551 bp, Homo sapiens
  misc_feature (22)..(22): "n" may be a, t, c, g, other or unknown
  misc_feature (26)..(26): "n" may be a, t, c, g, other or unknown
  misc_feature (45)..(45): "n" may be a, t, c, g, other or unknown
  misc_feature (57)..(57): "n" may be a, t, c, g, other or unknown
  misc_feature (60)..(60): "n" may be a, t, c, g, other or unknown
  misc_feature (93)..(93): "n" may be a, t, c, g, other or unknown
  misc_feature (181)..(181): "n" may be a, t, c, g, other or unknown
  misc_feature (183)..(183): "n" may be a, t, c, g, other or unknown
  misc_feature (206)..(206): "n" may be a, t, c, g, other or unknown
  misc_feature (239)..(239): "n" may be a, t, c, g, other or unknown
  misc_feature (260)..(260): "n" may be a, t, c, g, other or unknown
  misc_feature (269)..(269): "n" may be a, t, c, g, other or unknown
  misc_feature (356)..(356): "n" may be a, t, c, g, other or unknown
  misc_feature (380)..(380): "n" may be a, t, c, g, other or unknown
  misc_feature (505)..(505): "n" may be a, t, c, g, other or unknown
  misc_feature (532)..(532): "n" may be a, t, c, g, other or unknown
  misc_feature (544)..(544): "n" may be a, t, c, g, other or unknown
  misc_feature (548)..(548): "n" may be a, t, c, g, other or unknown
catctttgccttttaatataanattnggtttcatcatttctgagngtaacatatttnttntaaaaatagagctctctgcttgtctgaaacttnttagcgttcactgggaggtgaaggggaataaggctgaccgtaattctggggtgacgttgccagtttcatagtcatagataaacttctnangggctcctggatgctcacagcanggatgagttcatttcaaatccatggtactgaanaagcatgacaaagcgtttcanggccccatntgtgcctggtgtggactcctgaacgcattactgaccaaaggcaatcaatcacagcgccgaccccggcggggccgatccgagggcctnactaaaccatccaatcggtagtancgacgggcggtgtgtacaaagggcagggacttaatcaacgcaagcttatgacccgcacttactgggaattcctcgttcatggggaataattgcaatccccgatcccatccgaatggggttcaacnggttacccgggctgccggctaaggtangccaccttaccnatcnatg

SEQ ID NO: 6271 - DNA, 537 bp, Homo sapiens
  misc_feature (461)..(461): "n" may be a, t, c, g, other or unknown
  misc_feature (487)..(487): "n" may be a, t, c, g, other or unknown
  misc_feature (516)..(516): "n" may be a, t, c, g, other or unknown
  misc_feature (518)..(518): "n" may be a, t, c, g, other or unknown
  misc_feature (521)..(521): "n" may be a, t, c, g, other or unknown
  misc_feature (530)..(530): "n" may be a, t, c, g, other or unknown
  misc_feature (535)..(535): "n" may be a, t, c, g, other or unknown
aagtgttcggtttttcttttaattatttaccagataaaaaagaaaaaaatagtgattgtttctcttcacccccaacatttccgtttaccaaggtcgagttggagagaaattcattgaacaacgatttgtgctcctggcctggagcaaattcttctcctctgctctacgccacctcaggcagcagggacagggcaaagggctccaggcagaaatcctggtggctgggcagcagagtggcagtgtggcgatcgcttcttctcgccattgccagagcattcagaccctttcccgtctgtccccctaccccaagtcccccagtccctcaaaggaggcagggagtggggactgcaggaagcaggacaggtgcacgggtggcctgggcagctccccacagatctggcagaggggacaacccctgcttctattgcacatcctggctcacccccctgcccgagcagtangccacaaaatgaaacacttttcaaantcagaaagcccgtgctttgtgccagcttnangangggaagttngttgntg

SEQ ID NO: 6272 - DNA, 512 bp, Homo sapiens
  misc_feature (461)..(463): "n" may be a, t, c, g, other or unknown
  misc_feature (473)..(473): "n" may be a, t, c, g, other or unknown
  misc_feature (475)..(475): "n" may be a, t, c, g, other or unknown
  misc_feature (495)..(495): "n" may be a, t, c, g, other or unknown
  misc_feature (511)..(511): "n" may be a, t, c, g, other or unknown
aagtctgttcacgtagcctgggactgggctagcctttcagtaaccatatcagtatcacacaaagcgaaccccagtctcctctgagtcttcattcctctacccagagaatgggttttcctctcagaacaagctcaaagaccttcctgacttctgcaggggagggtgtcctccctctcgtcccctcacatggctttctatcactcccttgctcctgcaagcctgcctcatggaaccctcagaccaatctccattttgccaaggacggtggggcccacctctgcctcttggagcagaccctgcagagttgctcttggcggcctcaggccttccctgggagtctctgcactgctgacttgtgcagaatctcatctcagagcttgcaaatggccccaacaatgtgctggaatgtatatggatgggggtgggctggaaagtgctgagaacccaacattttcttaatnnntttttctttncnttgagacaagttttactttnttacccaggttggaang

SEQ ID NO: 6273 - DNA, 569 bp, Homo sapiens
  misc_feature (430)..(430): "n" may be a, t, c, g, other or unknown
  misc_feature (478)..(478): "n" may be a, t, c, g, other or unknown
  misc_feature (509)..(509): "n" may be a, t, c, g, other or unknown
  misc_feature (538)..(538): "n" may be a, t, c, g, other or unknown
  misc_feature (557)..(557): "n" may be a, t, c, g, other or unknown
  misc_feature (563)..(563): "n" may be a, t, c, g, other or unknown
  misc_feature (569)..(569): "n" may be a, t, c, g, other or unknown
caatttgccctctacacttcccaatttagaagaaactatcactagtttcttgggtatttatatttgtcactaagtcactttaatgcatcttcaaatatgtgtaaaaaatagaactcttataccaccatcaaccagacagcatatattaccaattaaataagtgcccactatttataaatagtgcatgtttagggatcaataaaaacatatccttacacgtaaggacatatcctaatcttatcataatatctccaaactgcaaaagcatgtgctgggctgttctctaccgaataccataaaactgaatattgttcaccactatggtcgatctttctaactttaaagagtacacaactgaactcaattactccaaagatatgtgaaaacacagaaaaatgacccctgttaaaagagtaaacctagcttttgntttactttccttttatataaaaaaagatgtacagggttctcttctganggccagtagtcaatttagaggggatacttcngaagctttttttggtggtggtaattgggnacctttacttcccaagggncccttntaccan

SEQ ID NO: 6274 - DNA, 566 bp, Homo sapiens
  misc_feature (535)..(535): "n" may be a, t, c, g, other or unknown
  misc_feature (550)..(550): "n" may be a, t, c, g, other or unknown
  misc_feature (554)..(554): "n" may be a, t, c, g, other or unknown
  misc_feature (565)..(566): "n" may be a, t, c, g, other or unknown
aaaccacaaatacgtttattcctctaaaaacagtataccatctttccaattttcaaaatgttattatcaattgtctgcagattactctcattaagctgatttttaaaaatctcagacagagcagagcaattcaccagcaccatcatcaagtgagctacaaatctatcttttaccagagcaaggagacacttaagatcaattcaagagaatagctttcagtgttcatagaaggggtactcacattcatttgtcacatatttcaggccctcatacaccccttttaaattgtctaactcctatcccagtttctttttatagtctaaaaacaaggaatcacccaagtaagatactccttcagagcactgctgaaaatggatcaaacgtgggagatcccccagatccctgttctcaagtgttaaaaatattttatattagcacatagaatacccttagaatatattctggtatggtctaaagaagttggggttccccttttgatgaggcttcaattcttctgagacctttcctggatagncatttggtctattgntttnacttctctggnn

SEQ ID NO: 6275 - DNA, 556 bp, Homo sapiens
  misc_feature (476)..(476): "n" may be a, t, c, g, other or unknown
  misc_feature (479)..(479): "n" may be a, t, c, g, other or unknown
  misc_feature (493)..(493): "n" may be a, t, c, g, other or unknown
  misc_feature (513)..(513): "n" may be a, t, c, g, other or unknown
cagatcaggaagttttattgctgacatgcaggaagagtccccatgtagtacaaaaatatgtctttatacaaacttttttgtgactttttccgtttctttacaataggacttctctcagaaacccgtccatcctcaggaatggtatactcggcagccttgatcttgcggaagagctcctgcgggatgctgtcgtagaaggggaactggccatacagcatggtgaagagcaccacgcccagggcccacatgtcactgggcttgccacggtacggccggccgctgagcacgtcgggactgatgtaggcagggctccctctctggtccttcagcaggtccccctcgctcaccagatgcttcccgaggcaaaaattggtgatggttatccgatgggcctcttgttgagcaccatgttccccagcttcaggctctgtgcacgatatttttctggtgcaggccttcaccacgcggaccacgtntanaagattacccaggnttccttttgctgagcctttntcttgatgactaatgcttcaggttgataaggcaacggcttttc

SEQ ID NO: 6276 - DNA, 554 bp, Homo sapiens
  misc_feature (443)..(443): "n" may be a, t, c, g, other or unknown
  misc_feature (490)..(490): "n" may be a, t, c, g, other or unknown
  misc_feature (500)..(500): "n" may be a, t, c, g, other or unknown
  misc_feature (515)..(515): "n" may be a, t, c, g, other or unknown
gagacagagtcttgccctgttgcccaggctggagtgcagtggcgcgatctccgctcactgcaagctccacctcccgggttcacgccattctcctacctcagcctctcgagtagctaggactacaggtgcccaccactacacccggctaattttttgtatgtttagtagagacggggtttcaccatgttagccaggatggtctcgatctccaggatcagtttcttgagtcttttctcttttgcctcttagtcagaatcctaagaacataaccaggaaacaaatgaggcaagcaagatcctgctataaatcaaagaactactagactcatgaaataattttaaatgcgtgttaaccatgagtgaaaactagaaattgacagccccaatttttttttaagggcagatggtactttacatcttggtcttaggcataaaactatctgnaacaaatgtctagggatcgagtcattataaaagtcacttcatgcttnaagtatttcnaaacttggagctttnaagggaattggggttcacttattagacaccagtggaatt

SEQ ID NO: 6277 - DNA, 556 bp, Homo sapiens
  misc_feature (483)..(483): "n" may be a, t, c, g, other or unknown
  misc_feature (495)..(495): "n" may be a, t, c, g, other or unknown
  misc_feature (497)..(497): "n" may be a, t, c, g, other or unknown
  misc_feature (526)..(526): "n" may be a, t, c, g, other or unknown
  misc_feature (538)..(539): "n" may be a, t, c, g, other or unknown
  misc_feature (547)..(547): "n" may be a, t, c, g, other or unknown
gaaaatggattcaatttttattaaataatgtaaaggattttcttggcactattcacattctcttgcctgagtaaaacaagccgcgtttatctgcattggtagcagagggaaagctactggagcaaacgctaagtgaatgggttcccgtgccgagggtgtcctcattcttgggctctgtcaggcctccccttgtctgcaggactggacaggccaccctccccaggccctgcccttgccgcgagcgtgtccttccatacagacaacagccttgctgggtcacctggaggagctgcgctctttgctgacacagtcgtcctgggaggtggtgtccccgtttcccaccatgctgcacgtcctcctcttcttcctgcggtgcactgtcccatcgccctcggatccagactcgcactctgagtcggagtctgacgaactggagctggaggagctggaagagtcgctggagctgtcggaagctatccctgnggacttctgaangncaacccaatcttgcaaggctggccaattnggggggctttgnnttaaaaanccttaccat

SEQ ID NO: 6278 - DNA, 556 bp, Homo sapiens
  misc_feature (470)..(470): "n" may be a, t, c, g, other or unknown
  misc_feature (482)..(482): "n" may be a, t, c, g, other or unknown
  misc_feature (507)..(507): "n" may be a, t, c, g, other or unknown
  misc_feature (527)..(527): "n" may be a, t, c, g, other or unknown
  misc_feature (556)..(556): "n" may be a, t, c, g, other or unknown
actttttgggacatataattttaatgtactgtgactctgccatctagctattattactttttatacaagatttggaaatatctctctcattcagatattttaaatgtaatagcatttgatatgatatactcgcacctaataatctggtctccactaaggacttattgtaattaaaaagttaaacaagttagctgatggacaataaatctgttttaaggagggaagagaaaacaggcccttgtaaatattagctcttaagtgccagctactttatatgcaatatcatttgaaagatctcctaccatactaaataaagaattggaggccattatccctatattataattaaaggtgggggaggggagaagatcctcacaagaattcacaaagctagatattattacccttcctctctatttctcaacagatgagaaaagtgaggccaaaagaagctaagcaatttggtcaangccatcatgcanctatgtagtggggtggatccgggtnaatctactggctcctggatncatgctttttggtctgaaccctgctggtn

SEQ ID NO: 6279 - DNA, 555 bp, Homo sapiens
  misc_feature (476)..(476): "n" may be a, t, c, g, other or unknown
  misc_feature (481)..(481): "n" may be a, t, c, g, other or unknown
  misc_feature (489)..(489): "n" may be a, t, c, g, other or unknown
  misc_feature (492)..(492): "n" may be a, t, c, g, other or unknown
  misc_feature (541)..(541): "n" may be a, t, c, g, other or unknown
aagagagagggtctcactctgtcacccaggctggaatgcagtggcagaatcacagctcactaatcctcccaccttagccccccaagtaactggcatgacaggtgtgcatcaccatggccggctaatttttttatttttatttttttagaggcatggtctcgttatgttgcccaagctggtctcggactcctggcctcaagagatcctcctgtctcagcctcccgagtagctaggattacaggatgagccactgcacctggcagaagcaccattcttatagtattgtatatttacaccctcatattttcaaagttaaaggagcaaaatgtttcccatgcagaagtagagatggaaggagtaactaccaccatggcacttagatgtgaccaaatttataataaacagagtgtgattataactaatctgcattttttaaatttacatatgaaattcaccaaaaaaaaaaaaaagggaangcaangggcaaangangggcagcaatttagataatagggctctctaatccttccagtcttggaanatccggtactctta

SEQ ID NO: 6280 - DNA, 559 bp, Homo sapiens
  misc_feature (507)..(507): "n" may be a, t, c, g, other or unknown
  misc_feature (520)..(520): "n" may be a, t, c, g, other or unknown
  misc_feature (528)..(528): "n" may be a, t, c, g, other or unknown
  misc_feature (530)..(530): "n" may be a, t, c, g, other or unknown
  misc_feature (535)..(535): "n" may be a, t, c, g, other or unknown
gtatttttagtagagatggggcttcacgatgttggccggggtggtcttgaactcctgacatctaatgatctacccactttggtctcccaaagtgctgagattacaggtgtgagtgactacccctggccagattaagttaatttcaattgttttgcagtcgcttgtactacaaagtgctataatgcagatatttgggacacggtgtttagagaacttcctgactacctggatgtgagaagtgaggtaaaaagagccatgaatgatgtccaagtttctagcttaggtagctaggtgaaatgcggagtcaatcactaagggatgaaactggtggttgggggctaggaaagatgattatgtacagatttgaacatggtgattttcatttgtggtagaggacattcaaataaagatgtctaggatgcaactagaaatatgaagttaaacctgttaagaagatctgggctggagataactgataccggacttcaccagattgaaaatggaggnccttgggaaccancatttagntntcatnggaccttgtggaataaacttttga

SEQ ID NO: 6281 - DNA, 563 bp, Homo sapiens
  misc_feature (488)..(488): "n" may be a, t, c, g, other or unknown
  misc_feature (506)..(506): "n" may be a, t, c, g, other or unknown
  misc_feature (543)..(543): "n" may be a, t, c, g, other or unknown
  misc_feature (550)..(550): "n" may be a, t, c, g, other or unknown
  misc_feature (552)..(552): "n" may be a, t, c, g, other or unknown
ggggtgttttaggtaatttttaagaacttaaaattattatttgttcctccttaatatgaaactcttccaaaataccttctgaccagtaagtaaatgttccttaggcactgtgaggtgtattaatgatgaagcatgaacccaggctgagaagtgtacaatttgattttaactactgccaaaacagttaacaagctctgtcttatccactgacagcaggaaatgtctttaccccactactcctgagattctaaaaagggaaaactaatttcacaaacaacctttaaaagaatccatagatgattctaagaacagcacatattcagggtattagaaaagatgttttcttttgtaaggcatcaatgattaaactaatagaacgcatatttactaacaaaagatggttaacattatcataaaaccatttatctttttaaacttctctaattcctgctaattttgccagcttaaattaagaaatgaatggcctnttggcctaatcaactatngggtattaaaaactaagacatctggaacttttaggcncatcaangnaccgggttatg

SEQ ID NO: 6282 - DNA, 551 bp, Homo sapiens
  misc_feature (504)..(504): "n" may be a, t, c, g, other or unknown
  misc_feature (508)..(508): "n" may be a, t, c, g, other or unknown
  misc_feature (510)..(510): "n" may be a, t, c, g, other or unknown
  misc_feature (512)..(512): "n" may be a, t, c, g, other or unknown
  misc_feature (522)..(522): "n" may be a, t, c, g, other or unknown
  misc_feature (533)..(533): "n" may be a, t, c, g, other or unknown
agagtcagagtctctgtcgcccaggctggagtgcagtggtataatcacagcccactgcagccctgaacttgtgatcctctgcttcagcccctcagttatgtcttggcacatagctaggacaacagctgtgtgccaccatgcccagctaatgttttttgtttgagacagtctcgctctgtcaaccgggctgaagtgcagtggcacaatcttggctcactgcaacctctgcctcccaggttcaagcgattctcctgcctcagcctcccgagtagctgggactacggcatgtgccactacgcccagctaatttttgtactttcaatagagatggggtttcaccatgttggttggcgagaatggtctcaatctcttcacctcacgatccgccgcctcggcctcccaaagtgctgggattacaggcatgagccaccgtgcccggctgctaatttttgaaaatatatattttagagacttttcttggggtctcggtttggtatgcaaggncagncntnaacttctggntttgaacgaancttccgctgggcttccaa

SEQ ID NO: 6283 - DNA, 560 bp, Homo sapiens
  misc_feature (462)..(462): "n" may be a, t, c, g, other or unknown
  misc_feature (480)..(480): "n" may be a, t, c, g, other or unknown
  misc_feature (486)..(486): "n" may be a, t, c, g, other or unknown
  misc_feature (526)..(526): "n" may be a, t, c, g, other or unknown
  misc_feature (558)..(558): "n" may be a, t, c, g, other or unknown
gagacggagccttgctctgttgccaggctggagtgcagtggcacaatctcggctcactacaacctccgcctcccaggttcaagggattctcccgcctcagcctcctgagtagctgggattacaggcgtgcaccaccaagcccagttaatttttgtatttttagtagacatggggtttcactgtgttggccaggatggtcttgatctcctgacttcatgatccacccacctcggcctcccaaagtcctgggattacaggcatgagccactgcgcccggcccacaataaaacatttttaaaaatcagaacttttggcataatctatttcgctttcccaggaaaaggaatgtagcagattttataacagagaagagaaagtaaagtcaagtcaagagtctaaggtatttccatattatcatcaaagttgcccgggagaaggttgggggtcaaaagcttaagattncaggttggatgacctggntttggnatccaagcacagttcctcagtacttacctgaccttaggtnggtacctaaaccttttgagccttggttccctnat

SEQ ID NO: 6284 - DNA, 580 bp, Homo sapiens
  misc_feature (279)..(279): "n" may be a, t, c, g, other or unknown
  misc_feature (317)..(317): "n" may be a, t, c, g, other or unknown
  misc_feature (341)..(341): "n" may be a, t, c, g, other or unknown
  misc_feature (449)..(449): "n" may be a, t, c, g, other or unknown
  misc_feature (534)..(534): "n" may be a, t, c, g, other or unknown
  misc_feature (559)..(559): "n" may be a, t, c, g, other or unknown
  misc_feature (562)..(562): "n" may be a, t, c, g, other or unknown
  misc_feature (568)..(568): "n" may be a, t, c, g, other or unknown
  misc_feature (571)..(571): "n" may be a, t, c, g, other or unknown
  misc_feature (579)..(579): "n" may be a, t, c, g, other or unknown
cataaaacaaaatttatctttaatttgtaagtgtcaacagcagtacaaaagatggagtgatgacaactagattagggtagagaggacagtcttgaggtaaatgagcataaataggcagttcttatagacactcccctaaggggcctgagccccatcacggcatatacattatcacccaaagatggcatgttgaacatatcaggaaagcaccttgtgcaaaaaggaaaaaaaaaaagtagctaaggtgccaacatacaccaggatagataaagacagtgngtctttcaattttgtcttttcccttaattatgaggcanaggaggggaagactttgaaaagtnccactgaaagattattcaatgttgagctttatctcacgtcaatactgcacaacaaaatccaagaagtttgtgtatgcaacaaagctaagaacaatgattcattcctgnaaatttgaagaagaatttttttatttttcccatttctttaatccttacaaactttttaatattattatcaagaggagagtgtganaaaatgtatggcacccttaagggcnttnaaaacnttncctggacng

SEQ ID NO: 6285 - DNA, 576 bp, Homo sapiens
  misc_feature (453)..(453): "n" may be a, t, c, g, other or unknown
  misc_feature (502)..(502): "n" may be a, t, c, g, other or unknown
  misc_feature (538)..(538): "n" may be a, t, c, g, other or unknown
  misc_feature (542)..(542): "n" may be a, t, c, g, other or unknown
  misc_feature (546)..(546): "n" may be a, t, c, g, other or unknown
  misc_feature (555)..(555): "n" may be a, t, c, g, other or unknown
  misc_feature (558)..(558): "n" may be a, t, c, g, other or unknown
  misc_feature (569)..(569): "n" may be a, t, c, g, other or unknown
aaaatttcagaactattgtacatcaaaggacactatcaacagagtaaaaaggcaaccaacagaatgggggaggacatttggaaatcacatatctgataagggactaatatctaatatatataaaaactaaaacacaacaacaaaaaacaacctattggatttgaatagacatttcttcaaagatatacaaacttaaatgttcattgatggataaagaaaatatgtatacatacaatgagatgttactcaaccttaaaaaggaataaaattttgatacatgctataacatggatgaaccttgcgattattatgctaactaagccagacacaaaggacaaatatcctatgattccatttctgtgaggtacctggaacagtcaaattcatagagatagaaagtaaaagtagtggttaccagaggttgggagagaggggagaagagagagtgattgntcaatgggtatagaggtttaagtttggggaagaagaaagtagttctggnaaaaggtaatgatgggtgcacaatcatgtgaatggncctnaagntactggacnttnccaattaaaangaccaaa

SEQ ID NO: 6286 - DNA, 534 bp, Homo sapiens
  misc_feature (459)..(459): "n" may be a, t, c, g, other or unknown
  misc_feature (491)..(491): "n" may be a, t, c, g, other or unknown
  misc_feature (496)..(496): "n" may be a, t, c, g, other or unknown
  misc_feature (498)..(498): "n" may be a, t, c, g, other or unknown
  misc_feature (515)..(515): "n" may be a, t, c, g, other or unknown
  misc_feature (517)..(517): "n" may be a, t, c, g, other or unknown
  misc_feature (519)..(519): "n" may be a, t, c, g, other or unknown
aaatggattgtttttattaatttacaatgaaatagtttttgaatgacttcacacaaaaacctagagataacatcacaattgcaatgttataaagtttaaaggcctattcatttcactgtcagttgaaattcgttaccaggtgaaaattctggagctgggttttgcactgaggatgctacacagccactagcctttttaatttggtcttattaacagaaatactgacttagtgaaattacaggcataggcctcttaatcgctttttatgagtctgaacttttgctttcaataccaaatagtatctgaaaaacatgctcacttttgtgcttcttgagaaattctaagaattggcccagattcatgtgatagtcattccttaatccatagtcaccatgagcctcaaggagtaactcttcaaaagaatgggaaaaggcgcaggtcctcaccatttccttctgnctccacgctttcagcatgcttacaggaaatgngcttncnattggggacctaaatgngngncaaaacttcttacag

SEQ ID NO: 6287 - DNA, 581 bp, Homo sapiens
  misc_feature (463)..(463): "n" may be a, t, c, g, other or unknown
  misc_feature (494)..(494): "n" may be a, t, c, g, other or unknown
  misc_feature (515)..(515): "n" may be a, t, c, g, other or unknown
  misc_feature (525)..(525): "n" may be a, t, c, g, other or unknown
  misc_feature (536)..(536): "n" may be a, t, c, g, other or unknown
  misc_feature (566)..(566): "n" may be a, t, c, g, other or unknown
  misc_feature (581)..(581): "n" may be a, t, c, g, other or unknown
caacgtgatcacccaactgtttaatgtttgaaatttatatttcatttctgaaggagaggagacagacccaaacttttatatctttccagttggctgtacaatttctgaaccttgtccttgtagacacctggtcaccggaaaccatcatgtctgtaaaactaccacacagtccagcctccatcctcaactgccgccctcttcctctctgcactggagccggccaggccacctcctccccaaccgtggaacaccatggtgacaggagatggccctggccagggggaggctgctgggactgcacccccatcctgaccagacctccctcctttgtcccctgcagagcctccaaggcaggtcatcctgacactgcaacccactttggtggctgtgggcaagtccttaccattgagtgcagggtgcccaccgtggagcccctggacagcctaccctttttctggtccgnggcaatgagactctggactatgagacctttnggaaaggcagcccctgttccncaggaaggcncagccccattnaacaagcacgggttacaaaaaggatggccnccggaactttttttn

SEQ ID NO: 6288 - DNA, 561 bp, Homo sapiens
  misc_feature (464)..(464): "n" may be a, t, c, g, other or unknown
  misc_feature (470)..(470): "n" may be a, t, c, g, other or unknown
  misc_feature (515)..(515): "n" may be a, t, c, g, other or unknown
  misc_feature (527)..(527): "n" may be a, t, c, g, other or unknown
  misc_feature (530)..(530): "n" may be a, t, c, g, other or unknown
  misc_feature (548)..(548): "n" may be a, t, c, g, other or unknown
  misc_feature (555)..(555): "n" may be a, t, c, g, other or unknown
gagacggagtctcgctgttgcccaggagtacagtggcgcaatctcagctcactgtaagctccgcctcccgggttcaattgattctcctgcctcagcctccagagtagctgggactacaggcgcccgccaccacgcccggctaattttttgtatttttagtagagacggggtttcaccctgttagccaagatggtctggatctcctgacgtcgtgagccgcccgcctcggcctcccaaagtgctgcgattacaggcgtgagccaccgcgtccggccaataaatggtttctaattaaaggattgtgacatttaatagccgttgcttgctcttgtcttgctcccttctctctcgaaacttgttaagaaataactcaatattctggcttgggtaaagtaaatataatgctattggatattttggtccattgaattgataagacttttcaagtaaaagttgctttttanggtagnatcttcatggccttgagaaagttgcttggctctctttggaccaanttggcactggcnttnttaccggacaaatttggngctttanaattta

SEQ ID NO: 6289 - DNA, 567 bp, Homo sapiens
  misc_feature (488)..(488): "n" may be a, t, c, g, other or unknown
  misc_feature (493)..(493): "n" may be a, t, c, g, other or unknown
  misc_feature (502)..(502): "n" may be a, t, c, g, other or unknown
  misc_feature (505)..(506): "n" may be a, t, c, g, other or unknown
  misc_feature (543)..(543): "n" may be a, t, c, g, other or unknown
  misc_feature (553)..(553): "n" may be a, t, c, g, other or unknown
gagatagactctcactctgtcgcccaggctggagcccagtggtgcgatctcgactccctgcaagctccgcctcacaggttcatgccattctcctgcctcagcatctggggtagctgggactacaggcgccagccaccatgcccagctaattttttgtatttttagtagagacagggattcaccctgttagccaggaaagtctcgatctcctgaccccgtgatctgcctgcctcggcctcccaaagtgctgggattataggcatgagcctccgtgcctggcctcatatcccttttaaaaattactatgatatatcccttttaaaaagtactaactgaaaaaagtactatctctttaaaaagtactggctcaaaaaaataatagaaaataagaaacaaaaaacaggctgagaaaagtgggctcacatctgttggccatgctggtttcaaactcctggacctcaagtgaccatgggccttgggctccgacntgctnggaatacanggnngaagcccaaaactgggcccatccttttaacataaacncttgaagggnaataaaggcttgac

SEQ ID NO: 6290 - DNA, 537 bp, Homo sapiens
  misc_feature (494)..(495): "n" may be a, t, c, g, other or unknown
  misc_feature (497)..(497): "n" may be a, t, c, g, other or unknown
  misc_feature (507)..(508): "n" may be a, t, c, g, other or unknown
  misc_feature (517)..(517): "n" may be a, t, c, g, other or unknown
  misc_feature (523)..(523): "n" may be a, t, c, g, other or unknown
gtgcatagtgtatcttttcctagggactgagaatgcagaatatattaaattaatatggcaaactgtatttttttctgtttgttttcaatacagctaaacaaatctattttgtgcattctcagtgctcgaggcattttcacagcaatcctgtattaatgcccatcgactggccttcttttggggcattgccttcttgctttgcttttctatctagtaatcggaggacaaaggacagaagctgggcagtggatgagtagattgaatgggaaatcctttaagctggccaaagaggtcactgtggcatgtgtactgaaaactctcatggtgtccgccctatcccctctcccctgtcagagaacagacccatccactgcatagaaggcgcagccctgcttgacttttttcaaagctggctggacttacatggatgtcagacctgcagtgagccagatttgctttcctgggattgaagtggaaaacctgacccaagggcnntnactgggaaannggctttcanggattnctaccttggggaat

SEQ ID NO: 6291 - DNA, 558 bp, Homo sapiens
  misc_feature (471)..(471): "n" may be a, t, c, g, other or unknown
  misc_feature (497)..(497): "n" may be a, t, c, g, other or unknown
  misc_feature (510)..(510): "n" may be a, t, c, g, other or unknown
  misc_feature (524)..(524): "n" may be a, t, c, g, other or unknown
  misc_feature (531)..(531): "n" may be a, t, c, g, other or unknown
  misc_feature (548)..(548): "n" may be a, t, c, g, other or unknown
  misc_feature (558)..(558): "n" may be a, t, c, g, other or unknown
ggtcaggatctctctccaaggttactgaattgaactataaagttcccctatggaaataatatgtcaaaaaaaaaaaaaaaataagaatagctgtctagtagcagagtgcattcagtaggtagctggaaatcaagtactttattcctctgctaggattaagtaaccattcccacctggtccacttcttgaccaattttctaaagtggagtcagtctgtctctattgctctttctctaatgtggactttaaaatcaaagtttaggttaaaagagatagattagaaaacatacatttaacacacacatacacaaacacaaagttggaaagcaagagagcttcttcagtcaagtagacccacttttggtgttcttttacaaatcaaccacacctcaactaaccaaaaattagggcaaatcagacatgtattataaaaacaatgggaaagaatattagaaatgagaactattccangaaatctagaccgatactttaataanaagccttcaaaanccataccccgattnccgaacntttggggaacagtaaancctcttaatn

SEQ ID NO: 6292 - DNA, 570 bp, Homo sapiens
  misc_feature (489)..(489): "n" may be a, t, c, g, other or unknown
  misc_feature (512)..(512): "n" may be a, t, c, g, other or unknown
  misc_feature (531)..(531): "n" may be a, t, c, g, other or unknown
  misc_feature (564)..(565): "n" may be a, t, c, g, other or unknown
  misc_feature (568)..(569): "n" may be a, t, c, g, other or unknown
gtacacagagagagggaatttcagaatttttacatacattttagcaaacaagttttgatctattggcttcttggtgcagtaatgcaacggcaatccattctggtgccaaaggctcatactattacaaggaagttgtgaacactaatttcttaggaggtgaggccagccccacatgaacttctcttgcatccctctggtccaccatgacacataaatacttagacttttttttttcctctaatgaatcattagacattaaaaacggaataacagagtcacaaagggccacatgcttttcggtataaagcattctccttctctaggttgctatcacagtgcagacctgactgcctgaatatgctcaggagatttagtcaatattgtctgtatttggttatggaaaaggctctcctttttttttttttttttaaatccaaagtgcatagtgagaacaaaccaaagcatttttttttccttctcagcatcagnttcatctgagcattttccatganaggcctgttaaatgcctgnctttggcctttcaaccttcaaaattaaaaattnnatnna

SEQ ID NO: 6293 - DNA, 586 bp, Homo sapiens
  misc_feature (493)..(493): "n" may be a, t, c, g, other or unknown
  misc_feature (516)..(516): "n" may be a, t, c, g, other or unknown
  misc_feature (562)..(562): "n" may be a, t, c, g, other or unknown
  misc_feature (564)..(565): "n" may be a, t, c, g, other or unknown
  misc_feature (569)..(569): "n" may be a, t, c, g, other or unknown
  misc_feature (583)..(583): "n" may be a, t, c, g, other or unknown
gacagggtctagctctgttgcacaggctggagtgcagtggtgcaatatcagctcactgaaacccgggtttcaagtgattctcttgtctcagcctcccaagtagctgggattacaggtgccttccacaacacccagctaatttttgtatttttagtggagacaaggtttcaccatgttggccaggctggacttgaactcctgaccttaagtgatccgcctgccttggcctcccaaagtgctgagattacaggcctcagccaccgtgcctggccctatcctttcctctgaagattccattttatttttctgaaaagccagctccctggtgctcttttccttctataatgagacctcaacaatgtaaattgagaaggtgattttcacaaaatgcattctgccttggtccttctaaaaatcgagtttttggaaactgctgtttctaacaagataacatccaacagaagctactaatttcctttcaaaccttagcttntggaaatgtaagagatattaccnggaaatgaatgggtcttggccaatggatgtaaactccgagaaactntnngggnaagtaaaagggggncaa

SEQ ID NO: 6294 - DNA, 586 bp, Homo sapiens
  misc_feature (386)..(386): "n" may be a, t, c, g, other or unknown
  misc_feature (411)..(411): "n" may be a, t, c, g, other or unknown
  misc_feature (445)..(445): "n" may be a, t, c, g, other or unknown
  misc_feature (467)..(467): "n" may be a, t, c, g, other or unknown
  misc_feature (476)..(476): "n" may be a, t, c, g, other or unknown
  misc_feature (491)..(491): "n" may be a, t, c, g, other or unknown
  misc_feature (516)..(516): "n" may be a, t, c, g, other or unknown
  misc_feature (540)..(540): "n" may be a, t, c, g, other or unknown
  misc_feature (544)..(544): "n" may be a, t, c, g, other or unknown
  misc_feature (550)..(550): "n" may be a, t, c, g, other or unknown
  misc_feature (573)..(573): "n" may be a, t, c, g, other or unknown
  misc_feature (586)..(586): "n" may be a, t, c, g, other or unknown
gcccttccaaaaactgcttgttaagtttcaggtacacaattaacctgcccaattaatttcgcagaaccttgaaataaaacatgttttacagtaagttcacacacaggcttattgcaaaccagagtaatgcacagatgattgccaagaccatattgacaaattgtgattagattataacgcatagtagcctgccttacattcagcaagttcaaacaggacacaaaaccagtcaactgaacacagagcagctctcttcagaagcacttccaatgagtgatgcagagatttcaaaaatacaaagcaggcaacttatatacagcaaatcctcacactgcctggacatgtgccacttttttggtggttttaatatatttttcctttctggntgccaatttagactgaattcttaangatttatcttggatgacttagaaaaatcccctgncctttcttactttggttcaagnaggaccagncatgaaaattgagtnaggcctcttaaaaaatggaaggtcncagatcccatgggggaaggtttangaancccttnccaggtaatggatcccgggaatnttaacaggttaan

SEQ ID NO: 6295 - DNA, 588 bp, Homo sapiens
  misc_feature (407)..(407): "n" may be a, t, c, g, other or unknown
  misc_feature (522)..(522): "n" may be a, t, c, g, other or unknown
  misc_feature (526)..(526): "n" may be a, t, c, g, other or unknown
  misc_feature (563)..(563): "n" may be a, t, c, g, other or unknown
  misc_feature (588)..(588): "n" may be a, t, c, g, other or unknown
gaagcctgtgaaattttatttatacaaaagaataaaaagttatttaaaaagaactgatttaaacttatgtttttccatttttcctgttccttgaacatgaatctactaccaactcagaaagatttaagataggtaattactaaacactctttacctccccttgcaaaaaacagaggcaagtttcccattttacttatgataaaccagattattttcagttatgaatattggcaactgcatgaaagagatgatcagatatgtcagcaggaaagtatgagctgtacaaaggcattacaaaaaaaaccccaaagaaaataagataaaaacaacaagagaaaaacaagaaaacataaaacaatataagaaaatgccagatatttacagcctccatctgaaatgtgacttgngttctactttcagcataaaacaaaaccagagaacatttcttggaagggtatcacagatgaagctggtgccagccagttttgggggagacattcattctaagaagggagaaacgcncagntagcacttgctgggattccaccattggcttcatcttnccggaagtctggtactaaaaaaggn

SEQ ID NO: 6296 - DNA, 582 bp, Homo sapiens
  misc_feature (419)..(419): "n" may be a, t, c, g, other or unknown
  misc_feature (454)..(454): "n" may be a, t, c, g, other or unknown
  misc_feature (562)..(562): "n" may be a, t, c, g, other or unknown
  misc_feature (572)..(572): "n" may be a, t, c, g, other or unknown
  misc_feature (579)..(579): "n" may be a, t, c, g, other or unknown
ggtctatcttccctactattgatagggacatgggcacagagaaatacctaattagaataggaaaacaacagtgcaagtgtcctgataaagggcaagtgacctcagctggtaagtggtaaatgatttgagtgtcagggaaactattatacattccgggtgactcttacaagtttccaaaaatcaaatccacataggacaagaattttcaccactgagaatatgcagaagaatgtaggacaattctcagagtaactcacaagaagtattcaaatatgattaatgcaatggcacattgttgaaacatacgtatttggatatataaatctcacgtgcttgttaaagttataggcacaatgtatgagcttccatttgtaatcttcaaaagagatactcatgagaggaaaggcaatcagaaaganggaggattagtaatggtataaaacttcatgaatgnactaaaacccctggactgtcactttaatgggcaaatttatggatgtacatatcttcaataaacctaattttttttaaagaaggggagattgtaacctaaaagaagtgncttggaaaanggagggnttt

SEQ ID NO: 6297 - DNA, 575 bp, Homo sapiens
  misc_feature (503)..(503): "n" may be a, t, c, g, other or unknown
  misc_feature (515)..(515): "n" may be a, t, c, g, other or unknown
  misc_feature (524)..(524): "n" may be a, t, c, g, other or unknown
  misc_feature (536)..(536): "n" may be a, t, c, g, other or unknown
  misc_feature (570)..(570): "n" may be a, t, c, g, other or unknown
gttttgttttgtttttttgccaagaataagagtccctgatcatcctgtgcactttactagtatactgcacaaaacacagcaggttctcaataaaaataatagttactaaattttactattactttttctaccagattttaatactgagtatgaacatcacatgtagtttcttttcgctttcagtcacttaaactgtatcccagactcttgtcctatcaaaaaaactcaatcatctttcattctttttttaaaaaaaggacacttttaatctttattggtaactttttcttattgtagcaaaagtgcataatattacatttaccatcttgcccattttgtattgtacagttcagtagtgctacctgtattcaccctgttgtgcaatggatctccaaaacttttacatcttgcaaaactgaaatgctggtatccattaaacaatttcccttttcccccatccctcattctctggcagccacaatcttattctggctctatgaatngctacttaaagnacctcatcnggtagaatgatncatttggatttttggggctggcttaatcacttancaaca

SEQ ID NO: 6298 - DNA, 579 bp, Homo sapiens
  misc_feature (486)..(486): "n" may be a, t, c, g, other or unknown
  misc_feature (511)..(511): "n" may be a, t, c, g, other or unknown
  misc_feature (536)..(536): "n" may be a, t, c, g, other or unknown
  misc_feature (551)..(551): "n" may be a, t, c, g, other or unknown
  misc_feature (559)..(559): "n" may be a, t, c, g, other or unknown
  misc_feature (566)..(566): "n" may be a, t, c, g, other or unknown
  misc_feature (574)..(574): "n" may be a, t, c, g, other or unknown
ccagagacaggacctcaccctgcagcccaggctggagtgcagtggcgtgattatagctcactgcagcctccaactcattggctcaagcgatcccccagtcttagcctttcgagtagctgggactactggcacatgccaccatgctcagctaatttttaaattttttttgtagagacggggtctcgttatgttgcccaaggtggtctcaaactcctggcctcaagcgatcctcctgcctcagcctcccaaagcgttgagattagaggcttgagccaccatgcccagcctattcactctttctttagaaatgtgaagtgacccctgaaaaacctggaggaagaaggaaaaggaaggatcctggataattatctaccctgtgggaagccattttaactatactgcattaagacattcattgcttctggcactttcttactggctcctaactttggttcatgtttccaaaggcatttaataattcttttnctaatttcaaaggctgtggggtttnaagaataaattatcaagcctactgncacaccaccaacctnggacttancaatggnccctgaangttgg

SEQ ID NO: 6299 - DNA, 584 bp, Homo sapiens
  misc_feature (494)..(494): "n" may be a, t, c, g, other or unknown
  misc_feature (515)..(515): "n" may be a, t, c, g, other or unknown
  misc_feature (520)..(520): "n" may be a, t, c, g, other or unknown
  misc_feature (554)..(554): "n" may be a, t, c, g, other or unknown
  misc_feature (560)..(560): "n" may be a, t, c, g, other or unknown
  misc_feature (584)..(584): "n" may be a, t, c, g, other or unknown
cctgttttgaaagtgttttaattagacaaaagcatcaggacaaaccattttaaaaacaaagtcttcaacttgggtgttgagattggcaaaaggggaagcaagggaaaagccaaggaaagataaaatattcagaagaaagtcaaagttatctgcaattacatgttagaacagattttgcaggttaaaaagatgttgcttaaatatattcataagcctgttgtaagattttcacttatgcagtttcagaaaatttagctgcttaacatatgacagaactgtattttaacaaatgacattaaaagtcaggagagctactcagttaattgataaagtagaggcaacgtgggggagccctccccacgtttattgaagatttgtggctcccccagccctgtttgcctgcatcaggctaacaacctcattcctcccatagagcctggccaaatcacaggctttctgctgtaggcactcattgagcttgctgccgccgttgncctttcctttcctttcccggntttgnggggggcctttggaaatggggaaaagtcctgggnaacctnggcccagttctgagtagggggagn

SEQ ID NO: 6300 - DNA, 571 bp, Homo sapiens
  misc_feature (479)..(479): "n" may be a, t, c, g, other or unknown
  misc_feature (505)..(505): "n" may be a, t, c, g, other or unknown
  misc_feature (533)..(533): "n" may be a, t, c, g, other or unknown
  misc_feature (542)..(542): "n" may be a, t, c, g, other or unknown
  misc_feature (556)..(556): "n" may be a, t, c, g, other or unknown
  misc_feature (559)..(559): "n" may be a, t, c, g, other or unknown
  misc_feature (567)..(567): "n" may be a, t, c, g, other or unknown
gccttgtgattcaccttactctcggccatttcctgagccacgtctgaagaaatcctgtactgccaagatatatcctcagacaaagaaatgtccattagtcactcactaaaagggtaaaaagcaatcgaaatgttttcctatctgaacccctggtgccagcacagtatacagtagacaatatatgccataatttattgcctgaactccccattgatgtgaccatgatatgtcaatggaaagtgagttcataaaaaataaattctcattctcttcaaataaatttattgagattctatgacactcccagaacgtggatatagcaaacaacactatgtaccatccatgaaaaaacttacaatccagtaggagaaaaagacaagtaaacaagcagttattgtagagcataataagaaataaatgaaaactgccatatgggcattttagttggtacagtcaatgccaaatagagagagcagtancagtttcctgaaaaagtgatggctanggtgagacctaaatgccggtaggaattnaactggggnaaatgttggaagcngcncactttanggac

SEQ ID NO: 6301 - DNA, 574 bp, Homo sapiens
  misc_feature (459)..(459): "n" may be a, t, c, g, other or unknown
  misc_feature (464)..(464): "n" may be a, t, c, g, other or unknown
  misc_feature (528)..(528): "n" may be a, t, c, g, other or unknown
  misc_feature (554)..(554): "n" may be a, t, c, g, other or unknown
  misc_feature (556)..(556): "n" may be a, t, c, g, other or unknown
  misc_feature (560)..(561): "n" may be a, t, c, g, other or unknown
  misc_feature (566)..(566): "n" may be a, t, c, g, other or unknown
gggacagagtcttgctgcgatgcccaggctgaagtgcaatggtgctatctcagcttgctgcaaccttcacctcctgggttcgggtagttcttccgcctcggcctccagagtggctgggagtgcaggtgcatgccaccacacctggctggtttttgtatttttggtagagatggagtttcaccgtgttggccgggatggtcttgaactcctgacctcaagtgatccactgacctcagcctcccaaagtgctgggattacatgtgtaagccactacgcccatcctccatcattaaactttttaatgtgaaattctatcatgtaccattaacctaacaagattttctttcctatttctgactggtgcctttccccttttcaggagcaatgaaagctactctgttagttatgttcttctgatgtgacaaaatgtcaagaagataggagaagagaatattttgntttgntgatgcttttggtcccaagtgtgaccctaaacttaagctttgtaggaactgaggtctctcatgnccctttcctttactcatgcccaactntnactnnggcanttgggctt

SEQ ID NO: 6302 - DNA, 581 bp, Homo sapiens
  misc_feature (425)..(425): "n" may be a, t, c, g, other or unknown
  misc_feature (431)..(431): "n" may be a, t, c, g, other or unknown
  misc_feature (465)..(465): "n" may be a, t, c, g, other or unknown
  misc_feature (544)..(544): "n" may be a, t, c, g, other or unknown
  misc_feature (549)..(549): "n" may be a, t, c, g, other or unknown
  misc_feature (565)..(566): "n" may be a, t, c, g, other or unknown
ctttaattatactttaagttctgggatatatgtgcagaatgtgcaggtttgttacataggtacacatgtgccatggtggtttgctgcccccatcaacccataatctacattaggtatttctcttaatgctatcacttcccttgcctctcaccccccgacaggccctggtgtgtgatgttccccccactgtgcccgtatgttctcattgttcaactcccacttatgagtgagaacatgcggtgtttggttttctgttcctgtgttagtttgctgagaataatggtttccagcttcatccatgtccctgcaaaggacatgaactcattcttttttatggctgcatagtattccatggtgtttatgtgccatattttctttatcccgtctatcattgatgggcatttgggttggttccaagtctttgntattgngaataagtgctgcaataaacatatgtatgcatgngtctttatagtagaatgatttttaaacctttggggaaaggcccttggaaaaggggacttttgggccagcaatccaagcngtganaaaagtgagccatgcnnaccctttgggaaaaa

SEQ ID NO: 6303 - DNA, 583 bp, Homo sapiens
  misc_feature (504)..(504): "n" may be a, t, c, g, other or unknown
  misc_feature (523)..(523): "n" may be a, t, c, g, other or unknown
  misc_feature (525)..(526): "n" may be a, t, c, g, other or unknown
  misc_feature (558)..(558): "n" may be a, t, c, g, other or unknown
aaattttggaatagtttcattatacttataatgagcattgcctttgagcggcatttgggtgctcatcaagtttcagattttgaagcatttaggattttggattttcagattggggatgctcaacctgcattcatttttcttaaaactacatttaaatattttagtacatcacagtttattataaaataaccttgagtatttgtctacatcccttgaggtattacaccagttttcaactaagaaatcagcaggaatagaaacactgcacacaaaacctacaaaacctcctatcaacagggaagagtgaacaagaatgtatcctgtctgcacagggacagtcggcatgaaaaatatagcaagtcaaagggctggcaagatggctgaataggaacagctctggtctgcagctcccagcaagatcaatgcagaaggtgggtgattctgcatcttcaactgagggtcctagctcatctcattaggactgggtagacagtgggtgcagancacggagggccagcagaancnngggttggccgtcgcctcatccgggaagtccangagcccgggaacttccttccctacc

SEQ ID NO: 6304 - DNA, 581 bp, Homo sapiens
  misc_feature (508)..(508): "n" may be a, t, c, g, other or unknown
  misc_feature (515)..(515): "n" may be a, t, c, g, other or unknown
  misc_feature (526)..(526): "n" may be a, t, c, g, other or unknown
  misc_feature (542)..(542): "n" may be a, t, c, g, other or unknown
  misc_feature (567)..(567): "n" may be a, t, c, g, other or unknown
  misc_feature (580)..(580): "n" may be a, t, c, g, other or unknown
gagacagagtcttgctctgtcacccaggctggagtgcagtggtgcgacttggctcactgcaacctccgcctcccgggttcaagcatttcttctgcgtcagcctcccgagtagctgggactacagatgcacgccaccaggcctagctaatttttgtattttcagtagagacagggtttcaccatattgaccaggctggtctccaactcctgacctcgtgatccgccaacctcggcctcccaaagtgctgggattacaggcgtgagccaccagacccggcccttaagtggtctttatgtgagtattaactgtataactcgaccttcctgtgttttttttaacatttttcaaaaataagatggagaaaaaaagtaggcattgaaattgcgtgagagactgcctgccatgtaagagtttagcaaaatgcctggactgcagaatgtgctcaaataacggtaacaaattactcaaaaacaaattactaaattagttatgggccctatttttcanggacttntggcttcaganttctagtaaggttttnacaactgcagaagttgtaagtgaanatttcaggatggnt

SEQ ID NO: 6305 - DNA, 474 bp, Homo sapiens
  misc_feature (50)..(50): "n" may be a, t, c, g, other or unknown
  misc_feature (254)..(254): "n" may be a, t, c, g, other or unknown
  misc_feature (266)..(266): "n" may be a, t, c, g, other or unknown
  misc_feature (283)..(283): "n" may be a, t, c, g, other or unknown
  misc_feature (330)..(330): "n" may be a, t, c, g, other or unknown
  misc_feature (345)..(345): "n" may be a, t, c, g, other or unknown
  misc_feature (397)..(397): "n" may be a, t, c, g, other or unknown
  misc_feature (416)..(416): "n" may be a, t, c, g, other or unknown
  misc_feature (439)..(439): "n" may be a, t, c, g, other or unknown
  misc_feature (451)..(451): "n" may be a, t, c, g, other or unknown
  misc_feature (456)..(456): "n" may be a, t, c, g, other or unknown
  misc_feature (462)..(462): "n" may be a, t, c, g, other or unknown
  misc_feature (464)..(464): "n" may be a, t, c, g, other or unknown
attatactttaaagttctaggggtacatggtgcacaacatgcaggtttgntaccgtatgtatacatgtgccatgttggtgtgctgcacccgttaactcgtcatttacattaggtatatctcctaatgctatccctcccctctccccccaccccacgacaggccccagtgtgtgatgttccccaccctgtgtcctggtgttctcattgttcagttcccacctatgagtgagaacatgcagtgtttggttttctgnccttgtgatagntttctcagaatgatggnttccagcttcatccatgtccctacaaaagacatgaactcatcctttnttttggctgcatagnattccatggtgtatatgtgccacattttcttaatccagtcgatcattgattngggttggttccaagtcttngctatcgaaaatagtgcttgcantcaatggaccgngggcntgtggntnttcatggggc

SEQ ID NO: 6306 - DNA, 565 bp, Homo sapiens
  misc_feature (503)..(503): "n" may be a, t, c, g, other or unknown
  misc_feature (527)..(527): "n" may be a, t, c, g, other or unknown
  misc_feature (559)..(559): "n" may be a, t, c, g, other or unknown
aacaaaatttttatttaataaatggttaaaatcgcagtgccaaaaatacattgacatttagcaatttcactgaaaggaagaaactacagaatgcacggtttcagaaagctattttaagttatttacaaataaagtatctaaaactcaaaaacaggctctgtatgctatatctagtttatcccttcccgaacaaaatttctgttatttgggcaaattcttaaaccatggtttaaaccgtaatggttacaaaccacaaacacatccatccagagactgaaaccgtttctatccggtcagtggcaaaactgttgaaagggcaatagttgaagctgttgggttttatatagtgtgaactctgataaatattcctaccaggactaaaacacagcacgctttgcgggcatggctgactcacaaaggttgtaacaaacaagaactactcttcactcgacaccatggctcaaaggccaccgagaagcacgagtgactgacagcttctctgnttacaaacgaatggaaccccaagnggatggcggtttacagggctggaaggggttanggcttc

SEQ ID NO: 6307 - DNA, 583 bp, Homo sapiens
  misc_feature (494)..(494): "n" may be a, t, c, g, other or unknown
  misc_feature (518)..(518): "n" may be a, t, c, g, other or unknown
  misc_feature (543)..(543): "n" may be a, t, c, g, other or unknown
  misc_feature (545)..(545): "n" may be a, t, c, g, other or unknown
  misc_feature (561)..(561): "n" may be a, t, c, g, other or unknown
  misc_feature (581)..(581): "n" may be a, t, c, g, other or unknown
agctaatgagaaatgccacacagtgtcttcaatattgtttacaactgcaaattgccttcatgaaaataatttaattgctcctgagaggcctgatagatgtccctgaattctgtccagccatgccatgactgacagaacagagaaaccaggaaaaggtcacacacggtttgagaaaccatcaaaatgtggtgtccatctcctggccaagacaggaatttacagcaccattgtggtgttcaaaaactgtcagaaaccttaggaattgtcacagttaccacaactacacattccagcaaagaggaatggaagacagaggcaacatgaaccaggagggtagaaggtctgtcccccagcactgaagcaggcacaaaggcataacgtgaaacactcatggagaataaacaaacagtttaaattgcacaattaaactataaaattcaacactgactgcaaactggcttttaaaatgtgtagacctatcaccctactatggnttatctcttttaccaaaaatctgncaggttcaactattttggtacatangnatttcttccctttggnaggcagacttaactattttnta

SEQ ID NO: 6308 - DNA, 576 bp, Homo sapiens
  misc_feature (508)..(508): "n" may be a, t, c, g, other or unknown
  misc_feature (556)..(556): "n" may be a, t, c, g, other or unknown
gatggagtcttgctgtgtcacccaggctggaatgcagtggcacaatctctgcccactgcaacctctccctcctgggttcaagcaattctcctgcctcagcctccctagtatctaggattacaggtgcccaccacccgcccggctaatttttttttttatttttagtagagatagggtttcgccatgttggccaggctggtcttaaactcctgacctcaagtggtccaaacacctcggcctcccaaagtgctgggatttcaggtgtgagccaccacacctgacctcatttacctatttggtaacaataagaaaatagctacccccaaattagtgccgtattgacagtaagttatgtgcaaataatattctttaaaagattaagatgtgaatgtgcttacatacaataggagaggtcatccacgattactcaatgtatactttaagttggaaaatcacaatactgatgaaataattccatgatatagattatcatttttacattcatggnaaaaattaagaacaggtcaagaagcttaaagctaatgagcttaccttntccttaaccaaaaagaaaaa

SEQ ID NO: 6309 - DNA, 591 bp, Homo sapiens
  misc_feature (491)..(491): "n" may be a, t, c, g, other or unknown
  misc_feature (513)..(513): "n" may be a, t, c, g, other or unknown
  misc_feature (532)..(532): "n" may be a, t, c, g, other or unknown
  misc_feature (542)..(542): "n" may be a, t, c, g, other or unknown
  misc_feature (544)..(544): "n" may be a, t, c, g, other or unknown
gttgttgttgtcaaaaatcaatattgctgaaacccaaaaagggacttgtgttcaaccattggtttcctcaatgagggatcggtcagtcttattggcaagactctttttccagctagtacaagatgctagctcttttcctagctgacaattgacagtatctataaaccttccaggccatttaactctcaatgagtaatgctatgtaacaaatggtttatcatacatgtttccatacaatgaatttcaataattaaaatgtaaaatgaatatttggaatgcgactttgcataatgcgtgcacactgactcaaaattacaccgaacaactaaaacagatttattgttctacggtgatttacttggtcatgtcagattagtaatatggatctgtttaaaaacacaaaaattaagacaagcaggataaattaatcaacttacaatatggtctcatactgcaatcaaatccggcaaataacagtagaaaatcttggntcacagaatctctttaaactgnttttatgcataaattaaanccttaagggnanatggattaccgtccaacagaactactggagcttaaagggtaatggat

SEQ ID NO: 6310 - DNA, 592 bp, Homo sapiens
  misc_feature (496)..(496): "n" may be a, t, c, g, other or unknown
  misc_feature (546)..(546): "n" may be a, t, c, g, other or unknown
  misc_feature (551)..(551): "n" may be a, t, c, g, other or unknown
  misc_feature (555)..(555): "n" may be a, t, c, g, other or unknown
  misc_feature (563)..(563): "n" may be a, t, c, g, other or unknown
  misc_feature (592)..(592): "n" may be a, t, c, g, other or unknown
gttagtcacatatttacataagatatcatagtcatggtagactaatgagaggagaagcattttggttatgtcatttcgggataattttatcagttgtgagagtttaacaataaagaacataaaacttgctgtttcataaaaatatgaaattttcctggagaaattttgacttaataaaggaacaaagaactcagtttgtagtgaataaaattttacattcacttccccactttctcatagaagatctacagttggggataaccgataagaggcaattggtttctggcttaagagcctttttcattaggaattttcggtaaattaaagtctgaaattagaaaaacattagacattaatcaacagaccaacaccagtcacgtaaataaatggcattcgtataatttggcagctgaaattcttaaataatctggcaggtacaaggagagaaagaggaaaaatgaaccgttcatcattctcactgcggtctcaccgtttnccttcacaccccattacagcgaatggaagagaaaggaccatcgtaaaatntaagncggncctaaatncggcacttagcttccaaaccttcctgggn

SEQ ID NO: 6311 - DNA, 589 bp, Homo sapiens
  misc_feature (506)..(506): "n" may be a, t, c, g, other or unknown
  misc_feature (508)..(508): "n" may be a, t, c, g, other or unknown
  misc_feature (513)..(513): "n" may be a, t, c, g, other or unknown
  misc_feature (547)..(547): "n" may be a, t, c, g, other or unknown
atttctgttgccatgttttttccagggcttccccgccccgttctcagagctcgcagtggatgcagtcactacaccactcccgggcttgtaacccatcacagcctggactcctttggtcaaagccctcacattctcttgatggaaaaaagttttgtcaacgatattttcaatctgctttgcttttttatttctgcctagctgcatttttatttcatcactgttcattttgttctctaggagtcgctggtgttgatgctgaaaagttacaggatctcttccaggaggaggatggcagtacagcagcttaccactgacatagtccttcaggatgtagcgcgcagatcgaggctggtctggctgtccatgcgctgtcatgaatcctcgcatgtctgtggagagaaaagaattttgcaaaatcttagatgacagaatatcacaacaaagacaactgaggtgatgtagcttctattactaagcattcttactcttggattttaaaaaattangnatcantggagaatatatattggttaacattaaaaccctngataatccaggagaatattacctatatctggaatcctaaaag

SEQ ID NO: 6312 - DNA, 581 bp, Homo sapiens
  misc_feature (493)..(493): "n" may be a, t, c, g, other or unknown
  misc_feature (525)..(525): "n" may be a, t, c, g, other or unknown
  misc_feature (537)..(537): "n" may be a, t, c, g, other or unknown
  misc_feature (544)..(544): "n" may be a, t, c, g, other or unknown
  misc_feature (550)..(550): "n" may be a, t, c, g, other or unknown
  misc_feature (562)..(562): "n" may be a, t, c, g, other or unknown
ccgattgtcacttctgtttattgagttacaagttgagatgtgcaggttcggtggcgccagcccccccatcccccccccttgggcaaaaatagctcccagcgccgaggaatggggggtaggaagggtctcggataacgggatggggcctcgagggtccctgtggggctcgtgggtcccaggatcaagcacggctgacacggaagacagcggggtggggggcctgccttggccgtggcgttggggggaaggtgagggagagcttctgtacaaggtcatcttccgtgagggtcccggctgcggccccaaaacgccgatgggccccgcgggacggaagcggagagcggaatgtccgctgggctccctcggatgccacgccccgccaggcagcctgggggcgtctcctgacctggccccgcccaccggagcgaacggcccgccaagtggtcttgcgcttgaaacctgcgcaagctcgggcctcttcttgttgcggttngcttaccaaccgatgccccgccggccaacggntacttttgcttntgaagcnccggantggcttccgtanaacctttggccaggcttcg

SEQ ID NO: 6313 - DNA, 555 bp, Homo sapiens
  misc_feature (160)..(160): "n" may be a, t, c, g, other or unknown
  misc_feature (462)..(462): "n" may be a, t, c, g, other or unknown
  misc_feature (467)..(467): "n" may be a, t, c, g, other or unknown
  misc_feature (514)..(514): "n" may be a, t, c, g, other or unknown
  misc_feature (517)..(517): "n" may be a, t, c, g, other or unknown
  misc_feature (536)..(536): "n" may be a, t, c, g, other or unknown
  misc_feature (542)..(542): "n" may be a, t, c, g, other or unknown
  misc_feature (548)..(548): "n" may be a, t, c, g, other or unknown
cacatttagctgtttttaatgcttaaaagctctgtacaaaaaaaaaaaaaaaaatcacaaatgaatcctcacaacacccccgtgaggtaggtaggcaagtattattctcccattttacagatggggaaactgaggcagagaggtgatgtgatcagccagnggtcccaacacagctgaaagtcagagccaaccatgagaacacaaaggatccctccccattcagtcccatctctgactccgcatctagaccttgtctgcaaagaaattaaaacgtcttaattcatgcaaaaataaaaacaataaacctgaaaaggtagtgaacagacacacagtagttctgcaaaagaattcagccaagggggtcaaatattttccaatactggataaatgggaacaacttcggcctcctccccttttcaaatatcatgaccaatgacacatccttttttttttttcctgcanaagtncacgagcctaccaaagacaggttttctggtcccagggagccaaccanggnggacagcttcttaatggtnactccngggttnagaaggc

SEQ ID NO: 6314 - DNA, 588 bp, Homo sapiens
  misc_feature (525)..(525): "n" may be a, t, c, g, other or unknown
  misc_feature (574)..(574): "n" may be a, t, c, g, other or unknown
  misc_feature (587)..(587): "n" may be a, t, c, g, other or unknown
agacaaagtctcactctgtcacccaggctgaagtgcagtggcatgatcttggttctgcaacctccacctcccaggctcaagtgattctcctgccttagcctcctgagtagctgggactacaggtgtgggccaccatgcccagctaatttttgtatttttagtagagacggggtttcgccatgttgcccaggctggtctcaaactcctgacctcaggtgatctgcctgcgtcagtttcccaaagtgctgggattacaggcgtgagccaccgtacccggccaagatgtttaaattacacatttgcataaagagtaattggattgcaaagctgaatgccttcaaatataacatattttactgttatgcaaaagttaccatgttattcctaagtgataagccagaggaaaggaaggtgtttcttccttctggcaaaaatatcccatagttaagtccaggaacaaatggctgaaaacagaaggcaatgaccatggacaccttttggatcctaatacctttagtaaagacncagttaaacagtccacctgggaactcttaagcacaatggcaacaactgnagggcacaaggcnc

SEQ ID NO: 6315 - DNA, 587 bp, Homo sapiens
  misc_feature (549)..(549): "n" may be a, t, c, g, other or unknown
  misc_feature (575)..(575): "n" may be a, t, c, g, other or unknown
  misc_feature (587)..(587): "n" may be a, t, c, g, other or unknown
gagatggagtcttgctctgttgcccaggctggagtgtaatggctcaatctcggctcactgcaacctctacctcctgggctcaagcgattcccccgcctcagcctcccgagtagctgggactacaggtgcctgccactgtgcccagctaaattttgtatttttagtagagatggggtttcaacatcttggccaggctggtctcaaacttctgacctcgtgatccacctgcctcggcctcccaaagtgccgggaccacaggcgtgagccaccgtgcccggccaacacagacctctttaaaaccaaattctctaccagcttcctacaaaatttgtatggcatcaatgggtacacatactaccatctgatcactcatatccaactgaaataggcattctgatcacgaaatttttttggtgtagtcattgactatatttatgaattcatacatgatcattcttcaactaagtatgaactaactcctggattcttggtctagttagggcttaagaaattatttccttctaaatccaagggactgctaatcagtanaacctttgtggaaactaacttccaanatgccggggggn

SEQ ID NO: 6316 - DNA, 578 bp, Homo sapiens
  misc_feature (447)..(447): "n" may be a, t, c, g, other or unknown
  misc_feature (510)..(510): "n" may be a, t, c, g, other or unknown
  misc_feature (516)..(516): "n" may be a, t, c, g, other or unknown
  misc_feature (529)..(529): "n" may be a, t, c, g, other or unknown
  misc_feature (543)..(543): "n" may be a, t, c, g, other or unknown
  misc_feature (553)..(554): "n" may be a, t, c, g, other or unknown
  misc_feature (556)..(556): "n" may be a, t, c, g, other or unknown
ctttttattaagatctgagataggaacggtcatacttagtactgaaaggcagacaataaaatgggccatgaaaggggggggaaaggtactgtctattgttcgagggattcaaccagagataaaacctatatacaagcatgtgtgtagctcgaaataaaaataaaaggactatttcatgtcatgactgcttgttggcttcctcttcatatgcattccctgtgccattctgtacataggatgaaccagaaccaaggccatacaaatgaccacaatatttggcatcatcaatatgatcttcaaagaacatttctctcattttgaaaaaggccattcctgtgagcaatgaatcagatcctgcctgatgttgtggtcctatccgttccagctctaactgttctgccacctcctgtaatccacctttgagatttttgcagctcttcatgaggnacttcacatcataaatgacaggaaaaaacaatcgaaggatctcaaagaagcaagtcttcttangcaagntaaaattgggtangaatttgattaagnacccaagtcnnanccgttttaaaggccaccctttg

SEQ ID NO: 6317 - DNA, 551 bp, Homo sapiens
  misc_feature (399)..(399): "n" may be a, t, c, g, other or unknown
  misc_feature (402)..(402): "n" may be a, t, c, g, other or unknown
  misc_feature (479)..(479): "n" may be a, t, c, g, other or unknown
  misc_feature (504)..(504): "n" may be a, t, c, g, other or unknown
  misc_feature (506)..(506): "n" may be a, t, c, g, other or unknown
  misc_feature (509)..(509): "n" may be a, t, c, g, other or unknown
  misc_feature (515)..(515): "n" may be a, t, c, g, other or unknown
  misc_feature (528)..(528): "n" may be a, t, c, g, other or unknown
  misc_feature (539)..(539): "n" may be a, t, c, g, other or unknown
aacagtaagaataccactatttatttagcatttactatgtaccaggcacagggctaagagctttacatgaaataatcatttaaccctcattcgatcatttaatatctaataaggtagctagatatagacaaggaaatgtgttagtaacttgcccaagatcacaggtggtgaaggtagtattcaaaacttcagacctcaagttcttaatgactacagtagatagaaacatgggaaagtacttacaatactttgatttgaaaaagaagaatataaaatatatactaggtacagccctataaaaatatgtgtgtgtgggcaaggacagaagatgagctatacaaatgaacacagatgttatagtggtgtgggatggttatgagtgaaacagttctctaatgntgntaatatattttaagaaaaaatttttagaagtcatgaattcacaaataactcttctaccattactattattattctgntttcaaccattggacaccaaggtgngnggngggttncataacttccggngacacagttantgggctccttta

SEQ ID NO: 6318 - DNA, 534 bp, Homo sapiens
  misc_feature (448)..(448): "n" may be a, t, c, g, other or unknown
  misc_feature (450)..(450): "n" may be a, t, c, g, other or unknown
  misc_feature (491)..(491): "n" may be a, t, c, g, other or unknown
  misc_feature (495)..(495): "n" may be a, t, c, g, other or unknown
  misc_feature (503)..(503): "n" may be a, t, c, g, other or unknown
  misc_feature (517)..(517): "n" may be a, t, c, g, other or unknown
  misc_feature (531)..(531): "n" may be a, t, c, g, other or unknown
aacttacaaacaaaaataccgtaataataaacccaaacaaagaccctcagcttgctgccacgttctctatgcggtttggcggggcgggtatttacaagcctacagctgggactgaaaccccgcacgcagccgccggagtttccaaactgcgatcccttctcacccaaagaaacaaggggagtatgatccatgatcaacaacatgctaaagttaaacaagaaaatggtacaaaatagaaattattaccatacatgtccagcatgcaggattaatatttttaatgcagattttttgtatttttctatataatcgagcaggcaataaaactgatgagatttgggcgccgagcgtcctaactgaggcctgtgtctcagggctgagagccagtgttctccgaactctgacagacaggtccgtctgtccttccttctttcgctcaagctcgctntngcctgccgggacgccagaagtccctcttcttttcctcgtgntctntttctggngcggctacttttcnggcagcaaaacaantgg

SEQ ID NO: 6319 - DNA, 512 bp, Homo sapiens
  misc_feature (3)..(3): "n" may be a, t, c, g, other or unknown
  misc_feature (37)..(37): "n" may be a, t, c, g, other or unknown
  misc_feature (45)..(45): "n" may be a, t, c, g, other or unknown
  misc_feature (148)..(148): "n" may be a, t, c, g, other or unknown
  misc_feature (172)..(172): "n" may be a, t, c, g, other or unknown
  misc_feature (204)..(204): "n" may be a, t, c, g, other or unknown
  misc_feature (251)..(251): "n" may be a, t, c, g, other or unknown
  misc_feature (266)..(266): "n" may be a, t, c, g, other or unknown
  misc_feature (278)..(278): "n" may be a, t, c, g, other or unknown
  misc_feature (292)..(292): "n" may be a, t, c, g, other or unknown
  misc_feature (318)..(318): "n" may be a, t, c, g, other or unknown
  misc_feature (341)..(341): "n" may be a, t, c, g, other or unknown
  misc_feature (377)..(378): "n" may be a, t, c, g, other or unknown
  misc_feature (425)..(425): "n" may be a, t, c, g, other or unknown
  misc_feature (451)..(451): "n" may be a, t, c, g, other or unknown
  misc_feature (459)..(460): "n" may be a, t, c, g, other or unknown
  misc_feature (468)..(468): "n" may be a, t, c, g, other or unknown
  misc_feature (484)..(485): "n" may be a, t, c, g, other or unknown
ganacgtctgtttctgtcacccaggctggagtgcagnggcgcagnggcgtgatctcggctcactgcaacctccacctcccgagttcaagcaattcccctccctcagtctcccaagtagctgggattacagtcgcgcgccaccacaccnggctaattttttttttttaagtanagacagggtttcaccacgctggccaggctggngaaaactcccaacctcaggggatccacccacctcagcctcccaaagngttgggattacaggngtgagccactgngcccggcccctagnaagtttttttttttttaaagttttgngaaacactaacagggtttgaaanagggcattttccaaaacaaattactatattatatgnnggaatcattaacttttcatatgataaaagggggatgaaatcactaangacttaatagaaaggttaattgggcngaatccgnntaaaatanggggtaaaccccactnnggcactggctggggtaccttgggccca

SEQ ID NO: 6320 - DNA, 530 bp, Homo sapiens
  misc_feature (50)..(50): "n" may be a, t, c, g, other or unknown
  misc_feature (71)..(71): "n" may be a, t, c, g, other or unknown
  misc_feature (137)..(137): "n" may be a, t, c, g, other or unknown
  misc_feature (307)..(307): "n" may be a, t, c, g, other or unknown
  misc_feature (313)..(313): "n" may be a, t, c, g, other or unknown
  misc_feature (317)..(317): "n" may be a, t, c, g, other or unknown
  misc_feature (340)..(340): "n" may be a, t, c, g, other or unknown
  misc_feature (427)..(427): "n" may be a, t, c, g, other or unknown
  misc_feature (447)..(447): "n" may be a, t, c, g, other or unknown
  misc_feature (451)..(451): "n" may be a, t, c, g, other or unknown
  misc_feature (453)..(453): "n" may be a, t, c, g, other or unknown
  misc_feature (502)..(502): "n" may be a, t, c, g, other or unknown
  misc_feature (508)..(508): "n" may be a, t, c, g, other or unknown
  misc_feature (526)..(526): "n" may be a, t, c, g, other or unknown
  misc_feature (529)..(529): "n" may be a, t, c, g, other or unknown
ggcgtgcagggccaactttaatacgggccggcctgtctgggggtcgaggnggccgctccctttgtccttgnggctttccacgggcaggggcggtcccagcgagatcgtctcataaccaaaccagccctgtgcacganaagtcacgccatgccccacagcctccagtcctggctgctggtggctcggggacccgcagggcaggagggtcccgggtctcgcagttccatgagccccagccgcggggacccccatggacaaacttccggggctgcacctgccggagcagcgtctcccaagcatcggaggncctttntcancagggctgagccctagtggacanagccgtgagtggcaaggcgggagtcagggctctcggagtcgtcaattcagcaagaaagcccctggcccgcaccttcaaactggaagngggtggctagggtgccggangcanangcccaaaaagggttaagcacaatcctggctcctggggatcccccaacancagggnaacttaagtgcccccggnaanc

SEQ ID NO: 6321 - DNA, 516 bp, Homo sapiens
  misc_feature (2)..(2): "n" may be a, t, c, g, other or unknown
  misc_feature (208)..(208): "n" may be a, t, c, g, other or unknown
  misc_feature (457)..(457): "n" may be a, t, c, g, other or unknown
  misc_feature (471)..(471): "n" may be a, t, c, g, other or unknown
  misc_feature (493)..(493): "n" may be a, t, c, g, other or unknown
  misc_feature (501)..(501): "n" may be a, t, c, g, other or unknown
  misc_feature (505)..(505): "n" may be a, t, c, g, other or unknown
  misc_feature (508)..(509): "n" may be a, t, c, g, other or unknown
gntttctttgagatagggttttgctctgtcacccaggctggagtgcagtggcccacaatcacagctcactgcaaccttgaacccctgggatcaaacaattctcttgcctcaggcttagagtagttaggactacaggtgcacatcaccatacctggcaatttttttttttttttaattatttttgtagaaagcagagtctcgctacggngcccaggacaatttcaaattcctggcctcaagcaatcctcctgtcttggtctaaacatgttgagattacaggcttgagccaccatgcccagcctgaaaaacttttaagacaagacattaggaattctaaagttttaaaaagttgcaaattataaaacaatagcaaaagcaaaaaattatactaacagctggcatatatgattttatctgctaatttactttgggacaatggcagggttaaaagcttgcntagaactccaatcngctcctttagcactggtagggnggaatgtngccntgnnaaaattc

SEQ ID NO: 6322 - DNA, 598 bp, Homo sapiens
  misc_feature (505)..(505): "n" may be a, t, c, g, other or unknown
  misc_feature (560)..(560): "n" may be a, t, c, g, other or unknown
  misc_feature (578)..(578): "n" may be a, t, c, g, other or unknown
  misc_feature (593)..(593): "n" may be a, t, c, g, other or unknown
gagcaataaagctgtttatttcaccagggtgcaggcggactgagtccaaaaagagagtcagagaagggagataggggtggggctgttttacaggatttgggtgggtagtggaaaattacagtcaaagggggttgttctcttgcgggtaggggtgggggtcccaaggtgctcagtgggggaggttctgagccaggagaaggaatttcacaaggttaatcgctcagttaaggtggggcagaaacaaatcacaatggcgcaatgtcatcagttaaggcaggaaccggccgtttccacttcttttgtgattcttcacttgcttcaggccatctggatgtatacatgcaggtcacaggggattatgatggtttagcttgggctcagaggcctgacaataagcatgtagttaaggctgtagttctattaatgccatatttggtgtacttcgcaattcataaaaataggttttcaataaatttgaacatacatactcacttgaaaaaagatncttgtaaaaatggctataaaatatgggtaatggtggggtaatatgggatcctganataattcatacctatgancccatttggttctangttta

SEQ ID NO: 6323 - DNA, 594 bp, Homo sapiens
  misc_feature (503)..(503): "n" may be a, t, c, g, other or unknown
  misc_feature (522)..(522): "n" may be a, t, c, g, other or unknown
  misc_feature (529)..(529): "n" may be a, t, c, g, other or unknown
  misc_feature (555)..(555): "n" may be a, t, c, g, other or unknown
  misc_feature (572)..(572): "n" may be a, t, c, g, other or unknown
  misc_feature (587)..(587): "n" may be a, t, c, g, other or unknown
  misc_feature (591)..(591): "n" may be a, t, c, g, other or unknown
aattgccagggaccactggatgattggagtgaactccaaagtcaaacacctatgtctccaaatcaactttcaaatggaacctcgtggaggcctggcccacacacctccaggccgtttccccagggtgcctggtttatgacagggattgatatgaggcagggctgccaggtgtctggtctgggagaggcccacctcaccccacttctcatagtaactttagggaaattgaaaggaaacatatcaaagaccagctcctcatttgttgaggtttaggattaaataaaacaaaacaaaaaacagtagcaaaaagcattggtactatctaggtacacatctcctctcaaaagatgagaatatacaggtgtgtggtagataaagctcagtttccagccagccagggtgagctcttgatggctttgcaatttgtgcaaagttctggaagttccatactcctctggctgccgggataattccaggttttactggcctctggttttgcgaantggtttggtgcatacttgngctcatnattcttcttctcctcttctctctttnttttttttttaattcanggaaagggaacggcntttnttt

SEQ ID NO: 6324 - DNA, 566 bp, Homo sapiens
  misc_feature (412)..(412): "n" may be a, t, c, g, other or unknown
  misc_feature (450)..(450): "n" may be a, t, c, g, other or unknown
  misc_feature (477)..(477): "n" may be a, t, c, g, other or unknown
  misc_feature (517)..(517): "n" may be a, t, c, g, other or unknown
  misc_feature (520)..(520): "n" may be a, t, c, g, other or unknown
  misc_feature (529)..(529): "n" may be a, t, c, g, other or unknown
  misc_feature (537)..(537): "n" may be a, t, c, g, other or unknown
  misc_feature (549)..(549): "n" may be a, t, c, g, other or unknown
  misc_feature (564)..(564): "n" may be a, t, c, g, other or unknown
ggtgggggcacatatttcctcaggaaggagcagataagttcctccttaggcttgtgaatactttcttgtcacctggccaaatggaattccaacgatattgtgaagaggcagtgccacttcacagcagacactcacaacaagccacagtcatggggtggtcaaaactcccaatctccattttcatgcaaagctgaatgggcagctcagacctttaaaaagtgtcatgaacacataggtcctcttagtctctgtctacttgacaagatctcttagtgtccatgtgtgatagaacagcacatgcctacactgtgtggagtgaggggctgccagagccacacggtgtagccttctgtcccccacggaggcatgggtgagaggagagacacaagacagagaggaagactgccatcangcttgcggaaatgagcttgagggtttatggtttgaggntgcaaagaaagaagaaaaataaggaanatggggttggggaaaaagaacaacttggttaagggaaganganggatgtccngaaaaggncttaggcacccngaagggtttccggangg

SEQ ID NO: 6325 - DNA, 599 bp, Homo sapiens
  misc_feature (581)..(581): "n" may be a, t, c, g, other or unknown
ccaaatgcagaaaaaaagtctttattctcataataaaaataagtctgttctgtattttacaatatatttcaaatatttccactatgaagcattcattagtcccacatggtcaagaagtatacaaccttttccaaagacagagctgccgggagtgtgtttaggacacacacctcgtacagccgcacttcaccactttctcaacctcgtccacaaaggaggagccgtcagtgcattcgaaagagtatttccgccgcttgctcctcagcggtccacagcactgccctcctgcacacccacctctgcactctaatcgggacaccttcttggttgtttggcaagcagcatagccctgctgcttttggtaataatctcttatcctttcccctcgacaagagatttctcgatcacagctgtcccccgtgtatccactgctgcattcacagtagggctgccccagacctgaaagcctgcacttcccatgcttgcacttgatcgcctggcatgggttaaacagatcctcctcttcatcacagaggacaccttcatgggccctcaagccttacggttgtaggagaaccccntgatgggcaaccaggtgc

SEQ ID NO: 6326 - DNA, 585 bp, Homo sapiens
  misc_feature (251)..(251): "n" may be a, t, c, g, other or unknown
  misc_feature (266)..(266): "n" may be a, t, c, g, other or unknown
  misc_feature (461)..(461): "n" may be a, t, c, g, other or unknown
  misc_feature (489)..(489): "n" may be a, t, c, g, other or unknown
gtgagaaaattacaatatttatttacacatttacatatagcacaatgtattggtcaagtactagtaacaggcaattaacaaactaataagaaaatcagcattttaacaatttaaacgcttcatgacagggtaattcatgtccaacatatcaaaaacatatttatagataactttagaaagaaaatacatactttttttgataatcacaagtagcaatgagattttctatattattttcagtctcactttanaaatgttttaattgnctaaatttaatcaattcatcgattaaaggaaagacaataaaatagtaaaattacatgtgtttatatataagtgtgtgtgtttcaaataacaaaacgcaggttgtaaactaaaatcactggaaggcaaattgaagacaaaagtgatgctggtttaagttgtttggttcttcacataaattccagtttccaagttgngttttacaactctagtaatatccagatngataattcaacctgcacttttttcttctattcctggtttctcttggtcacccggaatttttggcttttactggaactggttaataaaataggactt

SEQ ID NO: 6327 - DNA, 593 bp, Homo sapiens
  misc_feature (518)..(518): "n" may be a, t, c, g, other or unknown
  misc_feature (525)..(525): "n" may be a, t, c, g, other or unknown
  misc_feature (528)..(528): "n" may be a, t, c, g, other or unknown
  misc_feature (539)..(539): "n" may be a, t, c, g, other or unknown
  misc_feature (593)..(593): "n" may be a, t, c, g, other or unknown
aaaaattgcagtgggtactttattaagaatttattttaccatctagccattcaaaacatctttacatcaacaaacacagcagtttgactattgaaatcataagcgatttatcttgaaaaggttatatttgtaggtggatgcaagtatattggagaaatatttctatcaaaatcactggttttgttaggagtattttgatttttctatttttacgctgggaaaaaaattaaaacaagtatgtcagtgttcattttatgggatagttggcttcactgtgtttgtcatgtttgtccgaattacagctgtttatcttgcaactttaagattaattaaatgcaaatgtaactctgtgaatcatgggaatacctgccagacctcttattaataccttcacttaaaaccccctgtgcctgagagtcattaatttgctaaaagaaaagtgctaaagcagccctttgcccacaaacaattctgcgatggctgcccaattaatcccaaagcatctgatcctccttcangcctcgnggncctttgaggcnccaggaaggctccatgatacccggcaacctaaggtagaacccaacccagggtgn

SEQ ID NO: 6328 - DNA, 593 bp, Homo sapiens
  misc_feature (468)..(468): "n" may be a, t, c, g, other or unknown
  misc_feature (472)..(472): "n" may be a, t, c, g, other or unknown
  misc_feature (475)..(475): "n" may be a, t, c, g, other or unknown
  misc_feature (510)..(510): "n" may be a, t, c, g, other or unknown
  misc_feature (528)..(528): "n" may be a, t, c, g, other or unknown
  misc_feature (557)..(557): "n" may be a, t, c, g, other or unknown
ggtcttttgctattttatagtttgcttaagaaacttaagaacaagtgactggggccgggcgcagtggctcacccctgtaatcccagcactttgggaggccgaggggggtggatcacgaggtcaggagatcaaaaccatcctggctaacacggtgaaaccctgtatctactaaaaatacaaaaaattagccaggtgtggtggcgggtgcctgtagtcccagctactcgggaggctgaggcaggagaatggcgtgaacccgggaggcggagcttgcagtgagccgagaccgcgccactgcactccagcctgggcgacagagcgagactccatctcaaaaaacgcgtacagcaaaaaagggtgccgttacataggtcattggatgctatcactggaatgtctgttgagaaataaacgttttaccatctgtagacacatgagggcgctttaagcaggcagcgtgggatgcancgtnccnaaggaaggaaggaggaagaaagctttgtcaaaagnagcctgaaattcagcctnttcctatctggttgcgacctgtgcctgcntcgggtggggggcacccaatcaattaagaaaaaaat

SEQ ID NO: 6329 - DNA, 584 bp, Homo sapiens
  misc_feature (551)..(551): "n" may be a, t, c, g, other or unknown
  misc_feature (559)..(559): "n" may be a, t, c, g, other or unknown
  misc_feature (573)..(573): "n" may be a, t, c, g, other or unknown
gagatgccaggctggagtgtagtggcacaatcatagcccactgcagcctggaacacctgggctcaagggatcttcctgcctcagcctcctgagtagctgggattacaggcacgtgctaccacacctggctaatcttttaatttttggacacggttttgctgtattgcccaagacggtcttgaactcttggcttcaagtgatccccttgccttggcttcccaaagtgtgggattacaggtgtgagccactgcacctggcccgacttcacctccgacctactgctggggcccctggtttggcctctccagctttccctgcgtctcacacaggccctgtgccctccgcatttcacccctcccggggagtctgctgccgtcaactcacagcctggcaaaggggccacaacactgcactgtgggttgaggtgcatgggcccatgctacacggcccaactcaggagtaggacaaggtgtggcagccatgcccttgcctcctacagacaaagagtgaccaccccacccaatttcctggcacacgcttccaagtgacanggtgcttnttttaaaaggcagnccctttttgcc

SEQ ID NO: 6330 - DNA, 594 bp, Homo sapiens
  misc_feature (555)..(555): "n" may be a, t, c, g, other or unknown
  misc_feature (566)..(566): "n" may be a, t, c, g, other or unknown
gacagccaaaatatttattattggttaatataccacttaaaatctctgacctaaaacaaatttttgagccactggaaaagtgaactttctcacagaaatatttaatgttgtcaaaagaatactctgttttaacaataactccattaatttattactttaaaagatgcacagtgctgcttttacacattaaaatttcagtgacatcaacaacataactatatgttaatattttgaactaacatttcaaatgtagactgaccacatgtttgatttaaagcttaaagaatcaatgttcccttttgtgaagatggcttttgttgtcattagattctactgattttttaggaatagagctgctccacactgaatccactggtcttggttgcccccacatggaacatcaatattggtaaccacacgatccctttcagcacttgtgtaaacaggcaaagagatgcactcatccggagaatatggaccacgtgcatcctgtggaatccagcccataaaacaagggacactgatgacccctgggagaatcaagcttgatttcanaaagtggattncatcaaactacatcctttagtaccaagc

SEQ ID NO: 6331 - DNA, 591 bp, Homo sapiens
  misc_feature (503)..(503): "n" may be a, t, c, g, other or unknown
  misc_feature (544)..(544): "n" may be a, t, c, g, other or unknown
  misc_feature (590)..(591): "n" may be a, t, c, g, other or unknown
aagacagggtcttgctatgttgcccaggctggcctcagactccttccctcaggggatcctctcatctcagtcttacttgtagctaggattacaggcatgtgccaccaagcctggctaagagtttaaagttctgacaagccacttttgccatcaacatcactattattattgccattattcttaaattagaaatattttaatcctttttactgctattactctgatgatatgccaaaggtcatgctcctcaattctgccttattttcaccttttctctatttggtttttcataatcattattaaaccagcttaacaaagttgttctatttaatccaatatctactggctgaacaactcaaaatttcaggtggcaaagaaactggagattaaccaattgccattgccaaattattgtaacagcatggaaacctggtgtttccagacagtaagggctccagaggttatctgagaagcccggaaatttaaatatgcatttctttganacccttggtaccccaccctactttaatggtaaaagaagtcnttacaccatcttaggaccctgaggggctaaaccttggaaggctaann

SEQ ID NO: 6332 - DNA, 590 bp, Homo sapiens
  misc_feature (492)..(492): "n" may be a, t, c, g, other or unknown
  misc_feature (525)..(525): "n" may be a, t, c, g, other or unknown
  misc_feature (558)..(558): "n" may be a, t, c, g, other or unknown
  misc_feature (568)..(568): "n" may be a, t, c, g, other or unknown
aaaaatacagtggttatccctctatggtttggaagtatttacttttgggattctcatgtatgatcatttcaaattttatacttattcatactgatttcatgtttgagaaaatttatggttcaaattgtaatgtttacaaatctcaacttttaatcatggcaaagtggacattcacaacagcttcagaagagaaaagaaaatcagtgatataacaaacatttaagtatcatttacggcagccctataagaaggctagccataattccctatttcattctgaaagtgatatcctattagctttcattccataagcctaggagaaaagtataaaacctaaaattacctatgtcttaaacaatattacacctaaaaagatgattgtcgtagtagacagactggaattgtccaccaaaataggaaattgatacccaatttatagtctatgatgaaatttaggcttgaataagtggagttggagttttaatataatgnacttcaaactattaaaaaaaccgggtctatggnccagttgtttaaacatggccctggttaaagaanctgatacctntaaaaagaatttttttaggccg

SEQ ID NO: 6333 - DNA, 591 bp, Homo sapiens
  misc_feature (496)..(496): "n" may be a, t, c, g, other or unknown
  misc_feature (535)..(535): "n" may be a, t, c, g, other or unknown
  misc_feature (542)..(542): "n" may be a, t, c, g, other or unknown
  misc_feature (576)..(576): "n" may be a, t, c, g, other or unknown
  misc_feature (586)..(586): "n" may be a, t, c, g, other or unknown
atttttgctcatggaaatgagaaatcccatagcaataaagaagctaatacccccactaaaataaaccagaaagtctctcccgtctttattcctcttaagccctttgtttagtctatagataaggatctaaactttttaagttttaaaatttaaaaatcacctgctttaattgccgtaattcaaagtcagaagaacaaagaagaattctgatccaagaagctccaattattgaaagctcaggtggtggaaacaacatgtaattcagggggctcagagaagtgacaagcgggagcctgaaaacacacctttgaccggcaaagtgagcagagctcagtagaggggaaatagcacagcacggatcctccccaggaagagcccatgctacgaaaagaacatctagcagcaaatcaaagaaaggggcttctttcctgctttagggctatcacagcccaattctatgtggaaaatcccttgctcttcctctaattctcggctncatggtctgacatctatttcctttatcttctctggcagnctattantaaatcctgggccggccccgggggttacgcctgnaatccagcantttgg

SEQ ID NO: 6334 - DNA, 540 bp, Homo sapiens
  misc_feature (460)..(460): "n" may be a, t, c, g, other or unknown
  misc_feature (469)..(469): "n" may be a, t, c, g, other or unknown
  misc_feature (472)..(472): "n" may be a, t, c, g, other or unknown
  misc_feature (474)..(474): "n" may be a, t, c, g, other or unknown
  misc_feature (501)..(501): "n" may be a, t, c, g, other or unknown
  misc_feature (518)..(518): "n" may be a, t, c, g, other or unknown
  misc_feature (536)..(536): "n" may be a, t, c, g, other or unknown
cagcccagcccttggggcccctttattgaaacaactcacagcacagtatttgagacagacagtgttggccggcggaaccccaggaggctgagaagtcgaggttgcggcatccctcactgccctcctgggggaggcatcctccaagcagacctgagcggccccgggctggggcgggcgatccacacacagaggcgataagagcacttggaatcagggcagccatgcagcactgccctaggcggggatcccccaaagtctgacagtttgggcatcagtggggtggcaggtgccccctcagctgcctttatgagcgcgctcttccacgtaaagctgcatctttaaaatgtccgacgtcatggtttttagtggtatcagcccgggggtcatgcatgtggacatcctgctcatccgccaggatccaggggaaatccttgatgacctggatcttttccatgttgcnagtggcggnttntntcgtgtgcaccaagaattgtgaaggtncaacctgggggggttgnggtccaagacgggattgnacac

SEQ ID NO: 6335 - DNA, 553 bp, Homo sapiens
  misc_feature (347)..(347): "n" may be a, t, c, g, other or unknown
  misc_feature (435)..(435): "n" may be a, t, c, g, other or unknown
  misc_feature (475)..(475): "n" may be a, t, c, g, other or unknown
  misc_feature (478)..(478): "n" may be a, t, c, g, other or unknown
  misc_feature (491)..(491): "n" may be a, t, c, g, other or unknown
  misc_feature (510)..(510): "n" may be a, t, c, g, other or unknown
  misc_feature (526)..(526): "n" may be a, t, c, g, other or unknown
  misc_feature (542)..(542): "n" may be a, t, c, g, other or unknown
  misc_feature (551)..(551): "n" may be a, t, c, g, other or unknown
gagacagggtctcgctctgttgcctaggctggaatgcagtggtgcagtctccactcactgcaacctccacctcctgggctcaagcagtcctcccacttcggcctcctgagtaactgggactacaggcacatgccaccatgcccagctaatggctaatttttttgtattttttgtagagacagggtcttaccatgtttcccaggctggtcttgaactcctggactcaagtgatctacccacctcagcctcctaaagtgctgggattacaggcatgaaccactgcacctgcccaaatgacctcattttaacttgattacctctgtaaagacgctatttccaaataaggncacattcacctgtacaggggttaggacttgaaaatcttttgttgggggacacaatccaatccattaccaataccttcccccaaacctntcaggtgctcaaagcctggatccccaagttctgctgcctnctnacatgtggctttnatctgtttccagccgactnttggctggccatgggnaaagtccaaccaaganttaagatancc

SEQ ID NO: 6336 - DNA, 575 bp, Homo sapiens
  misc_feature (55)..(55): "n" may be a, t, c, g, other or unknown
  misc_feature (97)..(97): "n" may be a, t, c, g, other or unknown
  misc_feature (129)..(129): "n" may be a, t, c, g, other or unknown
  misc_feature (187)..(187): "n" may be a, t, c, g, other or unknown
  misc_feature (195)..(195): "n" may be a, t, c, g, other or unknown
  misc_feature (244)..(244): "n" may be a, t, c, g, other or unknown
  misc_feature (252)..(252): "n" may be a, t, c, g, other or unknown
  misc_feature (334)..(334): "n" may be a, t, c, g, other or unknown
  misc_feature (375)..(375): "n" may be a, t, c, g, other or unknown
  misc_feature (471)..(471): "n" may be a, t, c, g, other or unknown
  misc_feature (488)..(488): "n" may be a, t, c, g, other or unknown
  misc_feature (520)..(520): "n" may be a, t, c, g, other or unknown
  misc_feature (528)..(528): "n" may be a, t, c, g, other or unknown
  misc_feature (540)..(540): "n" may be a, t, c, g, other or unknown
  misc_feature (552)..(552): "n" may be a, t, c, g, other or unknown
  misc_feature (565)..(565): "n" may be a, t, c, g, other or unknown
  misc_feature (575)..(575): "n" may be a, t, c, g, other or unknown
aaaggcaaaaaagtaactttattgactgctaatcttaccatgaaatatctataanaaataattacaaaataatgcaggtttctttttacatactttnggtatcatcttgatatgatgatcctttcacanaaaggattatttacagtttatgtagatataaagctcactgttgcatatacaaatgtanatgtgcanaggcaatatataccaaaacgggtatactgacaagcgatagatatgtaanaaatgcanaataaataacagctttatatatttcctttcctttttatttttaaaaacaatttccaaatacaaaacatggattattcaaagnggatttttcctatacatatatataattctgctgcaaacagnggatcaaaaagcagaagtgttcttagcatgattcatctttgaaaacccatagaactattcataaatccaattagttctattaaacatattaactgnattggttaacttatcangtttttgacatagagaaatttggttgcaggtnatagaaantttatcctccantttcaataattncccccataattcngggttaaggn

SEQ ID NO: 6337 - DNA, 587 bp, Homo sapiens
  misc_feature (541)..(541): "n" may be a, t, c, g, other or unknown
  misc_feature (547)..(547): "n" may be a, t, c, g, other or unknown
  misc_feature (564)..(564): "n" may be a, t, c, g, other or unknown
aagataagaccataagctagagttctggtcaaattataatgcctttcctccgcctttctttcaaatcccaaatgtccaaggaccaagttcctacttcactcatactaacttttctaaagtctctagacctacgttccccaacatggtaagcatcagccacatatggctaaatttaaatgaattaaaattaaataaagttaaaaacacagtttcttagccacattaaccacatttcagatgctcggcagccacataggaccacgtgtactctacaggacagcgcagacatttccatcttccactgcagacagttctaccggacagtgctgctctggactcatttggttttgcttttttaaaattgcattttcagacatttttataactttttgaaatgttaaatgactgctccacagagttattcatttgatggtcacacctactcaatcccagaaccaagcattttagtgtaattgcagaaatgctctgaaccaatcaacctattggcctatttgggcaaattaggaagaaaaaaactatnagccgnttcaaggaccttggctnaattctggttacatacagtccca

SEQ ID NO: 6338 - DNA, 593 bp, Homo sapiens
  misc_feature (554)..(554): "n" may be a, t, c, g, other or unknown
accctgggaagcattattttttaatgtaccaaaaatgtctttgtacatctctgtattagatgcttttataaacaacgtgcattatgagaaaaaaatgaaaatttcccatttttattttaaaaaggtacagagaatagagtccaaatgaagtctccaaatgacaatatgccagagaacaccaaattcccaaatctgagtaactatctaaatttctgaggtctcagcctggacaacatggcaaaaccccatctctacaaaaaacagaaaaattagctgagtgcggtggtgtgcacctggagtcccagctactcagaaggctgaggtgggagaatcgcttgagcctgggaggttgaggctgttgaggctacagtgagccaagatcgcaccaatgcactgcagcctggaggacagagcaagaccgtctcaaaaaaacaagaaattctgaggtcagcaattaaatatttgcttttaactttctactaaagtacaaaagaaaaataacacaatttctatgaaatatcaggataagcatagcaataaatctggcttaatgnaaatgtagccattttcacatatattactggggaatggcg

SEQ ID NO: 6339 - DNA, 579 bp, Homo sapiens
  misc_feature (543)..(543): "n" may be a, t, c, g, other or unknown
aacacctcaaactcccctcagccccaatatcctggcatctttagtgagtcaggacaatcctaacctagaagcatatatgcctgggagcttcctggcctcaaaggaataaatcttttcacagcattcacaggactgaaaaataatataaataggattcctacagtaaacaagtattgtttctgtttcaaaaccatcctgcaagcataacaatcagctggtcctaaagcctgtaatacgtacacaggtcacaggcagacaggcaggcaggaaaagggatttcccccagtgcaggctcctttggttctgcctcagaggcactagaagtctaggccctgggttaacagcaacccagagtctgcttggatatggttctagttgtatgcttcgtaagtgaacaccaaaataccataaaggtagaggagagtgaacacataacccacttgcaaataagaattaccttgcaagattcctatttttttatcttaacagtctatgcgtatgaacattttattctataatataactttttatataaaaataggncatcttatgactcttaaccattgggaagtaaactgg

SEQ ID NO: 6340 - DNA, 586 bp, Homo sapiens
  misc_feature (507)..(507): "n" may be a, t, c, g, other or unknown
  misc_feature (516)..(516): "n" may be a, t, c, g, other or unknown
  misc_feature (530)..(530): "n" may be a, t, c, g, other or unknown
  misc_feature (557)..(557): "n" may be a, t, c, g, other or unknown
  misc_feature (566)..(566): "n" may be a, t, c, g, other or unknown
  misc_feature (573)..(573): "n" may be a, t, c, g, other or unknown
  misc_feature (583)..(583): "n" may be a, t, c, g, other or unknown
gagacaatgtctggttctattgcccaggctggagtgcagtgtcacgatcttggctcactgcaacctccaactcctgggctcaagcaatcctcccacctcagcctcacgagtagccgggactacaggcatgtaccaccatacctggctaattttttttttttttgtattttttgtagagatggagttttgctaagttgtccaggctggtcttgaacacatgaactcaagcaatctgcccaccctggtctcccaaagtgttgggattacatgtgtgagccaccgcttctggtctattattgctattatatgtaagctcatcatataatgcagaataatttgctaaactgaagagttactcttaacatgagggcccatgaaaggtagcatagaataatggttaggagacagtaagctatacagcaaggctgcctggggctctgccacttaccagctctgtaaccttgggcaagttacttatctttttccctacctactttctttatctgngaaatgganaaaagtaagtagtnccaggttgagtatcccttatccaaaangattggganccaaaanggtttaaaantta

SEQ ID NO: 6341 - DNA, 596 bp, Homo sapiens
  misc_feature (546)..(546): "n" may be a, t, c, g, other or unknown
  misc_feature (548)..(548): "n" may be a, t, c, g, other or unknown
  misc_feature (572)..(572): "n" may be a, t, c, g, other or unknown
aacttttaaaatcagaagtaggttttatatctttattcagaggtgattcaactatagaataaagcccttttagcactataaaatccaatgttttgaattttttttttttttgctcagcaatacagttgcattttacaacttttataatcctgaagagattctcttatttggagttttttcatgcattcaggtatttagcatgatgtctgatgtggtcagtaataaaggttgcaatgaagtagtagctatgatcataaccctagaagataaagagatgataagacatttatctaccattcaggaacatcagtattaggaacattaaatatatctctaaggtcgtttaatttgcttacaaatagtcataacattaaggaagtatgaggaaggtttataataaaatcaaggttgtcatccttgtactttaacattttcactgtcattaaaagagcagcaaaaatgtgaaggaaaactaaacattctgcctagcttctaaacatagcctaacttctaaagctggcattaatatgtaaagagtggaagtancncattaattaaatatgcccgagtanactggcatatcaccctggggaggg

SEQ ID NO: 6342 - DNA, 594 bp, Homo sapiens
  misc_feature (455)..(455): "n" may be a, t, c, g, other or unknown
  misc_feature (509)..(509): "n" may be a, t, c, g, other or unknown
  misc_feature (518)..(518): "n" may be a, t, c, g, other or unknown
  misc_feature (521)..(521): "n" may be a, t, c, g, other or unknown
  misc_feature (548)..(548): "n" may be a, t, c, g, other or unknown
  misc_feature (569)..(569): "n" may be a, t, c, g, other or unknown
  misc_feature (592)..(592): "n" may be a, t, c, g, other or unknown
gagatgcagtcttgctctgtcccccaggctggagtgcagtggcacaatcttggctcactgcaacctccaccgcccgggttccagcggttctcctgactcagcctcctgagtagctgggatcacaagcgtgcgccatgttcggctaatttttgtatttttagtagagatggggtttcaccatgttggtcaggctgatcttgaactcctgaccacccaggatccactcgcctcggcctcccaaactgctggaattacaggcgtgagccaccgcgcccagcctaaaacgagatttctatctcgtttttcaaacttataccacaaaattgccgagaaaatcccaaaaaaggaaacaaaccctagaacaatagaaagtaagtctcaacccaattccaggccaaatcaatattaatgagcttcttcatacaatcctcttaatgatgagaagtttacaagangtggagaaaaataaccggggttagaagcagtattcattggtttaaagctgaagntaaaacttnttnattctttttcgatggtacataaatctntggaaaaattaatccaggccnttttccaacctttttttggaaangg

SEQ ID NO: 6343 - DNA, 585 bp, Homo sapiens
  misc_feature (503)..(503): "n" may be a, t, c, g, other or unknown
  misc_feature (526)..(526): "n" may be a, t, c, g, other or unknown
  misc_feature (578)..(578): "n" may be a, t, c, g, other or unknown
gttttcttttcctttctttctctctctctcgcttctctcctctccttttctctctctttcgcaataaagacaggaaaaaggcggggggaaacatggagaaagcttcccacggataatcccatggagtctaaaagggacatgccgagggctggcagggctgggaggcctttgggaagctcagaggagccgcggggagccgggcgtacgagagcaggccgggactccgctgggcgaggccgagcagggacaccagctcctcacccagttgaaacttgcggtcactggagaggagcaacgcaggagctgatctggtttgaaaaagaggtcaaagcactttacagctcccatttcccagcgccgaggagtggtgagttttccgtgttccaagccccactgttctgcctccgggagagtttgcagctgctttcggggaaggtggctggctctgctcacctgctctgccctccctgacaagagcacctgctgtgtgcccacactttggntcccgaggtctactttgctcctnctgcaccccaggagcttggcccttctggctctggaggagacttaggttcagnaaactgc

SEQ ID NO: 6344 - DNA, 501 bp, Homo sapiens
  misc_feature (390)..(390): "n" may be a, t, c, g, other or unknown
  misc_feature (421)..(421): "n" may be a, t, c, g, other or unknown
  misc_feature (448)..(448): "n" may be a, t, c, g, other or unknown
  misc_feature (461)..(461): "n" may be a, t, c, g, other or unknown
  misc_feature (466)..(466): "n" may be a, t, c, g, other or unknown
  misc_feature (472)..(472): "n" may be a, t, c, g, other or unknown
  misc_feature (487)..(487): "n" may be a, t, c, g, other or unknown
  misc_feature (493)..(493): "n" may be a, t, c, g, other or unknown
ggtttttgttgttcaaatttcccttttacagtaaaactactgaggtgacggcataccccgccaccatggcaatatcaacttcctgttccccagaaggagcgattagaaaaatcaggaaggagctgggaactacagcaccagagaggtgaacttgacctctggtggacaaagcaaccatcttggctggtgattgaggtggccaacctggtgcccaacaacagctttgatctaataaaactgtgttgagtctgaaaggagtcggaaatgtaggatggaatgaacaagacagccatctgggttactcgggagagcacatgggttcttggggtagtcctgttgattaacagagattatactgggatatggaaaggaaagaacaagacaaattangcctgccacagcacatggcaagtcatcttanctgcctaaaatcagcacagagcacaangggaaggagatcntgggnaagtgncacttgaaactgggnaaaagnccttttgg

SEQ ID NO: 6345 - DNA, 602 bp, Homo sapiens
  misc_feature (514)..(514): "n" may be a, t, c, g, other or unknown
  misc_feature (542)..(542): "n" may be a, t, c, g, other or unknown
  misc_feature (556)..(556): "n" may be a, t, c, g, other or unknown
  misc_feature (576)..(576): "n" may be a, t, c, g, other or unknown
  misc_feature (589)..(590): "n" may be a, t, c, g, other or unknown
  misc_feature (594)..(594): "n" may be a, t, c, g, other or unknown
atgccacttattttatttactaaccttgacagggactaaagaatgaggtacagaaaactttccagaagtctgagtgtggtgtagaagtccaagacaacttggagctccattattgcattattaagtagaatgaactgttatgaaattctccatattccaggtttactacatagaaaagtactatttacctacctcacagaggtattgtgaggatttgtgtttataaagtgcttcaggcgccttcgaagaaaggcaacatacaagtataaaataatcatacaaatttcaaaataaatgaaaagatgattttggcacaatgggaagggtgcctcctatttaaagaacacttggctattggtttataaaatcccctgacctcttgggttttaaaaaaattattatttaaaagaataaatgtttttccattgccaatcttataaaaattctcaatccagctggggttatcagaatccttggaagagctcagtaaaattattgatgtttgggcaacagnctacaccagcggaattaaaggtctatgngggatacccaggtncctatatttcaaaaggactnttgggaatctggnncctnccaaagtt

SEQ ID NO: 6346 - DNA, 603 bp, Homo sapiens
  misc_feature (456)..(456): "n" may be a, t, c, g, other or unknown
  misc_feature (528)..(528): "n" may be a, t, c, g, other or unknown
  misc_feature (556)..(556): "n" may be a, t, c, g, other or unknown
  misc_feature (584)..(584): "n" may be a, t, c, g, other or unknown
gtttgttcatggagggaagtaaggaaattttaatgatattccttagataatacattttcttacctaaaagtggtacaataatgggttttactctacctcagtccactatgcagcatgcatactctacttaatactaggttgtgttcctacagttagttaaaaaaccaaccagctggtagtatttttttagatccaacctaagaaagacagtgtggtctagtgtagagggcactggctttggagtcagatgggtctaagttcgaatgctggctctgctgcttggaaggtgtgtaactttaggtaagttgcataacttctctaagcctcagtctccgtcaccataaaatggggatatctatgtatcttgcagagctgatatacggttatgcgttacatgtgtcatacagaggcaaagtacatgtcgaaagtagatgtggcctgtgaataaagtggtanggccaattttacaccgatgggtaagctcacaattaggaaacatgaataacttcttttggagtaatatatatntataatggaaggtcagagtttaaataanggattcccttcaatcatggttctttaanggggtcatcatggacccat

SEQ ID NO: 6347 - DNA, 590 bp, Homo sapiens
  misc_feature (509)..(509): "n" may be a, t, c, g, other or unknown
  misc_feature (542)..(542): "n" may be a, t, c, g, other or unknown
  misc_feature (545)..(545): "n" may be a, t, c, g, other or unknown
  misc_feature (555)..(555): "n" may be a, t, c, g, other or unknown
  misc_feature (571)..(571): "n" may be a, t, c, g, other or unknown
  misc_feature (590)..(590): "n" may be a, t, c, g, other or unknown
gagatggagtttcgctgttgttgcccaggctggagtgcaatggtgcaatctcagctcatcgcaacctctgcctcccaggttcaagcgattctcctgcctcagcctcccgagtagctgggattacaggcatgtgccaccacatccagctaactttgtattttgagtagagatggggtttctccatgttggtcaggctggtctcgaactccagaactcagatgatcctcccccttggcctcccaaagtgctgggattgcaggtgtcagccaccatgcccggcctcctctgtcacttttatagccatcctctgctcagaggaaagagctgacacctctctgcccagtctcgaggccccagtccacactgtctacaactatctacagccatcttcatacctaatgccaaaagaggctccccacattagttaaccctcggagtgattcactctaaatttggccgagcacactagagacaaagaaacacaaacccacccagaaataaagtttcanggccatccttccctttccaccaagtaaccaccntgnaggaaacttnttttccttggcctaanccttttaccagttcacacn

SEQ ID NO: 6348 - DNA, 583 bp, Homo sapiens
  misc_feature (156)..(156): "n" may be a, t, c, g, other or unknown
  misc_feature (557)..(557): "n" may be a, t, c, g, other or unknown
  misc_feature (560)..(561): "n" may be a, t, c, g, other or unknown
  misc_feature (569)..(569): "n" may be a, t, c, g, other or unknown
  misc_feature (576)..(577): "n" may be a, t, c, g, other or unknown
cttttatttcatggatctgtttattccatttattagtaacagtgcattttttcacacagtattctattttacttaaacttaatgcatatgtagtaagaaagatttactatcccaactagcctctcagtatttagatgaggatagaacagatacggngtaacacgcctctccactgcttactgtgtgtaccaagaaggcagaaagcagctcacccaagcctaacctggccctgtctttttcaggcttctcaggatgcccacagcacatactggggggatggggacactatggtgcactcaggcagtggcaagggggcaatacgtggagtcaggatggaggaacactgggtgccaagacaggaggggggccttggcaaccatctgcaatgcatggggcagggactatctggaaggactgcagggatcactgaaaagctgtgccaatgcattagccatgaaacctaagaaacttcagacatgtctcctctggttaccaagagttgcattatcttggggactttttgatttcaggccattcggaattatggcagccattgntcnnaggataanctttggnnacaaaa

SEQ ID NO: 6349 - DNA, 594 bp, Homo sapiens
  misc_feature (1)..(594): "n" may be a, t, c, g, other or unknown
nnnnnnnnnnnnnnnnnnnnnnnnnnnnnnnnnnnnnnnnnnnnnnnnnnnnnnnnnnnnnnnnnnnnnnnnnnnnnnnnnnnnnnnnnnnnnnnnnnnnnnnnnnnnnnnnnnnnnnnnnnnnnnnnnnnnnnnnnnnnnnnnnnnnnnnnnnnnnnnnnnnnnnnnnnnnnnnnnnnnnnnnnnnnnnnnnnnnnnnnnnnnnnnnnnnnnnnnnnnnnnnnnnnnnnnnnnnnnnnnnnnnnnnnnnnnnnnnnnnnnnnnnnnnnnnnnnnnnnnnnnnnnnnnnnnnnnnnnnnnnnnnnnnnnnnnnnnnnnnnnnnnnnnnnnnnnnnnnnnnnnnnnnnnnnnnnnnnnnnnnnnnnnnnnnnnnnnnnnnnnnnnnnnnnnnnnnnnnnnnnnnnnnnnnnnnnnnnnnnnnnnnnnnnnnnnnnnnnnnnnnnnnnnnnnnnnnnnnnnnnnnnnnnnnnnnnnnnnnnnnnnnnnnnnnnnnnnnnnnnnnnnnnnnnnnnnnnnnnnnnnnnnnnnnnnnnnnnnnnnnnnnnnnnnnnnnnnnnnnnnnnnnnnnnnnnnnnnnnnnnnnnnnnnnnnnnn

SEQ ID NO: 6350 - DNA, 190 bp, Homo sapiens
gttttgaacagcaatgagatttattttttcagcttttattttaggttcagggtacatgtgcaggtttgttataaaggtaaacttgtgtcacaggggtttgttatacagattatttcttcacccaggtactaagcctagtatccaatattattttttctgatcctctccctcctcccaccctgtgcaccct

SEQ ID NO: 6351 - DNA, 525 bp, Homo sapiens
  misc_feature (169)..(169): "n" may be a, t, c, g, other or unknown
  misc_feature (217)..(217): "n" may be a, t, c, g, other or unknown
  misc_feature (386)..(386): "n" may be a, t, c, g, other or unknown
  misc_feature (442)..(442): "n" may be a, t, c, g, other or unknown
  misc_feature (462)..(462): "n" may be a, t, c, g, other or unknown
  misc_feature (483)..(484): "n" may be a, t, c, g, other or unknown
  misc_feature (494)..(494): "n" may be a, t, c, g, other or unknown
  misc_feature (503)..(503): "n" may be a, t, c, g, other or unknown
  misc_feature (506)..(506): "n" may be a, t, c, g, other or unknown
gagacagagttttgcccttgttgcccaggctggagtgcaatggcgcgaccttggctcaccacaacctccgcctcccaggttcaagcaattctcctgcctcagcctcctgagtagctgggattacaggcatgcaccaccatgcccggctaattttgtatttttagtaganatggggtttctccatattgaggctggtctcgaactcctgacctcaggngatccacccacctcggcctcccaaagtgctgggattacaggcgtgagccaccgtgcccagccttaaccttacatttctaaagcactaagaagtttctagatttgagttaacactattatctcttgaagctcatataccctacgaggtagacaatgcagatagatacagngattctcattccacacgtgaagaaactgattttcagagactaatttgcccaaaggncacacaacaaattaaggganaagccaaacttggacccatgnntttcaagggncaagttaanacnttttaacctggccttttgg

SEQ ID NO: 6352 - DNA, 559 bp, Homo sapiens
  misc_feature (538)..(538): "n" may be a, t, c, g, other or unknown
  misc_feature (546)..(546): "n" may be a, t, c, g, other or unknown
agagtgtcactgatgctttatttacatgcgtcaccatctcttttacaaactagattacggttttaagtggaatacacaaggcaatatctacaaacaccaaggaaagttaagtactgcatctctatttcatttggaaaggggaagattcccaaatcaaactggttttgatccttaagaaaggcggcagagttaattcatggcaacatatggttagacaaaatcctcagtaagaatgccatatgatagtgttcgcattgaaagaaggatgaggtgcttcaaatcaaagtctcaactgcttgactctcaggtgtttaaatatggccacacaccatatttagttctagattatatgggatatgagcaaggaattgaaacagataagatagtttttacagatactgtatacagatttttttttccattcatgcaacttttttcttaaaaaaagttaaacatgtgaagcccaaatgcccaatacatttttttaaatattaactaaattttctggggcctccttacaattggtaccttttccctngccataangggctgggacaag

SEQ ID NO: 6353 - DNA, 535 bp, Homo sapiens
  misc_feature (382)..(382): "n" may be a, t, c, g, other or unknown
  misc_feature (465)..(465): "n" may be a, t, c, g, other or unknown
  misc_feature (477)..(477): "n" may be a, t, c, g, other or unknown
  misc_feature (486)..(486): "n" may be a, t, c, g, other or unknown
  misc_feature (489)..(489): "n" may be a, t, c, g, other or unknown
  misc_feature (502)..(502): "n" may be a, t, c, g, other or unknown
  misc_feature (528)..(528): "n" may be a, t, c, g, other or unknown
  misc_feature (533)..(533): "n" may be a, t, c, g, other or unknown
gagacaaggtcttgctctgtcacccaggcgctggagtgcagcggcaagatcatggctcactgcagcctcaacctcccaggctcaggtgatcctttcacctcagcctcctgagtagctggaaaaacagacatgtaccaccatgcctggctaatttttgtatgttttgtagagatgggagtgtcaccatgttgcccaggctggtcttgaactcctgggctcaagcaatccatccgcctcagcctaaatcttgatctctgccaatagagccaaacgtttttaaaaaggcaaaaatctctctataggtaaaagttttatttcaatgataatattctcaaacatttcttaagaaatgtcttcattttctaagaaatccaattactgnctcatacttccaggattctccaattttttttttcaggatattataggccatcaatttccatacgactcccacacagtggtggnaaccaaggtggnttggggacntgnaagaaaccttagnccccaattaaaagttgggcgggacangcagnca

SEQ ID NO: 6354 - DNA, 558 bp, Homo sapiens
  misc_feature (466)..(466): "n" may be a, t, c, g, other or unknown
  misc_feature (495)..(495): "n" may be a, t, c, g, other or unknown
  misc_feature (497)..(497): "n" may be a, t, c, g, other or unknown
  misc_feature (521)..(521): "n" may be a, t, c, g, other or unknown
  misc_feature (535)..(535): "n" may be a, t, c, g, other or unknown
gcaaatcatcagcgctcatgtttatttataaagttacatcctaaaagtgattcgaacaataaatagttataaagaagatctgctgccctaccctctgggtgtgaggcctggctgtgaatggatggcctgtcaatcctggttgcgatggtcactgtgaaggccccctctgtgtccggcaggtaggtggagggcacaaccttgtagggcccgcaggcaggaggcagagccggctcacctcctgggcgtagcgatgtggcacgcagctcagcagcggctcctgcagcagcagtgggggtgcgtcctggctccttccaccctctgggacctggaagatatggaagccgatggggtggaactcggtgtcactgggccggcagtgctgatgcagagtgatgcggacgcagcgagctgcacggtcccccactccccgcaagcagggcttgccccgggggtggtgttctttggncactggccttatggcgcttaaggaaactngnccggtagaaaaagacttggagcanggacttcccctggngcgttccttaaggaagggcttgg

SEQ ID NO: 6355 - DNA, 534 bp, Homo sapiens
  misc_feature (149)..(149): "n" may be a, t, c, g, other or unknown
  misc_feature (229)..(229): "n" may be a, t, c, g, other or unknown
  misc_feature (243)..(243): "n" may be a, t, c, g, other or unknown
  misc_feature (262)..(262): "n" may be a, t, c, g, other or unknown
  misc_feature (466)..(466): "n" may be a, t, c, g, other or unknown
  misc_feature (485)..(485): "n" may be a, t, c, g, other or unknown
  misc_feature (492)..(492): "n" may be a, t, c, g, other or unknown
  misc_feature (501)..(502): "n" may be a, t, c, g, other or unknown
  misc_feature (521)..(521): "n" may be a, t, c, g, other or unknown
  misc_feature (530)..(530): "n" may be a, t, c, g, other or unknown
gcaattacaaacattttaataaaatggaatgagctttttaattgaagctaatatgaagtctaattctcatggacagcaaaaaaaaaaaaaaaaaaaaaagtctattagatcaattatcaccttacctttttgcacagaaatcttattgngaagtcaccatagagtcaatagctaaaattttaagactttctttggccttctgatattaaacaaattatttacaaactgngatcagtaattcgnggatattggtaaaatgatncaattttttgttgttgttgttaagggctttccattaaaaattgtaaaacaactttgtaaggctgtacagggctgtaaactactttgctaatataccatgggatgcagaggaaggaataatagaccttttttttaaggctaaagttatcaatgttatagatgcattccttaaaatcattatgatttatacccaaagggacctttnccattaaatcccctgggtnctacaantttcaaagnnaaaaaattaacctggattncccttagtntttt

SEQ ID NO: 6356 - DNA, 550 bp, Homo sapiens
  misc_feature (486)..(486): "n" may be a, t, c, g, other or unknown
  misc_feature (488)..(488): "n" may be a, t, c, g, other or unknown
  misc_feature (514)..(514): "n" may be a, t, c, g, other or unknown
  misc_feature (522)..(522): "n" may be a, t, c, g, other or unknown
  misc_feature (543)..(543): "n" may be a, t, c, g, other or unknown
  misc_feature (545)..(545): "n" may be a, t, c, g, other or unknown
cagtttgaaatgttttccccctttattttgtttttcaaattacaaaagcaatatatgtgaacaagacaatgcaaaggtattcagaaaacttattacccttctccaccaaggtaaccaatgaatgttaacaccttcgtgtgtattcttctacacttttctatgttcatataaacatccacatgcatatatacacacacaggagtttttactttttttaaaaatagaatcgtatacattattatgaaattttccctttttacaatatataccatgaacatccccacaaattagcaaaattctagctccctcatccccagccaaatttactaactcacacatttgtggtatcacccgtgattcagtcatttatgtatttttctttttttggttttccttttccctacacccctgactcccccataacctacctgcattacccaccttccttcaagtcaatgcatactcttctatacttttcttcatgcncnttaaatccaattaacctttttgggancccggtantggtggacaaacccttagagncntttgg

SEQ ID NO: 6357 - DNA, 551 bp, Homo sapiens
  misc_feature (435)..(435): "n" may be a, t, c, g, other or unknown
  misc_feature (473)..(473): "n" may be a, t, c, g, other or unknown
  misc_feature (506)..(507): "n" may be a, t, c, g, other or unknown
  misc_feature (549)..(549): "n" may be a, t, c, g, other or unknown
gagatggagtttcgctcttgtcacccaggctggagtgcagtgatgtgatctcggctcactgcagcctccgtctctcccaggctcaagcaattctcctgcctcagctttccaagtagctgggattacagcctgcaccaccacacccagttgttttttttgtattttttgtagagacagggtttcaccatgttggccaggctggtctcaaactcctgacctcaggtgatccgcccgcttcggcctcccaaagttctgggattacaggtgttaaccaccatacctgacctcttaatctcttttttgaatagtttgttgttagtgtatagacagaaaactgatttttgtatgttgatttttgtatcccagaacttgactaagtgaacagatttcttgatgaagtcttgggtttttctacatacaagattatgccactgnaaataaagataattttatttcttctttatgaattaagnggcttttacttttttttttttttttgggacaannttggcctggttgccaagctggaatggcaaggggcaatttaantt

SEQ ID NO: 6358 - DNA, 556 bp, Homo sapiens
  misc_feature (450)..(450): "n" may be a, t, c, g, other or unknown
  misc_feature (464)..(464): "n" may be a, t, c, g, other or unknown
  misc_feature (497)..(497): "n" may be a, t, c, g, other or unknown
  misc_feature (499)..(499): "n" may be a, t, c, g, other or unknown
  misc_feature (521)..(521): "n" may be a, t, c, g, other or unknown
  misc_feature (531)..(531): "n" may be a, t, c, g, other or unknown
catgttctcaactttattccccatcccagtggtggctcttctgtacagtggagaaagaagggggaccccaccagggctatggagagacagtagaggcaggactgaaccgtcagcaaagattaaaaggatgacctgaggctggcaaccacaaaaccaagaagccagcgggggctgccccttccaagtctcaccaatgacccagagcaggttccagagcccaaaggcccaaaagtgcaattcccaaaagccaaggtctgggagccatcaaggagctcccagagatccagcgacgctcagagggcaagggtgtctttgatgagcctgcgcatggtggtggtgactgaggtgcccagggcatcagtgatctggaaggagatcttgtacaggtagggctgcacgtcccgcaagcctgtgtcaaacacgttatccaccttcgactgtgtgggcatnttgggcaaagtctnatgccgattcattaacttcacgatgttgatgancnttttgcaaaagtttttaccacnttttcccggnaaatttgccgttcttgttccggggc

SEQ ID NO: 6359 - DNA, 538 bp, Homo sapiens
  misc_feature (20)..(20): "n" may be a, t, c, g, other or unknown
  misc_feature (40)..(40): "n" may be a, t, c, g, other or unknown
  misc_feature (87)..(87): "n" may be a, t, c, g, other or unknown
  misc_feature (184)..(184): "n" may be a, t, c, g, other or unknown
  misc_feature (248)..(248): "n" may be a, t, c, g, other or unknown
  misc_feature (275)..(275): "n" may be a, t, c, g, other or unknown
  misc_feature (307)..(307): "n" may be a, t, c, g, other or unknown
  misc_feature (309)..(309): "n" may be a, t, c, g, other or unknown
  misc_feature (321)..(321): "n" may be a, t, c, g, other or unknown
  misc_feature (416)..(416): "n" may be a, t, c, g, other or unknown
  misc_feature (458)..(458): "n" may be a, t, c, g, other or unknown
  misc_feature (463)..(463): "n" may be a, t, c, g, other or unknown
  misc_feature (481)..(481): "n" may be a, t, c, g, other or unknown
  misc_feature (498)..(498): "n" may be a, t, c, g, other or unknown
  misc_feature (507)..(507): "n" may be a, t, c, g, other or unknown
  misc_feature (519)..(519): "n" may be a, t, c, g, other or unknown
  misc_feature (525)..(525): "n" may be a, t, c, g, other or unknown
gagacagggtcttgctctgncacccaggctggagtgtagnggtggagatcacaggcttactgcagcctcaacctcctgggctccggnggtcctcccaccttccacctcctgagtagctgggaccacaggcatgtgacaccagctaatttatttgtattttttttaagagatgaggtctcaccgngttgcccaggatggtctcaaactccttgggctcaagcgatcttcccgccttggcctgccaaagngctgaaattacaggcatgagccactgngcctagcctaggaaatttcaaattatatatgngngtcacgttctgnttctcttggacagtgctgatctagaagaagaactgttactaagagtgagttaatggtacttgggaatagctttatgattcaaatcatttccttgnaaatggtcaaaaattgtaagggaattttattaaataaatggntttcnggatttcaaaaatgggtnaaggggaaaaaaccttnaaaaggganaaaggctttttnaaggcntgggtttagcttt

SEQ ID NO: 6360 - DNA, 555 bp, Homo sapiens
  misc_feature (485)..(485): "n" may be a, t, c, g, other or unknown
  misc_feature (506)..(506): "n" may be a, t, c, g, other or unknown
  misc_feature (509)..(509): "n" may be a, t, c, g, other or unknown
  misc_feature (515)..(515): "n" may be a, t, c, g, other or unknown
  misc_feature (552)..(552): "n" may be a, t, c, g, other or unknown
aaactaacgtttatttaacaacctacctgtatgggccaggcatttatgctgaggaaggacaaaggagatgaagcatgctccttaccttgggaaacttaaagtgtagtcaggaggagaaacagaatattgcaggttgaaaatacaggaagtcaaaaaattaacaagagtaaataggaaaactggtctaacagttcacatattgtactggaaaaaagagagcacagatgcagaaagagtaattaggtgaaatgaacctgttatcttatttggaaaaatgagtctctgaagatgtaattaagttaaaggtctcaggatgagatgacactggattatccaggtagatcccaaatccaatgacaagtgtccttacagaaaatacacagagtgaggtcagagagatgagaaggccatgtaaagacacaggaaaaaactggagttatgcagccaccagacaaggaatgcctgtagccccccaagcttgaagnaaccttggaccaaaatttccnttnaagccnttggagggaccacggtttgattttgaaataggatgcntac

SEQ ID NO: 6361 - DNA, 549 bp, Homo sapiens
  misc_feature (414)..(414): "n" may be a, t, c, g, other or unknown
  misc_feature (425)..(425): "n" may be a, t, c, g, other or unknown
  misc_feature (435)..(435): "n" may be a, t, c, g, other or unknown
  misc_feature (448)..(449): "n" may be a, t, c, g, other or unknown
  misc_feature (538)..(538): "n" may be a, t, c, g, other or unknown
  misc_feature (540)..(540): "n" may be a, t, c, g, other or unknown
  misc_feature (542)..(542): "n" may be a, t, c, g, other or unknown
attcacagcatacttttatttaccaaagtacatcgtacattatacaaatcttaattacatttacattatacatttataatattaaaattgtgcgagtagtcttcaaatatctgacaactttggggtcagtgaattatttaagaaaaaactcagaagagttttgaaaaaggagcaggtgtaattctacaaattcaatatgaggcaccagtgggagaagtcaattggatgagcacatgaaatattaggagtgctcgtgagggggaagtaacaggtctattgtgtgcagtgctgggcaggctgcatatggagaatgtgttaaaagagcatttgcaaacttaagcattacttgaagatattaaacagaatgatggaagcctggtctttgattatttattgctgacatatgcattgcantgatggcattnatggcctaangattaagcttacnntgaattggccatggacaaggcatgcttataaataaaaatgcctgttgttgattgcccatcttgggaaccttgctagctcaaatcttctntnangcccatt

SEQ ID NO: 6362 - DNA, 551 bp, Homo sapiens
  misc_feature (433)..(433): "n" may be a, t, c, g, other or unknown
  misc_feature (437)..(437): "n" may be a, t, c, g, other or unknown
  misc_feature (509)..(509): "n" may be a, t, c, g, other or unknown
  misc_feature (512)..(512): "n" may be a, t, c, g, other or unknown
  misc_feature (514)..(514): "n" may be a, t, c, g, other or unknown
  misc_feature (524)..(524): "n" may be a, t, c, g, other or unknown
  misc_feature (542)..(542): "n" may be a, t, c, g, other or unknown
  misc_feature (551)..(551): "n" may be a, t, c, g, other or unknown
ggttcctacctctttaacagaaaacaacaatgcacttgagaaaaagtgattctttgggaagaccttcggaagcagcatgacagtgaccaaaatgagctcagatggacgtcctgcactgacactgaatgctagagagtcagtcatttcacttgcctgaacctcctcgtccccttgtccagagtgagagacgtgatgttcacatcacaggcttgctgtgagggccagtgaggaggcaaaagggataatgccacacaaagaccaggtgctcaataagggctgctgttattactgaagtcttgggctcagttccagctgtcctattgcttaagtctgtgagctgagacaagtcgtgtcaacttttgggccctctagaacacctggatagtctttggtgggtaccaccttgaaaaaggcttgggggtccactgtaccnttancaaggggtcacttacttttccaaattcacttactcttatatcagaatctactggatcgtaaaattctttcantanangggcctatancttggcacatttttaaanccctggatn

SEQ ID NO: 6363 - DNA, 551 bp, Homo sapiens
  misc_feature (394)..(394): "n" may be a, t, c, g, other or unknown
  misc_feature (403)..(403): "n" may be a, t, c, g, other or unknown
  misc_feature (463)..(463): "n" may be a, t, c, g, other or unknown
  misc_feature (468)..(468): "n" may be a, t, c, g, other or unknown
  misc_feature (472)..(472): "n" may be a, t, c, g, other or unknown
  misc_feature (509)..(509): "n" may be a, t, c, g, other or unknown
aatttagttcctggtcaaacaaattcaaggcctactttagcctgcaaggtcactagcttaagacttctgacctttgccaataacaagcctgaggccttcatatgagggttggcaagtttagggtgggacgttaaaagagacaactgcccagggaacagtagtttacccattaaaagtaatagggtaatgggcaggcaggttaacagtgcgtataaaaatgtttaaacagcgactgaggcagcacaagttaacctgggacaagaagcatgtttacttgatttgaattatagaactatgtatggctccttaaactcccccttagtaggggctgcattggaggggaggggtcaagaggtctcattcctgaaaactgaaaggacaaactgcataaagnccaagttgnctaagacagatgccatctttacatgatataattcaagtttaagccttttaggaaataatncattnggtnaatattgacttttacaatacttggataattctattcncaacccccaaagagccattgtagccaaaaccttaatggacct

SEQ ID NO: 6364 - DNA, 446 bp, Homo sapiens
  misc_feature (14)..(14): "n" may be a, t, c, g, other or unknown
  misc_feature (112)..(112): "n" may be a, t, c, g, other or unknown
  misc_feature (154)..(154): "n" may be a, t, c, g, other or unknown
  misc_feature (246)..(246): "n" may be a, t, c, g, other or unknown
  misc_feature (258)..(258): "n" may be a, t, c, g, other or unknown
  misc_feature (313)..(313): "n" may be a, t, c, g, other or unknown
  misc_feature (349)..(349): "n" may be a, t, c, g, other or unknown
  misc_feature (393)..(393): "n" may be a, t, c, g, other or unknown
  misc_feature (395)..(395): "n" may be a, t, c, g, other or unknown
  misc_feature (417)..(417): "n" may be a, t, c, g, other or unknown
  misc_feature (423)..(423): "n" may be a, t, c, g, other or unknown
  misc_feature (426)..(426): "n" may be a, t, c, g, other or unknown
  misc_feature (429)..(429): "n" may be a, t, c, g, other or unknown
gcctcggggttacnagtcggctgctatagctttcagaatcacactcacactaccacattcaaacgcaggaaatgtgagtggcagcaaaaagaggctttcttcacagaactgnctcccattctgatcaaaaaagaaaatctttccaagaaccctnccccaggagactttctttgattggccagaaccaatgagatgagaccagtctatgccagtcactgggattactaaagaattatcatgaaaggnttaagccaatgntaatacctcccctaagtgcattggtgcttactcaatatctgaacaaaattacggntcttgagcatgaaagaagcaggcacagggaagactntcaagttaggtaaccagtaatgcctggcttacttggccacagancncaaaggcgattcttggataaanccaagnatngtngaattcattcttttaaa

SEQ ID NO: 6365 - DNA, 535 bp, Homo sapiens
  misc_feature (34)..(34): "n" may be a, t, c, g, other or unknown
  misc_feature (47)..(47): "n" may be a, t, c, g, other or unknown
  misc_feature (63)..(63): "n" may be a, t, c, g, other or unknown
  misc_feature (68)..(68): "n" may be a, t, c, g, other or unknown
  misc_feature (97)..(97): "n" may be a, t, c, g, other or unknown
  misc_feature (99)..(99): "n" may be a, t, c, g, other or unknown
  misc_feature (164)..(164): "n" may be a, t, c, g, other or unknown
  misc_feature (232)..(232): "n" may be a, t, c, g, other or unknown
  misc_feature (244)..(244): "n" may be a, t, c, g, other or unknown
  misc_feature (252)..(252): "n" may be a, t, c, g, other or unknown
  misc_feature (309)..(309): "n" may be a, t, c, g, other or unknown
  misc_feature (389)..(389): "n" may be a, t, c, g, other or unknown
  misc_feature (428)..(428): "n" may be a, t, c, g, other or unknown
  misc_feature (442)..(442): "n" may be a, t, c, g, other or unknown
  misc_feature (477)..(477): "n" may be a, t, c, g, other or unknown
  misc_feature (490)..(490): "n" may be a, t, c, g, other or unknown
  misc_feature (512)..(512): "n" may be a, t, c, g, other or unknown
  misc_feature (515)..(515): "n" may be a, t, c, g, other or unknown
  misc_feature (534)..(534): "n" may be a, t, c, g, other or unknown
cagttgcaaatgaatgactttattaatgagactntttagacaatgtncttcgtttaaatgaanatgtncttctaacataatctgtccgttataactngngtcatacagtcaatacatttaaacaaatgacaaggtaaatccttatgttaaatataagataatcnccactttcatttattattttctaatataaaataggcttacctaaaacaaacctgaaaagtttgaactntgcaagtagatncagttctntttcacaatctactagaataatcattccctatattattcaatctgactttttagttncctcatcttcttttttatccattcaaagttttatgctaaacaaaaactatatgaatagggtcaaacctgttaaaagtgcncaccgttgaagacttcctttccaatttcatggacatatncctatcctaaaatnggaattaaaaattttccctttttaaaacccaccgntttcaaatcccgnaattttttacctctttttaagnctngggatgggtttttgctttna

SEQ ID NO: 6366 - DNA, 568 bp, Homo sapiens
  misc_feature (387)..(387): "n" may be a, t, c, g, other or unknown
  misc_feature (392)..(392): "n" may be a, t, c, g, other or unknown
  misc_feature (418)..(418): "n" may be a, t, c, g, other or unknown
  misc_feature (429)..(429): "n" may be a, t, c, g, other or unknown
  misc_feature (449)..(449): "n" may be a, t, c, g, other or unknown
  misc_feature (461)..(461): "n" may be a, t, c, g, other or unknown
  misc_feature (464)..(464): "n" may be a, t, c, g, other or unknown
  misc_feature (489)..(489): "n" may be a, t, c, g, other or unknown
  misc_feature (511)..(511): "n" may be a, t, c, g, other or unknown
  misc_feature (521)..(521): "n" may be a, t, c, g, other or unknown
  misc_feature (533)..(533): "n" may be a, t, c, g, other or unknown
  misc_feature (556)..(556): "n" may be a, t, c, g, other or unknown
  misc_feature (568)..(568): "n" may be a, t, c, g, other or unknown
ctcttgagacagagtttcactcttgtcatccaggctggagtgcaatggcgcaatctcggcccactgcagcctccatctcctgggttcaagcgagtctcctgcctaagcctcccaagtagctgggattacagacgcccaccaccacacccagctaatttttgtatttttagtagagatggggtttcgccacgttggccaggctggtcatgaactcctgacctcaggtgatccacccgcctcagcctcctaaagtgctgggattacaggtgtgagccaccgcacccagccacaaatttttcttaaagcatttatagctttgagtctccctttcacacactcaactagactgtatgccccacgaaggcagagattttcggctggttcttncttgntgggatcctcaacatctaaaaatagnggctggcatanaagtaaaaagttctataagnattttggtaaanggntgaatcatatgctctgtaaaaaccnggtttttttatttccaaaatantttaataatngcttaattttgngccccaaaactgggggatttggnaaaggggggaan

SEQ ID NO: 6367 - DNA, 492 bp, Homo sapiens
  misc_feature (458)..(458): "n" may be a, t, c, g, other or unknown
  misc_feature (463)..(463): "n" may be a, t, c, g, other or unknown
  misc_feature (469)..(469): "n" may be a, t, c, g, other or unknown
  misc_feature (471)..(471): "n" may be a, t, c, g, other or unknown
  misc_feature (480)..(480): "n" may be a, t, c, g, other or unknown
  misc_feature (482)..(482): "n" may be a, t, c, g, other or unknown
  misc_feature (485)..(485): "n" may be a, t, c, g, other or unknown
gaaacatctaaaatgtaaacatcattcttagcctgcagaccatacacaaacagaggttaagcctgatttagcttcaggctatagtttcccacttccaggattaaatcaccaaaatggcagtatctgtgtcttctgtgtctcatggttgcatatcatcattgcattgctctgaagaagctgaaaatgcagagcaatgggatccctgacttgactgtgggcagagacagagtaggcaatgaaagtgctgcaaaggccttggggagagaggaaagtaggctaggacaatgggactagtcttggggaaaaaggacttctctgtgctttttagctccagagaaggaatgtaaagcaactttcacaccatcatctgggctgtagcggaacagtgagtatctctgatgaatgatgggctctatatgtggtgggctgcctttcagcttggatcaagtgctgcaaancctanagacangnttacccatngnccntaaccag

SEQ ID NO: 6368 - DNA, 583 bp, Homo sapiens
  misc_feature (464)..(464): "n" may be a, t, c, g, other or unknown
  misc_feature (509)..(509): "n" may be a, t, c, g, other or unknown
  misc_feature (554)..(554): "n" may be a, t, c, g, other or unknown
  misc_feature (578)..(578): "n" may be a, t, c, g, other or unknown
aaccagaaaacccactctcaggagttgtcacagccatagcaccttgaccacccaagtgaaactttgtactcggtatttatacagaaacataaattgcagcaaacattctactcaatatttctgccttccagtgccttgatccgatcctagtttttcccactactatcctgtcactactttttccatctcctgtagatcccgatgcccttcatcccttttagcgacaatgcattaggcaaaactctgctacccaacatttttatcttggacccacacacactaacacaaactgcccatccccttcccaggcccactccagtgctggctaccctttaaattatcttactgtgcaatcctaagtggttaataagtcaagtgatccctctacatgctcaactaaaatcaagacttccaagaagaaaccgccttcctccttgctggttcagaattattttttgggccanggatggtggcttatgcctataatggcagtattttgggaagctganggcaggaggatcacttgagtccaaaagtttggaacagcctggggnacatgggcaggacctggttttctnaaaaa

SEQ ID NO: 6369 - DNA, 573 bp, Homo sapiens
  misc_feature (448)..(448): "n" may be a, t, c, g, other or unknown
  misc_feature (497)..(497): "n" may be a, t, c, g, other or unknown
  misc_feature (507)..(507): "n" may be a, t, c, g, other or unknown
  misc_feature (563)..(563): "n" may be a, t, c, g, other or unknown
  misc_feature (567)..(567): "n" may be a, t, c, g, other or unknown
acaggtggtggttgtacaggcaattagtgctctctgtcagaaataccctcgaaagcacagtgtcatgatgactttcctctccaacatgctccgagatgatgtaggtagactactttttaatcataggaagttgctgtcttaaattcttaggattgccatgaaataccatagtgttttaagatttccttatcatctcagtatgcctctcaagtagtacactaagtctggttactgtcttattactaaacatgccattgctttgctttccccacttggagaaaaaaacacttttgcttctttcataaaaggtgggaaatgaaatttgaatattataagcataaaccttggagtgtaagcatttctccaaaatgtgtccctagaatgaatggcagttttatcttcttttttgccagggaggctttgagtacaagcggccattgtggactgnataatcagcattgtggaagagaaccctgagagtaaagaacaggcctagnccacctttgngaatcattggggctgggacacctggtctggtactaaaatctcacttgtgggcaaanaggncctaaa

SEQ ID NO: 6370 - DNA, 580 bp, Homo sapiens
  misc_feature (390)..(390): "n" may be a, t, c, g, other or unknown
  misc_feature (416)..(416): "n" may be a, t, c, g, other or unknown
  misc_feature (463)..(463): "n" may be a, t, c, g, other or unknown
  misc_feature (469)..(469): "n" may be a, t, c, g, other or unknown
  misc_feature (484)..(484): "n" may be a, t, c, g, other or unknown
  misc_feature (486)..(487): "n" may be a, t, c, g, other or unknown
  misc_feature (518)..(518): "n" may be a, t, c, g, other or unknown
  misc_feature (549)..(549): "n" may be a, t, c, g, other or unknown
  misc_feature (571)..(571): "n" may be a, t, c, g, other or unknown
  misc_feature (576)..(576): "n" may be a, t, c, g, other or unknown
gacggtgtcaaactctgctttattggaatagagaatacaggcagcaggaatcacgcttggtgctggcagctccaggtcccctgcccccacgggctctcccacttgtctggatcaggggagacctccactttgaagaacaatatggggtgggagcttccaatgtgcattctgctaccagcctcaggattagcagcaagatgccaacagcaacagcaacagcaacagcaacagcaacaaaggactggactcgacacttcaggaaaggacgtgtagaagagaaagtcagacccacagtgtcacgtgttaacaacggtcccacaacagcagacacgacactggtgtgcaccggttgtaccacctgtggggaaggcttgcaagcacaccgacagnccctgaggggcccggcattctcactnccaacatgagaaagaattaacacacacacacacatgttcacattttntgcganggacagtcaaattangnnccaaagggaggataaaacattttagagaacncaaaagcctgttgccttgcccaataggcgtnaggctggacacaaaaggctggnttggnctgg

SEQ ID NO: 6371 - DNA, 566 bp, Homo sapiens
  misc_feature (356)..(356): "n" may be a, t, c, g, other or unknown
  misc_feature (393)..(393): "n" may be a, t, c, g, other or unknown
  misc_feature (478)..(478): "n" may be a, t, c, g, other or unknown
  misc_feature (500)..(500): "n" may be a, t, c, g, other or unknown
  misc_feature (525)..(525): "n" may be a, t, c, g, other or unknown
gaaaggagtctcacactgtcgcccatgctggagtgcaatggtgcaatctaagctcactgcaacctccacctcctgggttcaagcaattctcctgcctcagccttccaagtagctgggattacaggcgcccaccaccatgcctggctaagtttttgtatttttagtagagacggggtttcactatgttggtcaggctggtcttgaactcctgacctcgtgatctgcccacctcggcctcccaaaatgcagggattccaggcgtgagccaccacacctggcctaatgctggcttttttctgtccttcaatcatgtcaagcttgttttcacctcaggtattttaccaaatggtcgttgntcttgaaattctctctgccctgatcttaaagggctgnttcttggcattcagaattagtactcatacttcattagaataagcctttttgaacctatctttactaagtccctcatttaataatncctataataagctggaattttngcttggttggctatggcaatcttgnccagtagaattcgaattcatgagaaacaaggttttgtttgt

SEQ ID NO: 6372 - DNA, 511 bp, Homo sapiens
  misc_feature (430)..(430): "n" may be a, t, c, g, other or unknown
  misc_feature (446)..(446): "n" may be a, t, c, g, other or unknown
  misc_feature (457)..(457): "n" may be a, t, c, g, other or unknown
  misc_feature (467)..(467): "n" may be a, t, c, g, other or unknown
  misc_feature (479)..(479): "n" may be a, t, c, g, other or unknown
  misc_feature (497)..(497): "n" may be a, t, c, g, other or unknown
  misc_feature (509)..(509): "n" may be a, t, c, g, other or unknown
aaagagatagggtctcactttgctgcccaagctaagtgtagtggcacgatcatagctcactgcaaccttgaactcctgggctcaaacaatactcttgccgcagacgcctgagctgacaggggcacaacatcatgccaaggtagcttttaaatttcttgtagagaccagaacttaccatattgtccaggctggtctagcctcaagggatcctgtggcctcagactcccaaagcactgggattaaaggttccctatcttaactgtcagtatcatggttgtgatgttgtagcatagttttgacaaaatgtttccatcaatggaaactttgtaaaaggtacaaagaatctcatttcttaggattgcatgtcaatctacaattatctcaaaactaaaagtttaatgaagactttttttttttttttttttttganacagggcttttgttgnccaagcttganttcaatggcncaaaaaaacagnttactggaaccttgaccncccaggttaaanaa

SEQ ID NO: 6373 - DNA, 572 bp, Homo sapiens
  misc_feature (392)..(392): "n" may be a, t, c, g, other or unknown
  misc_feature (464)..(464): "n" may be a, t, c, g, other or unknown
  misc_feature (511)..(511): "n" may be a, t, c, g, other or unknown
  misc_feature (514)..(514): "n" may be a, t, c, g, other or unknown
  misc_feature (518)..(518): "n" may be a, t, c, g, other or unknown
  misc_feature (531)..(531): "n" may be a, t, c, g, other or unknown
  misc_feature (559)..(559): "n" may be a, t, c, g, other or unknown
  misc_feature (567)..(567): "n" may be a, t, c, g, other or unknown
gttttttaaacatagttgctgtaaacgtctatgggaaatacagtctttataataggttttgatagaataattgagtaattcccccccataagtacattttattgactgttactgcataataggcgataaatctgatgcttatttggaaaagaagtaggcattctttagatgagctgtgctttgaagactgttatgaaaaggaataagaagtcagcatagtggcactcctggtttccttttttggccccgccacagaaaagatggatgtagtaagaaagttggagtgaaagagaaagttccagggagaggggaggggagctagtagtcatcagctaaaaaagagaagaagaaaagtgattttaaggaaaaaaaaattaatagaataaaagatnaaaagagtgattaattcttactttcaatggtaagaatacaggtctagctgcagatcctttattggtgactgntttacacatatactctcctcatcttctggggaaagttcttggtagtnaangccngtaagttctcccnttcaatatatggaaggcttttcatccgnaggatttntcctt

SEQ ID NO: 6374 - DNA, 575 bp, Homo sapiens
  misc_feature (450)..(450): "n" may be a, t, c, g, other or unknown
  misc_feature (454)..(454): "n" may be a, t, c, g, other or unknown
  misc_feature (456)..(457): "n" may be a, t, c, g, other or unknown
  misc_feature (526)..(526): "n" may be a, t, c, g, other or unknown
  misc_feature (548)..(548): "n" may be a, t, c, g, other or unknown
  misc_feature (564)..(564): "n" may be a, t, c, g, other or unknown
  misc_feature (567)..(567): "n" may be a, t, c, g, other or unknown
  misc_feature (575)..(575): "n" may be a, t, c, g, other or unknown
gctgctgtatcttttaaaaaagcaaaatcaactcacatttaagcaccaactccatgcaagtaacctgaacggttcagtctttttgtcatgtatgtggcctttggttctccaactacatgggatctgtgttgttagcttaaaaaatacagaattggcctttcaaaaaaaaataataatctacagcaaccaataaatagtctcaaacaaccctgctgactgcagctgccttctgaaggctgggaaaaggaggtggagatagagcagaaagaggcagggaaaggggacgctgcagctagctacatagcaaggaacacgcccccatcatgtcctccttgctctgtcagaaggcgggttgttgtcagtctcctgatcaggctgccttagaaacgattaaaaaaaaaggaggcaggaagactaacaactaaaaaatgccagcttcttgaaaaggangggncnnggtccttgggaacttcctccttcccttttttccaggaactttccgtaaatctaaaggggtgccggggcncaataggggacaaggggtttgnccaagaaattttgggngcnccaccggn

SEQ ID NO: 6375 - DNA, 566 bp, Homo sapiens
  misc_feature (1)..(566): "n" may be a, t, c, g, other or unknown
nnnnnnnnnnnnnnnnnnnnnnnnnnnnnnnnnnnnnnnnnnnnnnnnnnnnnnnnnnnnnnnnnnnnnnnnnnnnnnnnnnnnnnnnnnnnnnnnnnnnnnnnnnnnnnnnnnnnnnnnnnnnnnnnnnnnnnnnnnnnnnnnnnnnnnnnnnnnnnnnnnnnnnnnnnnnnnnnnnnnnnnnnnnnnnnnnnnnnnnnnnnnnnnnnnnnnnnnnnnnnnnnnnnnnnnnnnnnnnnnnnnnnnnnnnnnnnnnnnnnnnnnnnnnnnnnnnnnnnnnnnnnnnnnnnnnnnnnnnnnnnnnnnnnnnnnnnnnnnnnnnnnnnnnnnnnnnnnnnnnnnnnnnnnnnnnnnnnnnnnnnnnnnnnnnnnnnnnnnnnnnnnnnnnnnnnnnnnnnnnnnnnnnnnnnnnnnnnnnnnnnnnnnnnnnnnnnnnnnnnnnnnnnnnnnnnnnnnnnnnnnnnnnnnnnnnnnnnnnnnnnnnnnnnnnnnnnnnnnnnnnnnnnnnnnnnnnnnnnnnnnnnnnnnnnnnnnnnnnnnnnnnnnnnnnnnnnnnnnnnnnnnnn

SEQ ID NO: 6376 - DNA, 558 bp, Homo sapiens
  misc_feature (478)..(478): "n" may be a, t, c, g, other or unknown
  misc_feature (494)..(494): "n" may be a, t, c, g, other or unknown
  misc_feature (505)..(505): "n" may be a, t, c, g, other or unknown
  misc_feature (539)..(539): "n" may be a, t, c, g, other or unknown
  misc_feature (547)..(547): "n" may be a, t, c, g, other or unknown
caaagggagttttaaaaaaatttattggctatgtttgattatccacaacagaatttcccttaattagcacaggaaattgaaagttggttataatttaatatctctgctcgtcttcaacagacatactcagcatttatacttgtaaatagaattgagttttcattgtttcgttttctgtttttgtttccttaggaacaagaggatgaaggaaatatggtcagcattttaataacaccataaatccaagataataagtaattctataaagttttccagtttcattaattcagaatttcatcatataacttgaaatccaattggcttcctctttcttagaaacaaaaaccaaagaaacctttttctgaaagacattattttccagtattaggccaatttgtcctcaaattaagtagaatctcaacatcttgttgagccagtttgtaaattccaacttcatttaatgctgctgtggcaggangcttgcctggaactgntggaggacatntttaacaatagtgcaaaacccgcgttcaaaatcnaaacaatnccgggtttttt

SEQ ID NO: 6377 - DNA, 563 bp, Homo sapiens
  misc_feature (528)..(528): "n" may be a, t, c, g, other or unknown
  misc_feature (540)..(540): "n" may be a, t, c, g, other or unknown
gtttttttttgcttttgagggaattaataagatataattaattgtgtcttaacttttgaaagaaatttttagatggaggcaactgggatgtttgtgataatagataagaaagacaccactgacctgtagttaaattggtttgaattgcagatattcattattgaatttattcctgttttctcatactttagaaaagacacctgaacaataaatgaatcctggatagtgtactgtccttcaaacaatgaagtgatattaatacttgcctgcaggagatgcatactacaggagagaacccttagactatgtcaggccacactatgaacctccccccacctgccttttttctcctttatgtttctgttaccgtactaacattgtggattaacgacactgaaattctgcataatgtgaacaggataaactatttataaatcgaaaaaaaaaaaaaacaacacagggcttctgcagggaatattctttcctcaatattctactttccttaactcttctttgaatttgcttaancatttgaggctncctggcaccctttttttccaata

SEQ ID NO: 6378 - DNA, 559 bp, Homo sapiens
  misc_feature (496)..(496): "n" may be a, t, c, g, other or unknown
  misc_feature (519)..(519): "n" may be a, t, c, g, other or unknown
  misc_feature (533)..(533): "n" may be a, t, c, g, other or unknown
  misc_feature (537)..(537): "n" may be a, t, c, g, other or unknown
  misc_feature (548)..(548): "n" may be a, t, c, g, other or unknown
  misc_feature (556)..(556): "n" may be a, t, c, g, other or unknown
  misc_feature (559)..(559): "n" may be a, t, c, g, other or unknown
actcaagaatttttattttcagtcttctttgtaggaatgagaaatgggaaagaattgcattctgataaatagattaatggttaaacaaatcatggcacattcaaaccaagaaattttgtagccatttgaagcttgtagtgagcagtaaaattgccaacatacggtgagtgaaatgaagtcacagaacagtattactagtgtctatcagttatgtaaagctaaccaaaaaccgtgcatttacatgtgtgtgtttgctaatgcattttgatcaggatcgggagcactgtatcaaagcatcataagtagactcccttttcactttttgttctccaatggctcagaattgtgaactctttacgggcatgtattttacagttttaaaacaattgttttttgttttttgtttttggtggggtttggggagcagggtctcactctgttgcccaggctggagtgcagtggcataatttctgctcactggaaccttcgcttccangtcaagtgattcttctggctaancttcccagtagctnggantaccggggggntccccttnccn

SEQ ID NO: 6379 - DNA, 550 bp, Homo sapiens
  misc_feature (1)..(550): "n" may be a, t, c, g, other or unknown
nnnnnnnnnnnnnnnnnnnnnnnnnnnnnnnnnnnnnnnnnnnnnnnnnnnnnnnnnnnnnnnnnnnnnnnnnnnnnnnnnnnnnnnnnnnnnnnnnnnnnnnnnnnnnnnnnnnnnnnnnnnnnnnnnnnnnnnnnnnnnnnnnnnnnnnnnnnnnnnnnnnnnnnnnnnnnnnnnnnnnnnnnnnnnnnnnnnnnnnnnnnnnnnnnnnnnnnnnnnnnnnnnnnnnnnnnnnnnnnnnnnnnnnnnnnnnnnnnnnnnnnnnnnnnnnnnnnnnnnnnnnnnnnnnnnnnnnnnnnnnnnnnnnnnnnnnnnnnnnnnnnnnnnnnnnnnnnnnnnnnnnnnnnnnnnnnnnnnnnnnnnnnnnnnnnnnnnnnnnnnnnnnnnnnnnnnnnnnnnnnnnnnnnnnnnnnnnnnnnnnnnnnnnnnnnnnnnnnnnnnnnnnnnnnnnnnnnnnnnnnnnnnnnnnnnnnnnnnnnnnnnnnnnnnnnnnnnnnnnnnnnnnnnnnnnnnnnnnnnnnnnnnnnnnnnnnnnnnnnnnnnnnnnnnn

SEQ ID NO: 6380 - DNA, 584 bp, Homo sapiens
  misc_feature (504)..(504): "n" may be a, t, c, g, other or unknown
  misc_feature (563)..(563): "n" may be a, t, c, g, other or unknown
  misc_feature (577)..(577): "n" may be a, t, c, g, other or unknown
  misc_feature (581)..(581): "n" may be a, t, c, g, other or unknown
aaaaaataaaatgttcgcacaatgggagaaaattgctttaagtgttacaccttagccaacagagcccaaactccgtgtttccgttctttctctttcggtttctgctgagggctggtgacacactggcctcttgtcagtggctgccggcagggccaggaacagagtagaacctgcagcacagctcagtccagaaagcgctggcaggccttcttccaccggcaggccgtgcaccactggtcccggtgctcgatgccatacaccttgcggcacttcttagcctcccctcgggctttcctggcaccactctgggcccggggtggagaagtgacgatcagatgagatttcatcgcaggtgctggctgctggggctcgctgaagcttagcgaccggctccggaccggagagagagagcaggcggcggagggggcagcagcccagctgacactggtgtagatgtgtggtgagactgggaatctggaaggatggcagaacctgcggaagacnaggtgcaacccggattctagcttaaggaagtgttcaaaagtttgccacaattcccaaangcttatacacagcngaanggg

SEQ ID NO: 6381 - DNA, 583 bp, Homo sapiens
  misc_feature (522)..(522): "n" may be a, t, c, g, other or unknown
  misc_feature (538)..(538): "n" may be a, t, c, g, other or unknown
  misc_feature (562)..(562): "n" may be a, t, c, g, other or unknown
aaaatgtgggtcatttctttattattttatttgtattggttaacaatgatcagccatgcaagaataaatgattattgtaaaatctgcaaacaatgtaggtatgtagagagtcccttccttggagcttgaccttgtcagacaggtatagatgagtgttccggggcagccgtaaaaactgccagagactgggctgcttataacagaaacgcatggtctcccagaagcccacattcaaggtgtccaaaggcctggctcctggaggctctggaggagagcctgttccctgtctctcagcttctgccggttgccagcaagtgttgccgttcattcactccagccactgcctccatctgcacacagcaaaacagcgtatcctgaagtgctcaaccttatagccattattttaaaatatccggaacacacaggaccgtgggagtggctgttggagaaattttcatgaaggaagaaagattaccactaagttttaaaatgctagtttggttggtttggcttggaaaggangtaaaagtgggaagtnaaaatagggagtttggggtaaggngggaaaagcaaaggaacccct

SEQ ID NO: 6382 - DNA, 586 bp, Homo sapiens
  misc_feature (503)..(503): "n" may be a, t, c, g, other or unknown
  misc_feature (520)..(520): "n" may be a, t, c, g, other or unknown
  misc_feature (538)..(538): "n" may be a, t, c, g, other or unknown
  misc_feature (576)..(576): "n" may be a, t, c, g, other or unknown
  misc_feature (585)..(585): "n" may be a, t, c, g, other or unknown
gactggatacaaattgcagtttattaaggctccagagtgagaaatggcacttggttctgggcaggggcaggggcaggggtgtcagtggagcccaaaggagctgggtccaaacatgttggagggacctcctccatccccctacccccaataaataaagtctcagctccatctcagggtgctggtgcagggcagggatccctcactgaggagaacccagggctgctacctccttcatatttctccccacattggacctggtcacaggtcagtgagcaacagggcttctgtggtcctagtactctgagggggctggggagttcagggtggagagctggggcctggtggtggcctccccgtagccagtcatagtccgaggctgcccagggcaggctcagagtggggcctgcgttggggacactgtgcgcatcccaggtcggggcccagcctgggccacaagctagatgtgcagcttccgggtcatcaggtggcttcaggccagactnttgcgctgaatgctgangcttaaggaaccttgggncaccccaaatggtgagacaacgggtgaaccaaccaccngaggaaacnt

SEQ ID NO: 6383 - DNA, 553 bp, Homo sapiens
  misc_feature (40)..(40): "n" may be a, t, c, g, other or unknown
  misc_feature (104)..(104): "n" may be a, t, c, g, other or unknown
  misc_feature (243)..(243): "n" may be a, t, c, g, other or unknown
  misc_feature (273)..(273): "n" may be a, t, c, g, other or unknown
  misc_feature (285)..(285): "n" may be a, t, c, g, other or unknown
  misc_feature (376)..(376): "n" may be a, t, c, g, other or unknown
  misc_feature (487)..(487): "n" may be a, t, c, g, other or unknown
  misc_feature (497)..(497): "n" may be a, t, c, g, other or unknown
  misc_feature (512)..(512): "n" may be a, t, c, g, other or unknown
  misc_feature (526)..(526): "n" may be a, t, c, g, other or unknown
  misc_feature (531)..(532): "n" may be a, t, c, g, other or unknown
  misc_feature (541)..(541): "n" may be a, t, c, g, other or unknown
gagatggagtcttattctgtcacccaggctggaatgcagnggcacaatcttggctcaccgcaacctccacttcctggttcaagcaattctcctgcctcaacctnctgagggcctggggttacaggcgcccaccaccacgcccggctaatttttgtatttttactggagacgaggtttcgccctgttggctaggcgggtctcgaactcctgacctcaggtgagctgtccgccttggcgtcccanagtgctgggattacaggcgtgagccactgngcccagccttgnttatctttctgagtcaatatgttttcctgggcataatccaaatgactcaagtagttttgcttcattttgggataatgaaggatgccaaatntagtcttacttgttttgtgatgaaaagaaaatatattctgcagatagctaagaagctaactagaccccttgttacactgacctatagatatgccttttacacttatcaacngagaagtgancctgaatcaaaactnttgtaactggcccngattnntgggggaanaaaaccccagtt

SEQ ID NO: 6384 - DNA, 576 bp, Homo sapiens
  misc_feature (459)..(459): "n" may be a, t, c, g, other or unknown
  misc_feature (571)..(571): "n" may be a, t, c, g, other or unknown
  misc_feature (574)..(574): "n" may be a, t, c, g, other or unknown
gttttctactgaaacttattatttgccattaagaattgcaaactatactactaagaatgaacaacattctcttcattaagcctttttcaaaacacacgagacaaagctcccctttggtcaaggtgtcccacacattaccactgcagctcccagcacagcggcgcaccatgaactcggacgtggagcccaaggaatgagagatcgcaccagccttccctgcttccccacagcgatggacgggtcaagctccgcgatgctcatgcggcacggcgggtgctggcagtggaagctctcgtccgggatgaagcagccatcagtgggctccacggctggctgcgtggtgtgggggtccaggtagatgagcccctcaccaacgtagccgatgaagtagtgggcgctgttgggcttcctccgatgacgcccagggactggggcatcatgaacagtgcttagcgtctncacgtaggcctcgttgatgtccgtgagccccagcgcaggggaatgagaagtaccaggggcttcatggcgaacggctgttgtgaccttaagttccgcagggaatccgttgcantgncg

SEQ ID NO: 6385 - DNA, 579 bp, Homo sapiens
  misc_feature (458)..(458): "n" may be a, t, c, g, other or unknown
  misc_feature (576)..(576): "n" may be a, t, c, g, other or unknown
acatatagtacaatttccagtgtgatgacatttcaatgggaaaaagattgtgcatttgcaataaacaccatcatccctgagtccacagataaggtccccggagaaggggcttcccctcctttctcgctgggttgacgttcccagcgagtgaagccttttctggaatgtgtgtacgcaccctccaccaagagttctaataagctaagcttaaagcagaacagtgaaatggcaaaactgtacagagccctgactttacatttcactctgacagccagggtcggaagcaccacatggaaagtgctgtccataactgctcacttacctgctccttgctgacagctcccaggatctggctccagcgagtggcaaaactgggaattttgccaagggaaattactcaggaccgctaataaaaacgccggcttctgcaacatgcatattcccccagcccccacctncatcttgcccagggcagaccattcattaactatctgcggggtgaacaaagaatcccaatccttagatgtcccaggactcatggctcatgacccacggaatctaaggcagcacagtggnttt

SEQ ID NO: 6386 - DNA, 570 bp, Homo sapiens
  misc_feature (489)..(489): "n" may be a, t, c, g, other or unknown
  misc_feature (541)..(541): "n" may be a, t, c, g, other or unknown
gaaaaaaatcatgagtgagttaaatttaaatatttcaaacatgtaaactctcaagagggtaccatgattacagggattaaataacataaaggtttcctacaaactctacacctgcttttgccccttaaatatcaaatgtagttacattctggtgcaaacttaaaagtaattttcaaattctgtctgaacatggtgtcttagtctgcttgggctgccagaacaaaataccatagactgggtggcttaaacaacagaaataaattttctcacagttctgaaggctgggagtccaggattaaggttttgcagggtttggtttctagtgagggctttcttcctggcttgcagatggccatcttctctccataggctaacatggcctctactttgtgtgtgggagagtcagagatagagcaagccctcttgtgtctcttcatataagcctactaatccccatcagaccaggcccttatgatcttaaaccctaantacatcttaaaaagccccatcccgaaacaccatcagactggagatggaactntaaccccattccataccctggagatggag

SEQ ID NO: 6387 - DNA, 557 bp, Homo sapiens
  misc_feature (21)..(21): "n" may be a, t, c, g, other or unknown
  misc_feature (70)..(70): "n" may be a, t, c, g, other or unknown
  misc_feature (443)..(443): "n" may be a, t, c, g, other or unknown
  misc_feature (465)..(465): "n" may be a, t, c, g, other or unknown
  misc_feature (526)..(526): "n" may be a, t, c, g, other or unknown
  misc_feature (538)..(538): "n" may be a, t, c, g, other or unknown
  misc_feature (548)..(548): "n" may be a, t, c, g, other or unknown
  misc_feature (551)..(551): "n" may be a, t, c, g, other or unknown
ggctgagagattcaagtttgngctatatagaacactaacagttactaaagactaggaaaatttgcagganaaaggctatttttaaacttcacaataattctaaaggaagccaaataataaaacttctaataaatgccataacttaactattacctctatttgtacctttcacaaggatctaggttcaaaataagctcaaaacacagcactcaccacttcaacagcagctcaaagtcaaatggaaaaacttggggtatattctttggaggatatactaggacctgagaagcaacatgttcctggttggtaggtccacaaaaaatttaaacatgcagaattttatggactgacaaaaaaaattaccaatttaagtgatcaatatattaatggttttcagagtagtacccgatatttgatgttcaaggtcatgcatgggtattttnaattccttaacctagaccgcanggtataagtcaccattctccctaatttttgaaaaatcttaactgggcaatccaaatcttgntttccattttcncaaataatgngangacccg

SEQ ID NO: 6388 - DNA, 585 bp, Homo sapiens; identical to SEQ ID NO: 5617
  misc_feature (1)..(585): "n" may be a, t, c, g, other or unknown

SEQ ID NO: 6389 - DNA, 572 bp, Homo sapiens
  misc_feature (518)..(518): "n" may be a, t, c, g, other or unknown
  misc_feature (524)..(524): "n" may be a, t, c, g, other or unknown
  misc_feature (550)..(550): "n" may be a, t, c, g, other or unknown
  misc_feature (552)..(552): "n" may be a, t, c, g, other or unknown
gtagagatggggttttgccatgatgcccaggctggtctcaagctcctgagctcaagcgatcctctcgccttggcttcccaaactgcttggattacaggcatgtgccaccacatccggcctaaaagtttttaagagtaataagcaaaggtagatgtgtatgtgtgtgatactgtcatggtgacatttgtccaaacctatagaatgtgccaagagtgaacactgtggactctggttgatggtgatgcatcaatgcagtttcaacaactgtgacacatccacccctctggagcgagaggtctgcagtggggaggctatatgtgtatggggggaaaagggggtgtatggaaactgtaccttccacttaattttgctgtgaacctaaaactgctctaaaaaatagtctatttttaaaaggcacatgattcaattacattttccatcaataacaactgagaggcttgggaatgatgaccggtgtggactggcccggccccattacctggtgcacgtccttctgnatccgnatcgtggtgctggccccgacacatcnanttggtgaggaagggtggctt

SEQ ID NO: 6390 - DNA, 582 bp, Homo sapiens
  misc_feature (104)..(104): "n" may be a, t, c, g, other or unknown
  misc_feature (112)..(112): "n" may be a, t, c, g, other or unknown
  misc_feature (417)..(417): "n" may be a, t, c, g, other or unknown
  misc_feature (497)..(497): "n" may be a, t, c, g, other or unknown
  misc_feature (534)..(534): "n" may be a, t, c, g, other or unknown
  misc_feature (539)..(539): "n" may be a, t, c, g, other or unknown
  misc_feature (554)..(554): "n" may be a, t, c, g, other or unknown
  misc_feature (574)..(574): "n" may be a, t, c, g, other or unknown
gtgactgatcataggaatttatttttaaataggtttcattagttcaagttagaatgacaataaatgtgaagacatgtttgtctgggatgtggttttttttttgntttgtttnttgcttttattcagcaaagcgtactttttttcccaaaacataaaatcattcagcaaaaaaacaaccaaagaacaataacaaaaaaacagtgcacatgccacaaagcaaaccaaacatagctcagttttcctactgataacatattttgtcttttaattttggcatgtggaagtcacagaaattcacagacttaatatgcacacccaaatattctaagtgcttatttagggagtatctttatttggaataaagaatttcgagttataaaactgatggcttataagaatgcagcttactaaattggncttcgttcttacaaactggagtaatcttgcctttgagagttgaaaatacatattcatctacatttctgcagcgagtgggnccacagttaattttcatcactggtgggggttggcaanaatgntcactctttttctgntgctggggctggggcttccntgacttgg

SEQ ID NO: 6391 - DNA, 575 bp, Homo sapiens
  misc_feature (546)..(546): "n" may be a, t, c, g, other or unknown
  misc_feature (561)..(561): "n" may be a, t, c, g, other or unknown
  misc_feature (575)..(575): "n" may be a, t, c, g, other or unknown
gactgaaattaaagtgtatttatttgcagcaatcctttaacaatgatcaaattttgacaacaagcaacagcaattactgcttaagtgttgcctctagataggagcggcagatagcaggaaactgtattatctccaaaacaaactgcaagccccccacccccccgaacgtctgtaatcaaatcgccatctccccaaagtctgattggcagggcagatcaccctaagataatgaatttattacatttcctgggttatttacaaaagggggagggccaatccggattgtcccctaggtttaactgtaaattaacaagaaaaaatggtttaaaaagaaaccaccctagaccaaaatgttctgctcctctcgccttccttcttgttattgctttaaatctttttcaaaaataattgttctacaaacatattttctaaaatagtttcccaaagattaaatatccctttccaacccgcagtatatttttaaaaaagcaatccttctatgtaatcatgaaggattgtaaatgggggagaaatattttccttccntttaaaaactgggtnatttttccttttan

SEQ ID NO: 6392 - DNA, 476 bp, Homo sapiens
  misc_feature (19)..(19): "n" may be a, t, c, g, other or unknown
  misc_feature (46)..(46): "n" may be a, t, c, g, other or unknown
  misc_feature (79)..(79): "n" may be a, t, c, g, other or unknown
  misc_feature (86)..(86): "n" may be a, t, c, g, other or unknown
  misc_feature (383)..(383): "n" may be a, t, c, g, other or unknown
  misc_feature (437)..(437): "n" may be a, t, c, g, other or unknown
  misc_feature (463)..(463): "n" may be a, t, c, g, other or unknown
  misc_feature (465)..(465): "n" may be a, t, c, g, other or unknown
  misc_feature (469)..(469): "n" may be a, t, c, g, other or unknown
  misc_feature (472)..(472): "n" may be a, t, c, g, other or unknown
  misc_feature (475)..(475): "n" may be a, t, c, g, other or unknown
agttttgctcaaaatgctncgtttattgctctattcaatgaccacnagcgaattataaaaagacaccaaatgtctctgnctgccgngggataaatatttaaagtcagcaataaaaacacgtggctccaagataatacatgttgccaaagagtcatgcatgccctcctgatgggctctcaacacacgcacggacatgggaacacacgcagagcaacacgcagtgagacttctgggaaggctttcccacagtgacacagaaaaatgtctcacgtagatctgggctgagtccccacccaaaccttgagctcccctcccctccccaacagggcctagatcctctgggttctccatgccccatctgccccctaccttgccagtgcctnacaggctgggcaccctcctgagagcatctgacacccagaggccaccctggctgngatgcccactccaacctagagaactntncctnagntgna

SEQ ID NO: 6393 - DNA, 566 bp, Homo sapiens
  misc_feature (140)..(140): "n" may be a, t, c, g, other or unknown
  misc_feature (142)..(142): "n" may be a, t, c, g, other or unknown
  misc_feature (435)..(435): "n" may be a, t, c, g, other or unknown
  misc_feature (496)..(496): "n" may be a, t, c, g, other or unknown
  misc_feature (499)..(499): "n" may be a, t, c, g, other or unknown
  misc_feature (502)..(502): "n" may be a, t, c, g, other or unknown
  misc_feature (530)..(530): "n" may be a, t, c, g, other or unknown
  misc_feature (533)..(533): "n" may be a, t, c, g, other or unknown
  misc_feature (537)..(537): "n" may be a, t, c, g, other or unknown
  misc_feature (553)..(553): "n" may be a, t, c, g, other or unknown
gagatagtgtgtgactctgtcaccaaggctggagtgcagtggcaagatcatagctcactgtagcctccatctctggagttcaagggatcctcccgcctcagtctccgaagctaatttttttttttttttttttttagtananacatggtttcactatgttgcccaggccagtctcaacctcctgactgaagcaatcctcctgcctcagcctcccaaagtgctaggattacagatacgagccactatgccctggctctttccttcttaaagaaaggacactttaaatcactttctccacacacagagatgaatgagcaacagacatataagttaggatttatttcagggtacctgaaccacctaagagaaaacagacacacaaagcaacatcacttgaccaccgtcacacttaactaatgagtgtactgggacttnaggctagaacaattgggctttctatcctctggtcctttcagaaacaaaaggggaaaaaacnggnttnaatcctcatttgctggaaattccgggcnctncagnattaggataacacctncaaagtttttctt

SEQ ID NO: 6394 - DNA, 582 bp, Homo sapiens
  misc_feature (386)..(386): "n" may be a, t, c, g, other or unknown
  misc_feature (465)..(465): "n" may be a, t, c, g, other or unknown
  misc_feature (483)..(483): "n" may be a, t, c, g, other or unknown
  misc_feature (532)..(532): "n" may be a, t, c, g, other or unknown
  misc_feature (556)..(556): "n" may be a, t, c, g, other or unknown
  misc_feature (560)..(560): "n" may be a, t, c, g, other or unknown
  misc_feature (572)..(572): "n" may be a, t, c, g, other or unknown
  misc_feature (575)..(575): "n" may be a, t, c, g, other or unknown
  misc_feature (578)..(578): "n" may be a, t, c, g, other or unknown
cattgatatagggtcttgctttctcacccaggctggagtggtggtgaaatcacggctcactgcagcctcaacctcctggtctcaggcaatcctcccacccaagcctcctgagtagctgggactacaggcggcaccaccatgcctggctaattttttaaaaattatttgtggagacggtttcactatgttgcccaggctggtcttgaactcccgagctccaagtgatcctcccacctcggcctcctgaagtgctgggattccacaggtgtgagccactgcacctggctgcaaggctggtcttgactgacaacgtcaggcagtagtccagtcgctaggacagacggatcctgaccctcacactggagtgggtcacaagggcgccgtantgccccacccaggaactcacgtctctcccgtactgctcaaaagatacgtagcggatgcccttgccaaagttggtgaaanacgtgggagaacctgtcngcaagccccttttagtccacttgaaggaccgggtcaaggtgaaggcttnaaaactttgaccactttccttttnatanacattccagaanggnggncccg

SEQ ID NO: 6395 - DNA, 544 bp, Homo sapiens
  misc_feature (458)..(458): "n" may be a, t, c, g, other or unknown
  misc_feature (473)..(473): "n" may be a, t, c, g, other or unknown
  misc_feature (508)..(508): "n" may be a, t, c, g, other or unknown
  misc_feature (511)..(511): "n" may be a, t, c, g, other or unknown
  misc_feature (528)..(528): "n" may be a, t, c, g, other or unknown
  misc_feature (531)..(531): "n" may be a, t, c, g, other or unknown
  misc_feature (537)..(537): "n" may be a, t, c, g, other or unknown
cccattttattcatttatttattttttgcaaacaattttagaggcagggtgttaaactgattaaaatttcacaagattgacattattgcttaaagtgcttgaattggttacattttaaaaaattaaggtacagattattttaaataaaaactacaatatttttagcaacaaaataataggaatgccacacaaatacagtaactattttggttatacagaaatggaagccaaaaataaattaatgtaatactggaaaacagaaatttaattaggcagaaaagtaggaaataattttccctgacccatgccacttacatgagttcattacaatagtgctgataaatgccttgaccatataatagcaaacaagggcaaaacatttagtgcacaatattttaatacacgtgaatatacaaagttgatcaaaatgcaatgttgaagggataaaatccatctgnaataaagctacactncaatatctaaaatagccctaagctccatttggacnttngatcatatttaggctgnccntgaaantaagggt

SEQ ID NO: 6396 - DNA, 581 bp, Homo sapiens
  misc_feature (441)..(441): "n" may be a, t, c, g, other or unknown
  misc_feature (481)..(481): "n" may be a, t, c, g, other or unknown
  misc_feature (514)..(514): "n" may be a, t, c, g, other or unknown
  misc_feature (541)..(541): "n" may be a, t, c, g, other or unknown
  misc_feature (544)..(544): "n" may be a, t, c, g, other or unknown
  misc_feature (564)..(564): "n" may be a, t, c, g, other or unknown
  misc_feature (569)..(569): "n" may be a, t, c, g, other or unknown
ctgcataaaatactgtttattttgtcctttaggaagactaaagtagtccagctcccctacagcccagtcttgcccccaccctgcactctgtcgccttagttcctggggaccaagcaactggcatttctcaagcagaccctctccttgttgctccttttcagtccctggagtctggcttcccaaaagccaaagctggaggagagctcattgctgaggaagcagggttggagcctgaggagatgcagagggcctggacccctcgctggatcccagaggcccaggggcagagatgctgggacagggctctaggggaccactgggtgactcttgaggggctagaagcagggctgggtgacttttgctacggtgggctgcaacactgtctggcttctcaaagcgcttgccgcagaattcacaggggaagcgcaaggcagccaccgnctctgcatgcttgcgctggcgccagttcagggaaaccttntggcggcaggtaaacccgcatatctcacactgnaaggggtttttttcagggggaaacctntgnggatgacaaggttcttgtantgcgnaagaccggccct

SEQ ID NO: 6397 - DNA, 544 bp, Homo sapiens
  misc_feature (454)..(454): "n" may be a, t, c, g, other or unknown
  misc_feature (457)..(457): "n" may be a, t, c, g, other or unknown
  misc_feature (471)..(471): "n" may be a, t, c, g, other or unknown
  misc_feature (484)..(484): "n" may be a, t, c, g, other or unknown
  misc_feature (499)..(499): "n" may be a, t, c, g, other or unknown
  misc_feature (536)..(536): "n" may be a, t, c, g, other or unknown
  misc_feature (538)..(538): "n" may be a, t, c, g, other or unknown
aaatagagacagggttctctgttgcccaggctggaatgcagtgaggtaatcacagctcactgcagcctcgacctcccaggcccaagcaatcctcccacctcagcctccccagcagctgggaccacagatgtgcaccatcacacccagctaatttttgtattttttgtagagatggggtttcaccacgttgcccaggctggtctcgaactcctcggctcaagctatctgcccacctcagcttccgaaagtgcagtgattacaagtgtgagctgccatggctggccaaggctgtcttttaaaaagctaaagatgtgttggttcaagaccagtctgagcaacatggcgagacctcatttctactaaaaagaaaaaaaaaatcagctggctgtggtggccatgcctgtagtcatccagccacttgaaaggctgaagtgggaggatcgcttgaacccanaanggtgaagcttcagngaaccctgattgngccctggacttcggnctgggtgacaatgagaacccggtttaaaaagccttgnangggtgg

SEQ ID NO: 6398 - DNA, 559 bp, Homo sapiens
  misc_feature (464)..(464): "n" may be a, t, c, g, other or unknown
  misc_feature (469)..(469): "n" may be a, t, c, g, other or unknown
  misc_feature (480)..(480): "n" may be a, t, c, g, other or unknown
  misc_feature (488)..(488): "n" may be a, t, c, g, other or unknown
  misc_feature (508)..(508): "n" may be a, t, c, g, other or unknown
  misc_feature (521)..(521): "n" may be a, t, c, g, other or unknown
  misc_feature (556)..(556): "n" may be a, t, c, g, other or unknown
agtgcaagaaatgctgcatcattgaagcacttgagaattaccatgaaatctaacaaaaaatgtcatcaactcaggagtaataataaaaaagagaaacaaccagagaggcacacagattgttgtttttttaaaaggatttttatactatattaaaaaaccacaaaataaaaaagggatcaatcaacatatatcttagaagtccttccaagagtcttggtatgcaacagccatggaggctgtgacctttttccttcttttctcagcctgcagttcatttaaggatcaccggagatgactcgtgctctagttcttaaaatcaaacttgttctgccaaatccaagaccctgaatttgtccaaattgtagaaacatgcttttaccacccgtccaccaaaatacctcccattcaagtcaacaaccgctttaattgctgattcaactctctcaaattctaaaaatatccgnactgnttcatcatcangggcccangaatcttggaagaaaatganaacctgatgagtnaaaggcttttgaaatgccttggaaggagtttcccnttt

SEQ ID NO: 6399 - DNA, 522 bp, Homo sapiens
  misc_feature (367)..(367): "n" may be a, t, c, g, other or unknown
  misc_feature (444)..(444): "n" may be a, t, c, g, other or unknown
  misc_feature (448)..(448): "n" may be a, t, c, g, other or unknown
  misc_feature (461)..(461): "n" may be a, t, c, g, other or unknown
  misc_feature (474)..(474): "n" may be a, t, c, g, other or unknown
  misc_feature (500)..(500): "n" may be a, t, c, g, other or unknown
  misc_feature (515)..(515): "n" may be a, t, c, g, other or unknown
  misc_feature (517)..(517): "n" may be a, t, c, g, other or unknown
gagatggagtctctctgtcacccaggctggagtgcagtggcaccatttcggctcactgcaatttccgtctcctgggttcacgccattctcctgcctcagcctcccgagtagctgggactacaggcacctgccaccacacccgaccaattttttgtatttttagtagagacagggtttcacggtgtgagccaggatggtctcgatctccagacctcgtgatccacccacctcggtctcccaaagtgctggattacagccatgagccaccgcgcccagccgaaatttattttttgatatgtgtactttcttactttactgggacacaatcacagatgacctatgtggctgatcttaggtccacactctnccagaagtcaggttttaactttagcctctagttctggaaagtttctggcctatcatagatcacagatctatcatagntcgnatttttaggctgnccagtgggccaanggccccagcaaaccaaggaccttccnttagccagatattcnanaagcc

SEQ ID NO: 6400 - DNA, 570 bp, Homo sapiens
  misc_feature (83)..(83): "n" may be a, t, c, g, other or unknown
  misc_feature (273)..(273): "n" may be a, t, c, g, other or unknown
  misc_feature (317)..(317): "n" may be a, t, c, g, other or unknown
  misc_feature (445)..(445): "n" may be a, t, c, g, other or unknown
  misc_feature (472)..(472): "n" may be a, t, c, g, other or unknown
  misc_feature (508)..(508): "n" may be a, t, c, g, other or unknown
  misc_feature (512)..(512): "n" may be a, t, c, g, other or unknown
  misc_feature (519)..(519): "n" may be a, t, c, g, other or unknown
  misc_feature (523)..(523): "n" may be a, t, c, g, other or unknown
  misc_feature (546)..(546): "n" may be a, t, c, g, other or unknown
cagcaagagcaatgagttcatttttgttttctttttttgattgaggtaaataaaaaagctttatccagcaacacggagataanagtctgtccaacccgacaagttccagaccccaccctgccctcacatcaggctcttccggtactgactgtgcggggtggtctgtctgaggtgggagtccggggtctgcaggtccatctgtctgtacaggtctctcagctccctgacctcctgcagcaccctctttgcctggctccaattcgatgatgcctntcccagcagccgttccgtctccagcagcagctgctctgactcanaatccggcggagaccgaggggggtccttggcctttcgcttcccatctcccaagtccctgaacctctgccagaagctcctgagtctcctccaagtttccttgctaccaggtcctggatccgggacaagntgcccgggttggggagggcaagggttngggggtcctaacccgcactggaaggttccggccaangcanattcccnttanaaaggactcctcaggaggccaanggccttttttggggggaaattttt

SEQ ID NO: 6401 - DNA, 519 bp, Homo sapiens
  misc_feature (457)..(457): "n" may be a, t, c, g, other or unknown
  misc_feature (459)..(459): "n" may be a, t, c, g, other or unknown
  misc_feature (461)..(461): "n" may be a, t, c, g, other or unknown
  misc_feature (476)..(476): "n" may be a, t, c, g, other or unknown
  misc_feature (478)..(478): "n" may be a, t, c, g, other or unknown
  misc_feature (492)..(492): "n" may be a, t, c, g, other or unknown
  misc_feature (499)..(499): "n" may be a, t, c, g, other or unknown
cagcctcagttgggactttaatgccatcttcattctttcctagtccctttttagggagctatcccattttagtcatgattttttgattcctggggctgtatagggaggctgggatagtaatctctgcatgccattgttgtaacaagtctcggccccataaattgattggaatagaagtgatcataggctgaaccgtactttcttgattatcagatcctagacaatgtaaaatcatggcactttgatacacttctgaggcggtgcctatgccaatgatagaaacatcagcctgggtatccactaatccttcaaactctttccctgaatagtgactgtacacacgggtctatcctctgagacctgattagcccaataagtggcttttcctgcagggttggtacttcaaaccctccggtctttccgtttggtttccccaatttaacataaggcaaaaccngnantgggcaatctattcncnggaatggccttcanggaacantggactgaccctactggaat

SEQ ID NO: 6402 - DNA, 580 bp, Homo sapiens
  misc_feature (1)..(580): "n" may be a, t, c, g, other or unknown
nnnnnnnnnnnnnnnnnnnnnnnnnnnnnnnnnnnnnnnnnnnnnnnnnnnnnnnnnnnnnnnnnnnnnnnnnnnnnnnnnnnnnnnnnnnnnnnnnnnnnnnnnnnnnnnnnnnnnnnnnnnnnnnnnnnnnnnnnnnnnnnnnnnnnnnnnnnnnnnnnnnnnnnnnnnnnnnnnnnnnnnnnnnnnnnnnnnnnnnnnnnnnnnnnnnnnnnnnnnnnnnnnnnnnnnnnnnnnnnnnnnnnnnnnnnnnnnnnnnnnnnnnnnnnnnnnnnnnnnnnnnnnnnnnnnnnnnnnnnnnnnnnnnnnnnnnnnnnnnnnnnnnnnnnnnnnnnnnnnnnnnnnnnnnnnnnnnnnnnnnnnnnnnnnnnnnnnnnnnnnnnnnnnnnnnnnnnnnnnnnnnnnnnnnnnnnnnnnnnnnnnnnnnnnnnnnnnnnnnnnnnnnnnnnnnnnnnnnnnnnnnnnnnnnnnnnnnnnnnnnnnnnnnnnnnnnnnnnnnnnnnnnnnnnnnnnnnnnnnnnnnnnnnnnnnnnnnnnnnnnnnnnnnnnnnnnnnnnnnnnnnnnnnnnnnnnnnnnnnn

SEQ ID NO: 6403 - DNA, 532 bp, Homo sapiens
  misc_feature (473)..(473): "n" may be a, t, c, g, other or unknown
  misc_feature (482)..(482): "n" may be a, t, c, g, other or unknown
  misc_feature (485)..(485): "n" may be a, t, c, g, other or unknown
  misc_feature (489)..(489): "n" may be a, t, c, g, other or unknown
  misc_feature (503)..(503): "n" may be a, t, c, g, other or unknown
  misc_feature (516)..(516): "n" may be a, t, c, g, other or unknown
  misc_feature (521)..(521): "n" may be a, t, c, g, other or unknown
agataggcaataaaacttcatattatgaaagcaatatattccaagtttcaaagatttgacaagttctgtagagtatctttcatcagtacatgaaaacttccaaactgcatgatcttctgccaggcaggactgggtgctattcgctggtttgaggtcgaatccatttcaaggcatgtcgtggtgggacattaatggtgggatggtagaatgtgcagtccggtcttgtacattgagtgttaaacctacaatgttttggatgatagaagggacattccatcttcttacaagcagggaagtaacggcagagctgactactggaaggtggtgctggtggtgcaactggttttggagacagtactggaattcttctactcacatgagtgaagggacaatctggtttaatacactttgcatcatatttaccatttgggtgaacaaaccaacatttttcagcaaatttacaattggggaangcttttcanggngaanaaggggtgaatggnaggcacacttatncccanttttaccagcc

SEQ ID NO: 6404 - DNA, 547 bp, Homo sapiens
  misc_feature (82)..(82): "n" may be a, t, c, g, other or unknown
  misc_feature (472)..(472): "n" may be a, t, c, g, other or unknown
  misc_feature (485)..(485): "n" may be a, t, c, g, other or unknown
  misc_feature (500)..(500): "n" may be a, t, c, g, other or unknown
  misc_feature (528)..(528): "n" may be a, t, c, g, other or unknown
  misc_feature (530)..(530): "n" may be a, t, c, g, other or unknown
  misc_feature (540)..(541): "n" may be a, t, c, g, other or unknown
aaggagcaaaaggctttattgataaatatgcagatatgtctgtccacagggacctgctgtggaggccatgaccaggctgcanacctcccactgcctgggttacagccaggacatggccctgtgcagaccctgccacgacagcccagccgtccaccacccgcctcatctctgccaattgtgctgggggcagggagaggcagaggcccgcctcaggcttcccaagccctggggctcacgggtggttccctcccttccaagggagtggcactgtgcccaggggagagccaggggatgggggcagaggagggagacagcagctgctccagaccctgagcagaaaaccagagtgagcacagctggcagcaccagatgacagatctgggctccaggggcctcctggttggcccttgtggctcgaacctgcttcgggagacaggcagggtgagggccctgttcgcttttctctgacaanggttcaagggccntgtgtggcttgctgnttccctgggtacccgggaactggtggcncntaatggcctnnaaggca

SEQ ID NO: 6405 - DNA, 588 bp, Homo sapiens
  misc_feature (428)..(428): "n" may be a, t, c, g, other or unknown
  misc_feature (492)..(492): "n" may be a, t, c, g, other or unknown
  misc_feature (495)..(495): "n" may be a, t, c, g, other or unknown
  misc_feature (504)..(504): "n" may be a, t, c, g, other or unknown
  misc_feature (540)..(540): "n" may be a, t, c, g, other or unknown
  misc_feature (542)..(542): "n" may be a, t, c, g, other or unknown
  misc_feature (547)..(547): "n" may be a, t, c, g, other or unknown
  misc_feature (582)..(582): "n" may be a, t, c, g, other or unknown
ccaggaaaaaaattaaatctttatttttaaaaatcccacaaatccataatgaaatcatcatctgaaaaaaaagatggtagggaacaaaacgtgggatacatttaaaaggcactagattcattaataccagagccattctggagatgccatgtaagaaatctggagttactctaaatcttcttcttagtggtatcagaactggggagaagggtccaagcaaagtgttgcctttgccagtgtattcggatcgaggttatgaggaagagcccttttcctttgtcagtgagtttcatgttggtccaccactccagcgctgagcagctccccgatggccctgtcatcgtatctcaggacctccttcaggatgtgcgttgtgtgctgcccgagcagggggggcggcctggcctctgacatcttgaacttactgnatctcacagctgggcctgggacggaaatcttccccacagttggatgctccatctccataacganggncctttgggnaatacccttgctgatccttgaagatgaaggaagggncntgggnccaaggaatgccacagctttggaagcccaaacagngttttg

SEQ ID NO: 6406 - DNA, 557 bp, Homo sapiens
  misc_feature (202)..(202): "n" may be a, t, c, g, other or unknown
  misc_feature (435)..(435): "n" may be a, t, c, g, other or unknown
  misc_feature (470)..(470): "n" may be a, t, c, g, other or unknown
  misc_feature (491)..(491): "n" may be a, t, c, g, other or unknown
  misc_feature (510)..(510): "n" may be a, t, c, g, other or unknown
  misc_feature (519)..(519): "n" may be a, t, c, g, other or unknown
  misc_feature (533)..(533): "n" may be a, t, c, g, other or unknown
  misc_feature (543)..(543): "n" may be a, t, c, g, other or unknown
  misc_feature (550)..(550): "n" may be a, t, c, g, other or unknown
aacagtaaaaaaaaatttttagtaagttccaattgtgtgtcagaattgtgctaggcgcagggggcaacaataagcaagacagatcaagcctataccgtcttgaaatttaagtttagggaccactctctgtcaaaggatccagcgctggtaatatagattgctgaaggcctttgccttctttccaccaggcaacagaatttgngtccccgtcactgcttcttcttctgtgaaaaatatagcttcagtttggtccacgaatacagaagttggtcagagatattttctttcaagcacacaacaagcaaaacttggccaatacacaccaatcaaatgcacttcctttttccctgggagctcctgccacatctcaaaaacaaaaaacaaaaagggatcacagatctctttgaaaatcagtggcccctttagactttctgngcccaaaaagttatgctttcacctcagcacccagntttccctagttaatctgaagnttcatgggcctatgatggncccaaattnctggagcttcaganaccccacgtnagaaatnctagggg

SEQ ID NO: 6407 - DNA, 580 bp, Homo sapiens
  misc_feature (466)..(466): "n" may be a, t, c, g, other or unknown
  misc_feature (476)..(476): "n" may be a, t, c, g, other or unknown
  misc_feature (529)..(529): "n" may be a, t, c, g, other or unknown
  misc_feature (549)..(549): "n" may be a, t, c, g, other or unknown
  misc_feature (555)..(555): "n" may be a, t, c, g, other or unknown
  misc_feature (557)..(557): "n" may be a, t, c, g, other or unknown
  misc_feature (565)..(565): "n" may be a, t, c, g, other or unknown
  misc_feature (567)..(567): "n" may be a, t, c, g, other or unknown
  misc_feature (577)..(577): "n" may be a, t, c, g, other or unknown
gagatgaaggttcgctcttgttgcccagtctgaagtgcaatggctcgatctcggctcactgcaacttccgcctcccgggttcaaaggattctcgtgcctcagcctcctgagtagctgggattacaggcatgcaccaccaggcccagctaatttttgtatttttattagagacagggtttcaccatggtggtcaggctagtctcgaactcctgacctcatgtgattccccccgcctcagcctcccaaagtgctgggattccttgctaggcaggaccaagcagagattggagaagggggctgggttggtgctgaggaacgaaagggtggaggccaatagctcttgacctcttcctgtgggtcaagaaaaggaagggctgaattgtcatcaaaaaggccaaagaagtaaacagaggaaaccagccaaaaaacagaaacttagtaccgtgttcaagcaggacacagcatncaaagattancaatctctgaccatcgcaacccgggagacagagaacagatggcccattcaggncttttttcctaacagttaanggcaangngggtcaancnaaaagggccnccc

SEQ ID NO: 6408 - DNA, 573 bp, Homo sapiens
  misc_feature (249)..(249): "n" may be a, t, c, g, other or unknown
  misc_feature (486)..(486): "n" may be a, t, c, g, other or unknown
  misc_feature (490)..(490): "n" may be a, t, c, g, other or unknown
  misc_feature (506)..(506): "n" may be a, t, c, g, other or unknown
  misc_feature (523)..(523): "n" may be a, t, c, g, other or unknown
  misc_feature (572)..(573): "n" may be a, t, c, g, other or unknown
gtcggtaagaaatcaccaatttattgaatgaaaaacccaacatcaactcagtccctcccacccccatctcctctctctggcccaggagacgctcaggacagcagggctgagccctgggaagggctggaggagagcttgggggaggtatggagaatgagaaaaacactttcaaaatgaagttctgtgcaaaaacttctgggaaggagtgagaggacaagagaaaagctccaaaggggctgtggggcgcanatggccgggctggggggtgcagagggctgggctggggccctgtgtcctcaaccactcctgagaacacggacggtcaggaatgaggggctcagaccccgggttggtgagagggaggtgacagggagggaaggagcctgctggagggaaacctggctgggaggatgggtctgggcccaggctggggcctaaggagggggaagaacagatgaagcggctgatgccttcaatgacctgctnttanaatccacctccttttntcggggttcttgctcangaaaatggggggactttctgggctttctttggggaccccagcattggcnn

SEQ ID NO: 6409 - DNA, 503 bp, Homo sapiens
  misc_feature (119)..(119): "n" may be a, t, c, g, other or unknown
  misc_feature (222)..(222): "n" may be a, t, c, g, other or unknown
  misc_feature (243)..(243): "n" may be a, t, c, g, other or unknown
  misc_feature (253)..(253): "n" may be a, t, c, g, other or unknown
  misc_feature (267)..(267): "n" may be a, t, c, g, other or unknown
  misc_feature (309)..(309): "n" may be a, t, c, g, other or unknown
  misc_feature (429)..(429): "n" may be a, t, c, g, other or unknown
  misc_feature (449)..(449): "n" may be a, t, c, g, other or unknown
  misc_feature (469)..(469): "n" may be a, t, c, g, other or unknown
  misc_feature (472)..(472): "n" may be a, t, c, g, other or unknown
  misc_feature (483)..(483): "n" may be a, t, c, g, other or unknown
  misc_feature (487)..(487): "n" may be a, t, c, g, other or unknown
  misc_feature (490)..(490): "n" may be a, t, c, g, other or unknown
gagacagagtctcactcttttcacccatgctggagggcaatggtgtggtcttggctcatttccacctcagcctcccagattcaagcgattctcctgcctcaggttcctgagtagctganattacaggcatgcaccaccacgcccggctaattggggtttttttttgtccttttgttttttgtttttgaccgattctggctctgtgccaggctggagtgcagnggtgcgatctcagctcattgnaacctccatntcccaggttcgagngattctcctgcctcagcctcctgagtagctggcactacaggngtgtgccactatgcccagctaagttttgtacttttagtagagacgaggtttcaccatgttggccaggatggtcttgatctcttgagcttgtccaggatggtcttgatctcttgagcttgngatccgcccaccttggcctntcaaagtgctgggattacangtntgagccactgngctnggncagggttttcttt

SEQ ID NO: 6410 - DNA, 571 bp, Homo sapiens
  misc_feature (488)..(488): "n" may be a, t, c, g, other or unknown
  misc_feature (503)..(503): "n" may be a, t, c, g, other or unknown
  misc_feature (511)..(511): "n" may be a, t, c, g, other or unknown
  misc_feature (537)..(537): "n" may be a, t, c, g, other or unknown
  misc_feature (547)..(547): "n" may be a, t, c, g, other or unknown
  misc_feature (559)..(559): "n" may be a, t, c, g, other or unknown
  misc_feature (561)..(561): "n" may be a, t, c, g, other or unknown
caactgtgatcactttcagacagaaaagccagcttaaagagttaatttacaagctgcatttgggcaaatggtgttaaatgatgaacactttctaacgctttattcatgtactgactagcaaagacattttataaaatgactactacctgggattacaaacgcaataattgtatacattctcctatacttgttggctagcggtggttaatgcctctctaagtattgcctaccgcaagaagctacaacttccctacttaaaaaggcccttaattactgtgctggattctcttttctacaatgtcctgcaaactatcaagctcacaatggtttctgttcagcagtttatttcttctctgaaatatcctgttgaaatccataatcattttgacaaaacccacacagaaagcaagccaataatttccctggcatttggtaaatgctgcagaaccatcataaaagcaccacatgtaaaaataattattcaatgnattaagcgctggctntggaccanttcctggtgtaagccctttacatggntaaatcattnaatttcccacancntttgaagggg

SEQ ID NO: 6411 - DNA, 575 bp, Homo sapiens
  misc_feature (495)..(495): "n" may be a, t, c, g, other or unknown
  misc_feature (524)..(524): "n" may be a, t, c, g, other or unknown
  misc_feature (548)..(548): "n" may be a, t, c, g, other or unknown
  misc_feature (559)..(559): "n" may be a, t, c, g, other or unknown
  misc_feature (572)..(572): "n" may be a, t, c, g, other or unknown
ccttccactatttgattcctgggagcagttttctcagattcgcatttggatcccaaccttggtctggaaagcaaagccagctttggagcagcttgccctgcagtctccccagctgcagctctccccaccttcctgggtcccctctggggtcccagccatgctcagggggcgtccctccagctggcctctgcctacctgaagacagcaggctgccgctgctgccgctgatgatcttccccttgctacccatgttggccagcttcgaggtcttcagcgtccccgtctcggtcaggtcgatggcgatctcactcaggctgcgtgctgcatggattttggacttactctgctttctgtccagatagaactggtgttggcttatggccatagcccagatggacttgatcaatgccggacatgcataccacgtgtgcactgcaatgccgctgtgcccaaacgtcctccttgtcactgaaccctgcgtgggtcatgaacttncacggaaaacttcttttctctgaagacangttttccaactgcttcattggaanactttcttggnttcactttataanggg

SEQ ID NO: 6412 - DNA, 584 bp, Homo sapiens
  misc_feature (485)..(485): "n" may be a, t, c, g, other or unknown
  misc_feature (535)..(535): "n" may be a, t, c, g, other or unknown
  misc_feature (537)..(537): "n" may be a, t, c, g, other or unknown
  misc_feature (565)..(565): "n" may be a, t, c, g, other or unknown
  misc_feature (574)..(574): "n" may be a, t, c, g, other or unknown
  misc_feature (577)..(577): "n" may be a, t, c, g, other or unknown
  misc_feature (584)..(584): "n" may be a, t, c, g, other or unknown
caccagaactgactttattaaaaaaatgacaaaacaggtctatacatatttacaggctgggagccaggaggctcaggtccgacagcaggggccaggctgctcacttcttggagagcttgacttgcttgtgcttggggggtgcccacttgaggcagacggagtccactgtgatgggtggtttcttatactgggcacttttgaggtgctcctccaccagcttgggtgtgacacagatcacgtgctggcccttccagtacttgaccatattgagggattgcagggtactgatgatgtcattttgggtgatactggtcatctggctgaggtccttgatggacagtgtgccccggaagtcccgcaggatctccagcagcacccaggaccagtagctgcggtagctgagcttgcccaggtcagacagcggcttctccggggagcccgactgtgctctccagcttggagagctcataactgaaagccatgangaacttcccgtaacccccggcgttggtaggggggcaaggtcaggatgcangncccaattgtttccatccgggactccttntccttgganaantacccan

SEQ ID NO: 6413 - DNA, 574 bp, Homo sapiens
  misc_feature (58)..(58): "n" may be a, t, c, g, other or unknown
  misc_feature (212)..(212): "n" may be a, t, c, g, other or unknown
  misc_feature (296)..(296): "n" may be a, t, c, g, other or unknown
  misc_feature (371)..(371): "n" may be a, t, c, g, other or unknown
  misc_feature (471)..(471): "n" may be a, t, c, g, other or unknown
  misc_feature (488)..(488): "n" may be a, t, c, g, other or unknown
  misc_feature (551)..(551): "n" may be a, t, c, g, other or unknown
  misc_feature (561)..(561): "n" may be a, t, c, g, other or unknown
ccagtttgattcgtttattgacaaatcaaatgaaaaaaattcacttaaaagaagggtntgtgatcacaaatgtagctaacagggggaacgcatacagcaccagggagggagagtgaggctggacataccattacagagaggaggaagagaaaggatggcgcggggggcggaggaaagagagcacctgccaaaaatcccacactttccacttntcagctatcactcaatcatttttctggatagggttaacagctagaaatggtttaagggcaacatccaggtagtttgtctggaanatcagggagatgaagagttggagagaatgtgggtgtagcattttgaaggattctccagcttgaacctgttgccanaacccttttcatggtgaactgggagtcaggaagcttaatcctggtctcagctcagccatgaacttgctgtgtgactttgggtgaatcattttccctctgngatcctctttcctctgntgtaaaacaatcaagttggcaagttctccatgggttttagcccttttgcaatgccaaccgttntggcaacctnggcttaaccaaga

SEQ ID NO: 6414 - DNA, 583 bp, Homo sapiens
  misc_feature (492)..(492): "n" may be a, t, c, g, other or unknown
  misc_feature (531)..(531): "n" may be a, t, c, g, other or unknown
  misc_feature (539)..(539): "n" may be a, t, c, g, other or unknown
  misc_feature (559)..(559): "n" may be a, t, c, g, other or unknown
  misc_feature (582)..(582): "n" may be a, t, c, g, other or unknown
atatttactgcatgtggaaaaatatagtttagtatgcatcccctggtgttttctaagatgtagtttttgaaaaatttttgaaatgtattacatttgtagtttttctccgatataaattccctgatgttgaacgaagtttggagcaactgcttcggatacaaaatgtgtacaataagatctgtgatacaagtaaggcaggcactacaaccctctttatgtttctaatgtttgtcttcaaaataaaaactctttttttactttaaaggcttatattggctgggaacagtggctcacacctgttattccagcactttgggaggcagaggtgtatggatcatttcaagtcaggagttcgagatgagcctggccaacacagtaaaaccctgtctctactaaaaaatacaaaacttagcccgagcgtgatggcacatgcctgtagtcccagctattctggaggcccaggcaggagaattgcttgaacctggaaggcanaggttacagtaaaccaagaattgcaccagtgcacttcancctggganaagagttttccgaatctcanttaaaaaaaacccaccaaaccant

SEQ ID NO: 6415 - DNA, 586 bp, Homo sapiens
  misc_feature (482)..(482): "n" may be a, t, c, g, other or unknown
  misc_feature (496)..(496): "n" may be a, t, c, g, other or unknown
  misc_feature (512)..(512): "n" may be a, t, c, g, other or unknown
  misc_feature (567)..(567): "n" may be a, t, c, g, other or unknown
atcatcgaaataatttatttaccactagagcaccacaaaaacagacatacatcgtgttaaaatacagcgtaattggtcatcaaaatacaaaacagctaatcttatattccattttttaaccatgccaacgatcaaattgtactgctgattaacacaaaaataattgctgcccacttgcatactagcacttcaccccttccttcccacctccacccccctcccatggcaatatttacttatgggaaataaagaccttacagaacccccaaattaaaaaaaaaaaacagattcaagagatcttaaaatagagcatttaaaatattatcagtgcattcatgaggaaagacaaaataatacaaaacaaaatgtcatcctatctgagaggaaaatgtctgcagaaataaaagtgatttacacataatagaaaagtggaagacaaaaaaataatcaacacacactcaaatctgggattgggttacatncacacaagggctgnttactattatggcatnccatctcttgcttttccagttttaaacttgcaaatccaattcttaattaatgggnaggaaattccaaaaggaag

SEQ ID NO: 6416 - DNA, 574 bp, Homo sapiens
  misc_feature (469)..(469): "n" may be a, t, c, g, other or unknown
  misc_feature (479)..(479): "n" may be a, t, c, g, other or unknown
  misc_feature (507)..(507): "n" may be a, t, c, g, other or unknown
  misc_feature (517)..(517): "n" may be a, t, c, g, other or unknown
  misc_feature (519)..(519): "n" may be a, t, c, g, other or unknown
  misc_feature (550)..(550): "n" may be a, t, c, g, other or unknown
  misc_feature (565)..(565): "n" may be a, t, c, g, other or unknown
aaggtcagaattcgttttttttgtttgttttttttttttccaaaataagcccagaccattaaacaagtgaaactccaacaaataagtcttctccaacagcgagaaaaactgtacagttactcaaagctgattctgtgagaagagggctgcatacttgtgcaaacggaggctcttgagccatgagggcacatctttcatgccactgccatcctcctggaaggtgttccggctggagccctgctcctctgtctgctcactgccagaggaggccacgctgctctggggcgagagaggtgcgtgatcgggcgtggtaaaagcagcccgggccccaagctcctctggactcggccactcaccagggacctgggggcttgtagggatgagtgacatggagcgcttcagtgggctagggtggatttggcaggggaaacctgtgtttgcattgctcccaatactgttgatggctgcnggcacttganctggatggtggaaagggcccgtgtccantttccggggngntttgccttgccagcctgaccttgcttcccanggcctaacttttgangggcccccc

SEQ ID NO: 6417 - DNA, 534 bp, Homo sapiens
  misc_feature (458)..(458): "n" may be a, t, c, g, other or unknown
  misc_feature (472)..(472): "n" may be a, t, c, g, other or unknown
  misc_feature (484)..(484): "n" may be a, t, c, g, other or unknown
  misc_feature (506)..(506): "n" may be a, t, c, g, other or unknown
  misc_feature (508)..(508): "n" may be a, t, c, g, other or unknown
  misc_feature (512)..(512): "n" may be a, t, c, g, other or unknown
  misc_feature (514)..(514): "n" may be a, t, c, g, other or unknown
gagacggagtttcactcttctgcccaggctggagtgcagtggtgcgatcttggctcactgcaacctccaccttctggtttcaagcaattctcctacctcagcctcccgagtagctgggattacaggcgcgtgccaccacgcccagctaatttttgaatttttagtagagacagggtttcaccacattggctgggctggtctcgaactcctggccttgtgttccacttgcctcagccccccaaaatgctaggattacaggcgtaagccattgcacccagccaaggtggctcttcttaaaccttggtttagtgtcacctacagatgaaaggtgaaggaggtgagtgcagaaaggagagggagcacagaaaggaaatggggagagaatggaggaagataaggaaagacaggaaaggaggagggaaaagggaagaagatgaagatagagcgtgctgtatganggcaaaggtggcanaagaaacaccangaaggtggagaattcacttctntntaanangagctggcttttccaaatga

SEQ ID NO: 6418 - DNA, 577 bp, Homo sapiens
  misc_feature (517)..(517): "n" may be a, t, c, g, other or unknown
  misc_feature (522)..(522): "n" may be a, t, c, g, other or unknown
  misc_feature (540)..(540): "n" may be a, t, c, g, other or unknown
  misc_feature (543)..(543): "n" may be a, t, c, g, other or unknown
  misc_feature (545)..(545): "n" may be a, t, c, g, other or unknown
gagacggagttttgctcttgtcacccaggctggagtgcaatggcacgatctctgctcactgcaacccccgcctctggggttcaagcaattctcctgcctcagcctcccgagtagctgggattacaggtgcctgccatcacacccggccaatttttgtatttttagtagagacagggtttcaccatgttgccaggctagtctcgaactcctgacctcaagtgatctgcctgccttggcctcccaaagtcctgggattacaggcatgagccactgcgcctggccatgctctttttaactcttatcaacaccaagcccgctacacactcacctagactgcctctgcctctaccctccttgcttagcaccttttcatcatctagtggtaatcccctgaaatgcttcccagtgcctgccaaatcatcttatcttgcctcaaatcccaagtctggtccctttatctcatattttctgcttccctgaaccagttctaagagcccccttcaagtcttccatctgncctcntatctacctatgccccangangnacccttttttctggggaaaaaggggccattct

SEQ ID NO: 6419 - DNA, 582 bp, Homo sapiens
  misc_feature (496)..(496): "n" may be a, t, c, g, other or unknown
  misc_feature (553)..(553): "n" may be a, t, c, g, other or unknown
  misc_feature (557)..(557): "n" may be a, t, c, g, other or unknown
  misc_feature (564)..(564): "n" may be a, t, c, g, other or unknown
  misc_feature (573)..(573): "n" may be a, t, c, g, other or unknown
gtttcctctcagatttccttaagcagtggcttgtggttctccttgaaaaggtcatttacttcccttgatagctgtattcctaggtattttattctctctgtagcaattgtgaatgggagttcattcatgatttggctctctgcttgtctgttgctggtatataggaatgcttgtgatttttgaacattgattttgtatcctcagactttcctgaatttgtttatcagcttaagaaggctttggcctgagatgatggggttttcttgatataggatcatgccatctgcaaacagaggcaggttgacttcccctcttcctatttgaatagcttttatttctttctcttgcctgactgtcctggccagaacttccaatactatgttgaataggagtgatgagagagggcatccttgttttgtgctggttttcaaggggaatatttccagcttttgcccattctgtatgatattgctgtgggcttgtcataaatgcctantaattttgaggatgtctttcaatacctaagtttaattgaaaagtttttaatatgaangggntggtganttttattcnaaggctttt

SEQ ID NO: 6420 - DNA, 468 bp, Homo sapiens
  misc_feature (414)..(415): "n" may be a, t, c, g, other or unknown
  misc_feature (424)..(424): "n" may be a, t, c, g, other or unknown
  misc_feature (431)..(431): "n" may be a, t, c, g, other or unknown
  misc_feature (434)..(434): "n" may be a, t, c, g, other or unknown
  misc_feature (441)..(441): "n" may be a, t, c, g, other or unknown
  misc_feature (447)..(447): "n" may be a, t, c, g, other or unknown
gaatgcgcaggtcgtggtatttatttctatcgctctaaagagtattgtttcaggaaaaactctgcaagcggtgtttttcctctgttctcacaccagcacaacaatcaccaacacagaaaagggcttctgtgaccaaatgtgtgagggtttttccgccacacaccaagcagtgaacaccagctgggtgttctccaattcaatgccagcactatagacccagagatagtatcagatctcacagctcagttcccaagactgctgcccccaactccccagacgtcagtcgcaagtccgggcctctggaacttgagagcaaccagcttcaagttggggttctcacaactccctctttgagatcggtgtttttttttttttttttcagatggaatctcgctcttgttgccccccagtggnngcaatggcncaacctnggntcaccgnaacctntgctcccaggttcaagcaatt

SEQ ID NO: 6421 - DNA, 573 bp, Homo sapiens
  misc_feature (525)..(525): "n" may be a, t, c, g, other or unknown
  misc_feature (535)..(535): "n" may be a, t, c, g, other or unknown
  misc_feature (564)..(564): "n" may be a, t, c, g, other or unknown
  misc_feature (567)..(567): "n" may be a, t, c, g, other or unknown
gagacggagtctcactctgcagcccaggttggagtgcagtgacatgatctcggctcactgcaagctctgcctcccaagttcacggtgtcctcctacctcagcctcctgaatagctgggactacaggtgcccgccaccacgcccgtcttattttttgtatttttagtagcgatagggtttcaccgtgttagccaggatggtctcaatctcttgacattgtgatccgcctgcctcagcctcccaaagtgctgggattataggcgcgagccaccgcacccggccaatatatctttacttcttataagaaatgagtaactttattaattctaccaacagataacattcttcctctcagagagtaatatgcaatcatttcctaaccttattttattgcgctatattttaaatataataaacgtgtcaaaaatgtggtttcgtactttttataaattgatatatttacctaattacactaaatctaagaaaatctatgggcttattcaaacttctcttctcttcttcagangcaaacctgnataattccgtgggttggttggttggtttnaanaccaaa

SEQ ID NO: 6422 - DNA, 578 bp, Homo sapiens
  misc_feature (490)..(490): "n" may be a, t, c, g, other or unknown
  misc_feature (507)..(507): "n" may be a, t, c, g, other or unknown
  misc_feature (521)..(521): "n" may be a, t, c, g, other or unknown
  misc_feature (523)..(523): "n" may be a, t, c, g, other or unknown
  misc_feature (538)..(538): "n" may be a, t, c, g, other or unknown
  misc_feature (570)..(570): "n" may be a, t, c, g, other or unknown
  misc_feature (577)..(577): "n" may be a, t, c, g, other or unknown
cttcttttttttttttcttctagcatacctctggtggcaggaaaggttgattgccacattagggaaaaatcaaagaatctatattagtcaaaacaatcttgaaaaagataacttacatcacctgatttcaagactactataaaactaccatgatcaagacatttctgctcatcaaaagacatcactaaggaaaagaaaatgaataagcaagacatgcctttgaggaaaaatatctgcaatataggtatgtatatgtgacaaaggatttctagtgataaaatataaaaatgccctattggtaactgttgatatgaataacaaaaataatgagatttaagaacatgtaaaagattggaacagtcaatttacaaaagaaaatatgtgactggctaacaagcaaatgaaaagttctcaacatcagtactcatcagggaaatgcaactaacatcttacatctactaacatgactaaaatcaaatggagaacaatntcagatggtagtgagcnttgaagagccactngnactttcataccttgntgccgggggtgtaaaatggtgccatcgttcanaaactcng

SEQ ID NO: 6423 - DNA, 574 bp, Homo sapiens
  misc_feature (526)..(526): "n" may be a, t, c, g, other or unknown
  misc_feature (551)..(551): "n" may be a, t, c, g, other or unknown
atcgttaatttaatttgctcaaattttgtttaaaatgtttacatctatatccatgaagaatactgattctttgttttgctgttatctttgttgaattttagtatcacagtaacaatgatagttaccaatttgttataataaaatgagttaagaagtattctcatttttttttcttaatggaagactttacataagattcacaatatttctttcttgaagtttgataaaatttattagtgtggccatttaggcttcacattgtcttggtggaataatttttaattgcaaattcagcttctctaatcaatatagggatactaaaattttctattgctcctgggtaataatttgtgttttccaaagaatttatttttttcaactaagttgtctaatttactggcttagagctgtttatgatattctcttataaggccttttaatgtccatatgatccgcagtgatgtctcctattttattaaatatactggtaaatagtgtcttctctcttattctgggatagtctaantagagctttatcttaactaactttncaagaactcttttagttcatatt

SEQ ID NO: 6424 - DNA, 578 bp, Homo sapiens
  misc_feature (504)..(504): "n" may be a, t, c, g, other or unknown
  misc_feature (508)..(508): "n" may be a, t, c, g, other or unknown
  misc_feature (547)..(547): "n" may be a, t, c, g, other or unknown
  misc_feature (553)..(553): "n" may be a, t, c, g, other or unknown
aacaaaaaaaaggaaaaacaaaagcctaaaatctgagttctagaaccagagagatttgggaaccataagatctagaatcagaaggagttgagggtggtaaggtctaaaaccagagaaatgtataaggcaaagtctaaaatcagaagatatttgaaggctgaattctagacccagggtaatttggagtcagatcttgagtgaggaggagctggaaatgatgaagtctagagccaagggaacttacggaatgaggtctagaatcagaaggcacttgtaagtcagttctagaaccagagaaacagcagatcaccagatcttgaatcaggaccctggaggtggcaccttctagaagttgtgtagtctggaactagtgagtggtacaggtcatgaggttcagaatctaggagaactagagcatcgtctggttctagaagaactggttattataagataaggacagggtcgggcacggtggcttatgcctgtaatcccacactttgggangctnaagccggtggatcatcttgaggccagagtcaagaccagnccttcnaattggcaaaaccccgtttttctaa

SEQ ID NO: 6425 - DNA, 569 bp, Homo sapiens
  misc_feature (520)..(520): "n" may be a, t, c, g, other or unknown
  misc_feature (526)..(526): "n" may be a, t, c, g, other or unknown
  misc_feature (556)..(556): "n" may be a, t, c, g, other or unknown
  misc_feature (564)..(564): "n" may be a, t, c, g, other or unknown
cacatatgttcttgacttgtacagaaaatcccaaattttaaatgattccccaactcagccagttctatagatgaggccagatcatttttgagaattaagataagagtgggaacttgttaaaacaaaaatgaaaataaaacccacctcactcctgtatctctccctgattagacattaaagaggtgaatcactgcctctggctgcttcagccttccaggaatgaagagccatccaccttgcccttctcagccagccacaggcagctcttctgattcttccctcacagcagtggcggtccagcccctccctcccctgcacagtgcctgagaaagtttcccaggatttcatctttagctcttactgatccagtttctgaagctttaggctgattatcaaaaatcttatgttcacttcttccttcaacaaattaacatgtggttaaaaaaaaataccaccattagcccatgctgctttaagttatttcattggtggacaagaataaaaaccagcccttacactntgaccncatttggattaaaggttaccaaattccacnttagactntgggg

SEQ ID NO: 6426 - DNA, 580 bp, Homo sapiens
  misc_feature (503)..(503): "n" may be a, t, c, g, other or unknown
  misc_feature (569)..(569): "n" may be a, t, c, g, other or unknown
  misc_feature (580)..(580): "n" may be a, t, c, g, other or unknown
agtatatgtcacgcagcaatttatcaaaagcttttgttgtgaaaacacttttcttaaatacacaattaaaagatatgattaagcacttacaggatgtgaaatatttaaaggtaatacacaataatcgggttaccaaaaggacgccttccaatttttctttctattcattttgatgttttgttcttttcaaaacattttctctcattacattcattactaaaggccttactttaaatacatcatgctacattttgttctcctcttcaaatgccaatgttttaacaatttgaattctctggcctgggaaaaagaaaagttatccacttacaaggtatacgtattgacaacatggatgttacagtccaaacaacagcacaaaatcaaccatgtacatgtaacatagtgaaatgagtccacgttttctacacgctacaggataggaagagctggctcttaaggcccagggctcacatgattatgcacttgtcaaagcagcttctcantggtgttgggcatctggggatttcttcttgggcttctggaggcccgtggtgggctttttccttggnaattaacaacn

SEQ ID NO: 6427 - DNA, 578 bp, Homo sapiens
  misc_feature (532)..(533): "n" may be a, t, c, g, other or unknown
  misc_feature (567)..(567): "n" may be a, t, c, g, other or unknown
  misc_feature (577)..(577): "n" may be a, t, c, g, other or unknown
aacaaagctggcacctaccaacacttgtagcgggtgtcatgcacaatattgagcctgcccatcatgcattgcaacaggaaggtggatttgaaaagggaaaagaattaaaacatcccatcacacgtgtaattagaaaattcatttgaacaaagaagaaaaattgttattatgggaacagtggcatgtaactgtcagcacaatcaaatcatacaatagcacagtgatcaattagaactagtctcaagtgaagaataaaagccagtttaactgtgtgctggtacactttgtttctcttaattgttgcctataaacaaaagtattttggaagtaatttaaatccacttaattcttttaaaaataatattgtaatttgttttgttttaatctgattactaaccatctggtcgttttgctatttctgactttaacttatgaacgccttaacattttctttatatcaggcacatattaacttactaaagatatttattattaaatactaaataattcaatgtccaaactgacttaacanntaatggaaacccaacattcatttcattcctttgntttaatttcng

SEQ ID NO: 6428 - DNA, 572 bp, Homo sapiens
  misc_feature (523)..(523): "n" may be a, t, c, g, other or unknown
  misc_feature (563)..(563): "n" may be a, t, c, g, other or unknown
  misc_feature (568)..(568): "n" may be a, t, c, g, other or unknown
aatggagacagggtcttgctgttgcccaggctggtttctaactcctgggctcaagcagtcctcctcctgccttggcctcccaaagttctgttactacaggaatgagccactgtgcctggcaggaaatgcacattcttaaaaagaaacaaatattatcaccccaaccagtccgaactccatgagacgcttaactaatgttatgtgttgaattgtgtccctcaaaacgatatgaagtcctataccctggtatctgtgaaatatggccttatttggaaacagggtctttgccgaagtaattaagatgaggttatactggattaaggtgggccccaaatccaatgactcaagtcctcataagaagtaaagatcagactgggcacggtggctcacacttataatcccagcacttgggaggccgaggcaggtggatcatgagcccaggagttcgagaccagcctgacaacatgacaaagtcctgtctctacaaaaaatagaaaaattagctgggcatggtgttgcacanctgtagtcccagctacttaggaggtttgattggaaaaacnctaanccgg

SEQ ID NO: 6429 - DNA, 549 bp, Homo sapiens
  misc_feature (481)..(482): "n" may be a, t, c, g, other or unknown
  misc_feature (489)..(489): "n" may be a, t, c, g, other or unknown
  misc_feature (517)..(517): "n" may be a, t, c, g, other or unknown
  misc_feature (524)..(524): "n" may be a, t, c, g, other or unknown
  misc_feature (537)..(537): "n" may be a, t, c, g, other or unknown
  misc_feature (546)..(546): "n" may be a, t, c, g, other or unknown
gagataaggtcttgctatgttgctcaggctggttttgaacttctgagctcaaatgatcctccctcctttgcctcccaaagtgctgagattataggcctgaaacactgtgccccgcctaaactcattcttctgcatgttaaagttcaaaggctactataaaggacgtattttaagaaatccttccttcttgaataatgtctgccccttgcaattttcaaagtactttaagatcatgagatctcagttgtttagcagaactcttaaatcttaaattatcttcaattcctaaggtcttgggtacttcaattaacattccatttaacaaatatttgtgaataccaattctgtgccaggttagaccaagaggactcaaagaagaggaagaaatccttgtcttcaacaggtctggtcagctctgaagattccctgaaatgtgacatgtaccgtgactgttgcattctggagtagccactacactggnntaaatcncaaattggggaggctcttctaaggagtnccacagnatttcaccaaggngatcccggntaa

SEQ ID NO: 6430 - DNA, 534 bp, Homo sapiens
  misc_feature (53)..(53): "n" may be a, t, c, g, other or unknown
  misc_feature (81)..(81): "n" may be a, t, c, g, other or unknown
  misc_feature (94)..(94): "n" may be a, t, c, g, other or unknown
  misc_feature (154)..(154): "n" may be a, t, c, g, other or unknown
  misc_feature (164)..(164): "n" may be a, t, c, g, other or unknown
  misc_feature (177)..(177): "n" may be a, t, c, g, other or unknown
  misc_feature (229)..(229): "n" may be a, t, c, g, other or unknown
  misc_feature (235)..(235): "n" may be a, t, c, g, other or unknown
  misc_feature (256)..(256): "n" may be a, t, c, g, other or unknown
  misc_feature (300)..(300): "n" may be a, t, c, g, other or unknown
  misc_feature (317)..(317): "n" may be a, t, c, g, other or unknown
  misc_feature (373)..(373): "n" may be a, t, c, g, other or unknown
  misc_feature (462)..(462): "n" may be a, t, c, g, other or unknown
  misc_feature (466)..(466): "n" may be a, t, c, g, other or unknown
  misc_feature (508)..(508): "n" may be a, t, c, g, other or unknown
  misc_feature (513)..(513): "n" may be a, t, c, g, other or unknown
  misc_feature (520)..(520): "n" may be a, t, c, g, other or unknown
  misc_feature (522)..(522): "n" may be a, t, c, g, other or unknown
  misc_feature (527)..(527): "n" may be a, t, c, g, other or unknown
ccagtaaagttcttttattcggatttaacctaaaatagttcgcttgatctctntttgatagagaaatgaaatctccagttntatagactataanggaaaagtattgaatttgcatatttccaataaaagatatttgcttcatgctttgggcatntatcatagtngcccaaaagactntgtccagtaaacataactgtcacagtactgaagcgcaaacttacaaaattgnctttgngttaccacaacacacacagtntttagtcagctgactattcatgttgtttgaaaagcatgaaaatncaggtttttagcatgcncacccagttggaaaaggacttgctcctccggaaacaccattcattcgctttggcanagctgagagcacctgtgcatgtgaacaagcaggtgggtatctcactggtttctgcagtcatcactttccttgataggtaagttttgatnccanccaggggaaaagtccaggcttttacctcagctttttccttanatttngcctttntnggaanaattttc

SEQ ID NO: 6431 - DNA, 588 bp, Homo sapiens
  misc_feature (445)..(445): "n" may be a, t, c, g, other or unknown
  misc_feature (462)..(462): "n" may be a, t, c, g, other or unknown
  misc_feature (468)..(468): "n" may be a, t, c, g, other or unknown
  misc_feature (545)..(545): "n" may be a, t, c, g, other or unknown
  misc_feature (549)..(551): "n" may be a, t, c, g, other or unknown
  misc_feature (567)..(567): "n" may be a, t, c, g, other or unknown
  misc_feature (574)..(574): "n" may be a, t, c, g, other or unknown
  misc_feature (578)..(578): "n" may be a, t, c, g, other or unknown
aaataatgagaattagttcatgttaggagtgcatggatctatgattccacccaacactcccccctcaagatcttacggggtagacgccatttgaagcaaagggagtgtgatggttgatcctggtataacatcaggagctttaaatcccaaaaatgtggggttgctcatcttggcccagtagtttgccgctgttgctaagtttgggaacattcgtggtgacagctccccaataatggggtggcaaagtacacccccaaactcaaaatatttccccaatgcctttttaaccattgttttttttctcctcaaagactgggatctcagacacaatggcccgtagagcaatggagccatccatgcactgatctagaaacattctcacagcattaataggttgtcatctgtgctttcttggcaactaacttgacttgcgtagcttgtgtanaggggattcaaagtctncaaatngaagtgtgaacattaattcttccaacccatggtcttgagctgatccaacctatggctggatctgctttgcaacttgnttannngaataagcacttttancatgggnaagnctttcaataa

SEQ ID NO: 6432 - DNA, 525 bp, Homo sapiens
  misc_feature (430)..(430): "n" may be a, t, c, g, other or unknown
  misc_feature (457)..(457): "n" may be a, t, c, g, other or unknown
  misc_feature (474)..(474): "n" may be a, t, c, g, other or unknown
  misc_feature (490)..(490): "n" may be a, t, c, g, other or unknown
  misc_feature (494)..(494): "n" may be a, t, c, g, other or unknown
  misc_feature (500)..(500): "n" may be a, t, c, g, other or unknown
  misc_feature (512)..(512): "n" may be a, t, c, g, other or unknown
ctgagatggagtttcactcttgttgcccaggctggggttaaatgctgtgatctaggcttactgcaacctctgcctcctggattcaggcgattctcctgcctcagcctcccaagtagctgggattacaggcacccaccatccatgcctgactaattttttgtatatttacccgaaacgaggtttcaccatgtaggccaggctggtctcgaactcctggccacaggtgatccatccccttcagactcccaaaatgttgggattacaagcgtgagccaccgtgcccggccttaaacatgcaaatctgattatctctctccccttcttaaaaatgttccttttttccattgcccttaggtaataggcccaaatccacaccttgtgtataggtccagaagaccttcaggcctaccccagacccttcctggccctnagccacactcctgccttgcagttcctntgacatgaatgcaatcntttctggcttaagggntttnacctantaagttcacttnaactggaacgtca

SEQ ID NO: 6433 - DNA, 589 bp, Homo sapiens
  misc_feature (472)..(472): "n" may be a, t, c, g, other or unknown
  misc_feature (494)..(494): "n" may be a, t, c, g, other or unknown
  misc_feature (515)..(515): "n" may be a, t, c, g, other or unknown
  misc_feature (517)..(517): "n" may be a, t, c, g, other or unknown
  misc_feature (524)..(524): "n" may be a, t, c, g, other or unknown
  misc_feature (574)..(574): "n" may be a, t, c, g, other or unknown
  misc_feature (585)..(585): "n" may be a, t, c, g, other or unknown
caaataaggctaatttatttattacatggatcctgaccttgagttaagtattcagaacaaaaataaaatgtcccagcctggatagagtgacaatactttctctccatttctatctcaagctattaaagattacctgcggcagcattcttttgttggaacttggttaaatacatgttcattcctttcttaaagtccttatccccaatgtagtcatgcagcattcggatgacagatgcacctttgctatatgatatagcatcaaatatctcatcaacctcagatggatggcccacactgacttcaataggatggctgttatctaaggcgtcaagctcctgggcacgggtgtaatcagcagaaacaaactgagtccaaatatcatactctgggaagcagtggtctacacacagatattcaatccaggatgcaaaaccttcatttaaccaaagatgagtccaccattccatagtancaagatttccaaaccattgatnggcaaagtcatgtcccacaancnggagcancccactggcgggatgaagaacaggaatttttggatcaataagcaatgcanctcctatgttnaaaa

SEQ ID NO: 6434 - DNA, 593 bp, Homo sapiens
  misc_feature (529)..(529): "n" may be a, t, c, g, other or unknown
  misc_feature (536)..(536): "n" may be a, t, c, g, other or unknown
  misc_feature (552)..(553): "n" may be a, t, c, g, other or unknown
  misc_feature (568)..(568): "n" may be a, t, c, g, other or unknown
  misc_feature (592)..(592): "n" may be a, t, c, g, other or unknown
aattttttgggactgagtctcgctcttttgcccaggccggagtgcagtggtgctatctcggctcactgcaagctctgcctcctgggttcacaccattctcctgcctcagcctcccaagtagctgagactacaggcgcctggctaattttctgtatttttagtagagacagggtttcaccgtgttagccaggatggtctccatctcctgacctcgtgatccgtctgccttggcctcccaaagtgctgggattacaggcatgagccaccacgcctggcccaactttactgatcttttataatgatctttctatgttacttatttagggatatcctttttagacaatcaatatgatccaataatttacatttagtgactcagcaacatacttgatctaaattatgtcactctttatgtgatgctatttgttggtatggcttcaaacaaaaaccttaattgggcttcacttctaataaagatgaattttaccttttaatctaaaaatgacattgaaaactttaactttttaanaattctnggaatcattattttgnnccaaaagccttaaangccttttaaaagaagcctgatttnt

SEQ ID NO: 6435 - DNA, 588 bp, Homo sapiens
  misc_feature (549)..(549): "n" may be a, t, c, g, other or unknown
  misc_feature (574)..(575): "n" may be a, t, c, g, other or unknown
  misc_feature (586)..(586): "n" may be a, t, c, g, other or unknown
  misc_feature (588)..(588): "n" may be a, t, c, g, other or unknown
ggaggtatgtcctgaacttccatactattaactagacacagaactgcacagcaggatgcctgctgtgtgcattccagatatagtacatagctcagctctcaaatcagcaacaaagaagataagcacaccaggtccacatagcagagaacttcacattatcaagtttctatccaaagcttcaaagaagcaaataatattttgaaagactatgtgataaaaggatcaatttttagaaagtttcatgatctgtcatggatcaatagtttataaaggacactgaaacttggatgttgaggcaatgtcaaattgccccaagtttctaaatgcttactcttcatttctgtacttaatgtggacttggatcaaatagggcatgaaccagcattggtccgtggactgcattttgactcgtattggtttaaagaagttgtcgtttactcctcgaggtagtctcagatctaattttctcttggattaatatgacaactaatacttgaagcacttagcttactactagaggaatctatctactggggtatgccttatggncctaacttttatcaaatttttaagnnttgataaaaancn

SEQ ID NO: 6436 - DNA, 598 bp, Homo sapiens
  misc_feature (206)..(206): "n" may be a, t, c, g, other or unknown
  misc_feature (327)..(327): "n" may be a, t, c, g, other or unknown
  misc_feature (503)..(503): "n" may be a, t, c, g, other or unknown
  misc_feature (544)..(544): "n" may be a, t, c, g, other or unknown
  misc_feature (573)..(573): "n" may be a, t, c, g, other or unknown
  misc_feature (579)..(579): "n" may be a, t, c, g, other or unknown
  misc_feature (582)..(582): "n" may be a, t, c, g, other or unknown
  misc_feature (594)..(594): "n" may be a, t, c, g, other or unknown
  misc_feature (597)..(597): "n" may be a, t, c, g, other or unknown
gagacggagtttcgctcttgttgcccaggctctgtttaaaaaaaaaaaaaaaaaaaggtttattattgctaatactatggaggggctcagagatgtgaggaataagacaaagctgctttatttggtgaatggcagtcattagtgacttttaaaagagcagcttggtagaatgtagggaggttgggttattttcttttttacagatnctatttattaggcactatataagattaaaagagactttaacacctcttttaaaaaaaggctttatctctttcaatgcttacactgactcttttaacaccctttttatagatgaaaagtgcnattgagagaggttaagtgacttgttcaagcccttgtataaattaagtatggacacaggatttaacccagttgtgtctgatcctaaagcttatcattttaatgagttgcctcctctctcattcatggaagccagaatgcaagtggttaaggagtaataaagaaggtgaatggaaccnggtatagaggactcttaaggacagggtttggccaaaagtgnaaagggaaaaaattgggatgttgcttttnggtttncangggaaaggaccnttnt

SEQ ID NO: 6437 - DNA, 589 bp, Homo sapiens
  misc_feature (466)..(466): "n" may be a, t, c, g, other or unknown
  misc_feature (487)..(487): "n" may be a, t, c, g, other or unknown
  misc_feature (553)..(553): "n" may be a, t, c, g, other or unknown
  misc_feature (557)..(557): "n" may be a, t, c, g, other or unknown
  misc_feature (559)..(559): "n" may be a, t, c, g, other or unknown
  misc_feature (579)..(579): "n" may be a, t, c, g, other or unknown
cagtgaaattcattcaccttgacatgtgtagcaataatcagtcattttgacctctgtgtaccaatgatagctaaaatatattgagcattttctgtgtatcagacagtctcaactactttacatgggttaactcaatcttcacaataatcctttgaggtacatagtattatcaacctactccgtatgaagagactaaaattcaaagggattaagcaacttgcctaaaataaatgttactaggcggcagagtctggataagaacactacaatttattaatctattctctgtctatggatgtttgggcagttctaattttttgctatttcaataaatgttgctaggaataatagtgtataggccttatggtatatatgacaaaaagtttctctagaagacaaagaatagaaatactgggtcacaggatatacatatgttccagttctcataatgaaaatgatttttgangtggtttgaacaattcatgtnttcacaatcggggctccatattcttaccaagactaggactggcacactggtcactcttaaatgganttcngntatttaaattccattttaanggacccccct

SEQ ID NO: 6438 - DNA, 553 bp, Homo sapiens
  misc_feature (475)..(475): "n" may be a, t, c, g, other or unknown
  misc_feature (482)..(482): "n" may be a, t, c, g, other or unknown
  misc_feature (488)..(488): "n" may be a, t, c, g, other or unknown
  misc_feature (509)..(509): "n" may be a, t, c, g, other or unknown
  misc_feature (515)..(515): "n" may be a, t, c, g, other or unknown
  misc_feature (542)..(542): "n" may be a, t, c, g, other or unknown
  misc_feature (545)..(545): "n" may be a, t, c, g, other or unknown
gggtttaaaaataaaagcacggaccaatgaggtgggaaagactgccaggctggttcttttacctaggatctcagtaataccagattccagattccctctcggcctctaaggctctgaatccaggttagaggtctgaacccctccccccgtccccaaatggggggcatttagttttttgtttcataaatactgtccaggcaactcaaagaagacaccaaggttggactctgttttctttcctgctcagttttttgctgctccagtgtatgaattgagatttattttttaaggccctcctacatttatcctgtgttgctcagaacgccgacgtttcccactgatatctgtcctatactttcaaaagaaggtatgatcttctgggatcagatgaattgcttaagtggttacagtttttgcaagggtgttctaactgatgacagtggggtaaagtgggattctattggcctcttgggtncaattgnatctgnttctactatgcaatttaaaantgcttngaaccttttccacgggctaatttgatnttnccaattgg

SEQ ID NO: 6439 - DNA, 587 bp, Homo sapiens
  misc_feature (453)..(453): "n" may be a, t, c, g, other or unknown
  misc_feature (513)..(513): "n" may be a, t, c, g, other or unknown
  misc_feature (529)..(529): "n" may be a, t, c, g, other or unknown
  misc_feature (534)..(534): "n" may be a, t, c, g, other or unknown
  misc_feature (537)..(537): "n" may be a, t, c, g, other or unknown
  misc_feature (550)..(551): "n" may be a, t, c, g, other or unknown
  misc_feature (582)..(582): "n" may be a, t, c, g, other or unknown
aactgagataaatgtagatttacatatagttgtagaaataatacagaattatcccgtgtaccccttacctagttacccccaatggtaacatcttgcaatattataccacaatgtcacaaccaggatattcagatagatgtcatccactgatcttactcaaaattcactcattttccatacagtcctttgattgtgtggtagttctgtgaaatttcatcccatctgtagttttcatgtaatcatcgccacagtcaaggcacagaatgcttcacttccatcactataaggaacccttgtgttgcccttttataaccacacccacttctctcctctctcccaaactccatctctaatccctgttaaccactgatatgttccttacttacacaattttatcatttcaagaaagttacagatattgaatcacatagtatgtaaccttttaggattggngtttttcactcagcattattccctggagatcatccaagttgtggacgaatgattgggtcntttaatggttggggangtagnctntgggattgatggnntcacagtttaattattcccccttgaaggcanttggg

SEQ ID NO: 6440 - DNA, 571 bp, Homo sapiens
  misc_feature (69)..(69): "n" may be a, t, c, g, other or unknown
  misc_feature (496)..(496): "n" may be a, t, c, g, other or unknown
  misc_feature (511)..(511): "n" may be a, t, c, g, other or unknown
  misc_feature (525)..(525): "n" may be a, t, c, g, other or unknown
  misc_feature (542)..(542): "n" may be a, t, c, g, other or unknown
  misc_feature (549)..(549): "n" may be a, t, c, g, other or unknown
  misc_feature (551)..(551): "n" may be a, t, c, g, other or unknown
  misc_feature (557)..(557): "n" may be a, t, c, g, other or unknown
agtaatctttatcccttcagagaattcttcctttaagtcttgggtgagatattttattatttttaaggnttatatatctatattgttagaacaagcatactctggcaatgttgttctttaaaaaagcatggattgcatttatatagtgtttttttccaaaaatctgaagaaattatcaagagcacttggcagagataacttgatgaaatcaggggaaaaaattgatgtccaacttttaaatatacaaaaacttgattgacattctacataattcaaattgtgtgcaagatgttctcaataaacatttacagactgtatccccacaccaatgtcagaaattcaaagctggtcctattactgatgtgatacatcaacatcacaatgtcagctatcaaaaatcattttaaatctatgtttttccaacaactccagttccatcaatgaaaataattttaaaggatatcaagcttggaaaccataaaatatttggcaagcnttggttggttggttngttggttcttctgnttggcctttgaatctanggaaagncnccttantctcttcaggaaaa

SEQ ID NO: 6441 - DNA, 575 bp, Homo sapiens
  misc_feature (490)..(490): "n" may be a, t, c, g, other or unknown
  misc_feature (519)..(519): "n" may be a, t, c, g, other or unknown
  misc_feature (539)..(539): "n" may be a, t, c, g, other or unknown
cggtacagacagcatcttgctatgttgctcaggctgatctggaactcctggcctcacaatactcctgcctcagcctcccacatgagctaccatacctggtaggacattatttttaagctcccattaggtggaaatcaaaagacaaagcttttagtaacagttcttccataaactagctgtgtaatcttaggcaagtcactctgaatcccaggtacagttttctaatctacaaaaatgactggaaaaaattatttctaagaccctctccaccttaagttattccactagtgcaaaatttaaaaataaagactcttatggtttggatgtttgtcccctccaaatctcatgttgaaatgtgattcccaatgttggaggtgggcctagcgggaggtgtttgggtcatggaggcggattcctcatgaatagcttgggccctccacatggtaaataatgagtctcactgtagttcatgccaaactgggtggttaanagcctgccacctcctttttttttggtccnggtttcccatatgacttggntggtaccttttacctttcgccatgctggaaaaaagt

SEQ ID NO: 6442 - DNA, 573 bp, Homo sapiens
  misc_feature (380)..(380): "n" may be a, t, c, g, other or unknown
  misc_feature (561)..(561): "n" may be a, t, c, g, other or unknown
  misc_feature (563)..(563): "n" may be a, t, c, g, other or unknown
  misc_feature (566)..(566): "n" may be a, t, c, g, other or unknown
  misc_feature (573)..(573): "n" may be a, t, c, g, other or unknown
ggattatctgttcacttttctagagcatatccttcctgagaaaagaatggatgtgtacattttgagtccttctatgtctgtattctgtcttcaaatgtgactgcaaatttgactgaattgagtagagttgccgcatatggttgtaaagattatgcactgcaaaaccctagggggtcatttttattcaaagtgttttaaaaatgcgaaccaaaaccgaaaagctctaggggatgtcattcactgcatgttggtttggattgaatattactttccagaattttgaaggcattttctcatttcttctagcttgcaatgataatgttaaaaagcctgacgtcactgtgatcgtcttcttttcctcttctttcaatgtgtactgntttcttcatctcccttcacccacttccatgcttctctctcctttttctccacaaacttaaaaaaagattctctttatctctagcgttccaagatttcacaacaaggtaacttggtgtgggcattttctcaacttttcgcatggactctggtgggactttcaatctggaagacttataatcntnccntctgggn

SEQ ID NO: 6443 - DNA, 571 bp, Homo sapiens
  misc_feature (483)..(483): "n" may be a, t, c, g, other or unknown
  misc_feature (487)..(487): "n" may be a, t, c, g, other or unknown
  misc_feature (560)..(560): "n" may be a, t, c, g, other or unknown
  misc_feature (565)..(565): "n" may be a, t, c, g, other or unknown
  misc_feature (570)..(570): "n" may be a, t, c, g, other or unknown
aaagtctacaggtaagcagacatttctatacatgtcctggtcactctttctaaagtatttataattaggttattgaccatgtcttggatattgttggcagtttaaataataccctcatccgtaggtatacacagaaagactgttttctttataacaaaaaatactataaagaaagagataatggaaataaggcctataatgaagacagaatcactaacactgtcagaattaactgatacagagaagaaaagattttttcttggaaaaggcattaattttgcagatcactgggatactatgtacatctgcaaagctaaatagaacctcagaggtccaaatagggcaatgtcatttcactggtcagatcaagcccagataagtaatcacagaaaaccggaagtacacttttcatagattttttttaaaaacactggctgaacaaaatagtgtataaattaatgtaagaaaggcactggtagtggncagntaatagatactcggttttttttctttcaagtgccactattaatgggtaattttcctttcttggctattaagcncctgnaaccng

SEQ ID NO: 6444 - DNA, 564 bp, Homo sapiens
  misc_feature (487)..(487): "n" may be a, t, c, g, other or unknown
  misc_feature (492)..(492): "n" may be a, t, c, g, other or unknown
  misc_feature (510)..(510): "n" may be a, t, c, g, other or unknown
  misc_feature (517)..(518): "n" may be a, t, c, g, other or unknown
  misc_feature (553)..(553): "n" may be a, t, c, g, other or unknown
  misc_feature (561)..(561): "n" may be a, t, c, g, other or unknown
gttttgatgctgcagagcttgaaactgttttattacacaccagtgtattctttctcaaaaagtaactcaaaggaataatgtacctccatatactagactggaagtgtaatgacacattaaagtgtcaccctatggttcacgtaacctaaatccatttccattatgacaggacccactattacacctaaagcatagaactcagatctgtagatcatggcaatgactaaagagtttcttacagtggcaggcagtactgatcccacctatgaaacaggataattgcatatccattctacagaaaagaaagctgaggcttagagaagttaaattactttcccagcttaaaaaaagaatctacgaaatgatatttctaattcattagttagaggcctggaatcaaggtgcccttagcaatatatttttggagagcaaagaatactattcccttggtttagagatgaagaactgaggcttttgagtggggtanggttnctaagaagccacagctgnttaatgnncagcacatagaatggctggctacaggccagacttntttttcanaag

SEQ ID NO: 6445 - DNA, 574 bp, Homo sapiens
  misc_feature (451)..(451): "n" may be a, t, c, g, other or unknown
  misc_feature (508)..(508): "n" may be a, t, c, g, other or unknown
  misc_feature (517)..(517): "n" may be a, t, c, g, other or unknown
  misc_feature (530)..(530): "n" may be a, t, c, g, other or unknown
  misc_feature (537)..(537): "n" may be a, t, c, g, other or unknown
  misc_feature (552)..(552): "n" may be a, t, c, g, other or unknown
  misc_feature (561)..(561): "n" may be a, t, c, g, other or unknown
attgagaaggagtctcgctctgttgcccaggctggagtgcagtggcacatctccgctcactgcaagctccgcctcctgggttcacgccattctcctgcctcagcctcccacgtagctgggactacaggcgcccaccaccacgcctggccaattttttgtatttttttagtagagatggggtttcaccgtgttagccaggatggtctcgatctcctgaccttgtgatccgcccgcctcgggctcccaaaatgctggaattacaggcgtgagccaccacgctcagccaacttttattcctccatttcaaccgtggagagtctgatgattttgtgccttagggttgctcttctcaaggagtatcttagtggtattctctgtatttcctgaatttgaatgttgccctgtcttgctagattgggggaaagttctcccagataatatcctgaaatgngttttccaatttgggtccattcttccctggcacttttcagggaccctaatcaatcgnaggtttggnctttttacatagncccatantttttggagggtttngtcaattcntttcaaactttgg

SEQ ID NO: 6446 - DNA, 552 bp, Homo sapiens
  misc_feature (366)..(366): "n" may be a, t, c, g, other or unknown
  misc_feature (459)..(459): "n" may be a, t, c, g, other or unknown
  misc_feature (485)..(485): "n" may be a, t, c, g, other or unknown
  misc_feature (522)..(522): "n" may be a, t, c, g, other or unknown
  misc_feature (526)..(526): "n" may be a, t, c, g, other or unknown
  misc_feature (529)..(529): "n" may be a, t, c, g, other or unknown
  misc_feature (548)..(548): "n" may be a, t, c, g, other or unknown
  misc_feature (551)..(551): "n" may be a, t, c, g, other or unknown
aaaaccaaaagaacaactttaataagcttttacggcactgcaattacaggaacatcgacccataacatgcaacaaaaatgattttgccttttggacatatttaacagataaacttgacattacaagtaacagcaacacattcccattctactgaagaaaacaaatgcgatttaactttcaggttagaaaacgtatcttcttactgcaatctcaagtagcatttagaaagtttagttttcccttttctaacctctaaaagatgatatgatttttaatgcaatcatacacaactgttttcacattggaaataatcacgaggaatcaataggtttaggctaactgactgattggttttatttccattgntaatttcaagagggctcctgcagtattgtggatttcagatggggaaaataatcagaccaggagtaaacggccttggtctttaaagtggggganggaacatgcagcggcacacggggcangtgcctgacttttggaagcccgatggccacacacggnttgnggnaatagtggtggcacggaanttna

SEQ ID NO: 6447 - DNA, 557 bp, Homo sapiens
  misc_feature (447)..(447): "n" may be a, t, c, g, other or unknown
  misc_feature (474)..(474): "n" may be a, t, c, g, other or unknown
  misc_feature (493)..(493): "n" may be a, t, c, g, other or unknown
  misc_feature (501)..(501): "n" may be a, t, c, g, other or unknown
  misc_feature (541)..(541): "n" may be a, t, c, g, other or unknown
  misc_feature (549)..(549): "n" may be a, t, c, g, other or unknown
  misc_feature (554)..(554): "n" may be a, t, c, g, other or unknown
gtaaacacatagggtctccctatgtggccaagactagtctcaaactcctgggtgtaagcgatcctcctgtcttggcctcccaaaatgctatgattatggctgtgagacactgcacccggcaagggaaagtactttattattattttttccagtgggagggtttggtcaggcagggagcggctgagaaagtattttaaagcaatgtttgttcttagttgacttcagtgtcaacaaaaatctaaaaaaaaaaaaaggaaaaaaaagttttgacttaactggggcaaaatgagtaacactagccaaaaagtcaggatgcataacatctgtatatcatgtgaccctggcaagtcccagctcctcaaagccaaatttttttcatctttctcataaggtagaaatagtttggcaaacgcttactgaactaccaggaagagctccaggataganggagctttggcatatcactagatgctnaaattcggactgggtgctnaaatttgnggccaactttttttctttcctttttttttttttttttggnaaacaaanccctnttt

SEQ ID NO: 6448 - DNA, 563 bp, Homo sapiens
  misc_feature (493)..(493): "n" may be a, t, c, g, other or unknown
  misc_feature (496)..(496): "n" may be a, t, c, g, other or unknown
  misc_feature (503)..(503): "n" may be a, t, c, g, other or unknown
  misc_feature (507)..(507): "n" may be a, t, c, g, other or unknown
  misc_feature (523)..(523): "n" may be a, t, c, g, other or unknown
  misc_feature (530)..(530): "n" may be a, t, c, g, other or unknown
  misc_feature (560)..(560): "n" may be a, t, c, g, other or unknown
caaaaaggcacttttctgactatttctgctaaaagctagtagaagcctttatagcattgatgccaggggttaagcctccattataggacatttcgtgatattctgtgtaggcaaatgtaggccaatgtgtttctgaatatgcacatgtatatgatatctttaacaatgtataaaataaatgttgtacatcataaatagagttctgtaactaactagcttccataactaactagctgtggaaactctatggagttgtctatattcctggcttcaaattcaccagctgtaattgagaactttggattaattgatctctaaatctattcctgtttgaagagcccatgatgttagtgcatgcgtggattatgtggtttcatctgaataattgaataaaagacttaaaagttgagagtataaaaggcattttatccttaattcatgtagcattttttaagttctgagagagcaattccctcttttaaatcccaactgntgntcttttnccanttgaatgggggggggnaatgggncaaacctttaatttggcgggcaaaaaatanggc

SEQ ID NO: 6449 - DNA, 562 bp, Homo sapiens
  misc_feature (478)..(478): "n" may be a, t, c, g, other or unknown
  misc_feature (487)..(487): "n" may be a, t, c, g, other or unknown
  misc_feature (517)..(517): "n" may be a, t, c, g, other or unknown
  misc_feature (536)..(536): "n" may be a, t, c, g, other or unknown
  misc_feature (552)..(552): "n" may be a, t, c, g, other or unknown
  misc_feature (560)..(560): "n" may be a, t, c, g, other or unknown
cctgtgtacaaaatgtttaattttgacaaagcagttaaaaggctagggtggcccttctgcagccactggtgactgggaagagtgctctagggacactggccacccccctgctcctgtcttcagacctctgctctgggattgggtccaaccctgtcctttgcagccatgtggcgatcctcagcatggagctccttgccactgtcccccaaaggggctcagtcgtccatcttcacgaagactttgggccgagaaaagatcttgatggcctcctctacctgcaccagcttccggtccagctcagcacggtggctctgggctctcagtgagtctgccccagcaggcagcagtaccagctcacgcagcagctggctctggctctggagcagcttggtcaagtgtttccagcccgctggttctcaggcatgcccctgtggcctgggggcatggcaaggtccggctggctcttgttgcgggcttnggcttccgncgcacaaggtcctgggctcaacaagtatgnggcacatggccctttgggnggcattgaaggctccnggcctccntt

SEQ ID NO: 6450 - DNA, 562 bp, Homo sapiens
  misc_feature (499)..(499): "n" may be a, t, c, g, other or unknown
  misc_feature (510)..(510): "n" may be a, t, c, g, other or unknown
  misc_feature (527)..(527): "n" may be a, t, c, g, other or unknown
  misc_feature (559)..(559): "n" may be a, t, c, g, other or unknown
gtattctcagagctgccaggagtgcatcgagcctgtaatttcctgttctctgaatcccccatctttctgcagctccaagctttgtgtcccacagcctgtgactctgtgctaacaaatcgctattgtccagtggggcgaatggtggctggaactaaagaattgctgtctggtttctatccaaatccaggtagcgagatatatgaatggacttttcgaatcgtcatgtgaataacgtctgctcggcatgaaggctcagagccatgctaggaaggattaactcgtaggctgaccactaacatcctttgtggtacgagggagaaacattcccaagtatcattttattcacacttaattttctatcccatacccccaaaataaggctagctatttaattagttggctgcttttctcttaatttttagtgtttctgttgataatgtgtaaagtttgggaaaatgctaagtagcttttcacttagaacactggtattttctctttnaaggtttctancctacattaatattgcntaagtaatcttattgctaaatcccaaagtaanaaa

SEQ ID NO: 6451 - DNA, 536 bp, Homo sapiens
  misc_feature (69)..(69): "n" may be a, t, c, g, other or unknown
  misc_feature (74)..(74): "n" may be a, t, c, g, other or unknown
  misc_feature (121)..(121): "n" may be a, t, c, g, other or unknown
  misc_feature (123)..(123): "n" may be a, t, c, g, other or unknown
  misc_feature (128)..(128): "n" may be a, t, c, g, other or unknown
  misc_feature (251)..(251): "n" may be a, t, c, g, other or unknown
  misc_feature (289)..(289): "n" may be a, t, c, g, other or unknown
  misc_feature (308)..(308): "n" may be a, t, c, g, other or unknown
  misc_feature (318)..(318): "n" may be a, t, c, g, other or unknown
  misc_feature (341)..(341): "n" may be a, t, c, g, other or unknown
  misc_feature (423)..(423): "n" may be a, t, c, g, other or unknown
  misc_feature (469)..(469): "n" may be a, t, c, g, other or unknown
  misc_feature (476)..(476): "n" may be a, t, c, g, other or unknown
  misc_feature (484)..(484): "n" may be a, t, c, g, other or unknown
  misc_feature (491)..(491): "n" may be a, t, c, g, other or unknown
  misc_feature (497)..(497): "n" may be a, t, c, g, other or unknown
  misc_feature (500)..(500): "n" may be a, t, c, g, other or unknown
  misc_feature (530)..(530): "n" may be a, t, c, g, other or unknown
catttttttttttttttttttttttttttgagatagagtctcgctctgtcacccgggctggagtgcagnggcgnggtctcggctcactgcaaccttagcctcccgggttcaggcaattctntngcctnagcctcccgagtagctgggactacaggcgcccgccaccacgcctggctaattgtaagccttctttttaaacaacacactagacacctccttgtttgacccactataagcttcctcctcattgncagcatttccacctcccttgccagaatttaaatgcctntcagtccatacagctactntccacaacanatggtgatgtctcattttctcgngcttagactactaaccaaaaaaaaagtcctaggaagctggctttagcttcccattcaccttcctctatgggtatgcctttgngaacagtttgttcaacctcatccaagacatgagcatggcccaatgnaaaattntggcccanaaaaatnggtggnttnagaacaaattttataattccaatggctttngggagg

SEQ ID NO: 6452 - DNA, 565 bp, Homo sapiens
  misc_feature (159)..(159): "n" may be a, t, c, g, other or unknown
  misc_feature (187)..(187): "n" may be a, t, c, g, other or unknown
  misc_feature (485)..(485): "n" may be a, t, c, g, other or unknown
  misc_feature (539)..(539): "n" may be a, t, c, g, other or unknown
  misc_feature (549)..(549): "n" may be a, t, c, g, other or unknown
  misc_feature (560)..(560): "n" may be a, t, c, g, other or unknown
cctgtttggtgccctagaggtttttacatcttggatcaatgcataatgggaaatacataacagcaaaaggtaacaagtaagagactttggaaaagacaatgcaaaaaacataaacaagatctccgaagactagaaacagattcccttaaagctctctgngcctttatatatcctgaaaaatcttagngtatagcttgggataggtataccccagttttggaaactactgtagaataaatggttttctaaaatttataatggatttaactcatgttaattttaaatgtctatatagttcacttactagtatttctccccataagaaaaacaccaaccacaccaatataaaatgtgagaaagaatctgatatgctgctttaaaaaaatcttcataaatattccataattttccattttggtaaattataatcttttcaacagacttattacccagtaaccaaactttttactaggatccccaaaagngcccccaattttcctaaggattaatcatttcccattggtatgacctgaaggttngggtcccttnaaaggcttttntggaa

SEQ ID NO: 6453 - DNA, 581 bp, Homo sapiens
  misc_feature (244)..(244): "n" may be a, t, c, g, other or unknown
  misc_feature (432)..(432): "n" may be a, t, c, g, other or unknown
  misc_feature (448)..(448): "n" may be a, t, c, g, other or unknown
  misc_feature (451)..(451): "n" may be a, t, c, g, other or unknown
  misc_feature (492)..(492): "n" may be a, t, c, g, other or unknown
  misc_feature (545)..(545): "n" may be a, t, c, g, other or unknown
  misc_feature (573)..(573): "n" may be a, t, c, g, other or unknown
  misc_feature (575)..(575): "n" may be a, t, c, g, other or unknown
  misc_feature (578)..(578): "n" may be a, t, c, g, other or unknown
ggcttttttttgagaggaagcctcgctctgtcacccaggctggagcgcagtggcacgatctcggctcactgcaacctctgcctcccccacgcaagtgattcttgtgccccagcctcccaagtacctgggactataagcgcgcgccaccatgcccggctaatttttgtatttttagtagtgacaggtttcaccatgttggccaggctggtcttgaactcctggcctcaggtgatccgcccacctnggcctcccaaagtgctgggattacaggcatgggccaccacgccccaccaataattcaatcataaaattctgggttcttcaatgttcccccacatataaacatcaaaatgttagtgggtaatatattaatgccttagtagaaagcatgaagggaagaagtgcatcctgcctcccatgtgctggttgcantgctctcttgcagtanggntaaggccacgacacttaaggcttttaaggacaaacaagganaaggaagaaggaagaatgggaagttggtaagttaatggggattggagtttaanttgggatgacaaaaaaattttggaaaanantgnggg

SEQ ID NO: 6454 - DNA, 531 bp, Homo sapiens
  misc_feature (28)..(28): "n" may be a, t, c, g, other or unknown
  misc_feature (56)..(56): "n" may be a, t, c, g, other or unknown
  misc_feature (66)..(66): "n" may be a, t, c, g, other or unknown
  misc_feature (117)..(117): "n" may be a, t, c, g, other or unknown
  misc_feature (309)..(309): "n" may be a, t, c, g, other or unknown
  misc_feature (322)..(322): "n" may be a, t, c, g, other or unknown
  misc_feature (450)..(450): "n" may be a, t, c, g, other or unknown
  misc_feature (456)..(457): "n" may be a, t, c, g, other or unknown
  misc_feature (461)..(461): "n" may be a, t, c, g, other or unknown
  misc_feature (465)..(465): "n" may be a, t, c, g, other or unknown
  misc_feature (472)..(472): "n" may be a, t, c, g, other or unknown
  misc_feature (515)..(515): "n" may be a, t, c, g, other or unknown
aattagagcaggtatgcttttgatggtngggaagggatggaaaaaaggaaaagcantagaaactgnccaattcacatcagttatccgtctgctttttcttgagagcttgtggaaggngttaacgtggctgggaacatcaacaccttggcatgcatgaatgttaagtcaggaaggccagcgatcaccttgatagcttcttcacttaggtgctcttctcttttcggtttcctactggtagatgtgcttgtcttctctactgtagacatgagtcttgcaaatgcatcactcactttgaggcttgaggtgganatttccagcttanaagttgttaactcatacaactccggatccacacctgggattgaggtgctgctgctagagctactgtcatccacgggcccaaagaaatcaaggttcagaagagtggaacctccctaccatctaaagggntagtannggcnctgntactcantcaactggccgggtggtataaactctggaactgaccaaagtcntgggtcatatctggga

SEQ ID NO: 6455 - DNA, 557 bp, Homo sapiens
  misc_feature (1)..(557): "n" may be a, t, c, g, other or unknown
nnnnnnnnnnnnnnnnnnnnnnnnnnnnnnnnnnnnnnnnnnnnnnnnnnnnnnnnnnnnnnnnnnnnnnnnnnnnnnnnnnnnnnnnnnnnnnnnnnnnnnnnnnnnnnnnnnnnnnnnnnnnnnnnnnnnnnnnnnnnnnnnnnnnnnnnnnnnnnnnnnnnnnnnnnnnnnnnnnnnnnnnnnnnnnnnnnnnnnnnnnnnnnnnnnnnnnnnnnnnnnnnnnnnnnnnnnnnnnnnnnnnnnnnnnnnnnnnnnnnnnnnnnnnnnnnnnnnnnnnnnnnnnnnnnnnnnnnnnnnnnnnnnnnnnnnnnnnnnnnnnnnnnnnnnnnnnnnnnnnnnnnnnnnnnnnnnnnnnnnnnnnnnnnnnnnnnnnnnnnnnnnnnnnnnnnnnnnnnnnnnnnnnnnnnnnnnnnnnnnnnnnnnnnnnnnnnnnnnnnnnnnnnnnnnnnnnnnnnnnnnnnnnnnnnnnnnnnnnnnnnnnnnnnnnnnnnnnnnnnnnnnnnnnnnnnnnnnnnnnnnnnnnnnnnnnnnnnnnnnnnnnnnnnnnnnnnnnn

SEQ ID NO: 6456 - DNA, 574 bp, Homo sapiens
  misc_feature (497)..(497): "n" may be a, t, c, g, other or unknown
  misc_feature (521)..(521): "n" may be a, t, c, g, other or unknown
  misc_feature (536)..(536): "n" may be a, t, c, g, other or unknown
  misc_feature (556)..(556): "n" may be a, t, c, g, other or unknown
  misc_feature (564)..(564): "n" may be a, t, c, g, other or unknown
cctttccattgtgtcagcttttgggacacacactttattgcacttgatttttttatacatccatttcctaaacaagatatgtttattcatctttttaatcctcatggctcagcacagggcctgacatacataggcattcaaccaatatttgatctccaaagcatgaccattcatgcatccataatcctttttctatagtataaagatggctgacattcaggcccccatgtatattttaaggaatatataattcccaataagctcttctttttaaaggtgattaacagttctagtgttcaatttcaaaatcaaaatgacatcatatcaggtgtcattaaaagacgaatgccaaaccatatttgcctacacaccactgccttttccctttctttcattttctctgccatatgaaagccatgggtttttttggagttttcaccatctctaagagccctgaacaatttttaatcctataaggctttttacttcagttctgncacctattaaaagcctgggtgtcnagactgaagatatcnctaactctctctatcttacnccttttcnattcttcctg

SEQ ID NO: 6457 - DNA, 546 bp, Homo sapiens
  misc_feature (183)..(183): "n" may be a, t, c, g, other or unknown
  misc_feature (191)..(191): "n" may be a, t, c, g, other or unknown
  misc_feature (317)..(317): "n" may be a, t, c, g, other or unknown
  misc_feature (330)..(330): "n" may be a, t, c, g, other or unknown
  misc_feature (361)..(361): "n" may be a, t, c, g, other or unknown
  misc_feature (384)..(384): "n" may be a, t, c, g, other or unknown
  misc_feature (400)..(400): "n" may be a, t, c, g, other or unknown
  misc_feature (484)..(484): "n" may be a, t, c, g, other or unknown
  misc_feature (491)..(491): "n" may be a, t, c, g, other or unknown
  misc_feature (500)..(500): "n" may be a, t, c, g, other or unknown
  misc_feature (503)..(503): "n" may be a, t, c, g, other or unknown
  misc_feature (518)..(518): "n" may be a, t, c, g, other or unknown
  misc_feature (541)..(541): "n" may be a, t, c, g, other or unknown
  misc_feature (543)..(543): "n" may be a, t, c, g, other or unknown
gagacagagtctcgctctgtggccgtggcccaggctggagtgcagtggcacaatctcggctcactgcaagctccgcctcctgggttcacgccattctcctgcctcagcctcccaagtagctggaactacaggtgcccgccaccacgcctggctaattttttgtatttttagtagagacggggnttcaccgngttagccaggatggtctcgatctcctgacctcgtgatctgcccgcctcggcctcccaaagtgctgggattacaggcgtgagccgccacgcccggcagggaccacacaatttattaaccaaccaggntaataaattcttntttttttttttttggagacggagtctcactnttgtcacccaggctggagtgcanttgacacgatcttggntacatgcaatctccgccttctggggctcaaagcgattcttctgcttaacctcttgagaagcctagggattacaaggctttttgncaaccanaaccccaanacnatttttttggatttnttaggttcaaaaacggggaattngncat

SEQ ID NO: 6458 - DNA, 573 bp, Homo sapiens
  misc_feature (459)..(459): "n" may be a, t, c, g, other or unknown
  misc_feature (470)..(470): "n" may be a, t, c, g, other or unknown
  misc_feature (496)..(496): "n" may be a, t, c, g, other or unknown
  misc_feature (500)..(500): "n" may be a, t, c, g, other or unknown
  misc_feature (520)..(520): "n" may be a, t, c, g, other or unknown
  misc_feature (530)..(530): "n" may be a, t, c, g, other or unknown
  misc_feature (568)..(568): "n" may be a, t, c, g, other or unknown
  misc_feature (570)..(570): "n" may be a, t, c, g, other or unknown
  misc_feature (573)..(573): "n" may be a, t, c, g, other or unknown
gagatggagtttcactcttgttgctcaggctggagcgcaatggcacgatctcggctcaccgcaacctccacctcccaggttcaagcgattctcctgcctcagcctcccaagtagctgggattacacgcacacgccaccacgtccggctaatttttctatttttagcagagatggggtttcaccatgttagtcaggctggtcttgaactcctgacctcaggtgatccacccgcctcagcctcctaataaaatttatcttaataagataatatgttaatataagatagaggactgatgcctgaaattaatttttgtgctctaaaattctgtggaagtactgcttccaaatacgacacatattttactccgtatctctttagaattaatataaagtagggagaaatgaggaacaagatagggtaaagtgaagtcctgcatgccacttctgccttcaacttanaaccgtggtgnaagttttaacaggtcttacgggtccntganggctttttagaaacttttanacttccgagnggaaaactgggatttccgtggtaacctaagggctttananaan

SEQ ID NO: 6459 - DNA, 544 bp, Homo sapiens
  misc_feature (381)..(381): "n" may be a, t, c, g, other or unknown
  misc_feature (474)..(474): "n" may be a, t, c, g, other or unknown
  misc_feature (494)..(494): "n" may be a, t, c, g, other or unknown
  misc_feature (496)..(496): "n" may be a, t, c, g, other or unknown
  misc_feature (516)..(516): "n" may be a, t, c, g, other or unknown
  misc_feature (518)..(518): "n" may be a, t, c, g, other or unknown
  misc_feature (529)..(529): "n" may be a, t, c, g, other or unknown
  misc_feature (539)..(539): "n" may be a, t, c, g, other or unknown
gattttgcagcacttttaatacacaaagcaaaaggtaataggctggatgggtgaccaaccttcattcacatacagagcccaagtatagatacagactaattgggaaataagttagagtttgcagggccttagggctgagagccagaaacactgtccttttggcagccatggaagcgaggatttccttttctgaggacaaaaaggtaaaaataagtgtttttaaagtatggcagacacccagtcttcaataaagaaggtggttacatcctggccaggccttcaggcaggcagaatggagccaggcagggccctgggaaagcccaaactattctgcatgaagccaggcagggcagctggcaagagggcacctccttcaccctncaccaccccccattccgatcacagttaatcatctcctctgattctcacaacttcttcaaactctttggtgcttcagagaaagccaggaacacngggcaattcttaatggttgngnaaagtaagccctggctgttncntacagtttttnccggcttaanttgtt

SEQ ID NO: 6460 - DNA, 546 bp, Homo sapiens
  misc_feature (352)..(352): "n" may be a, t, c, g, other or unknown
  misc_feature (423)..(423): "n" may be a, t, c, g, other or unknown
  misc_feature (463)..(463): "n" may be a, t, c, g, other or unknown
  misc_feature (490)..(490): "n" may be a, t, c, g, other or unknown
  misc_feature (505)..(505): "n" may be a, t, c, g, other or unknown
  misc_feature (508)..(508): "n" may be a, t, c, g, other or unknown
  misc_feature (516)..(516): "n" may be a, t, c, g, other or unknown
  misc_feature (534)..(534): "n" may be a, t, c, g, other or unknown
  misc_feature (541)..(541): "n" may be a, t, c, g, other or unknown
aaaaattgctaattcacagaacatggagatgagtatgttttgaaggcttggaagcatgcaagtgggagaagaaaggagtcagctacattctggctgtgtgcagaggcaggtcactgtggtgggagtgttcctgtctcatggactctgcaaatcacaatgcttggcatggcctcccgaccctgatggcagagaagcaaacaccagtcggagagctggggtcctcccagccctcttggccctgtggccaattttttctccaatagcctcataaaatcacattatttgagtgtccatggctccaaaacaagcagggatgcccatggaccctgattatccattgtcacccttcctncaaacagccacctctcccctggagacagccccatactccactcagacctgtgcacttcctggtatccttgncacctgctttttatggctcatttacaaacccaaattgganggacagcaggagctgcccataataccngtaaagtgagaaccnagntaactagnctaacagccgattatgtngggcaanccact

SEQ ID NO: 6461 - DNA, 567 bp, Homo sapiens
  misc_feature (476)..(476): "n" may be a, t, c, g, other or unknown
  misc_feature (497)..(497): "n" may be a, t, c, g, other or unknown
  misc_feature (512)..(512): "n" may be a, t, c, g, other or unknown
  misc_feature (517)..(517): "n" may be a, t, c, g, other or unknown
  misc_feature (539)..(539): "n" may be a, t, c, g, other or unknown
  misc_feature (552)..(552): "n" may be a, t, c, g, other or unknown
  misc_feature (557)..(557): "n" may be a, t, c, g, other or unknown
cataataaactttattgtgacaggcggggctgatccctcccatgttgggagacaccatgtggcaagtgacaaagctctgagcccgcccctcttggggccacagtggtagggatgggggaaggggatggaccccatggctggggtagtaccatgactggaggcgggggaggcaaccagaggcctgctgctttggggaggtgcattcccccaaccatgtcccgacacctctggagttcaggcaaggaccttccagtcctacttgtcctgcatcttctcaaggataggcacaatcatgtcaaatttgggtcgctttgcagggtcttcattcatgcagatcttcatgagcttacacacatgaggggaaatacctggtgggatggtaggccgaaggccttccaatgccaccttcattccaatctccatattggaagaggtcagcaaagggtaccttccgtgtaccaatttccacagaagcncttgaaaacttcacatgtctncttgaacctttgttngggtnttaagcttttttggcaaacttngggggcttcccangcagntccttaattc

SEQ ID NO: 6462 - DNA, 538 bp, Homo sapiens
  misc_feature (405)..(405): "n" may be a, t, c, g, other or unknown
  misc_feature (447)..(447): "n" may be a, t, c, g, other or unknown
  misc_feature (465)..(465): "n" may be a, t, c, g, other or unknown
  misc_feature (509)..(509): "n" may be a, t, c, g, other or unknown
  misc_feature (530)..(530): "n" may be a, t, c, g, other or unknown
  misc_feature (535)..(537): "n" may be a, t, c, g, other or unknown
gagacagagttttgcttttgttgcccaaggtggagtgcaatggtgtgatctcggctcactgcaacctccgcctccctgggttcaagcaattctcttgcctcagcctcccaagtagctgggattacaggcatgcaccaccacatccggccaattttgtattttcagtagggacagaatttctccatgttggtcaggctggtctcgagctcctgacctcaagtgatctgcctgcctcagcctcctgaagtgttgagattacaggcgtgagccaccgtgcccagcctaagctggcatgttttaaggcagttacatctctaacttgatttaccagctatgcttgagggtccaaggagccaaaattgcagccaaactgatcttaaaggaccagggaatagaatggtcaancatgtttccaaagtttaacctaagcctggcacatccttgccnattgctcaaaatgcaatnaagggcaactaaatggaaaagaatacaggaagacccatttgggnggacacttgttgaaaacacanccgtnnna

SEQ ID NO: 6463 - DNA, 575 bp, Homo sapiens
  misc_feature (493)..(493): "n" may be a, t, c, g, other or unknown
  misc_feature (513)..(513): "n" may be a, t, c, g, other or unknown
  misc_feature (538)..(538): "n" may be a, t, c, g, other or unknown
  misc_feature (554)..(554): "n" may be a, t, c, g, other or unknown
  misc_feature (572)..(572): "n" may be a, t, c, g, other or unknown
atttttattgtttttgagatggagtctcgccctgtcacctaggctggagtgcagtggcgcgatcttggctcactgcaagctctgcctcctgggttcatgccattctcctgcctcagcctcccaagtagctgggactacaggcacctgccaccacaccaggctaattttgtttttgtatttttagtagagacggggtttcaccatgttacttttaaatgtctataaatatgcctttaaaattcatagtagtcttggacagtatacaaagtttgacttagtgggggtataaatttaaaaaatacgaaaacaagggaaacaaccaccatgtccaacatgaaaggagtaccttagttaatatgatccaccaatacagtggaataccacgaggtcatgaaaatattagtgaaagatatgaatatttgtgatataaaattaaataaaatgtgaaagacaaaattatgtgtaaactacaattgcactatttttacaaggnaccccatgaggattaagacnccgaagatccatgcaaaaaaaaaantacttggttaaatggnggaaaccgggaatttttnttt

SEQ ID NO: 6464 - DNA, 581 bp, Homo sapiens
  misc_feature (524)..(524): "n" may be a, t, c, g, other or unknown
  misc_feature (527)..(527): "n" may be a, t, c, g, other or unknown
  misc_feature (535)..(535): "n" may be a, t, c, g, other or unknown
  misc_feature (580)..(580): "n" may be a, t, c, g, other or unknown
ggtagagatggggtctcgctatgttagtaaggatcttaagattaaatcatctggtctatccaggtgggctctaaatccaatgacagtgtcctcataatgaaagatgtacaaaggagagacagagaagaaaaggcagtgtgaccacagaagcagaaactggagcggtaggaagagaaaaagaacagactctcccctacagcctcccaaggtggcactacccctactgccatctcaatttcagacttctggcctcctgaactgtgcagaataaatttctcgttttatgtcaccaaatttggggtactttgttacagcagcctaagaaactactacatcactgaaatacaggctttattcacctcctccacggaagcaggtgagagtaaaggcgaattagcctttgaaagttccttgcaaagcaggaaaatgttcaattctgtgacacaggaactaaaagctgttcccgctaggaagtggcagaatgtacagagacaggctacttgcttttgccacaagttccaggnttnacttggancctttgcacttgggtattgactttcatttggatttttttttaagnc

SEQ ID NO: 6465 - DNA, 559 bp, Homo sapiens
  misc_feature (18)..(18): "n" may be a, t, c, g, other or unknown
  misc_feature (30)..(30): "n" may be a, t, c, g, other or unknown
  misc_feature (45)..(45): "n" may be a, t, c, g, other or unknown
  misc_feature (48)..(48): "n" may be a, t, c, g, other or unknown
  misc_feature (53)..(53): "n" may be a, t, c, g, other or unknown
  misc_feature (56)..(56): "n" may be a, t, c, g, other or unknown
  misc_feature (74)..(74): "n" may be a, t, c, g, other or unknown
  misc_feature (196)..(196): "n" may be a, t, c, g, other or unknown
  misc_feature (389)..(389): "n" may be a, t, c, g, other or unknown
  misc_feature (463)..(463): "n" may be a, t, c, g, other or unknown
  misc_feature (484)..(484): "n" may be a, t, c, g, other or unknown
  misc_feature (491)..(491): "n" may be a, t, c, g, other or unknown
  misc_feature (512)..(512): "n" may be a, t, c, g, other or unknown
  misc_feature (519)..(519): "n" may be a, t, c, g, other or unknown
  misc_feature (554)..(554): "n" may be a, t, c, g, other or unknown
  misc_feature (556)..(556): "n" may be a, t, c, g, other or unknown
gacagaagccttgctctnttgcccaggctngagtgcagcctctgnctnccggnttnaagcgattctccttcctnagcctcccgagtagctgggattacagacatgctccaccacgtccagctaatttttttattttttggtagagacggggtttcaccatgttggccaggctggtctcgaactcctgatcttaagngatccgcctgcctcggcctcctaaagtgctggattatagcccacccaatcctatttttttaaaatgctgtccattaatgcattctgacttcttgcttgaaaacccctggtttagtggataagcacctgtaactccaggaagattcaggattaagggcagaaataatgaagtaaattgaagtattagcattagnattttccattacattttggaatccgctattttgatgtattcacgacggttaaaataatttaacatgcttaatgnatggattaacttgggcaattncattttnaaaatataaatggaataacgnatctgantctaaggtagacatgtgttaccagaatttcaaccncnttt

SEQ ID NO: 6466 - DNA, 575 bp, Homo sapiens
  misc_feature (48)..(48): "n" may be a, t, c, g, other or unknown
  misc_feature (148)..(148): "n" may be a, t, c, g, other or unknown
  misc_feature (173)..(173): "n" may be a, t, c, g, other or unknown
  misc_feature (430)..(430): "n" may be a, t, c, g, other or unknown
  misc_feature (509)..(509): "n" may be a, t, c, g, other or unknown
  misc_feature (519)..(519): "n" may be a, t, c, g, other or unknown
  misc_feature (529)..(530): "n" may be a, t, c, g, other or unknown
aaatcaaggaacattgtcttggctttttttttttttttttttttttgncattgcttttctcttttctttccttttttttttttaaagagaccattccactttattataacatctggatgcataaggactcatgtaaagcagtcatacnccattatcattaaaacccatatggnaaaatacatacacagtccaacaaaaggctaatacatagtaaagcctaagcatactactatgtaatattataatacataacttggagactttagttagagtactatgttatctattcagttttgaaaacattcattaagattttaaatgcaaattcattccttatttggaataaaacaaagtcctctaagttataacaagtattggtcataagttttcagacctattcattaaattcaaagaacccaaagaattctgngatgtccagtagaagtatgtaataaaaacattgcatatggttctaggggggagggctttagcaattggttactggagtnaaatgcaacnttaatctttnnaaatccagaaccgaagggggtttcttcttttggccaattgggaaa

SEQ ID NO: 6467 - DNA, 579 bp, Homo sapiens
  misc_feature (514)..(514): "n" may be a, t, c, g, other or unknown
  misc_feature (529)..(529): "n" may be a, t, c, g, other or unknown
  misc_feature (576)..(576): "n" may be a, t, c, g, other or unknown
ctatgtatagtcagttaggactttggcaaatataaagcacaaccaatatactgatgtagggtggaaaataatttaaaaaattaatttagtaaaatgcctggagcagtaagtaacaattattaacaatacaacaatgaagctgtctgtactttcatttaacaacacacttaaggcaaatgttgaattaatataaaaataatatgtggtaaactgatacttgacatgatacaataaaattaattttcacgttgaagacctagttatgacaacatctctacatgccttctaaatacctaatttctcagttgtgcagagcatagctcactatggcctaataagatgtcaatcagaatatccagaatatttcttaatatagagcaatacatttcccctaccacatcaggcaaaataatttaatatatttattttcacaaaaggctcatctaacttcaaactataggggtttttaaaattctaggactaattctgatcttaaagatgctatcattggtantctaaaattcatgcnggtcttaaaagggccaaatgcttatccgggaggtttaccctaattanccc

SEQ ID NO: 6468 - DNA, 576 bp, Homo sapiens
  misc_feature (515)..(515): "n" may be a, t, c, g, other or unknown
  misc_feature (554)..(554): "n" may be a, t, c, g, other or unknown
  misc_feature (562)..(562): "n" may be a, t, c, g, other or unknown
  misc_feature (567)..(567): "n" may be a, t, c, g, other or unknown
  misc_feature (576)..(576): "n" may be a, t, c, g, other or unknown
gagacagggtctcccctgtcacccaggctggggtgcagtggtgtgaccatagctcaatgcagccttgaactcctggactcaaacagtcctcctgcctcagcctcccaagtagctaggactagagacgtgtgctagcacacctggcttatattttattttgtgtagagacagggtcttgctatgtggcccagggtaatctcaaactccttggttcaagtgatcctcttgcctcagcctcccaaagtgctggaattacaggcaaagttctctgaattataggaggttggtggggcctttcaccacgtaggcagcccaaagatctgcctcgtggatcactatcttgggatgtatggttgtatttcttggatgaaagggagaggataagagtatacaaaaatctttcttaaaataaaattaatctgatgtaaagcaaacatgaatgagtttcaaaacgtgaatgcccaaagttattcataggtaatttagacttaacaggtgggtttctatcaaggggntttaccatcctaaaattataagttttccaattatgcccnattggaangtacnttcccagcn

SEQ ID NO: 6469 - DNA, 545 bp, Homo sapiens
  misc_feature (462)..(462): "n" may be a, t, c, g, other or unknown
  misc_feature (489)..(489): "n" may be a, t, c, g, other or unknown
  misc_feature (497)..(497): "n" may be a, t, c, g, other or unknown
  misc_feature (502)..(502): "n" may be a, t, c, g, other or unknown
  misc_feature (510)..(510): "n" may be a, t, c, g, other or unknown
  misc_feature (536)..(536): "n" may be a, t, c, g, other or unknown
  misc_feature (538)..(538): "n" may be a, t, c, g, other or unknown
cttcagtataagcaccttcccccatcattacctacagcattcacacacagatgtgaaattgtttcatttctgacccagattctggctttgagtattaagtctttccaaactccatatttcttcatatttcactaggaagattataaacttatctgaaatggcagaaattcattttgctttcaatttctcattctgctgtatactgccgaaaaggggtacataatgagaagtgagagcagcagcctggcctgctgcccagctggaagcaggaagttcacctgataaggacttgatgcttcaaattctaaaaactggaaagggagctagaagtgggggaaggaagatctggaaacatgcccaggggtagtaatgaagaaagtgaattcagcctgagggtgggaccttctgcccagcctctgtcaacttgatgcctcgttatcttctccatcttcctaaccccanggcagtaaatttaaggagcaaggtggnaaaagccnctaanaaagccanggcaggataaaaacctttttgagggngnaagtttt

SEQ ID NO: 6470 - DNA, 497 bp, Homo sapiens
  misc_feature (264)..(264): "n" may be a, t, c, g, other or unknown
  misc_feature (323)..(323): "n" may be a, t, c, g, other or unknown
  misc_feature (414)..(414): "n" may be a, t, c, g, other or unknown
  misc_feature (432)..(432): "n" may be a, t, c, g, other or unknown
  misc_feature (436)..(436): "n" may be a, t, c, g, other or unknown
  misc_feature (450)..(450): "n" may be a, t, c, g, other or unknown
  misc_feature (463)..(463): "n" may be a, t, c, g, other or unknown
  misc_feature (476)..(476): "n" may be a, t, c, g, other or unknown
  misc_feature (490)..(490): "n" may be a, t, c, g, other or unknown
caggcacctccaaacatattttctttatttcctccagagaacaggctttagtactgaggtccttgtaaacatttaacaaaactggtttaagaacaaactaaaagcatctatatccttgccctgtgttgctggggtgagtttatacaaggagaagttggaacaaatgcagtgggcacaatgaccttcttactcagttcaaagtaggtcttgggatgagagttccacacggccagtacagctgactttctgtgatttccaaggggngcccaagacattaaacgccatggtccttgggaaggactgatgatgtttctgctcattgntgatcagggtcaaaccttttcactaaccgggactgctctttccaagaagtcagaggtcagaaagctggtaaccgtcgtacaaagacccgtnttgacagcatgtgtaganctgnttcttccatggggntaccttggcacanggtcacaagcagnccccatgggcttangggccta

SEQ ID NO: 6471 - DNA, 510 bp, Homo sapiens
  misc_feature (166)..(166): "n" may be a, t, c, g, other or unknown
  misc_feature (363)..(363): "n" may be a, t, c, g, other or unknown
  misc_feature (447)..(447): "n" may be a, t, c, g, other or unknown
  misc_feature (455)..(455): "n" may be a, t, c, g, other or unknown
  misc_feature (457)..(457): "n" may be a, t, c, g, other or unknown
  misc_feature (469)..(469): "n" may be a, t, c, g, other or unknown
  misc_feature (471)..(471): "n" may be a, t, c, g, other or unknown
  misc_feature (483)..(483): "n" may be a, t, c, g, other or unknown
  misc_feature (507)..(507): "n" may be a, t, c, g, other or unknown
gagacagtctcgctctgtcacccaggctggaatgcagtggtatggtctcggctcactgcaacctctacctcccaggttcaagtgattctcctgcctgagcctcccgagtagctgggagtgcaggtgagaggtgacaacgtgctagcagccctcgctcactctcggngcctctttggcattggcgtccactctggccacgctcaaggagcccttcagctcgcagctgccgctgtgggggtccctctctggggctggctgaggccggagctggttccctctgattgcggggaggtgtggagggaaaggtgtgggcaggagccagggctgtgcgcacacacgggttctaggtgagcgtgggctcancaagtgcctgctgggcttgatcaggggatgagctccctctgggtggctggagtgcccaagctaggtgctgcaaagtcccatggnagtgcccntnaaaaaaaccggntngactttttctanccatggggactttggggacctttntgg

SEQ ID NO: 6472 - DNA, 580 bp, Homo sapiens
  misc_feature (482)..(482): "n" may be a, t, c, g, other or unknown
  misc_feature (535)..(535): "n" may be a, t, c, g, other or unknown
  misc_feature (545)..(546): "n" may be a, t, c, g, other or unknown
aaaaaaaaaacaaaacacatagacaagtaatgcaaacaaagtaagagcaagacttgtgcagcagctcttttgaggacaatcaggaggtgtctggggggcccttcccactagagggcactggaccctgtccctgcatcttcagtcgtctctactgccacatgccctgtccacaccaggatgacccctccccaccccagccctatgactctggaaagctcttcagcacacataacaggatccagacagaacttggaccttctctgctggagcaaattggaattcctgaaattgattgaaccctccatacagagggagctcagtccgcatctcctcggtttaaggccctgcctcaaataggggttctgatccctcaggaaagcaagggctcgagacacagacacacctgacctgagggactctaaggggaagtgtggaggtgccaggaactatgaacaatgagcaaaacatgtcttgccaccatnacactacatgcttttcaacatttctatttattaccaaactggtttgaccttgnttacaaggtnnggaaaaactggaatctaaaatttttccggtactt

SEQ ID NO: 6473 - DNA, 604 bp, Homo sapiens
  misc_feature (21)..(21): "n" may be a, t, c, g, other or unknown
  misc_feature (529)..(529): "n" may be a, t, c, g, other or unknown
  misc_feature (582)..(582): "n" may be a, t, c, g, other or unknown
  misc_feature (587)..(587): "n" may be a, t, c, g, other or unknown
aattatttcaaattttattgnagattcaaggggcagtgaatgtacaggtttgtttcatggtgtactgggatgatgccgaggtttgggacacaaaagttcccatcacctggtagtgaggataacaacagtttttttcaaccctttccccttcctttcccctcccagtagtccccagtgtctactgttgcctctttatgtccataggtactcaatgtttagctcccacttatcaatgagaacatgtggtatttggttttctgttcctgtgttaactcacttaggatactggccttcagttgcatctatgttgctgcaaaggacatgattttgttcttcttacggctgtgtagtattccacggcaacacattctatcagtaaaatttataataaacgtatgcacacacaaacacacacccctgttccaccccacacccctcttcacaagttggttgttaaacatttcctagcacactaccaattccctacatttgccactattattggtattatcattaataaataaactgnataatggttaacaggttaccaagcattccttacaacaagccttggttaaaggngttantaacttactttgctgag

SEQ ID NO: 6474 - DNA, 600 bp, Homo sapiens
  misc_feature (516)..(516): "n" may be a, t, c, g, other or unknown
  misc_feature (599)..(599): "n" may be a, t, c, g, other or unknown
agacagagtcccattctgtcacccaggctggagtacagtggagcaatctcagctcactgcaaactccacctcctgggttcaagcagttctcatatctcagcctcctgagtagatgggattacaagcatgagccaaaacacatggctaatttttgtattttttaatagagacgaggttttaccatgctgcccaggctggtctcaaattcctggcctcaagtgatcctcctgcctcagcctcccaaagtgctgggattacaggcttgagccactgtgtccagcccatatttgattttaacgtcctgtcctgaaatatgcctggaacagagcagtactcaataaatgtctgtagaatgagtaagtgctcacctgcatcccatgcctgctcttaatcctcacaaggtctgtattagtatctcagttggcaaatgaagaaactaaggcttatcttgtactggctaattatgtgatttcagtcacacaattaaagaatgacagagatgatttgtgaactcangctggcttgaccctaaaccctggtctcttttactacatcagccttctttactggatggaaccaacctaattttgaatttgaant

SEQ ID NO: 6475 - DNA, 577 bp, Homo sapiens
  misc_feature (469)..(469): "n" may be a, t, c, g, other or unknown
  misc_feature (503)..(503): "n" may be a, t, c, g, other or unknown
  misc_feature (540)..(540): "n" may be a, t, c, g, other or unknown
  misc_feature (555)..(555): "n" may be a, t, c, g, other or unknown
  misc_feature (559)..(559): "n" may be a, t, c, g, other or unknown
  misc_feature (569)..(569): "n" may be a, t, c, g, other or unknown
  misc_feature (574)..(574): "n" may be a, t, c, g, other or unknown
  misc_feature (577)..(577): "n" may be a, t, c, g, other or unknown
cttctaaacaaaaggggggtacatacacagaatgtgcaggtttgtcacacaggtatacatgtgccttggtggtttgctgtacctattgagtggtcctctaagttccctcccctcacccccaaccctccaacaggccctggtgtgagttagtcctctctctgtgttcatgcattctcaatgttcaactcccacttatgagtgagaacatgtggggtttggttttctcttcctatgtaagtgtgctgagggtgatggcttccagcttcatccatgtccctgcaaaagacatgatctcattcctttttatggctgcatagtattccatggtgtatatgtaccacattttcttttccttttttattatactttaagttctgggatacaagtgcagaatgtgcaggtttgttacataggtatatatgtgccatggtggtttgctgcacccattaccacattttctttatccagngtatcattgatggcatttgggttggttccacaanccttgctattacaaatgggctgcaataaacatcatgngcctggatctttttngaangattaatatnccttnggn

SEQ ID NO: 6476 - DNA, 572 bp, Homo sapiens
  misc_feature (460)..(460): "n" may be a, t, c, g, other or unknown
  misc_feature (495)..(495): "n" may be a, t, c, g, other or unknown
  misc_feature (513)..(513): "n" may be a, t, c, g, other or unknown
  misc_feature (520)..(520): "n" may be a, t, c, g, other or unknown
  misc_feature (533)..(533): "n" may be a, t, c, g, other or unknown
  misc_feature (535)..(535): "n" may be a, t, c, g, other or unknown
  misc_feature (566)..(566): "n" may be a, t, c, g, other or unknown
  misc_feature (571)..(571): "n" may be a, t, c, g, other or unknown
aggatataggttttctggtttatttttgaaagcaaaaagcatatttaaaggttaactaaaaacgtactggatttacaaaaaagaaaaatgatatgtctgaataggagtcattattttaagactaaaaaaagagaatcaaatgaagaaatgctggaaaattggaatcacttccaaattgctctatttaattttaccataagcataatagtgggtgaagttcagctaaagataggggcatgaaaaaaatgtgatttggtattgctctttagggaggcaaattaattacaaattaagaccatctgggttaaagaatgaattgtcaccttttaagaaccaggaataaaggtaaatgttcactttaaaacaaagggagaaagaacatgagaaaaatcaagagtaaatccgtacaatattacatacacacaaattgggggaaataaacattggcatggaaatgccncaaaataaaatacctatggaatgtaaaatcacctntggtccctgaatattgancccaagnttttggggaaagntnaattcctggattctttccaggccttgggganggaant

SEQ ID NO: 6477 - DNA, 598 bp, Homo sapiens
  misc_feature (497)..(497): "n" may be a, t, c, g, other or unknown
  misc_feature (553)..(553): "n" may be a, t, c, g, other or unknown
  misc_feature (555)..(555): "n" may be a, t, c, g, other or unknown
  misc_feature (586)..(586): "n" may be a, t, c, g, other or unknown
  misc_feature (597)..(597): "n" may be a, t, c, g, other or unknown
cacttaaatccattgttagtgacaatgtaagtgtttaaacagtattgctttaggaatctcagaagttcaagtagaaagacatattccatattctgggaaaagacggtacaaagactttaagaatttaattttttaaaagtttcagtaactaccttcagttaccttcagttaactacctacctactcatacttttcaacaaactgggaaaaaagtcttctctaaaatcagcatctacttggcagatgtatgtcatcattgtgtctctcattgtttcatccttaaaaatgtgtaatacttttaattgcagaggtaataaaagatatttatttgaaaaaaataaagtgattatctacttctttcctgaggcacacagactttcagattttatttatgcacgaaagcatttaaaaatgaggtaatatatatactctttcacctactttcacggtgtttacttttctatgtcaaaacatacaaagttagatcattaccttgnatgtattgctatttaaagtatcttcattggtagataaatacccagtgggtcctttngnttgctattcctaagtaaacttggggggattngatcctagttnc

SEQ ID NO: 6478 - DNA, 354 bp, Homo sapiens
  misc_feature (18)..(18): "n" may be a, t, c, g, other or unknown
  misc_feature (101)..(101): "n" may be a, t, c, g, other or unknown
  misc_feature (234)..(234): "n" may be a, t, c, g, other or unknown
  misc_feature (273)..(273): "n" may be a, t, c, g, other or unknown
  misc_feature (293)..(293): "n" may be a, t, c, g, other or unknown
  misc_feature (300)..(300): "n" may be a, t, c, g, other or unknown
  misc_feature (307)..(307): "n" may be a, t, c, g, other or unknown
  misc_feature (309)..(309): "n" may be a, t, c, g, other or unknown
  misc_feature (317)..(317): "n" may be a, t, c, g, other or unknown
  misc_feature (334)..(334): "n" may be a, t, c, g, other or unknown
gagatggagtcttgctgngttgcccaggctggagtgcagtggcgcaatattggctcactgcaacctccgcctcccaggttcaagtgattctcctgcctcancctcctgagaagctgggactacaggcacgcgccaccacgcccagctaatttttgtatttttagtagagatggggtttcaccatgttgaccaggatggtctcgatctcttgaccttgtgatctgcctgcctcancctcccaaaatgttgggattacaggcatgagccaccgcncctggcccactagctctagnttttatnacacatngncacctcanatattcataaaggttanatgttgcaaaataataaact

SEQ ID NO: 6479 - DNA, 589 bp, Homo sapiens
  misc_feature (507)..(507): "n" may be a, t, c, g, other or unknown
  misc_feature (545)..(545): "n" may be a, t, c, g, other or unknown
  misc_feature (551)..(551): "n" may be a, t, c, g, other or unknown
  misc_feature (553)..(553): "n" may be a, t, c, g, other or unknown
  misc_feature (560)..(560): "n" may be a, t, c, g, other or unknown
  misc_feature (570)..(570): "n" may be a, t, c, g, other or unknown
  misc_feature (584)..(584): "n" may be a, t, c, g, other or unknown
gagatggagtttcactcttgttgcccaggctggagtgcaatggcgcgatctcagctcactacaacctttgcctcccgggttcaagcgattctcctgcctcggcctcccgagtagctgggatcgcaggcatgcaccaccacacccggctaattttgtattttcagtagagacggagtttctccatatttgtcaggctgatctcgaactcccgacctcaggtgatgtgcctgcctcagcctcccaaagtgccgggattacaggcatgagccactgtgcctggccaggtgaactattaaataatagaaagcacctgcaccatcttctgtctgcttgaattttctttacatttacaaaaatatttttgatataagaaaacaaaaaatttaacacaatagaaatatagtcaaacgatagaattcctcgacatataccaattttatggtaaaaaaaaaaaaaagcaatgttaacaactggttctacaaatgtttaaaacttcatataggccangtttggcagctcatacttagaatctcagaacttttganaggctnangtgggangatcactggnaactgggagttaangacca

SEQ ID NO: 6480 - DNA, 586 bp, Homo sapiens
  misc_feature (497)..(497): "n" may be a, t, c, g, other or unknown
  misc_feature (503)..(503): "n" may be a, t, c, g, other or unknown
  misc_feature (541)..(541): "n" may be a, t, c, g, other or unknown
  misc_feature (548)..(548): "n" may be a, t, c, g, other or unknown
  misc_feature (552)..(552): "n" may be a, t, c, g, other or unknown
  misc_feature (560)..(560): "n" may be a, t, c, g, other or unknown
  misc_feature (570)..(570): "n" may be a, t, c, g, other or unknown
aaatacaaatgttttattacgcaaaccacatgtaggtcccaggctcaggagtcacaggggtctgcacagtcctttctgctgtggaacacgtgatagatgctggtcggggggaacatagcaacagcgccgagcagagagcccacctggatggccacgccggctgccagcaatgccggccggcccccgccatgcagcagggagctggctgccaccttcacgtaggagaacacgccaagacacagcacccacgacagcaccacgaggacgacccccgccgaggtgcccaccaggggcgggcaggggctcaggactgccagcgccatcaggtagcccccacagaacacgcccagcagagagaggccgccagccctgcaaggacctgcacagcacacccatggccaggaagcaggccaggggattggcagcactgcccagcaccacaagcaggtggtaggccagacccccgtagggtaagcaggaaaaagttttgaccggangcaagnacgccattgggcaaacgccttggtggcgggcaacaggnccaacangcangcacttgnggcttgatanaacttgataggcctta

SEQ ID NO: 6481 - DNA, 588 bp, Homo sapiens
  misc_feature (458)..(458): "n" may be a, t, c, g, other or unknown
  misc_feature (469)..(469): "n" may be a, t, c, g, other or unknown
  misc_feature (522)..(522): "n" may be a, t, c, g, other or unknown
  misc_feature (551)..(551): "n" may be a, t, c, g, other or unknown
  misc_feature (569)..(569): "n" may be a, t, c, g, other or unknown
  misc_feature (575)..(575): "n" may be a, t, c, g, other or unknown
  misc_feature (580)..(581): "n" may be a, t, c, g, other or unknown
  misc_feature (587)..(587): "n" may be a, t, c, g, other or unknown
gtttgtttttgagacgcagtctcgctctgttgcccaggctggagtgcagtggcgcaatcttggctcactgcaacctccacctcctgggttaaaacaattctcctgcctcagcctcctgcgtagctgggactacaggcatgtgccaccacgctcagctaatttttgtattttttagtagagacaaggtttcaccatgttggccaggatgttctcgatttcttgacttcatgatctgcctgccttggcctcccaaagtgctgggattacagctgtgagccactgtgcccagccctacattgactgattttcaaatgctgccttatattccaagcctaaatccactcggtcatgacttgttattatttttattattgcctaattcaatgtactaatattttgtgaaggatttctgcatctatgttcctaagagacattggtctgcagttttcttttactgnactaactttgnctggttgggaaccaggataatgctggcttacaaaacgaagttgggaaatgtgnctctcttttggtttttgaaaagactttcngaatgaggcattttttcncaatgnttgcnnaaaatnt

SEQ ID NO: 6482 - DNA, 537 bp, Homo sapiens
  misc_feature (339)..(339): "n" may be a, t, c, g, other or unknown
  misc_feature (445)..(445): "n" may be a, t, c, g, other or unknown
  misc_feature (463)..(463): "n" may be a, t, c, g, other or unknown
  misc_feature (518)..(519): "n" may be a, t, c, g, other or unknown
  misc_feature (531)..(531): "n" may be a, t, c, g, other or unknown
  misc_feature (533)..(533): "n" may be a, t, c, g, other or unknown
  misc_feature (536)..(536): "n" may be a, t, c, g, other or unknown
agaagtcacagcagttatcgtttattgagcactttctatatgctgggcactttgccatgcgcattacaactattttgaaatacttctatcccctactcctccctccttaataaccgaggggtgccgctgcgtccagggaggtcaagttcttgcccaggatcacacagccgggaacacacattccaaaacccacgggtttaaccgcgaaaacccgtttgctccttcctcagctccccatttaaataacgttttaactttattcagcaggtttgctcatctcccaccccaatcgtgactccccagaccgggtctccacagggaccaagaggcctctccctnccccttcgccgcgggagcagggaagggccttcggcagcaacttgttccacctcccaaggttcagacgctaaactgagttccagaaggaagggcttacgcaaaggcncccagcgcgccagaagangggtgtcttttccgtgcccgggccaagcccggggccagtccggaccgtgggcggnnacacttggactngngcng

SEQ ID NO: 6483 - DNA, 591 bp, Homo sapiens
  misc_feature (478)..(478): "n" may be a, t, c, g, other or unknown
  misc_feature (519)..(519): "n" may be a, t, c, g, other or unknown
  misc_feature (554)..(554): "n" may be a, t, c, g, other or unknown
  misc_feature (583)..(583): "n" may be a, t, c, g, other or unknown
gagacagagtctggctctgtcacccaggctggagtgcagtcccatgatctcggctcactgcaactccacctcccaggttcaagcgattctcctgcctcagcctcctgagtagctaggattacaggcaactgccaccatgcccagctaattttttgtatttttagtagagatggggtttcgccatgctggccaaaccagcctcgaactccggacctcaggtgatccacccacttcggcctcccaaagtgctgggattacaggtgtgagccaccacacccggcccctttatcttttgattcctgaaaacaatgcacttaacttcagtatttggtcttttagttataattcttaaaaataagacattttaaaacatattaaatgtgcattatttggaaaaaagtatatgcaaatgaacctggaaatatcaatatacaaaccaatttttcaattctcagtccatggaggggagatctcatgnatttgacatttgaaaaccatttttttagcaactatgatagngggttctaaacttggccttaacacaagccattttnctatatgacatgacataccaaggattatntttgctcc

SEQ ID NO: 6484 - DNA, 550 bp, Homo sapiens
  misc_feature (439)..(439): "n" may be a, t, c, g, other or unknown
  misc_feature (509)..(509): "n" may be a, t, c, g, other or unknown
  misc_feature (534)..(534): "n" may be a, t, c, g, other or unknown
  misc_feature (537)..(538): "n" may be a, t, c, g, other or unknown
  misc_feature (544)..(544): "n" may be a, t, c, g, other or unknown
  misc_feature (549)..(550): "n" may be a, t, c, g, other or unknown
gagatggagtctcgctctgttgcccaggctggagcgcagtggcgcaatctcggctcactgcaagctccgcctcctgggttcaatgttgtgaatattcttaatgcatttcattatttatatacaatatgatactgatgaggagtcattatattctgagtagttttcctgaagaccacaagtctcaagtcaaggaaagtatccttaatctaggggaaaaaaaggaagtttctaaattgttccacaatacacttcactaagaattgtactgtatgacaatgttaatttttaaaaataatatatatatatatttttgtttctgttaaggatggtggtatttgcttaatactggttttcctgtatagcagatattttcttatggctatatttacttgaatgaaaaattaaagatgactacctgaatattccagtgtataattcnggtacaacctcatgaaatgggttgattctgtggtctcaagtctagaatccagaattgctggccaatctgnaaattattcagaacaaataaggccnttnncccccnggggnn

SEQ ID NO: 6485 - DNA, 550 bp, Homo sapiens
  misc_feature (481)..(481): "n" may be a, t, c, g, other or unknown
  misc_feature (485)..(485): "n" may be a, t, c, g, other or unknown
  misc_feature (505)..(505): "n" may be a, t, c, g, other or unknown
  misc_feature (507)..(507): "n" may be a, t, c, g, other or unknown
  misc_feature (522)..(522): "n" may be a, t, c, g, other or unknown
  misc_feature (532)..(532): "n" may be a, t, c, g, other or unknown
  misc_feature (539)..(539): "n" may be a, t, c, g, other or unknown
agacagagtattgctctgtcgcccaggctggagtgcagtggcgcgatctcggctcactgcaagctccgcctcccgggttcatgccatcctcctgcctcagcctcccgagtagctgggactacaggcgcacgccgccacacccagctatttttttgtatttttagtagagacagggtttcaccatgttagccaggatggtcttgatctcttgaccttgtgatccgcccgcctaggcctcccaaagtgctgggattacaggtgtgagccaccgcgcccggccctgttagatacttttttaaaaacaacagtttgctttaaactataaacattaaaccctcccaaaagaataaaaatgcatagtcagtagtttaaatgtctttattaatagctataattaaatcttttttcaaaatatcagtccaacataactccaatcatatctatcacactgatgggaggaaaaatgacaactacccaaagntttnccattactggataattttgncnaaagattccaattgngagaaagcanaagttcnggaagagaatt

SEQ ID NO: 6486 - DNA, 562 bp, Homo sapiens
  misc_feature (352)..(352): "n" may be a, t, c, g, other or unknown
  misc_feature (476)..(476): "n" may be a, t, c, g, other or unknown
  misc_feature (497)..(497): "n" may be a, t, c, g, other or unknown
  misc_feature (500)..(500): "n" may be a, t, c, g, other or unknown
  misc_feature (523)..(523): "n" may be a, t, c, g, other or unknown
  misc_feature (529)..(529): "n" may be a, t, c, g, other or unknown
  misc_feature (531)..(531): "n" may be a, t, c, g, other or unknown
  misc_feature (562)..(562): "n" may be a, t, c, g, other or unknown
gtgaaacatttctcaaggcaggatgagcagccacctcctctgcgtttccacagggccccgggcggagctattctagcacttgccacctacactgccattgtcaattaacttgtccccctggactgggggagtcctgagatcaggggctgcacctaacccatcattgtggctccagcatctggcacatagtgggtgcccagtaaatgtgggtttggcagatgaatgaatgacacgtgtctctctagtggctctatggtgcacctgagctccacgaagtcttcttcataacagaggacaggctgtgctgagcacctcctggatgtgcgagccagtgagtgtgggtggggcaganagcgtggagcatgagaaggcacatgggaagtgggagtgggagcatgcatacattttaaccacacatgcgggcaagttcacagactgccttggaatgagccaaatgagactgatccaacctggtnatgcctaaaagggggaagtgnggncattccccatggccaaaaaggtnccaaananccttgtccaaacagggcttggaaaaacaacn

SEQ ID NO: 6487 - DNA, 618 bp, Homo sapiens
  misc_feature (607)..(607): "n" may be a, t, c, g, other or unknown
gagatgcagtctcgctttgttgtccaggctggagtgcagtggcatgatctctgctcaccgcaagctccgcctcccgggttcacgccattctcctgcctcagcctcctgagtagctgggactacaggtgcccgctaccacgcccggctaatttttttgtatttttaatagagacggggtttcactatgttagccaggatggtcttgatctcctgaccttgtgatccacctgcctcggcctcccaaagtgctgggattacaggcgtgagccaccgcgcctggccccacaaattatcttttaagaaggtaaaatgaatctttctagaatactacttaatattaagtcatttcttggctcaataatctacagtggcatccaggtatgggtaggattaaggctaccacataattgttagactataacctacttcctgaaatgtaaattgtaactccatgtgcaggttgacaaatgctgaagtgggtgatgggtagttagaggctcattgggctattctctctacttttgtcaaaatccactataaaatatttaaaaagcaatatacaggatttaagttggccatgctttctttggaacctgggttggggtanatgtggaaaaa

SEQ ID NO: 6488 - DNA, 617 bp, Homo sapiens
  misc_feature (562)..(562): "n" may be a, t, c, g, other or unknown
  misc_feature (605)..(605): "n" may be a, t, c, g, other or unknown
  misc_feature (616)..(616): "n" may be a, t, c, g, other or unknown
aaacacaagcctctgacccacagtgattcatggggagagcttagagagctccatgctactggtaacttcccttcactttgactaaagtgactaacatctctctacctgacctcactgtcccatgcagagaccacgtgttgttgatagaagattgtaccaaaggaataattcatagaacaacaaggaagaattaagctaacaacagattccaaaatgttattcaagaaatgagacaaaggtaaggaatagctgctatcacctttgttgagtgttacttccatgacgatcctgtccttgggcccaggggtcttccgacccagggatgaagaactgccttcatcggaacctcccgccgaggctcccccactggtattgaagttcggggaggcggatctgctcatgtgtgtgggtgtcgagcagggtgtgaggctggggctcaccaactttgtgcgtaccgttaaaacaaataatccactccggatttgctgagaaaacagtgaggaaaggtgggctgaaacatttggaatgccttatatcaaagggttaaaaaaaaaaaccactnaccaaacccaaccagaaggaaataagaaaggaaattggataanggagatcattna

SEQ ID NO: 6489 - DNA, 617 bp, Homo sapiens
  misc_feature (1)..(617): "n" may be a, t, c, g, other or unknown
nnnnnnnnnnnnnnnnnnnnnnnnnnnnnnnnnnnnnnnnnnnnnnnnnnnnnnnnnnnnnnnnnnnnnnnnnnnnnnnnnnnnnnnnnnnnnnnnnnnnnnnnnnnnnnnnnnnnnnnnnnnnnnnnnnnnnnnnnnnnnnnnnnnnnnnnnnnnnnnnnnnnnnnnnnnnnnnnnnnnnnnnnnnnnnnnnnnnnnnnnnnnnnnnnnnnnnnnnnnnnnnnnnnnnnnnnnnnnnnnnnnnnnnnnnnnnnnnnnnnnnnnnnnnnnnnnnnnnnnnnnnnnnnnnnnnnnnnnnnnnnnnnnnnnnnnnnnnnnnnnnnnnnnnnnnnnnnnnnnnnnnnnnnnnnnnnnnnnnnnnnnnnnnnnnnnnnnnnnnnnnnnnnnnnnnnnnnnnnnnnnnnnnnnnnnnnnnnnnnnnnnnnnnnnnnnnnnnnnnnnnnnnnnnnnnnnnnnnnnnnnnnnnnnnnnnnnnnnnnnnnnnnnnnnnnnnnnnnnnnnnnnnnnnnnnnnnnnnnnnnnnnnnnnnnnnnnnnnnnnnnnnnnnnnnnnnnnnnnnnnnnnnnnnnnnnnnnnnnnnnnnnnnnnnnnnnnnnnnnnnnnnnnnnnnnnnnnnn

SEQ ID NO: 6490 - DNA, 612 bp, Homo sapiens
  misc_feature (557)..(557): "n" may be a, t, c, g, other or unknown
  misc_feature (593)..(593): "n" may be a, t, c, g, other or unknown
gtagagacggggggtggggctcctgctgttgctgaggctggtcttgaactcctaggctcaggtgatccttccgcctctgtctcccaaattgctgggattacaggcatgagtcaccatgcctggccagcaacaatttgtgttttgagaattaacctgagccatttcctgaagctacctacactgccattccacagttgggaatatcttcacgtatctaccggctagggaagaatctgggggcagaaatcaccttattccagagcagcaatttagacgacgtagtaggagtttgtagggagatgttaaccataaggaattttcctattaaaatgagatgaaaaaggggaatccctctgacttccacgattataggcatcagtgaccaaattttaacctggaaaaggcattcatggatcagttcatgctcctgggcagaattcaatattgaacatgattcctagctattgatttggtatctgttctgcagaaatgtttgaatttctcaaactcaatccaaagccattgcctgaacagcttcctatgtcagagactaagcncagatgggttccatcaaccacacgtgaccataatgnttttcacaggtcacaggaa

SEQ ID NO: 6491 - DNA, 608 bp, Homo sapiens
  misc_feature (494)..(494): "n" may be a, t, c, g, other or unknown
  misc_feature (507)..(507): "n" may be a, t, c, g, other or unknown
  misc_feature (511)..(511): "n" may be a, t, c, g, other or unknown
  misc_feature (537)..(537): "n" may be a, t, c, g, other or unknown
  misc_feature (597)..(597): "n" may be a, t, c, g, other or unknown
attttttattttttattttttattttgagacagggtctccttctgtcatccaggctagagtgcagtagctttttcctggtctatgtaatccagaccaggaaaaagccctttacagccagtgtggcatggtccagggcagctctagctgacgttcaccaaggggagatcctactttgctatggtagggaggatttgggatagacatttgcagcctgcacttctagggaacctagtggatgagtgactagggagatgacagccatggctcagatggaacatagtcctgcctacgggcactggttgggaaaatgggtttaggaagcctgggaggctggaaggctctagggtggggctgcacaggctctgggtatcctatctcgggccttctccagggcatgtgttgctcaggatcctagccctggcttatccctcctcaagggagttaataaagtggaaagaaatgtggctcttgccaagagcccctggcagcttancaaatgccattgnctgngctgtgtccagtgcccttgatttgangctggtttggtcccagcccaaatcagccctttcattgccagcttttccacttgcacttgnaccaaagcctg

SEQ ID NO: 6492 - DNA, 553 bp, Homo sapiens
  misc_feature (467)..(467): "n" may be a, t, c, g, other or unknown
  misc_feature (481)..(481): "n" may be a, t, c, g, other or unknown
  misc_feature (483)..(483): "n" may be a, t, c, g, other or unknown
  misc_feature (530)..(530): "n" may be a, t, c, g, other or unknown
  misc_feature (543)..(544): "n" may be a, t, c, g, other or unknown
gttgagatctgaagtttattttgctgtgcaactccttttttggagttttacttgcttccaacaaggaaggcaaattttcctgcgtccatgatgatggaaggcaggtaactcctttctggagtttgagctcgtttccagcagggaagatgagtttcagttttttcctgctttgtttttgttgttgttgttgttgctgtttgtttctgtttcttgttgttttcatctttttcccattgggtttgaccaactctatccaacttgatcaaatccgaaggaaaattccaaattatggagaacaagacctctgaattggctaaattcctgcaacctgctctgtctaggcaagaagaaataaatctggttaaaagatttaacaaacatgatccaaaagccaaggcaagtataataattaatagtggactggccagaggaaggagatgtgagccccaaattagcattttgactangcgccccatgactnanacagctgtggcatatcttatgggccaatcggctagttttttgggggngatccttactaannccgttgggg

SEQ ID NO: 6493 - DNA, 556 bp, Homo sapiens
  misc_feature (476)..(476): "n" may be a, t, c, g, other or unknown
  misc_feature (500)..(500): "n" may be a, t, c, g, other or unknown
  misc_feature (502)..(502): "n" may be a, t, c, g, other or unknown
  misc_feature (518)..(518): "n" may be a, t, c, g, other or unknown
  misc_feature (528)..(528): "n" may be a, t, c, g, other or unknown
  misc_feature (537)..(537): "n" may be a, t, c, g, other or unknown
  misc_feature (545)..(545): "n" may be a, t, c, g, other or unknown
acaatataatctgttttattttacacttctctgattattgaaatctaaatagaggtttttgctaacaaacaaaaaggaaaataaaaagacagcaaggacacgattaaatgttgagtgcagatgaagggttgtatgaggccccatcctggggaggctgtacaccttcttggcacagcagcagtgtggcccacggagcttgaacctggtgaagacagcaagtaagccacagctcaagagttctgaggcttgggaacagaaaagagctccttcctgctccaccccaatctgggttgcatgggcatggaaaagagcaaacacaccctgcaaagcatactggacatgcctcttctttaccttctcaggccagaacaccctcctctccacaaacgtgtgcacacttgcacgctcattaagcatgtgcacacatcatattcacacactcaagccatgctcttgatttcagggctctattgcangctcaggtatcaaccccagaaccnangtgtgtgaaaactccntagcagactnacaaaaagntactgganaagcacggggt

SEQ ID NO: 6494 - DNA, 552 bp, Homo sapiens
  misc_feature (461)..(461): "n" may be a, t, c, g, other or unknown
  misc_feature (541)..(541): "n" may be a, t, c, g, other or unknown
ccgatctaagatggtttaatgtcttgacaaaaagtgagatgacttatacattttacattttgtacatttagatcaccatatgtatagatgttctaatgctgaatccttggtcttcagtatctcatagtgctggatgctcggaagtatgacaaaaacttgtaacacagactaaccacaaagtaccagatatttcttgccatttgtgatcttgcaataaaaatgcgccagatgaggatcacaaggatagtattaaaaccataacgtatattccgcaacttgttcagatgttttctggctgcagggaggccagacatttcttcattcaatacgtacttcttagttcccaagcagtagttctctatatattctgcccaatgtaactgccgtacatcaatattgaaggtctttttatcttcagggtttaagttgattcattaacatattgacattctcaggtattncaacccaagaattacttgggaaatattcaagaaacaccatagctttggtgaaaaccaagttattggtttcatcatcctgnattggaagaaa

SEQ ID NO: 6495 - DNA, 558 bp, Homo sapiens
  misc_feature (496)..(496): "n" may be a, t, c, g, other or unknown
  misc_feature (518)..(518): "n" may be a, t, c, g, other or unknown
  misc_feature (530)..(530): "n" may be a, t, c, g, other or unknown
  misc_feature (540)..(540): "n" may be a, t, c, g, other or unknown
  misc_feature (552)..(552): "n" may be a, t, c, g, other or unknown
  misc_feature (555)..(555): "n" may be a, t, c, g, other or unknown
  misc_feature (558)..(558): "n" may be a, t, c, g, other or unknown
acactctacactctattctttattctggtacagctcagcatggatttcagctcctactacaaccgggtacacatcctgggggtgagcacacagcaaaacggggtgggacgtgcagagaggtatagggtaaaggcagttgctgggtaccagaccaagagctggttggaaacagcacctgccactatggtcagctccttccaggcgtctccaatcaggcaggctgaagagagggtgcacctgtctgtgcagggcacctcttgcaggatgcaccctactacagggtcatatagcaccactgagttgtggcccagggccaaggctatatttccctcaagccagcgtgcatcccaaatccagtcagacatgttccacaggccagagcgccaaagctcccagaagtggccctgtccccagctaattttcacaactcggagtcccttgcttccaaacacagccaccatggcctcaagtcaaggtctccattaaggcttctggncgtacccggaaccatgggtaanatagtgggccancagggtctgnactcgctttatnatnccn

SEQ ID NO: 6496 - DNA, 556 bp, Homo sapiens
  misc_feature (475)..(475): "n" may be a, t, c, g, other or unknown
  misc_feature (494)..(494): "n" may be a, t, c, g, other or unknown
  misc_feature (518)..(518): "n" may be a, t, c, g, other or unknown
  misc_feature (529)..(529): "n" may be a, t, c, g, other or unknown
  misc_feature (534)..(534): "n" may be a, t, c, g, other or unknown
  misc_feature (537)..(537): "n" may be a, t, c, g, other or unknown
gcatcaaatgctggttttgaaaatgtaattaagataaacaaacagtagaaaatacataatggagtgcatactggaatatagttacttagttttcgaaaatgaaaactaagggttttactcaacactttataaagtagattgtctttttcaacccaaatttttgtgaaatgagactttcaaagtcagaaattccaattttaaaaatattaaactaagaaaatccttaaatgaaactaataaaaagtcatgaaatatagctatacaaattgccttgtgaaacatcatcacatttctctaaaaataattctatcttctctaaaaataattctatcttatggatttgggaaaaaaaatctaagagtaaacatcaaaaattagttctcagctgtaaactgattagagagggaaaatcagttcgaattaatattgaggatgaaaatgttgattataccgttgagaaaacgagtgctttggnccctggatctctaagctgnatttcatcagaagtctgccccagntttcactttgnaaaanggntggcctttgacacaccccc

SEQ ID NO: 6497 - DNA, 559 bp, Homo sapiens
  misc_feature (5)..(5): "n" may be a, t, c, g, other or unknown
  misc_feature (536)..(536): "n" may be a, t, c, g, other or unknown
attgntaataatttgaagatgtttattgcattctatttttggtgggaaaaaaatgtaacatacatttatttagcacgacattgtgaaatacacaaaacatgtaactgagaaagcaggaattttctattcctagtccatttctgaggactaaatcatgaactgctcccaatgtaattaaatatttcttacaatagttgggcaccaagtttaagatttattaattttcccctctcagtataggcagcaattcaccattttctttcagttccttcacaatatccaatcctcccaccagctcccctttcacatacagctgagggtatgttggccaatttgagtaagcttttaatccttgccgaacttcttcatcctccaatatatcgaatgtttcatattcaacaccagtactatttagtatttccagaatttgtttgctgaatccacattttgcttcctgtttggttcctttcataaagagcatcacagaagctttatttgtcagcactttgagcctttcctctaatttgggagctttnggacaaatggatctaggtcttca

SEQ ID NO: 6498 - DNA, 567 bp, Homo sapiens
  misc_feature (435)..(435): "n" may be a, t, c, g, other or unknown
  misc_feature (451)..(451): "n" may be a, t, c, g, other or unknown
  misc_feature (481)..(481): "n" may be a, t, c, g, other or unknown
  misc_feature (509)..(509): "n" may be a, t, c, g, other or unknown
  misc_feature (547)..(547): "n" may be a, t, c, g, other or unknown
  misc_feature (559)..(559): "n" may be a, t, c, g, other or unknown
  misc_feature (567)..(567): "n" may be a, t, c, g, other or unknown
aaaggcaggggactctcaagaaaatgatgaatattattatttctttgaattcttgaaatcaacataaagttgtgtgattcctctcctcctacccccaattttagcataactggtagtaatataaaagaactagctctttgctaactgtgcataagaaataattttttccccagaaatcagaaatgaagacaagtgccacacatcattgatcgccccaacatggattttcgcacaaaagaaatacagctacccagtatgcagtttacctgactgggagaaaaactgggatcgtcgccaagagttctgaactctaagcggaacactggcagtgccaggcgactctagatcagatggcagaacagaacaaacagaaaaccatgaaaactggggtgagaactgaatagaaccatgctcccaagtactatagggagtttnggcttctagtcaaatnccagaaattgagaagtcagtaaaatctacnggtccaaaaatgtcttaataaccccacnttttaaaaacctggaaggacattgttccaaaatcaacnggaacccggacnggtttttn

SEQ ID NO: 6499 - DNA, 555 bp, Homo sapiens
  misc_feature (510)..(510): "n" may be a, t, c, g, other or unknown
gaaagctgaaaatttatttcactaatatacataagaagttcacaacaatgaacagacagaaaatagcagtatatacagaatttcactacttacagtacattacaatagagaaagcattttataaacagttcagtattggattaaaatcttttaaggatggctaattctattacctaattaaattctatacccattattcaaggtttaatgcaaatctcgcctcatcaatgaaattttcttattttcctggtccaaattgaactcctctttctctaagcttgtacagactgtattctgtccaaataaattaccaataaattaggtattgctttatattactgattaattcatccatagatattattagattttaatcctagtctctcctacgagatagttaagattctttcacagctccagtccatctcccatgcaaattaaattaacaaatgcatacagtatatacatctgttcacttgaaatcttttggaggccaagtagtcaacaaanggaaggcatattacatagtttgactatgcactccgcaaaacaaat

SEQ ID NO: 6500 - DNA, 554 bp, Homo sapiens
  misc_feature (494)..(494): "n" may be a, t, c, g, other or unknown
  misc_feature (509)..(509): "n" may be a, t, c, g, other or unknown
  misc_feature (513)..(513): "n" may be a, t, c, g, other or unknown
  misc_feature (524)..(524): "n" may be a, t, c, g, other or unknown
  misc_feature (527)..(527): "n" may be a, t, c, g, other or unknown
  misc_feature (541)..(541): "n" may be a, t, c, g, other or unknown
gaagtcggttagcactttatctgcaccgctcctgtggtactaacactcaccaccttttattacagttatttgtatcttctgggggttctgacttagaagcattcgctcatgatcccttgagaggtttatgactgaatgcctaatttatctctgagtcctctaccttgcactttaccttgcacatacaggccttcggcaaatgtttgctgaatgcttggattaatgaatacacttctgaacccacccaagagggcgccagcagggacgtgcccttcccgggtgcctaatgggacgctgtttctcaacaggaccccccatcatctccagcacccagacccagcacgccctccacggcgagaagggccagatcaagtgcttcatccggagcacgccgccgccggaccgcatcgtgagtgctccagggacggcgggcgggggccgggccagcaagcccgacagtcacttttgccaatacctgggtggccagccaggcngtgcacaccttcganggtnctcttttttgntgngggaaaatttaccnggccttggtggtt

SEQ ID NO: 6501 - DNA, 545 bp, Homo sapiens
  misc_feature (481)..(481): "n" may be a, t, c, g, other or unknown
  misc_feature (500)..(500): "n" may be a, t, c, g, other or unknown
  misc_feature (534)..(534): "n" may be a, t, c, g, other or unknown
gagatggagtctcgctctgttacccaggccggaatgcaatggcacagtcttggctcactgcaacctctgcctcccgggttcaggcgattctcctgtctcagcctcccgagtagctggaatcacaggcgcccgccaccatgcccagctaattttcgcatttttagtagagacggggtttcaccatgttggccaggctgatctcgaactcctgacctcaggtgatccacccgcctcggcctcccatagtgctgggattacaggcgtgaggcaccgcatccggccaagactccttaggtcttagagcaatctaaatgatcaataatgccccttgaatgtgtcagtatcaataagtctctgattacacgcacagagaataaaaagtgtaacaggctttagtgaacaagggttccaggcaatttctatgaaggcccaatacctacaataacctagtaacagcagatccaatgttcacagaaaaacnattaaataattcccactgnactggggaaacttggcttaacagcaaaccttctnccaattgtttt

SEQ ID NO: 6502 - DNA, 412 bp, Homo sapiens
atatatattcattgacctctgcctttacttttattatttacttccatacgttttactgttgttgttttaaaattttaatacctggctctcttactagctttttgagttgaacactcagtgtaactaatttttggccttcttgattttatatcaatatattcatggcttttaactgctccctagatccgtttcaataggtaaggctctaagcattgaattttcttccttctagcttctaagagtagttttctattcccaaacacatgtcattctacttgtcttctaatccttgatttctttctttttttggcattgtggtcagagaatatttgtataaatgattatgattatttggatttcaaaaagatttacttaaaaatccttgtggacaggtacataactacattttatg

SEQ ID NO: 6503 - DNA, 562 bp, Homo sapiens
  misc_feature (464)..(464): "n" may be a, t, c, g, other or unknown
  misc_feature (499)..(499): "n" may be a, t, c, g, other or unknown
  misc_feature (523)..(523): "n" may be a, t, c, g, other or unknown
  misc_feature (527)..(527): "n" may be a, t, c, g, other or unknown
  misc_feature (541)..(541): "n" may be a, t, c, g, other or unknown
  misc_feature (547)..(547): "n" may be a, t, c, g, other or unknown
  misc_feature (560)..(560): "n" may be a, t, c, g, other or unknown
ccagtttcttttgcatttattgcaagaaagttaggtatgtttgacaatacacatttttgaagtacatactggttataaacaatgtattccttacatattataactacatatacaagtatggtttttaaatgatgaaatccaattgtaattaatctatagggaaagcaattcaagaaaattcgggatacttaaatgttcagcctttttagatgtgcaagaggactcctatgagacacttttcagtatatgaaatattactataacccttgaatgatttacatgcaaggatttattttatttgggacagactaaattgcctgaagataatgccatggcttctcccagtgatccctgagtttcttttcttcttctttttttttccccatagtttactgctgtgcttaggttctgattgatgacacactcacgtaaggcacttatttacaaggtatggacttaaaacnggaatcacagcatttctgcgaaagcccttaaactnttcatctatggttggctggttcangacnttttaaataggcanggtcancatggaaaattanct

SEQ ID NO: 6504 - DNA, 552 bp, Homo sapiens
  misc_feature (506)..(506): "n" may be a, t, c, g, other or unknown
  misc_feature (508)..(508): "n" may be a, t, c, g, other or unknown
  misc_feature (551)..(551): "n" may be a, t, c, g, other or unknown
ctctctcttcttccttccttccttttttctttctttctttctttcttctttccttctttctttctttctctgtctctctctccctcccaccctccctctctctctctctctctctttctttcttttttttgaggcagagtttcattcttgttgcccaggctgcagtgcaatggcgcgatcttggctcaccgcaacccctgcctcctgggttcatgagttctcctgagtagctgggattacaggcatgcgccaccacggctggctaattttgtattcttagtagagacagagtttctccatgttggtcaggctggtctcgaactcctgacctcaggtgatccgcctgcctcggcctcccaaagtgctgggattacaggcgtgagccaccacacccagcctagacttcagtgtttctaatctttattcctcagaggcagatatgaattttggacaaagttttggccaattttggatgtaactggactttggggaaaggaccttcttcntncaatcactttaatcaggaataattatttaacaaattaatccanc

SEQ ID NO: 6505 - DNA, 558 bp, Homo sapiens
  misc_feature (531)..(531): "n" may be a, t, c, g, other or unknown
  misc_feature (548)..(548): "n" may be a, t, c, g, other or unknown
  misc_feature (551)..(551): "n" may be a, t, c, g, other or unknown
  misc_feature (555)..(555): "n" may be a, t, c, g, other or unknown
acattatcccagaaaacagaataaatggctttatttggtatcttcaagaagcttctccttccgtaggagatgtaggtgttgtgggagaaactgtaactggttttcgtgtaattctgtctagttctgcatgaacatctaagacaggcttctggcctgactttttggtggatggtggtaaaccactgcttccacctccagccccacctgcagggctaccaccactcacaccagggcctcctggagagccagtctttttactcaacaaactgttgaagaaatttgccagaacgccttcacttgtagctccagctttcatgtttggatcaattttttttgacccagcaggaatgggtgacacgctggcaacattagatgatacagatctatttggtgttcgtggggagcctcctgggactcttggtgaggcatccacaggccttccagctgcaagttggtggttgctttgctaaaagggactgtagcttcataagaaacacctgacatcttctggcataaattccttctcatggncaaactttcgaacaggnggntaanttt

SEQ ID NO: 6506 - DNA, 562 bp, Homo sapiens
  misc_feature (547)..(547): "n" may be a, t, c, g, other or unknown
  misc_feature (559)..(559): "n" may be a, t, c, g, other or unknown
ggtttaatggtataaaacacaaaggtttacagtgagcaaagcaaatttctgagcagagacttctccacccccaagcccctcactaagggcagccagacctgttataaatggaaggcacaaaatcaaactcatcccgacccagggaacacagcccactccagggccaaacctgcagagtccaagagtgacagccagtcgttctggctccaggcaccacttctccctgagcccccaactcccacgagcaatgccgagttcagtggctaaaagaagcaacttcaggtttatttacggagaaaagcctttgccacggctgcggaaggagcccgttggccagagtgtgtggacatcaacgttacgcgaatggctgtgcgtgccaatggctggtataaggaacttttaaagtcctcaggttaaatgaaaaactcttgtggagctcttcactgcacgatcttggtatggtttctaccctggttaaggtctaccttttcccatttccccacatttctttacatcgcttttatttacttcaattgcaaatcccganctggtttggtanttt

SEQ ID NO: 6507 - DNA, 562 bp, Homo sapiens
  misc_feature (468)..(468): "n" may be a, t, c, g, other or unknown
  misc_feature (494)..(494): "n" may be a, t, c, g, other or unknown
  misc_feature (523)..(523): "n" may be a, t, c, g, other or unknown
  misc_feature (532)..(532): "n" may be a, t, c, g, other or unknown
  misc_feature (550)..(550): "n" may be a, t, c, g, other or unknown
  misc_feature (554)..(554): "n" may be a, t, c, g, other or unknown
  misc_feature (560)..(560): "n" may be a, t, c, g, other or unknown
ctctctctctctctctcgctctctctttctttcttttttggagtgttgctgcgatgcccaggctggagtgcaatggtgcgatcttggcttaccgcaacctccacttcctgggttcgagcaattatcctgcctcagcctcctgagtagctgggagtacaggcacactccatcacgcccagctaatttttgttttagtagagacagggtttcaccatgttaacccgactggtctctaactcctgtcctcaagagatctgcccgccttggcctcccaaagtgttgggatttccggcgtgagccactgtgcccagcctagaaatttcttgaagacaggaattaaatttcataactacttctctaccccaaaaagaacagcagggttactggtgagatataaatttttcctattgctattggatgataataagaacgatgatgattcaacccaacatgaaagaaggttggttnggatttccattttaccacagcacttnaaggctggattaaaaaagggctgcttttnaaggtgggnacccttttaaaggggggntttncaatcnaa

SEQ ID NO: 6508 - DNA, 563 bp, Homo sapiens
  misc_feature (448)..(448): "n" may be a, t, c, g, other or unknown
  misc_feature (472)..(472): "n" may be a, t, c, g, other or unknown
  misc_feature (534)..(534): "n" may be a, t, c, g, other or unknown
acagcatagagtaatttattgcacacaaaaaaagaaaagactactttgaaaattaagtgcagaatagacggtacattctgagaaagagattccagggcaggctgctcataagagtgagacaccattaattgttactggagaaaccctccttctgggggttttgcacgattattcataagaaggtggaaagaagtgttagtgtaagcatgttttgagtggtcttctgggtgcacatgtgcactaactgtacatatttgtgcatacattgcatgtctcgttagcatcttaagtctccacctaggaatgtgtttttactattaaaatgagcaaaagttcagtttgaggacagataaaatcaaaatgcacatgttctctagaagtaaaagtccctactgaagatagcgggtttcaaacgaccccaagtgctccacatcttaaatgtcggctncacaaagctggacactatctgctnctgagggatccggtcccatttggggttctgagacctgcaagtcaggagtgacttgagatganaccgtgattcaagggtaaatgcctaatag

SEQ ID NO: 6509 - DNA, 553 bp, Homo sapiens
  misc_feature (24)..(24): "n" may be a, t, c, g, other or unknown
  misc_feature (75)..(75): "n" may be a, t, c, g, other or unknown
  misc_feature (404)..(404): "n" may be a, t, c, g, other or unknown
  misc_feature (459)..(459): "n" may be a, t, c, g, other or unknown
  misc_feature (513)..(513): "n" may be a, t, c, g, other or unknown
  misc_feature (540)..(540): "n" may be a, t, c, g, other or unknown
ccccatttaaaaatatcttacagnggcataactttccctgtacaaattgggtttaagaaacaaaagggacaattngctaatcaatgatgagcctttaatccaaccattatatatcccctttccatccttagatcccttgaagagaccatttagttaagactaccaacaggtgacaccctgacctccttaccaaccttgccttttagaggtgaccagagacctgtgcttttccaaagtactgttatacgtgtaattagtataatatcaatgtggggaaactctacctttggattttgaggactctgcttttcttgaaaccctctgggttagagactgtttattcatatgcacctcaggaacttgaggccaagatgaagttcactgtttcctagtcctttgcttgntctcctggccattatgtttccaccttcattcaaaagccttctctttggaagctgnttataacccagcaacaccatcaactcactgggctactggcctcaatcccatttncaagcactttcccttttcatgcaaatnatccaaaaccaac

SEQ ID NO: 6510 - DNA, 496 bp, Homo sapiens
  misc_feature (377)..(377): "n" may be a, t, c, g, other or unknown
  misc_feature (431)..(431): "n" may be a, t, c, g, other or unknown
  misc_feature (436)..(436): "n" may be a, t, c, g, other or unknown
  misc_feature (461)..(461): "n" may be a, t, c, g, other or unknown
  misc_feature (467)..(467): "n" may be a, t, c, g, other or unknown
  misc_feature (473)..(473): "n" may be a, t, c, g, other or unknown
  misc_feature (487)..(487): "n" may be a, t, c, g, other or unknown
  misc_feature (495)..(495): "n" may be a, t, c, g, other or unknown
gcaattttacagtaagtcataccattccaaactaaaaagcttttgtgaaaaatcagtacacgaatacaccggagtgtaatgtaactaagagaccaccagaccaagaaagcaaggcatcctcccaggagaatgagggtgccctggctggtctgccctcactccaacccgcagacctgcggagcatccagggggccgatactcaggtgggctacccttggccccctgcccagggctccctcaggcaggctgcggccagcccctgcggcaggaccacatcctgtcccattcccctctccagcactacccactatgattaagctctcaaaccgagtacaccatggtgtgtccacgggtgagtctacaggagggcagatganggcagggctgtctggctaaccaagtgtcacttagggaacacctgtcggatggangcgtnaggtgtcagatgctgagcccatcgntggtcnaactgngcaaggtggggaanggtctggnt

SEQ ID NO: 6511 - DNA, 542 bp, Homo sapiens
  misc_feature (356)..(356): "n" may be a, t, c, g, other or unknown
  misc_feature (367)..(367): "n" may be a, t, c, g, other or unknown
  misc_feature (415)..(415): "n" may be a, t, c, g, other or unknown
  misc_feature (465)..(465): "n" may be a, t, c, g, other or unknown
  misc_feature (489)..(489): "n" may be a, t, c, g, other or unknown
ccttatcactttggttaaatgaatgacttattttacaatgacctatgatcctatttcatggtatcaagtcttttaaacctttgatattttacaaactttccaaaatcaatttataaattgtcttttcctgacctaattaatcctttaagatattaggtcccctaaagtccaaaaatgacataatttggcttatttggtataaaaattagacagggagcattgtcaaatatgaaatgatgtttggttttctttgggctatatttgtataaatgttattggtatgtgttccaaaatgatgggaaactcctgtaattctgatttaacttagtgaacgttatcagtaattgtaattgtgntaaattattgngtgccacagaggtacacatttgtcaattgggtcttggattatggctgncctaaaattttggcatccatggacaatggtggcttggttgggccttttanggggtctatatcactatgggactnaacaggggtcttaaagccagttctgaaccttgcaatgggccttgaataagggg

SEQ ID NO: 6512 - DNA, 528 bp, Homo sapiens
  misc_feature (479)..(480): "n" may be a, t, c, g, other or unknown
  misc_feature (491)..(491): "n" may be a, t, c, g, other or unknown
  misc_feature (497)..(497): "n" may be a, t, c, g, other or unknown
  misc_feature (500)..(500): "n" may be a, t, c, g, other or unknown
  misc_feature (512)..(512): "n" may be a, t, c, g, other or unknown
  misc_feature (527)..(527): "n" may be a, t, c, g, other or unknown
gagatggagtcttgctctgtcgcctaggctagagtgcagtagcgcaatctcggctcactgcaaactctgcctcctgggttcaagtgattctcctgcctcagaatctggagtagctgggattacaggcatgtaccaccatgcctggctaattttgtgtgtgtgtgtgtgtgtgtgtgtgtgtgtgtgtgtgtgtgcgcgcgcgcgcacgcgcgtttgtgttttagtagagacaaggtttcgccatgttagccaggctggtctggaactccttacctcaggtgatctgccccccttcggcctcccaaagtgctaaaattacaggggtgagccactgtgcccagccggattatcatttcaaatgctcatttccagatggaactatgttaatttggcatgtcaacaaacaagaccataagtagatccatcatgttggaggattttaatgacatttaggatattcttgccacaataacatgcanncagggcatttnctacanggntctattatggcnatgaataaactctgna

SEQ ID NO: 6513 - DNA, 553 bp, Homo sapiens
  misc_feature (467)..(467): "n" may be a, t, c, g, other or unknown
  misc_feature (489)..(489): "n" may be a, t, c, g, other or unknown
  misc_feature (508)..(508): "n" may be a, t, c, g, other or unknown
  misc_feature (516)..(516): "n" may be a, t, c, g, other or unknown
  misc_feature (538)..(539): "n" may be a, t, c, g, other or unknown
  misc_feature (553)..(553): "n" may be a, t, c, g, other or unknown
ccaattaaatcttttctttttttttatgaaaaaagatcacacagaatttgccaacaaacaaaattccaaaagaaacataaaaaaaaaaaaccaataattcccccaaaaaacaaacccaaagtctggcttttccttccctcaagattgtctggttgaggccttggtttcccttgaaggcttggggcctggttaagtgctttctggggcccaagcagggaccctgggcttgggccggctcctgcctctccctcttctctccctaacaaacacttctctatcctggggggtgagtacagtacacttggcggggtgggcggggggtgtgctggggactgggaggccggtgaagccggtgctagacactataatctaacaggaaataaaaaataatattctgcacgtcagaatgttttttttttataattcatagctatttttcacagttttaaaaagttatatatatattnaaatatattaaccttatatatntaattaaaaggtgactccnttaaaggntatgatcagggccgggccagtnnttggacaataaacn

SEQ ID NO: 6514 - DNA, 500 bp, Homo sapiens
  misc_feature (366)..(366): "n" may be a, t, c, g, other or unknown
  misc_feature (385)..(385): "n" may be a, t, c, g, other or unknown
  misc_feature (388)..(388): "n" may be a, t, c, g, other or unknown
  misc_feature (421)..(421): "n" may be a, t, c, g, other or unknown
  misc_feature (458)..(458): "n" may be a, t, c, g, other or unknown
  misc_feature (460)..(460): "n" may be a, t, c, g, other or unknown
  misc_feature (469)..(469): "n" may be a, t, c, g, other or unknown
  misc_feature (475)..(475): "n" may be a, t, c, g, other or unknown
  misc_feature (485)..(485): "n" may be a, t, c, g, other or unknown
  misc_feature (491)..(491): "n" may be a, t, c, g, other or unknown
gttcagcttttactggaaactgctgtctaggaccacctgccctaaccaggaataaaggcaagacagcctggagaccagtttgtttcttcagctgcaaacagctgcctgggcaggcaggtgacacaaggcctctgtccccagggatgggacctgcagggtctgttcacccagggcacccacagtcctgaagtgcaggcccagggtctgtccagctgggagagggcagaggtggcggctgggtgagttgccggcctcagctgggggcctgggggaggcccttcttcagcagagatgtgaggaagctccccagctcctcgtcctggtaggtccaggagaccagcagcaccttggtgcctgggtcctcanaaggggcggcggcctggangangacggacttcacagtcacagaaccgtctgggangtgcttgcacacaatgggcctttaggacgctcttgangnggcttgtanaacccncaatggccgnttctgnttccttgcg

SEQ ID NO: 6515 - DNA, 551 bp, Homo sapiens
  misc_feature (401)..(401): "n" may be a, t, c, g, other or unknown
  misc_feature (524)..(524): "n" may be a, t, c, g, other or unknown
  misc_feature (530)..(530): "n" may be a, t, c, g, other or unknown
ccttgtctgcagtcatgagcctattgaaaaaggcctacagaagtaaatctttcaaggaggtaatagggagatgtatttttttttaaagaagtgcagttgatatctaatttacacagtgaaactaatgatagaaaataactaatgaaaaaaaatcagagactggtttccaattgattgacacctagatctgtcagcctctcttaaagaaaggggaaggagaaaaaaaatctcatcatggaaggcagacaagagtccacctgacagaggtggaatctgatggaatctgaccccatttcatgataaacgagaggaaacataaatgccatctcaaatactaaagcgatgtagtgtagcatgagtgactcaatgcaaattcacagaggaaaagaagttcggcttangaagtaggacaataaatacaaatatttcatcttatttaatggtgcatgacttcagtgaaactccctttgcaatgcaataaattttaaacaccaacctttattcttaacggttttagccaccgnttttgngagagaaaactccttccaaca

SEQ ID NO: 6516 - DNA, 548 bp, Homo sapiens
  misc_feature (466)..(466): "n" may be a, t, c, g, other or unknown
  misc_feature (479)..(479): "n" may be a, t, c, g, other or unknown
  misc_feature (483)..(483): "n" may be a, t, c, g, other or unknown
  misc_feature (490)..(490): "n" may be a, t, c, g, other or unknown
  misc_feature (530)..(530): "n" may be a, t, c, g, other or unknown
  misc_feature (533)..(533): "n" may be a, t, c, g, other or unknown
  misc_feature (541)..(541): "n" may be a, t, c, g, other or unknown
ggagggtgtctcgctcggttgcccaggctggagtgcagtggcgcaatttcggctcactgcaagctctgcctcccgggttcacgccattatcctgcctcagcctcccgagtagctgcgtctacaggcgcccgccaccacgccaggctaattttttgtatttttagtagagacagggcttcatcatattagccaggatggtctcgatctcctgacattgtgatctgcccgcctcggcctcccaaagtgctgggatcacaggcgtgagccaccgcacccggccgggttggctttttaaataacagctctgtaatgaagtactcttggtcaagtagatacagcaggatccaaaaccagttaaatcactaactgtgaacatttgagcaaattatttaccctctctcggcctcagctttcacatctataaaatgagagcacaaattattcacagcttttgaaaagttactgntgagaatattacngtgnatttgtnaaccagctgcttatgccaaaagcctggcacaatagtaggnccntaaacaanggttggg

SEQ ID NO: 6517 - DNA, 550 bp, Homo sapiens
  misc_feature (442)..(442): "n" may be a, t, c, g, other or unknown
  misc_feature (460)..(460): "n" may be a, t, c, g, other or unknown
  misc_feature (512)..(512): "n" may be a, t, c, g, other or unknown
  misc_feature (524)..(524): "n" may be a, t, c, g, other or unknown
  misc_feature (531)..(532): "n" may be a, t, c, g, other or unknown
  misc_feature (543)..(543): "n" may be a, t, c, g, other or unknown
gttttttgagacagggtagagagtcttgctctgttgcccaggcttgtctcaaacttctggggtcatgtaatcctcccacctgagcctcctgagtcatgggattacaggcgtgagccaccacaccaggcttgaaggtaaatttaatgggggagtgggtacctccatgccattcaccttaaaaccagtggaagtgacttctcaatcccttgtttggaatcatccatgctagcctgtgcctcttctggtagggatatttgagaatttcaaacataaaaggttgtcctagactttcttcacccccaaaaaagtacccaacaaggttagaaaaatacaagcaaagtcagtaaaataaatacaagatgtgtcccttgggattcaaccaacacacattgtttcctagccaaaggcagagggtgagccaccacctggatgcttcgtctgnttactcagaccctgctgnttctttcaccttgtggcttggatcccttcatggccaattacccaatttgggnacttaaggcaanttatgcnntggatcaaaanctttttt

SEQ ID NO: 6518 - DNA, 523 bp, Homo sapiens
  misc_feature (59)..(59): "n" may be a, t, c, g, other or unknown
  misc_feature (232)..(232): "n" may be a, t, c, g, other or unknown
  misc_feature (456)..(456): "n" may be a, t, c, g, other or unknown
  misc_feature (469)..(469): "n" may be a, t, c, g, other or unknown
  misc_feature (501)..(501): "n" may be a, t, c, g, other or unknown
gcattatttaagtaaaaagctttatttttttccctcagtgtctgaatcttctttattgnttaccaggattcatgattccttttgtaacttgttctcagtcatttattcagttgagtaattacactttgtcagacaaatatctaaagttttattatgtaacttgcagattttcaggacgagtgaaggaggaaaatggcagaagagttcaggaaagacaaaaatgcaagactgngtctaagtttatgcctctcttgagtttgatgatccaattttaatttaatcatttgagtatctcttagggattcttcctccacagtggaggaaagtgggctctactgaattcattggaacaccgcctttaaggagaaagaaactttgacaatagacgctttttcaacaactactggcaatggtttgaaaggtgtcatttggttcagctagataccaaggctgaanagtgccttctttncaatgatccatggttactggcgcttttaaacncattcctaaaacttagaaactt

SEQ ID NO: 6519 - DNA, 541 bp, Homo sapiens
  misc_feature (445)..(445): "n" may be a, t, c, g, other or unknown
  misc_feature (454)..(454): "n" may be a, t, c, g, other or unknown
  misc_feature (477)..(477): "n" may be a, t, c, g, other or unknown
  misc_feature (513)..(513): "n" may be a, t, c, g, other or unknown
  misc_feature (518)..(518): "n" may be a, t, c, g, other or unknown
  misc_feature (520)..(520): "n" may be a, t, c, g, other or unknown
  misc_feature (535)..(535): "n" may be a, t, c, g, other or unknown
ggtttttttgtttttttcccaacatcttgtatctttaataacatacacaatggttaccagccatattcataacaaaagttattcataaaatgtatctaaaaataacattttttttccttttcggtgtgaaaagcttgagaatgtcccagttgggaaggtgggttgagggggaggagggcgttgaagagggagaccctggcttccccgcagtctgaacccccaaatcccctccctccacctgggccccaacacaacccctcattaggaatagggaccagacagtctgtcggactctggggctgggacgaatctctgggttatgatatagtgttccacttaagtgaggtcatgacataatgggggaaggaaaaaggctgaaagaaaagggaggggcttagggaaaaacccaaaaaccaaacaatcccctttcccttattcctgactnccaagtctnaccaaccagacctgggaacgganaaaggtgtgtgttcctggggaaggggacctttaggnacagnanttctgacttactggntaccct

SEQ ID NO: 6520 - DNA, 548 bp, Homo sapiens
  misc_feature (401)..(401): "n" may be a, t, c, g, other or unknown
  misc_feature (416)..(416): "n" may be a, t, c, g, other or unknown
  misc_feature (433)..(433): "n" may be a, t, c, g, other or unknown
  misc_feature (443)..(443): "n" may be a, t, c, g, other or unknown
  misc_feature (448)..(448): "n" may be a, t, c, g, other or unknown
  misc_feature (530)..(530): "n" may be a, t, c, g, other or unknown
  misc_feature (548)..(548): "n" may be a, t, c, g, other or unknown
ggctgttaacattgttttatttcctttatacaaaaagtagaaatgacagaaaaaacactcttgacagaaacaataccactgacctgatctcatgaaggagctgagccaaatctgcccacattatggggaaagggaggttcaatcaacattagcaaatactcatgcaattgatgaaatataaaatggtatcagtggcttggtgaatgtcctgtgggtagggtgaatcaatctactcttaaaaaacatacattttcccaatcatgcttttaaacggcatcttttaaaaaaacaagttatatatacagatatcaccccaaaatgaatcttttacagtctactactataaatttaaggcatcctgatattctgttcttctgctggtgaggcattggtttcatggntctctttccaaagangatagtccagaaatttncaataatttncaaangggatcagtgagaggaaatttaaaaaggggattaccaggaagaagtcttttggctttgcttaacaatgggccttaagcctgnaggattcttcattttctn

SEQ ID NO: 6521 - DNA, 532 bp, Homo sapiens
  misc_feature (1)..(532): "n" may be a, t, c, g, other or unknown
nnnnnnnnnnnnnnnnnnnnnnnnnnnnnnnnnnnnnnnnnnnnnnnnnnnnnnnnnnnnnnnnnnnnnnnnnnnnnnnnnnnnnnnnnnnnnnnnnnnnnnnnnnnnnnnnnnnnnnnnnnnnnnnnnnnnnnnnnnnnnnnnnnnnnnnnnnnnnnnnnnnnnnnnnnnnnnnnnnnnnnnnnnnnnnnnnnnnnnnnnnnnnnnnnnnnnnnnnnnnnnnnnnnnnnnnnnnnnnnnnnnnnnnnnnnnnnnnnnnnnnnnnnnnnnnnnnnnnnnnnnnnnnnnnnnnnnnnnnnnnnnnnnnnnnnnnnnnnnnnnnnnnnnnnnnnnnnnnnnnnnnnnnnnnnnnnnnnnnnnnnnnnnnnnnnnnnnnnnnnnnnnnnnnnnnnnnnnnnnnnnnnnnnnnnnnnnnnnnnnnnnnnnnnnnnnnnnnnnnnnnnnnnnnnnnnnnnnnnnnnnnnnnnnnnnnnnnnnnnnnnnnnnnnnnnnnnnnnnnnnnnnnnnnnnnnnnnnnnnnnnnnnnnnnnnn

SEQ ID NO: 6522 - DNA, 540 bp, Homo sapiens
  misc_feature (484)..(484): "n" may be a, t, c, g, other or unknown
  misc_feature (491)..(491): "n" may be a, t, c, g, other or unknown
  misc_feature (501)..(501): "n" may be a, t, c, g, other or unknown
  misc_feature (504)..(504): "n" may be a, t, c, g, other or unknown
  misc_feature (507)..(507): "n" may be a, t, c, g, other or unknown
  misc_feature (512)..(512): "n" may be a, t, c, g, other or unknown
  misc_feature (521)..(521): "n" may be a, t, c, g, other or unknown
gactggggaagtccttctgcattaattacaataagtaatactcattgaaaactttccttatttacacacagttgaacagttattctaagaaaccattttcccaccctatttaatattgacagatttcttcagttagaaacaaaaactcaaaacacacgcaatcctaaagaactcatctatgtcccccttatctcccctcatcttatgtagtccctaaaacagggcttgctgccctttcttcttcttgccttttcagcagatgagtcaaggttgcagaggtggcagtcaaccatagagtcacagagtttgattttcttccatccatcaggtcgtagaagctgccactgagcctgacaagagttggtactcaaaaatgcagaatgaattagtttgaatgaggtgattaaggattaatgagtagtggttaaggaaacaaagaccattagtggatgggggaaatattgctggattactggtggaagcnggatctnttaaaaaacnttntgnaggcntttcctacntaccttttaaggggtcctc

SEQ ID NO: 6523 - DNA, 523 bp, Homo sapiens
  misc_feature (451)..(451): "n" may be a, t, c, g, other or unknown
  misc_feature (469)..(469): "n" may be a, t, c, g, other or unknown
  misc_feature (476)..(476): "n" may be a, t, c, g, other or unknown
  misc_feature (500)..(500): "n" may be a, t, c, g, other or unknown
  misc_feature (503)..(503): "n" may be a, t, c, g, other or unknown
  misc_feature (512)..(512): "n" may be a, t, c, g, other or unknown
  misc_feature (520)..(520): "n" may be a, t, c, g, other or unknown
gcatatataaataacatttattaacttaggctgtacaatatattgatttagtcaaataaaaaataccgtacacaaaaattgaagtaaaatctgtaagatgccattcagactgaattttatattctgaataagacaagggactgccattcacttaaagcaaaatggctccaattccgtttatctatctatctatctatctatctatctatccatctatctatctatctatctataagtctcgctctgtcacccaggctggagtatctatctatttatttatgagataagtctcgctctgtcacccaggctggagtgcggtggtgcaatctcggctcactgcaacctctgcctcccacgctcaagcgatgctcctgtcccagcctaccgaggagctgggatcacaggcatgcaccatcacacctggccaatttttggatttttaggagaaaanggggttcaccatggtggncaagctnggcttgagcttctgacctaggggntcnccccacttnggcttccnaag

SEQ ID NO: 6524 - DNA, 526 bp, Homo sapiens
  misc_feature (432)..(432): "n" may be a, t, c, g, other or unknown
  misc_feature (475)..(475): "n" may be a, t, c, g, other or unknown
  misc_feature (483)..(483): "n" may be a, t, c, g, other or unknown
  misc_feature (502)..(502): "n" may be a, t, c, g, other or unknown
  misc_feature (504)..(504): "n" may be a, t, c, g, other or unknown
  misc_feature (506)..(506): "n" may be a, t, c, g, other or unknown
  misc_feature (519)..(519): "n" may be a, t, c, g, other or unknown
aaggatttccaactaggttttattttagtttccaatattatgagcaatgatacaggagtaactcaagcaaatacatcaccttaaatacatcagagaaaactcactgtgtcagcacgtcttgcgctccagcaaatgaacataaaaacaacaatgtcagcagcattaaagtgcttttggccatacttctttcagaaagggtctcccgggtgacgtcaacttgctgacacagatgagcaaaggtcccagacagttcctgctggacttggtggctgcagttggagccagtgtagctgatgacaagctgcagcttctcgctggcatgctccacaaactggcgcttgaaggccctctccttggccttggtggtccaggtcagacgctcatagacgtagaggaggccatagagcccaaaggagagggcaatgagcccgncagcccactggctttcacaccacttcttcaacaacaagaatgnccatgganggccctggatgtcaaggangncnaggccggtaaccnttgggaa

SEQ ID NO: 6525 - DNA, 541 bp, Homo sapiens
  misc_feature (367)..(367): "n" may be a, t, c, g, other or unknown
  misc_feature (504)..(504): "n" may be a, t, c, g, other or unknown
  misc_feature (541)..(541): "n" may be a, t, c, g, other or unknown
gagatggagtctcactctgtcgcccaggctagagtgcagtggcgcgatgtcggctcactgcaagcttggcctcccaggttcacaccattctcctgcctcagcctcccgtgtagctgggactacaggtgcccaccaccacgcccggctaattttttatattttttagtacagacagggtttcactgtgtcagccaggatggtctcaatttcctgaccttgtgatccgcccacctcggcctcccaaagtgctgagattacaggtgtgagccaccgcgccaggcctccttctgccattttacaaatatgaacctagcacagtaggtcctcaatgagagtctgttgaattactgaatgattataatgctgnttctagtttcctcacagttctgatccctttgtcctaaatacactccaatttggctttattctctcaaaatcaaatggagcaaaatctatagtaaggattatgatttattaaacccccaaatctaattccttttcagnctcttgaactttttcaaatccatggttgggaagggtn

SEQ ID NO: 6526 - DNA, 470 bp, Homo sapiens
  misc_feature (396)..(396): "n" may be a, t, c, g, other or unknown
  misc_feature (410)..(410): "n" may be a, t, c, g, other or unknown
  misc_feature (418)..(418): "n" may be a, t, c, g, other or unknown
  misc_feature (443)..(443): "n" may be a, t, c, g, other or unknown
  misc_feature (453)..(453): "n" may be a, t, c, g, other or unknown
  misc_feature (456)..(456): "n" may be a, t, c, g, other or unknown
  misc_feature (468)..(468): "n" may be a, t, c, g, other or unknown
cctcctataaatattttctttttatttgggtttagaagttgcaattttaggtactattaacagaaaatacataacaaaagcttcctaacaagtgaaaaaaataattataaatgctggaaaaattggcctcattaacatatttacagacttttacttaatacatacgcctttggaaattaattatctgacatttatacaagcatcaaaatttccaaatcactgagtagtgagcacttcagttctttattgtctatacccaaatttgaaagtcatttagtttctgaaagtagaaatgacaagtaacagaaatggtcaatctgagatactattgacatattgttctgttccttcgcctaaaggtgcttctgttgagtaagtgtccttatgctttctttnctctttgctctgancttcctgnagcttcagaattatgtttcggattncttctctttnggncccattcttggngg

SEQ ID NO: 6527 - DNA, 564 bp, Homo sapiens
  misc_feature (374)..(374): "n" may be a, t, c, g, other or unknown
  misc_feature (449)..(449): "n" may be a, t, c, g, other or unknown
  misc_feature (458)..(458): "n" may be a, t, c, g, other or unknown
  misc_feature (477)..(477): "n" may be a, t, c, g, other or unknown
  misc_feature (507)..(507): "n" may be a, t, c, g, other or unknown
  misc_feature (518)..(518): "n" may be a, t, c, g, other or unknown
  misc_feature (528)..(528): "n" may be a, t, c, g, other or unknown
agagtgtcaaacatattttattaaatatttggaagctattttattgaaattagagcatcttaaactcaaatggcttcaaatactagctttctgaggaaaactaacaagttagcattaaaatatttctaagaaagagaaatttctattttcatttggcctaatatcttaacagcaggcagttaaagatcattacaaatagattttttctctccagaagcagggtagtattggacatcccctggttactttttctttcctttctttttttttctgtgtgtcaggagctggggtcatcttttctgtctccagcttcatggctgcttcctgagcagccagagtttccagctttaggcgctcagcttccagcaatttgnttctgtactcttcccggatgtcgaaaattttctgtcgggcttcatctaaggagtcctgcatttccttatcatatncaggacttnatcctttaacttcaaccgntcttcttgggcaatggttccgaatgcttanggactctgggncctatgctgnccgaaacggatgaatttcttccgccttttgcattgg

SEQ ID NO: 6528 - DNA, 558 bp, Homo sapiens
  misc_feature (444)..(444): "n" may be a, t, c, g, other or unknown
  misc_feature (467)..(467): "n" may be a, t, c, g, other or unknown
  misc_feature (470)..(470): "n" may be a, t, c, g, other or unknown
  misc_feature (498)..(498): "n" may be a, t, c, g, other or unknown
  misc_feature (532)..(532): "n" may be a, t, c, g, other or unknown
  misc_feature (547)..(547): "n" may be a, t, c, g, other or unknown
  misc_feature (549)..(549): "n" may be a, t, c, g, other or unknown
  misc_feature (557)..(557): "n" may be a, t, c, g, other or unknown
ggtagaaatggggtttcaccatgttacccaggctggtctcaaactcttggactcaggcaatctgtcagcctcctaaaggagtgctgggattacaggcatgagccaccgtgcccaccccccaaattctactaatatatgtgcataattaaatagttaccagccatcattttctgatactttggcaattggttgaaagagtttatctaaagacctggaatccatagaaggcagtctctgtgttaaggggttgttcttattatgcagatgaagcctccaggtagcaggcttcagagagaattgattgtaaatgtttcttatcagacttaaaaaggtgcctagattagggaaaagacctggaaagggattccctgtagcatgtagactttccccacaagagacaactttgtagggacatttcaaaatatgataaccaatatattttanggtaaaatattttattcttttanggnctgctatctggcatgtaatgctacactngaagtcaggctggaaattgggggcctaatgggtnccaaaaaggcttaanantttggtgna

SEQ ID NO: 6529 - DNA, 552 bp, Homo sapiens
  misc_feature (421)..(421): "n" may be a, t, c, g, other or unknown
  misc_feature (497)..(497): "n" may be a, t, c, g, other or unknown
  misc_feature (501)..(501): "n" may be a, t, c, g, other or unknown
  misc_feature (545)..(545): "n" may be a, t, c, g, other or unknown
  misc_feature (548)..(548): "n" may be a, t, c, g, other or unknown
  misc_feature (551)..(552): "n" may be a, t, c, g, other or unknown
gagatggagtctcgctctgtcacccaggctggagtgcaatggctcgatctcggctcactgcaacctccacctccccagttcaagcaattcccctgcctcagcctcccgagtagctgggattataggcatgcaccaccacgcctggctaatttttgtatgtttagtagagatggggttctaccatgttggccaggctggtctcaaactcctgacctcaggtgatccacctgccttggcgtcccaaagtgctgggattacaggagtgagccaccgcgcccagccaattatattaatttttaaaaaattcactgtttaaaaaattatgaaagtaacaagatgagctctattaattttcaggtccatccattctttttctattcaaccaatccctccactccactactctctgattcactgctgntcttgaagactctttaaaggtaatttctacctttccctttttggaataaggtctacttgatctaccttaaatgacngaantaactctggtagaaataaagctcttgctgagtaagaccttttanccnctnn

SEQ ID NO: 6530 - DNA, 564 bp, Homo sapiens
  misc_feature (460)..(460): "n" may be a, t, c, g, other or unknown
  misc_feature (532)..(532): "n" may be a, t, c, g, other or unknown
  misc_feature (537)..(537): "n" may be a, t, c, g, other or unknown
  misc_feature (554)..(554): "n" may be a, t, c, g, other or unknown
aaattagttattgtcattcttaaaaaatcaggaaattttagatgtaagtgtggaatcgccagcaacaatgggcccacatttcaggtacagcagaactgacggcctctgttagagagggcatgcctgctcctgttccctcagaatcaatccttacccatcacattgtcttacattagggcccacttgactcatttaaataggtagctgcctggttcttgagtctgaaatccctgtcttaaaggatgatgaaaacaatggtttacgtctattctactttcttattaggcctcaccgatgtgcagtataaaacacctctctaatcttttcccatgtaatgtatcaccatttcaaagtgagatctctgcaggcttccatcagcttatgctatcacaccctatttaaaattaatacagcaatagctcaagagccaggctgaagaataagactggtggctttcaanggatgttaggaaaagaacccttccctattatgaaatactaatggcattatggttcctcttcaaaggaccaantttcngaaatgaaagggtggtnttttaacatt

SEQ ID NO: 6531 - DNA, 563 bp, Homo sapiens
  misc_feature (418)..(418): "n" may be a, t, c, g, other or unknown
  misc_feature (510)..(510): "n" may be a, t, c, g, other or unknown
  misc_feature (519)..(519): "n" may be a, t, c, g, other or unknown
  misc_feature (532)..(532): "n" may be a, t, c, g, other or unknown
  misc_feature (534)..(534): "n" may be a, t, c, g, other or unknown
atttttaaaactacagttcttttattcatcctaacacctagcagacagccctccacatagtaagcacttaagtatttggtgactggagatatgaaaaggcctacagtaaaagagaaaaatcatgcaatcactagataaaaaactacctagatttgtgtatctgactccaaaattgggctggaattgttagtagacaaattttcttctggcaaacaaacaaaaatgcaacaaaacttcaagataaacaatctatgtagtaaggcagtgtcaaacacatccgttttacccaaacgacagaacgaataccaataagatgacagacatcaaaatcaaactttgcagcaataaacaaattttcatatctgactgtaaattaaaatcttgtgtgcttagaaacatgttcatttagacagtattnaaaagtaggatgttagtctcaaaatccaagaagttaaattattaattcaaattcaatcttataatttaggaattttactggatagataaganggcccaggnacagtccaagaangnaagtggaatgctttaaggggatcaggaag

SEQ ID NO: 6532 - DNA, 553 bp, Homo sapiens
  misc_feature (462)..(462): "n" may be a, t, c, g, other or unknown
  misc_feature (467)..(467): "n" may be a, t, c, g, other or unknown
  misc_feature (469)..(469): "n" may be a, t, c, g, other or unknown
  misc_feature (484)..(484): "n" may be a, t, c, g, other or unknown
  misc_feature (536)..(536): "n" may be a, t, c, g, other or unknown
  misc_feature (553)..(553): "n" may be a, t, c, g, other or unknown
acaaaagagcaagagaagagagacaaagccctgatattgaaaaaaacactgcttagggcatatttgattattcgcaattgttattgtaatactatgctaattttaccttattaaatattgaagaaggccatcaccattgggaagaagttaaaatatattatataaaattaaactaatttatctttatgcaataaaatgttagaggataccagatgctatttttataataaacatctattttctaaaaaggtcattatgtcatgcatacacaaacaaacagagaagcaaaagagaaatgcatccctgggtaagttgagatccttctagaaaacattttgcctccatgttgtgttaaactagggacaccattgaaaagactaagtcaaatttccaaagaaaaatgtcacatgtctatcctgttgaggcacataggctaggtggaagtgtaaggtaatgataaangcatnangcaaaattgtatcanatctggctttgcacctggaatttcttcatttttttctaatttaatgggacanttaaaatatggggctcn

SEQ ID NO: 6533 - DNA, 549 bp, Homo sapiens
  misc_feature (358)..(358): "n" may be a, t, c, g, other or unknown
  misc_feature (430)..(430): "n" may be a, t, c, g, other or unknown
  misc_feature (451)..(451): "n" may be a, t, c, g, other or unknown
  misc_feature (458)..(458): "n" may be a, t, c, g, other or unknown
  misc_feature (473)..(473): "n" may be a, t, c, g, other or unknown
  misc_feature (507)..(507): "n" may be a, t, c, g, other or unknown
  misc_feature (525)..(525): "n" may be a, t, c, g, other or unknown
agatggagtttcactcttgtcacccagtctggagtgcaatggtgcaatcttggctcactgcaacgtccgcctcctgggttcgagcgattctcctgtctcggcctcctaagtagctgggattacaggtacatcctaccacacctggctaatttttgtatttttagtagagacgaggtttcaccatgttgtccagcctggtctcaaactcctgaccgcaggttatctgcccaccttggcctcccaaagtaagtgctgggattacaggcgtgagccaccgtgcccagctggtattctcaaattgagacagcttcctttgaatttttctactttatgaaaagttgctatgtataaatactgnaattctagcctctgctttactgaagccttttcccccagtaaactgtggagtacttacaggttcacaaagaanaactgaacctcaggtaagctnttaaaangaaaccaacaactgngggggtacttctgtgggaaaattaaaaaaagcgntttccactttcaattccnttataaaaggaaaaatcaaaggtt

SEQ ID NO: 6534 - DNA, 551 bp, Homo sapiens
  misc_feature (442)..(442): "n" may be a, t, c, g, other or unknown
  misc_feature (455)..(455): "n" may be a, t, c, g, other or unknown
  misc_feature (477)..(477): "n" may be a, t, c, g, other or unknown
  misc_feature (492)..(492): "n" may be a, t, c, g, other or unknown
  misc_feature (508)..(508): "n" may be a, t, c, g, other or unknown
  misc_feature (512)..(512): "n" may be a, t, c, g, other or unknown
  misc_feature (528)..(528): "n" may be a, t, c, g, other or unknown
  misc_feature (549)..(549): "n" may be a, t, c, g, other or unknown
acaatgccgagcttttattttgttctttatgcaaagggttcagtaaaactgccaagacaacaacaaaaacaattttaaaaactgacatcttttgaactgctacttgaagttctgagatttattgtaacatatacctcatctcttctcaaaaagacaggaagtctacttcgtctagtgttaaatttattgatctcagccctttaggttgaacttaaagaattatgtttagtctaactaaattcatgaagctctgaaataagagtttgacgttttgccatcatttcttactctgtaacctcaacgacatttgtcctgaggctgtggactacaactcaagttaattacaagtaggtcatacatgaacattcaccattcacaatagtaatgtgtaaaaattcctatttatatccaacaacatcaaagcaacctttgatggttaagnccaagtccatccnttatagtccattttaaccttantaggaaggatccatnggaaaagacccctttngganaattttggccatttcnttaaggctagcatatagcctnta

SEQ ID NO: 6535 - DNA, 557 bp, Homo sapiens
  misc_feature (398)..(398): "n" may be a, t, c, g, other or unknown
  misc_feature (422)..(422): "n" may be a, t, c, g, other or unknown
  misc_feature (496)..(496): "n" may be a, t, c, g, other or unknown
  misc_feature (502)..(502): "n" may be a, t, c, g, other or unknown
  misc_feature (508)..(508): "n" may be a, t, c, g, other or unknown
  misc_feature (517)..(517): "n" may be a, t, c, g, other or unknown
  misc_feature (542)..(542): "n" may be a, t, c, g, other or unknown
cctccttagcagattacctgatgagcacaagggcgatgctaggaaaattcaaaaattccccaaactttgtcatttggaggagagagaaagatgcggatgatgccccacatccaaaagtttcttcaaagtctgtggcaaaataatggtagcaccttcagaatcttaaatagggatttttttttttccttaaaaaaatcacatacactgtgagagacaattgtgagcaccagcgatttcacagtgggaggtagcaaacgtgggcacccccagcccgaggatctcgccgcttcccacgcctggctgctccttcccatcctctcacctctttcccgggtgaaaaaaaaatagtaacgcaccttctttttgtttgtttaaataatatatatatacacttctgnctttcctttctccttttttcatgnctcctttctaatatggccatcaatagcttcctacagggaccagctgacgagacgccccttccttaagtggctanaaaggngggctnttgggcagnaacttgggaagggaccgggtggccnaaaacttaaaggccc

SEQ ID NO: 6536 - DNA, 566 bp, Homo sapiens
  misc_feature (501)..(501): "n" may be a, t, c, g, other or unknown
  misc_feature (529)..(529): "n" may be a, t, c, g, other or unknown
  misc_feature (550)..(550): "n" may be a, t, c, g, other or unknown
aaaggtattaactttattaacctgtaacattcatcattttaaaggagtatataaaaactgtcaaaatgggtcagaaacaaagtttgcgatgctcataatcatcttcagcagtggcaacatttaactttttgagtcagtcgcaacagactggcaatataactaacacaatacataacgataagtgttgttcttgataaaaaaccaaattatttttctatttacaatttttagaaaaggtttaatgtaaaaatatttttcttctttatatatttccctgccatgataatgttaaaacatatcaagatcctcctcaaactttaagggtgaaaagcataccattccattttagttgaaatattccttcacatagccaacacattttttcaaggcactctagctactacaggaaaaatgtcctcttgcctactggattattttcccttcaacttatctaaatttaacactggtattactgggttttttaaattaagttttcatggnaccagtcttcaagtaattttctttatgnggagccctccttaagttcacntgctgagccggcaagc

SEQ ID NO: 6537 - DNA, 539 bp, Homo sapiens
  misc_feature (454)..(454): "n" may be a, t, c, g, other or unknown
  misc_feature (473)..(473): "n" may be a, t, c, g, other or unknown
  misc_feature (476)..(476): "n" may be a, t, c, g, other or unknown
  misc_feature (483)..(483): "n" may be a, t, c, g, other or unknown
  misc_feature (495)..(495): "n" may be a, t, c, g, other or unknown
  misc_feature (527)..(527): "n" may be a, t, c, g, other or unknown
  misc_feature (537)..(537): "n" may be a, t, c, g, other or unknown
agtgatgggctctcgctatgttgcccaagctggtcttgaactcctgggctcaagcaatccttccacatcagcctcccaaagtgttgaggttataggcatgagccactgcacctggccaagaaagcagctgcctttcaattgtccaccaggtgacatgaattcccaagtttgtactaaagcctcctcttaagaaggagctatggcattaccatgtaattaactcctctttaatggaatcggccatcaagagcaaggatcatgaagactagcatcagctacttagtggccagcagcctcagctcctatcagactgctgagggccactacatacgtgtcccttaagaagcctattacctcacagagcagaaatacacagacaagtagaataaaagcagaatatcctgctaagtggctaatgaacattggccacaggtggacaccatctcaaagactnttccaagagagcaagcttncanatgtggnggccaaggaccnttagagaggagaagcccatgactgggccttgnaacttgccangg

SEQ ID NO: 6538 - DNA, 579 bp, Homo sapiens
  misc_feature (446)..(446): "n" may be a, t, c, g, other or unknown
  misc_feature (459)..(459): "n" may be a, t, c, g, other or unknown
  misc_feature (512)..(512): "n" may be a, t, c, g, other or unknown
  misc_feature (525)..(525): "n" may be a, t, c, g, other or unknown
  misc_feature (551)..(551): "n" may be a, t, c, g, other or unknown
  misc_feature (560)..(560): "n" may be a, t, c, g, other or unknown
acaaatatactggagaatcatgcaatgctgccagcattggatgcaatccggggccacaagtctgcacactcctttgctactggtcctgtaatggcagaacctttcatctcgcctttattgttcactatgactcctgcattatcttcaaaataaagaaacacgccatcttttctacggtatgactttcgttgtcgaatgggaaaactggctagccatatgcagaaaactgaaactggaccccttccttatacagtatacaaaaattaactcaagatggattaaagacttaaacgtaaaacctaaaaccataaaaaccctagaagaaaacctaggcaataccatttaggacataggcatgggcaaagactgcatgagtaaaagcaatgcgaacaaaagccaaaattgacaaatagggcctaattaaactaaagagcttttgccagcanaagaaacttttcntcagaggggaacaggccacctacaggaatggggagaaaatttttgcatttatncattttgacaaangggttaatatcccagaattctggcangggactttnaccaaatttaccaggaaaa

SEQ ID NO: 6539 - DNA, 561 bp, Homo sapiens
  misc_feature (415)..(415): "n" may be a, t, c, g, other or unknown
  misc_feature (448)..(448): "n" may be a, t, c, g, other or unknown
  misc_feature (484)..(484): "n" may be a, t, c, g, other or unknown
  misc_feature (533)..(533): "n" may be a, t, c, g, other or unknown
ggagacagagtttcactcttgttgcccaagctggagcgcaatggtacgatctcagctcactgcaacctctgccttcctggttcaggcaattgtcctgcctcagcctctcaagtagctgggattatacaggcatacgccaccacgcccagctaattttgcatttttactagagacggggtttcaccatgttggccaggctggaactcctgacctcaggtgatccacctgcctcagcctcctaaagtgctgggattaccggcatgagccaccacgcctggccgaccctcatttttaataaacttagatgcagttcaactcattgaagtgaaaagcttgattgtatattttaactatgtgtcaattttataacagaaggaagaagcaaaaataaaaatccagccctactcttcatgcncagatgaccggaaaggagatcattggatactanggataacattgggtttctttcttgggaagtattttnaaacctaatgaatgctgagaattttataatagaaagctggaataagcanccaaaacttaatcttaggcttatgctat

SEQ ID NO: 6540 - DNA, 515 bp, Homo sapiens
  misc_feature (422)..(422): "n" may be a, t, c, g, other or unknown
  misc_feature (449)..(450): "n" may be a, t, c, g, other or unknown
  misc_feature (476)..(476): "n" may be a, t, c, g, other or unknown
  misc_feature (503)..(503): "n" may be a, t, c, g, other or unknown
  misc_feature (510)..(510): "n" may be a, t, c, g, other or unknown
  misc_feature (515)..(515): "n" may be a, t, c, g, other or unknown
aagcttgtctctgaaaactccaatatctggaggtccctacagatgtttaaatagaagctcctgctggtattcactcatgtctctttctgtggctactttttattgtgtgttctacagtgtacctgcaaaactgtttatagatttattttgaggcctagtttgttagttttctacactgtgtaacaatattaccacaaatctggtgtgttaagaacaagacacatttattatctcacaggttctgtgggtcaggagtccaagcacagattagctggcttctttctgtttcctggtctcaaaagactgcaatcaaggtgttagccagagctaaggtctcaactagggctccactgaaccaggattcacttccaaaataacaaggttgttggcaatcttcagttcctggcacactactagaacanggatctggttctgctgactactggctnnaaggcccccttaagttcttgcctganggccttttccaaagctgggttaccatnatgggancttgn

SEQ ID NO: 6541 - DNA, 552 bp, Homo sapiens
  misc_feature (418)..(418): "n" may be a, t, c, g, other or unknown
  misc_feature (430)..(430): "n" may be a, t, c, g, other or unknown
  misc_feature (465)..(465): "n" may be a, t, c, g, other or unknown
  misc_feature (476)..(476): "n" may be a, t, c, g, other or unknown
  misc_feature (518)..(518): "n" may be a, t, c, g, other or unknown
aatatattttttctccccattttcacattttcctttacattcttgagcatatgtataacatgttttaacatgtttgtctgctaattaaattgtcctgtcatttcttctttttgttgtggatcatatttccttgcttctttgcatacctgatcattcttaacagctttattgatgtataactagcatataataaagtgaatatgtttaaactacatacataagtgttgacacatgtatatacacatgtaactgtcaatacacttttagaatatacccaacactcccaaaggtttcctgatgccctcttggtaagccctcttttgcccctccacactactctcatccccaatacacatgaaaaattctgactagatactggccattgtgaattttacattcttggtgctggatttactgnattatcttaaanggatcctggcttgtctaacacacaataaatatttnaatcaattganctttcatggttgctttcaattttgtagaagaagtccaaggcngactagcctcagactaattgggcccctctttggg

SEQ ID NO: 6542 - DNA, 570 bp, Homo sapiens
  misc_feature (447)..(447): "n" may be a, t, c, g, other or unknown
  misc_feature (473)..(473): "n" may be a, t, c, g, other or unknown
  misc_feature (484)..(484): "n" may be a, t, c, g, other or unknown
  misc_feature (498)..(498): "n" may be a, t, c, g, other or unknown
  misc_feature (547)..(547): "n" may be a, t, c, g, other or unknown
  misc_feature (570)..(570): "n" may be a, t, c, g, other or unknown
gtgagacggagtctggctttgttgctcaggctggagtacagtggcgtgatctcagctcactgcaacctccgcctcctgggttccagcgattctcctgcctcagcctcccgagtagctgggattacaggcccctgcctccatgcccagctagtttttgtatttttaatagagacaggatttcaccatgttggccaggctggtcttgaactcctgacctcaagtgatccgcccgcctcggcctctcaaagtgttgggattacaggcgtgagccactgtgcccggcccgggttccttttgaagaaaggtgattcaaatgctctgagagcagttatgtatacacagggcaatcatcagaccataatcattactgttcgaggccagaacagagacgactagctctctgtgtgcctttcccaagtctcaccgtgatggactggccttctctgngctggtttcctaatttcaaccataanccttgtaccanaaaaacaattttcnaaagcctatcctaaggtaatctgaactcaacactggttaacttcctaanggtaaaggggttgggtcttaaan

SEQ ID NO: 6543 - DNA, 551 bp, Homo sapiens
  misc_feature (411)..(411): "n" may be a, t, c, g, other or unknown
  misc_feature (457)..(457): "n" may be a, t, c, g, other or unknown
  misc_feature (530)..(530): "n" may be a, t, c, g, other or unknown
gtgagacggagtctcgctctgttgcccaggctggagtgcaatggtgcaatcttggctgaccataatttctgctcccaggttcaagagattctcctgcctcagcctcccaagtagctgggactacaggtgtgtgccaccatgcccagctaatttttgtattttcagtagagacagggtttcactatgttggccaggctggtctcaaactcctgacctcatgatccgcccgcctcggcctcccaaagtgctgggattacaggcgtgagctatcgttcccatcctaaccattttttattgatatataatttacatataataaaatccaacatgtttaaagtgtataattcagtggtttttagtatattcataaggttgtgcaaccatcaccattctctaattccagaacattgnattcaagccccaaaagaaaccctgtccaataaccattcacttctgnttttccttcccttagcccctggcaatcactaacctactttttaattctggatattcatataaatggaatcatncatatggcaccttttggggtt

SEQ ID NO: 6544 - DNA, 550 bp, Homo sapiens
  misc_feature (446)..(446): "n" may be a, t, c, g, other or unknown
  misc_feature (500)..(500): "n" may be a, t, c, g, other or unknown
aaagaaaaagcctcattctgtcgcccaggctggagtgcagtggcgtgatctcggctcactgcagcctccgcctcccaggttcaagcgatcatcccacccgaacctcccaagaaactgagattaccggcatgcaccaccacacctgcctggctaatttttgtatttttagtagagatgggggtttgccatgttggccaggctggtctcaaactcctggcctcaagtgatccgcctgccttggccttccaaagtgttgggattacaggtgtgagccaccacacctggcctattcttgcaattctggaagatttagggggctggcaggagacaagactgagattgtttaggccatcctgttgctgacacaatcctggcacttaagcgggaatgcagtggcctaagtgtagggcaacatatctctcataccatttaccaaaacaaaacanaaaacacttctggggtgaatgtctgggcattcttaataagcatcttaataatcnggtttggctttttcctaaaaaaatgcttttcctcaaaaaaaaaaagtcgg

SEQ ID NO: 6545 - DNA, 551 bp, Homo sapiens
  misc_feature (490)..(490): "n" may be a, t, c, g, other or unknown
  misc_feature (543)..(543): "n" may be a, t, c, g, other or unknown
gagacagagacatagtctcactctgttgcccaggctggagtgcagtggcgtcatctctgctcactgtaagctccacctcctgggttcacgccattctcctgcgtcagcctcccgagtagctgggactacaggcgcctgccaccacgcctggctaattttttttgtatttttagtagagacggggtttacaccgtgttagccaggatggtcttgatctcctgacctcgtgatccgcctgcctcggcctcccaaagtgctgggattacaggcgtgagccactgcacccggctgctcccatcttttaatagtgcctcttacactggctttcacatctttccattcactgagctgggaatgtgaggatcattatctcaagaacacaaattccattcttcctgatgacaagtcacgctaagtttcttttgggatgctgaaaaactttactctggctaacatctaagccttctctcaaggagtgacttaaaatgcnggaaattttgggtcataaatccccagcagtaaaaaatggaaactaactccttntttgggta

SEQ ID NO: 6546 - DNA, 427 bp, Homo sapiens
  misc_feature (180)..(180): "n" may be a, t, c, g, other or unknown
  misc_feature (182)..(182): "n" may be a, t, c, g, other or unknown
  misc_feature (225)..(225): "n" may be a, t, c, g, other or unknown
  misc_feature (271)..(271): "n" may be a, t, c, g, other or unknown
  misc_feature (297)..(297): "n" may be a, t, c, g, other or unknown
  misc_feature (299)..(299): "n" may be a, t, c, g, other or unknown
  misc_feature (352)..(352): "n" may be a, t, c, g, other or unknown
  misc_feature (360)..(360): "n" may be a, t, c, g, other or unknown
  misc_feature (364)..(364): "n" may be a, t, c, g, other or unknown
  misc_feature (380)..(380): "n" may be a, t, c, g, other or unknown
  misc_feature (392)..(392): "n" may be a, t, c, g, other or unknown
  misc_feature (398)..(398): "n" may be a, t, c, g, other or unknown
  misc_feature (421)..(421): "n" may be a, t, c, g, other or unknown
cttttttgagacggagcctcgctctgtcgcccaggccagagtgcagtggcacaatcttggctgactgcagtctcaaccttcctggttcaagcaatcctgcctcagcccctcagctagctgtgactgaggcaagagcgcaccaccctgtccggctatttttttttttgtatttttttgtananatggggttttggggttttgccacgttggccaggctgctaatangtatggattttgggggcaggatgatggaaatgttctaaaattatanagtggtggttgttacacaacacagtnantatactagaaaccactaaattatatgctttatgagaagtcaattttatggttngtgaattntatnccaataaagccatttntaaaaaaaagantcggcngggacaattactaaaagtgaggngtcttg

SEQ ID NO: 6547 - DNA, 554 bp, Homo sapiens
ctttctttccttctttccttcctttctttcctttctttctttctctttctctctttctgtctgctacaagtaaactttatttgatgtaatgtaatacaacattttcaagtttcacaatgagcgtttgacataaataatcatttaaattaggaatataagtatgcacggtcacttgagcaaatttgcagttcaggggttggtacgagctttgtctgaaagcttttttctcctttaggaaaaagtagcccttcccttcacctggtaagaagcactatcaatgggagttagaagaagtccataatccaccttggaattccagctgatctgtgagaggacagctttctgtattctagaaaaataatattctctttcagttcattcatttttccccatggaagatattggcactctcttcatctactggctttctgtctccttagctgctgcttattaccatagaaccatttttaaaaatataatatctgcaagagacctcttctggtcccttacctccctaaaggccaataatttggggaaagggaaggtggtgggaa

SEQ ID NO: 6548 - DNA, 454 bp, Homo sapiens
  misc_feature (97)..(97): "n" may be a, t, c, g, other or unknown
  misc_feature (173)..(173): "n" may be a, t, c, g, other or unknown
  misc_feature (379)..(379): "n" may be a, t, c, g, other or unknown
  misc_feature (388)..(388): "n" may be a, t, c, g, other or unknown
  misc_feature (397)..(397): "n" may be a, t, c, g, other or unknown
  misc_feature (428)..(428): "n" may be a, t, c, g, other or unknown
  misc_feature (442)..(442): "n" may be a, t, c, g, other or unknown
  misc_feature (445)..(445): "n" may be a, t, c, g, other or unknown
  misc_feature (448)..(448): "n" may be a, t, c, g, other or unknown
cagagacaggatcttaccctattgcccaggctggagtagagaggcatgatcacagtagctcactgcagcttttgactcctgggttcgggcaatcctntcacctccgccacctgagtagctaggattacaggcacgcaccacgacacccagctaatttttttatcttcttgtanagacagggtctcgctacattacccaggctggtctggaactcctggcctcaagtgatcctcttgcctcagcctcctaaagcactgggataacaggagtgagccatcgtgcccagcccaatttcatgtaatttttattatggcttaaaactgaaagggtagccaggtgtggtggctcacgcctgcaatcccagcagtttgggaggccnaggtggcanatcacctgnggtcaggagttcaagaccagcctgaccaatntgagaaaccccatnttnctnaaaaaa
